United States Patent Application Publication US 2005/0153317 A1 - sequence listing, part 2

SEQ ID NO: 4560 - DNA, 600 bp, Chicken  19866894107603_5
gagaagtaaaaccacartgatggattcatcttttcttatagtacagtaacatgtcatttgagatggaactgttaatgctgtgatttccctggagatgaatgacttggctgcattcttttcatttgccacaaaagagactcctttactgaaggaaccaagacaatttgataaatgggctataaaaatgcttttaagtttaaatggcacatatttggatagcacttcttgtgcacaagaggctttgccaaatagcaaaagacagatggaagtgaatgttcttaaagttcagttactccatayaaaagaaaaagaatggatttttactaccttcttctttcataattttgtgatggtgatcattcctaaaggaataataataataaaaaaaaagaccttaaaaaaaccwccaatggaaaaacaaacaaaacacaaacccaacaacaacaacaaaacaaccaaacaggatgtgtcaactacttcattccacctctctaaaaatgaggaactggctcaagagagattcctagtgactaagacttatcttccctccttgttaacaacgttcagtttctgattctgtagtgaattttcacagggaaa

SEQ ID NO: 4561 - DNA, 600 bp, Chicken  19866894107603_6
atttccctggagatgaatgacttggctgcattcttttcatttgccacaaaagagactcctttactgaaggaaccaagacaatttgataaatgggctataaaaatgcttttaagtttaaatggcacatatttggatagcacttcttgtgcacaagaggctttgccaaatagcaaaagacagatggaagtgaatgttcttaaagttcagttactccatayaaaagaaaaagaatggatttttactaccttcttctttcataattttgtgatggtgatcattcctaaaggaataataataatyaaaaaaaagaccttaaaaaaaccwccaatggaaaaacaaacaaaacacaaacccaacaacaacaacaaaacaaccaaacaggatgtgtcaactacttcattccacctctctaaaaatgaggaactggctcaagagagattcctagtgactaagacttatcttccctccttgttaacaacgttcagtttctgattctgtagtgaattttcacagggaaataatttaaattctagccctttgcctgtatttttgattttctgatgtctttttccctggcttgagtatcataccagaaaatct

SEQ ID NO: 4562 - DNA, 600 bp, Chicken  19866894107603_7
gctgcattcttttcatttgccacaaaagagactcctttactgaaggaaccaagacaatttgataaatgggctataaaaatgcttttaagtttaaatggcacatatttggatagcacttcttgtgcacaagaggctttgccaaatagcaaaagacagatggaagtgaatgttcttaaagttcagttactccatayaaaagaaaaagaatggatttttactaccttcttctttcataattttgtgatggtgatcattcctaaaggaataataataataaaaaaaaagaccttaaaaaaaccwccaatggaaaaacaaacaaaacacaaacccaacaacaacaacaaaacaaccaaacaggatgtgtcaactacttcattccacctctctaaaaatgaggaactggctcaagagagattcctagtgactaagacttatcttccctccttgttaacaacgttcagtttctgattctgtagtgaattttcacagggaaataatttaaattctagccctttgcctgtatttttgattttctgatgtctttttccctggcttgagtatcataccagaaaatcttcagagcactaaccaacactgcac

SEQ ID NO: 4563 - DNA, 600 bp, Chicken  19866894107605_1
tggtgagaaaagaatactgaaatcatcaggcatgctcatgaagcaaggtgtcacatcgcgttgtgctaagtgtgagtgacagtactgaaatattgtttgcttaaatgccaaaaaacaatgcagagacatccaaatcaagattttctgcatgttttctaaggaatctttaagtgagctaaatcagctctaagctcagcttctgtgagcaacccaagggagttaaaattgagaaaacttccttgaatctggctgaatcatagaatcatagaattgctcaggttggaaaagacctcaaagatsaagtccaaccacagcctaaccatactgccctagctctaacaaccctctgctaaatcatgtccctgagcaccacatccaaacagtttttaaacacacccagggatggtgactcaaccacctccttggggagcctattccagtgtttaatcaccctttctgtaaagaagtgtttcctgatatccaacctaaacttagcctagcacaacttgaggccatttcccctcatcctgtcacctgtcaccagtgagaagagaccaaccccgctcttgctgtaagcacctttcagatactggaagagag

SEQ ID NO: 4564 - DNA, 600 bp, Chicken  19866894107608_1
taaatacaaacatatctgtggccaccagccataagtttatggaagtgttaatacaacaggtcaatgcttatagtaaatgagtgactttaaaaaatctcacttggggctattacctttagtaggtttcattttttgacatgacagccatctacaaggcagcttcactataccttgccttatatttgtctctcagtgtatttgtctctcagtgaaaagatttgagttttatagtctaaacaaattgaaaggtgcctttctcagaatggctgtgcttttaccagagatatagggtcacatttyccttctttcttttctggaaagttgctctgtggaagttaacaatcctgctcccactgataattaaagcataatttggtccaatttaaaatgcaattaggataatatacctctggtgaagatgagtttatctttaatcccaaatcctgcaaacactgtcactcatgtttaactctctgtacaccaggtgcatcggtgtacttcagcattttcaagtcgggggccactgcttcttttcaaaatgtagatttagaccaagaaattcaggatagcaagtggcactgagatatttcacacacattt

SEQ ID NO: 4565 - DNA, 600 bp, Chicken  19866894107608_2
gaatcttggtatcttgtgagccttactgtacacttggataaaatgtgcctgcttcttccttcgcctgacgtagagcaatcacttaatggtaattgtactctttatggctataatgatcctgctgagcatagcctgtttccaggtcactgatgccatgctttgcggaaaagaaagtttcaatttagatgcacatagaatctaagtgttggaaatatgtactgtgtagcaaaaaaaaaaatgttttcttagctggagcagaggctgactaagcagcactgataacacataagctagctagcwgggttgaaactgaattcccactgatttcactgagcccaggatttcagcaaacactgaatattaagcactttccagaactgytgcttagtaggcagtcacagtgccatttccttttgtgcttcctcctcctctgaatgcagaacccattaggtatctgccatataaaaggcatattttcctttggccaaataccatgttctggtacacttcatcagactaagactaaaaagccacaatattgctccaaacatttttttgcatttgaaatatcatatccaagtaaaacaccttatactgatt

SEQ ID NO: 4566 - DNA, 600 bp, Chicken  19866894107608_3
cttaatggtaattgtactctttatggctataatgatcctgctgagcatagcctgtttccaggtcactgatgccatgctttgcggaaaagaaagtttcaatttagatgcacatagaatctaagtgttggaaatatgtactgtgtagcaaaaaaaaaaatgttttcttagctggagcagaggctgactaagcagcactgataacacataagctagctagcwgggttgaaactgaattcccactgatttcactgagcccaggatttcagcaaacactgaatattaagcactttccagaactgytgcttagtaggcagtcacagtgccatttccttttgtgcttcctcctcctctgaatgcagaacccattaggtatctgccatataaaaggcatattttcctttggccaaataccatgttctggtacacttcatcagactaagactaaaaagccacaatattgctccaaacatttttttgcatttgaaatatcatatccaagtaaaacaccttatactgatttatagggtgactgcctacacrgtcctgctaatggattcccagggctctgcggcatcatcagaaatcaagcggtaacattgt

SEQ ID NO: 4567 - DNA, 600 bp, Chicken  19866894107608_4
tgatttcactgagcccaggatttcagcaaacactgaatattaagcactttccagaactgytgcttagtaggcagtcacagtgccatttccttttgtgcttcctcctcctctgaatgcagaacccattaggtatctgccatataaaaggcatattttcctttggccaaataccatgttctggtacacttcatcagactaagactaaaaagccacaatattgctccaaacatttttttgcatttgaaatatcatatccaagtaaaacaccttatactgatttatagggtgactgcctacacrgtcctgctaatggattcccagggctctgcggcatcatcagaaatcaagcggtaacattgtgaattgtaactgtttyttcctaacagtttacagaaggctaggtcagggaacaatgtattacagccttgttgagaaaactgccagagacgcctccacctatggcaktttcacatccttcaagcagctggttttggcagactgctgtgaatacaagtatttcggtgagcrtggtcttaggtgatcgtgatactgtagtatctgtgctctttgctcttactttctaaggatttaaatatttca

SEQ ID NO: 4568 - DNA, 600 bp, Chicken  19866894107608_5
acagtgccatttccttttgtgcttcctcctcctctgaatgcagaacccattaggtatctgccatataaaaggcatattttcctttggccaaataccatgttctggtacacttcatcagactaagactaaaaagccacaatattgctccaaacatttttttgcatttgaaatatcatatccaagtaaaacaccttatactgatttatagggtgactgcctacacrgtcctgctaatggattcccagggctctgcggcatcatcagaaatcaagcggtaacattgtgaattgtaactgtttyttcctaacagtttacagaaggctaggtcagggaacaatgtattacagccttgttgagaaaactgccagagacgcctccacctatggcaktttcacatccttcaagcagctggttttggcagactgctgtgaatacaagtatttcggtgagcrtggtcttaggtgatcgtgatactgtagtatctgtgctctttgctcttactttctaaggatttaaatatttcatttttgttcatttgtataatatatcctgggatgaaaaggtagttgtgaaaatggtactgaaaagctctctccctta

SEQ ID NO: 4569 - DNA, 600 bp, Chicken  19866894107608_6
aaataccatgttctggtacacttcatcagactaagactaaaaagccacaatattgctccaaacatttttttgcatttgaaatatcatatccaagtaaaacaccttatactgatttatagggtgactgcctacacrgtcctgctaatggattcccagggctctgcggcatcatcagaaatcaagcggtaacattgtgaattgtaactgtttyttcctaacagtttacagaaggctaggtcagggaacaatgtattacagccttgttgagaaaactgccagagacgcctccacctatggcaktttcacatccttcaagcagctggttttggcagactgctgtgaatacaagtatttcggtgagcrtggtcttaggtgatcgtgatactgtagtatctgtgctctttgctcttactttctaaggatttaaatatttcatttttgttcatttgtataatatatcctgggatgaaaaggtagttgtgaaaatggtactgaaaagctctctcccttatccccatcaaaatagaccaatcctgtcagcgcactcaaaccccgaatttgttatcatttaagtcatagcgaatcaatgggaaatatcag

SEQ ID NO: 4570 - DNA, 600 bp, Chicken  19866894107608_7
atttttttgcatttgaaatatcatatccaagtaaaacaccttatactgatttatagggtgactgcctacacrgtcctgctaatggattcccagggctctgcggcatcatcagaaatcaagcggtaacattgtgaattgtaactgtttyttcctaacagtttacagaaggctaggtcagggaacaatgtattacagccttgttgagaaaactgccagagacgcctccacctatggcaktttcacatccttcaagcagctggttttggcagactgctgtgaatacaagtatttcggtgagcrtggtcttaggtgatcgtgatactgtagtatctgtgctctttgctcttactttctaaggatttaaatatttcatttttgttcatttgtataatatatcctgggatgaaaaggtagttgtgaaaatggtactgaaaagctctctcccttatccccatcaaaatagaccaatcctgtcagcgcactcaaaccccgaatttgttatcatttaagtcatagcgaatcaatgggaaatatcagagcaatgaatgagcagagcttcatcctgacccacatttgcatgataggctgataacaaaacaa

SEQ ID NO: 4571 - DNA, 599 bp, Chicken  19866894107611_1
  misc_feature (1)..(29): n is any nucleotide
nnnnnnnnnnnnnnnnnnnnnnnnnnnnnaacagcatattcttcctctatcagtagctcataaaagacatccaaatacataattttagtgctttcattttgtttgcttttactagtttggtcagaacggagtgtcagcttctgctctgatctgcagtgtaaaaaacattcataatattgtcactcttggcaatatttgagaggaaaaaagtttcttttgaaacttgtagtttaactagtgaaactaatagcttcttttgaagttttgtgcatagactgcttttgttcttgaattgcagargttttttttttttctcaagagtaagtgcttcagacaaaaactctttttcacattaattcccctgtaattatattggatgaccttcagcaattatattgattattacccatcgggaaagttagtggcctgcccagtaawtgtaaacatcttagttctgaaaaattaacgttagaaaattaagactggtaacaacgactaccaattccagcctgctagcaagagtgagattcaaatatggcaaatgggcagcgagacaatccaaaaacaaagagagagaattagggtggctggttaatatt

SEQ ID NO: 4572 - DNA, 599 bp, Chicken  19866894107611_2
  misc_feature (1)..(28): n is any nucleotide
nnnnnnnnnnnnnnnnnnnnnnnnnnnnaacagcatattcttcctctatcagtagctcataaaagacatccaaatacataattttagtgctttcattttgtttgcttttactagtttggtcagaacggagtgtcagcttctgctctgatctgcagtgtaaaaaacattcataatattgtcactcttggcaatatttgagaggaaaaaagtttcttttgaaacttgtagtttaactagtgaaactaatagcttcttttgaagttttgtgcatagactgcttttgttcttgaattgcagatrttttttttttttctcaagagtaagtgcttcagacaaaaactctttttcacattaattcccctgtaattatattggatgaccttcagcaattatattgattattacccatcgggaaagttagtggcctgcccagtaawtgtaaacatcttagttctgaaaaattaacgttagaaaattaagactggtaacaacgactaccaattccagcctgctagcaagagtgagattcaaatatggcaaatgggcagcgagacaatccaaaaacaaagagagagaattagggtggctggttaatattc

SEQ ID NO: 4573 - DNA, 600 bp, Chicken  19866894107611_3
ttctgctctgatctgcagtgtaaaaaacattcataatattgtcactcttggcaatatttgagaggaaaaaagtttcttttgaaacttgtagtttaactagtgaaactaatagcttcttttgaagttttgtgcatagactgcttttgttcttgaattgcagatgttttttttttttctcaagagtaagtgcttcagacaaaaactctttttcacattaattcccctgtaattatattggatgaccttcagcaattatattgattattacccatcgggaaagttagtggcctgcccagtaawtgtaaacatcttagttctgaaaaattaacgttagaaaattaagactggtaacaacgactaccaattccagcctgctagcaagagtgagattcaaatatggcaaatgggcagcgagacaatccaaaaacaaagagagagaattagggtggctggttaatattcttgaaccactacacagaagtggaagtgacaatctttctgaatatttcctgaagtataaagaggagactaaatagacacaattctttgtgagtgtggtaatttccagccacagtcttgcttccttgtattttgtaaagg

SEQ ID NO: 4574 - DNA, 600 bp, Chicken  19866894107611_4
aacttcctgatttcagcactccctctttgacactgaaaaaactgcatttagcacatgctgtctgaatatctcagtttctaattttaagcatatttttcattactttctttgtctgtttttgcagtagcttaaatgaatgaggtcaaatattttttgtgcctgcaaaatgcaagctaatgtatctgaaattaaatatctgatgaatctagtcatccttttttatatgggaattaaggattttgagtccctattttgcctccaggtgtcccttggcctaaaaaaaataaaatgtttggaagktatgttactgactgagagtgaattcaagcagggttctgatttatttattgtacatgacctgatcctcctttggagccatggagttctgagcgcttcagaagccatttggagaaaacatgaggcagtctgccagtactagacagatacaggtgcagtattgtaggattctaggcagtcttttcttagaaagaagcagtatttgctccatcactgtagcctatgtgagtctgttgccctacctctgctgtttgcacagtccttgttggagctgtgctttgtgaggtgtagtatgagcaagag

SEQ ID NO: 4575 - DNA, 538 bp, Chicken  19866894107611_5
gttactgactgagagtgaattcaagcagggttctgatttatttattgtacatgacctgatcctcctttggagccatggagttctgagcgcttcagaagccatttggagaaaacatgaggcagtctgccagtactagacagatacaggtgcagtattgtaggattctaggcagtcttttcttagaaagaagcagtatttgctccatcactgtagcctatgtgagtctgttgccctacctctgctgtttgcacagtccttgttggagctgtgctttgtgaggtgtagtatgagcaagagaaygtgttttgtttagcttttgtcaacactaatcacgagaaggcttatgtttgcatcatctttcgttctgaagtagagatgtactgattgttgttttgtgtgtttttgaggtgacagaatccctgtaccggtgtttttctgtatgtgaatagaatgttaaaatacaaacattaaaaatgagataaggtatcacttaaaaatccttacaagatgcctctatttacaggcttaaacttagaaa

SEQ ID NO: 4576 - DNA, 600 bp, Chicken  19866894107622_1
tgctgtggtaggttgctttatattttcaattcatagtgtatctgctagagcaaatcactcggctgtatcttgagcgttgcagcttttctctgctgcattctgttttatgatctaaatcacgtgcagttgtggtctttctcaaaacctttcaaactcttgtctgtgtcatcaagattaacatttttataataacattcaaaatcgtgttcttctctggcttgtccctctctctaatcttactgtctctgttttactaaaatataaactactgatactggaaaatctcatggcatttttttytaaattgttaacattatatctgacctctttgcctttgcaggcaatgcatttggtttatagagctctcgagaaagagccagttccttcactgttacctccttctctcataccaccttctaaaagaaagaagacgcctgtctttcctggtgcagttcctgttctccctgcgagtcctccaccaaaagacagcctgcgttctaccccatctcatggtagtgtaaacagcctgaacagcacggggagtttgtctcccaagcacagcatcaaacaagcacaggtgtgatttttttttttcccttc

SEQ ID NO: 4577 - DNA, 600 bp, Chicken  19866894107625_1
catgtctggatgtgtgctgatcagcaggctcacctgttcacgagtcaatattcattcatggcagagcgatgtggttctggaattctggaaggcaaaagtaatggagatgagcagggcaatcaaaacactattagttcatcttcacgctgatatctaaccaaaatcattcgagttggatgtcccaggcctcagtacaaacctcatgatttatgcatgccaaaagctgcttttgaaagcactcatccttttaccgtctcccaagagcatcaaaacgtccgatgtgtctcacaaaatgcagcrtatttatttttcacattgcccatgaggagaaactgctttagtaaacccacatggggtagcaagcaatgttaagtaactgaagtttctcgttgattaccccattccatctcctccatttggcagaaacagataagatgtgatttttctaccaattttattgacgtgaaaataaccacttttaaaatcaggcctaatgagctagaaatgtacaacaacaacgacaaaaaattgctcaaaacctgtaaatatggacactgaaatgcagctatttgacatgctgagccacaacaacgacacatg

SEQ ID NO: 4578 - DNA, 355 bp, Chicken  19866894107627_1
gtggaaaaaaagcagactgggagagacagatgcaaagtggagatgatgttagagaggaatgagataccttctccacacacagatctgcacacactaactccctgtctgtgtgttagaataaaaggctgagggatggcaggctgtcagctgctctgacatcatgttcagatggaaatgctacctccagctgtgctccttttaatgccatatgctactcctctacactcctgccaccagctttttcttaggagaacttttctcttctgttagtataaacaaaatacttcaaagtctctcttyttttttttttttttccaaactttcgaacaggggggaaggaaaaaaaaaaaaaaaa

SEQ ID NO: 4579 - DNA, 600 bp, Chicken  19866894107629_1
accctctcctggcaaatggcctgggtaattggaagcggtagaagaatccacgcacgctctaatcttgctgggggaaaaatgtcatctatcatcaaataaatctttctctttgccaaatgaatgctgaaatgaaagttctctagcattttctctagattgtatggaaataataatccaaaacactagtagaataagttaccgtgttagcactatgtttgtgcaagaagctgcgaacaaagtatccaagaaaaggacttaaaactgaagaagcaggccagcgtttggagctcagagatgtaygttgtcgacatttcctgtctgtcaggtacaaaggccaggcttacctgggatgtcttttaaccttaaaaactatctactgtgtgctggagtaggagccatctcactgacgctygtacatctctggcagtgcagggcrtgacytgcttgcaagtccagatcccaggctgatgcaatggggatttttagactttgtgttgcaggaaatacaatccattaagtaagatcttaaactgaggatgcagctggacttattacttcatttccccagatctttgtatttgcggtagttttgttactttt

SEQ ID NO: 4580 - DNA, 600 bp, Chicken  19866894107629_2
ccaaatgaatgctgaaatgaaagttctctagcattttctctagattgtatggaaataataatccaaaacactagtagaataagttaccgtgttagcactatgtttgtgcaagaagctgcgaacaaagtatccaagaaaaggacttaaaactgaagaagcaggccagcgtttggagctcagagatgtaygttgtcgacatttcctgtctgtcaggtacaaaggccaggcttacctgggatgtcttttaaccttaaaaactatctactgtgtgctggagtaggagccatctcactgacgctygtacatctctggcagtgcagggcrtgacytgcttgcaagtccagatcccaggctgatgcaatggggatttttagactttgtgttgcaggaaatacaatccattaagtaagatcttaaactgaggatgcagctggacttattacttcatttccccagatctttgtatttgcggtagttttgttacttttgtttcttgccatggtaagatctgattggtctgatatttcttgtttcttctttccaggctgttttggacatgaattatacctgaatcctaaattcaagcttttctttctggtg

SEQ ID NO: 4581 - DNA, 600 bp, Chicken  19866894107629_3
tctctagcattttctctagattgtatggaaataataatccaaaacactagtagaataagttaccgtgttagcactatgtttgtgcaagaagctgcgaacaaagtatccaagaaaaggacttaaaactgaagaagcaggccagcgtttggagctcagagatgtaygttgtcgacatttcctgtctgtcaggtacaaaggccaggcttacctgggatgtcttttaaccttaaaaactatctactgtgtgctggagtaggagccatctcactgacgctygtacatctctggcagtgcagggcrtgacytgcttgcaagtccagatcccaggctgatgcaatggggatttttagactttgtgttgcaggaaatacaatccattaagtaagatcttaaactgaggatgcagctggacttattacttcatttccccagatctttgtatttgcggtagttttgttacttttgtttcttgccatggtaagatctgattggtctgatatttcttgtttcttctttccaggctgttttggacatgaattatacctgaatcctaaattcaagcttttctttctggtgttcttgttatcttagtattaaaca

SEQ ID NO: 4582 - DNA, 600 bp, Chicken  19866894107629_4
agcattttctctagattgtatggaaataataatccaaaacactagtagaataagttaccgtgttagcactatgtttgtgcaagaagctgcgaacaaagtatccaagaaaaggacttaaaactgaagaagcaggccagcgtttggagctcagagatgtaygttgtcgacatttcctgtctgtcaggtacaaaggccaggcttacctgggatgtcttttaaccttaaaaactatctactgtgtgctggagtaggagccatctcactgacgctygtacatctctggcagtgcagggcrtgacytgcttgcaagtccagatcccaggctgatgcaatggggatttttagactttgtgttgcaggaaatacaatccattaagtaagatcttaaactgaggatgcagctggacttattacttcatttccccagatctttgtatttgcggtagttttgttacttttgtttcttgccatggtaagatctgattggtctgatatttcttgtttcttctttccaggctgttttggacatgaattatacctgaatcctaaattcaagcttttctttctggtgttcttgttatcttagtattaaacagaagc

SEQ ID NO: 4583 - DNA, 600 bp, Chicken  19866894107638_1
gaaaaaccacaactgttgaatgctcatgaaacattgcactgcatttcttttgagcagcatgcttgatataacaagaaatctactgcatgtaatcttagagattcactctacaaagtctcctttccttgaaaaggtgtatccatggcaataaatggagcttatgctcaaatatttcaaaaataacttgtgaactgtaagatacacaaactgaacaaaacagcagttttaccatacctggtaactttttctacctgaaagcctctcaaaactaaacagagaagcaacatcataagaaattayacataaaaaggctctctaaaagaactccaaattatattttatgactgcgtgaggaagaaaaggaaactaagcaaattttccaatgtaactaggtacagtacacgcttaaagcagcaggacaaggagaccaatgctgcagatgttgactgtgtttgctgtctcattgcactgctttaagccagggaaaattgtatcatttggcaagcaaacgcaataataatattaacttccttattttcaaagcaactgcctttaactcagatgacgtgccactgtttagtctgcatcttagatgtttca

SEQ ID NO: 4584 - DNA, 600 bp, Chicken  19866894107641_1
gcttgaaaccatttccccttgttctgtcaccacagaacctgctaaagagtctgtcatcttctggggagccaaaggaaaataaaaatcgagaatgtttcaaatgactgtaggaatcttaaccactaaataagggaggcctggagatcagtgctgccttactgttaattttcttttggagcaagcaacggcctccatggaaccagagagtttaatcctataatgctttgttaacatgtccctaccccgcttctaagaataccctatgatgttcaggccagaaagcttttacaaggggtcaargcccaggtttacagtactgtgtttttcctgcagcagtgtgcttttgatggatcttcccaggctgctccaggaatgctagatttcctatttaaacgctagcctccacgtctcttggcaaatcgtttcagcctgattttgtaaacaaayaaggagctggcttcagcccttcyttagtttagyttagcatttatttttcacatctcctcatacagattattggaagggtgagttgcactttatattttattctctctcaaaagaaacccaaagcctcaatcagttggctttcttttaaagtct

SEQ ID NO: 4585 - DNA, 600 bp, Chicken  19866894107641_2
gtgctgccttactgttaattttcttttggagcaagcaacggcctccatggaaccagagagtttaatcctataatgctttgttaacatgtccctaccccgcttctaagaataccctatgatgttcaggccagaaagcttttacaaggggtcaargcccaggtttacagtactgtgtttttcctgcagcagtgtgcttttgatggatcttcccaggctgctccaggaatgctagatttcctatttaaacgctagcctccacgtctcttggcaaatcgtttcagcctgattttgtaaacaaayaaggagctggcttcagcccttcyttagtttagyttagcatttatttttcacatctcctcatacagattattggaagggtgagttgcactttatattttattctctctcaaaagaaacccaaagcctcaatcagttggctttcttttaaagtctctctgaacactcagtgtcttcactgtgaagaccttgacacgttttaaaacatgactgaattaaatcttaaaacatgctgtgaaatagctcccagagtataaaaaaatggtggaatgaaggatacaactcatctgataatacagtgca

SEQ ID NO: 4586 - DNA, 600 bp, Chicken  19866894107641_3
ttttggagcaagcaacggcctccatggaaccagagagtttaatcctataatgctttgttaacatgtccctaccccgcttctaagaataccctatgatgttcaggccagaaagcttttacaaggggtcaargcccaggtttacagtactgtgtttttcctgcagcagtgtgcttttgatggatcttcccaggctgctccaggaatgctagatttcctatttaaacgctagcctccacgtctcttggcaaatcgtttcagcctgattttgtaaacaaayaaggagctggcttcagcccttcyttagtttagyttagcatttatttttcacatctcctcatacagattattggaagggtgagttgcactttatattttattctctctcaaaagaaacccaaagcctcaatcagttggctttcttttaaagtctctctgaacactcagtgtcttcactgtgaagaccttgacacgttttaaaacatgactgaattaaatcttaaaacatgctgtgaaatagctcccagagtataaaaaaatggtggaatgaaggatacaactcatctgataatacagtgcaaggaagtatctgcatgaaaatag

SEQ ID NO: 4587 - DNA, 600 bp, Chicken  19866894107641_4
agcaacggcctccatggaaccagagagtttaatcctataatgctttgttaacatgtccctaccccgcttctaagaataccctatgatgttcaggccagaaagcttttacaaggggtcaargcccaggtttacagtactgtgtttttcctgcagcagtgtgcttttgatggatcttcccaggctgctccaggaatgctagatttcctatttaaacgctagcctccacgtctcttggcaaatcgtttcagcctgattttgtaaacaaayaaggagctggcttcagcccttcyttagtttagyttagcatttatttttcacatctcctcatacagattattggaagggtgagttgcactttatattttattctctctcaaaagaaacccaaagcctcaatcagttggctttcttttaaagtctctctgaacactcagtgtcttcactgtgaagaccttgacacgttttaaaacatgactgaattaaatcttaaaacatgctgtgaaatagctcccagagtataaaaaaatggtggaatgaaggatacaactcatctgataatacagtgcaaggaagtatctgcatgaaaatagaagccacaaa

SEQ ID NO: 4588 - DNA, 599 bp, Chicken  19866894107645_1
  misc_feature (1)..(53): n is any nucleotide
nnnnnnnnnnnnnnnnnnnnnnnnnnnnnnnnnnnnnnnnnnnnnnnnnnnnncccagtgcttgtaagggacctttggagatcggccggtccaaccccaaaaggttgggtgtttgttaggagcagtttcttctctgaaagagcggtgatgtgttggcacagctgcccagggagttttggggtcagtgtccttggaggtgttctggagccatggagatgtggccccgagggacgtggtcagttggcactgtgtgctgggcgtcctgaaggtcttcattaacgatggtatggttataactgytgtgctcagtttgctgtgtgctgtggttgttgggagtccrcctccaaatgcatgygctacaccctgagccatacctgggcgctcaggaggcaggtgagctgtgcagctggggctgcagagagctgcctcaccttgcccaaatggagcagtggaagttgtcctcttcattgttggttggtgttggagtgcagcttactgtgatgatgtactcacctagctggtttgcttgaaaatatttgcaagcacaatgactgtgctacatctggctgccttaatgatttgctctgtagccagcttga

SEQ ID NO: 4589 - DNA, 599 bp, Chicken  19866894107645_2
  misc_feature (1)..(13): n is any nucleotide
nnnnnnnnnnnnncccagtgcttgtaagggacctttggagatcggccggtccaaccccaaaaggttgggtgtttgttaggagcagtttcttctctgaaagagcggtgatgtgttggcacagctgcccagggagttttggggtcagtgtccttggaggtgttctggagccatggagatgtggccccgagggacgtggtcagttggcactgtgtgctgggcgtcctgaaggtcttcattaacgatggtatggttataactgytgtgctcagtttgctgtgtgctgtggttgttgggagtccrcctccaaatgcatgygctacaccctgagccatacctgggcgctcaggaggcaggtgagctgtgcagctggggctgcagagagctgcctcaccttgcccaaatggagcagtggaagttgtcctcttcattgttggttggtgttggagtgcagcttactgtgatgatgtactcacctagctggtttgcttgaaaatatttgcaagcacaatgactgtgctacatctggctgccttaatgatttgctctgtagccagcttgattgcacggctgtgtgaaaactttggtgtaaacatttctgt

SEQ ID NO: 4590 - DNA, 600 bp, Chicken  19866894107645_3
cagtgcttgtaagggacctttggagatcggccggtccaaccccaaaaggttgggtgtttgttaggagcagtttcttctctgaaagagcggtgatgtgttggcacagctgcccagggagttttggggtcagtgtccttggaggtgttctggagccatggagatgtggccccgagggacgtggtcagttggcactgtgtgctgggcgtcctgaaggtcttcattaacgatggtatggttataactgytgtgctcagtttgctgtgtgctgtggttgttgggagtccrcctccaaatgcatgygctacaccctgagccatacctgggcgctcaggaggcaggtgagctgtgcagctggggctgcagagagctgcctcaccttgcccaaatggagcagtggaagttgtcctcttcattgttggttggtgttggagtgcagcttactgtgatgatgtactcacctagctggtttgcttgaaaatatttgcaagcacaatgactgtgctacatctggctgccttaatgatttgctctgtagccagcttgattgcacggctgtgtgaaaactttggtgtaaacatttctgtctcttgattcttgaca

SEQ ID NO: 4591 - DNA, 600 bp, Chicken  19866894107646_1
ttttcaccagtgctattaatatgtttaaatcactgtgtaatgagctccctgccacgatatcttagtgcctgttaaaaaaatgaggatttttgaattggtttaatttgcatgtgttctgttttttttcagaccttatatatatggtcctactgcacaaggagaaagaatgcaaattctacaaaacttcaagcacaatccaaaaatcaacactattttcatttcaaaggtgaggaggtagtgtgtttttgtactcatcttcagagtgagccttatataagaacaagttatacatgcacatcrggcatttgacgttttattattgcaactaataaaggtgtactttgtacaaagtcgttattggtacatggaaataagatgctgctcagacactgcttctgtgttgtaggtgggtgacacatcctttgatctacctgaagccaatgttctgattcagatttcatcccacggtggatctcgaagacaggaggctcaaagactggggcgagtactgagagccaaaaaaggtgaggtagttcttgggctctgctctttggaatacagtacggcattcagataattactcaactatttagaatactg

SEQ ID NO: 4592 - DNA, 599 bp, Chicken  19866894107647_1
  misc_feature (1)..(35): n is any nucleotide
nnnnnnnnnnnnnnnnnnnnnnnnnnnnnnnnnnncttctcttcttttattcttgagctttcattgaatttgttagatgattgtgcagattcaggcagtttacaaattgtttggttgtcatactgttatgtaagaatttttgcggatgtactctttctctctgataaaatttgttgaatcatactgaaaggaaatttggaaagcaatggaatttttagtagaacttcattagttcagtgaaagatggagcagtcaacaactttatccatacttaagttcccaaagcaagaaggaaatgtwtcrtctccattgagacacaagctagtttattttccatcatttatctaagaagttgatgttcatcatggtaattcatcaagcatttcttgtgaagtgtatctggcaggacttcttggcttcagcctttaaattctgagagtttcttcatcctctgggaacagtgactctcttcttattgcacatctggaaggaatgatgttgctttactcttggattgtgatttcacctctctgagctgtgtrtatcttcagatttttgtagatggaagaagaaaaatgctactatttatacatatcttt

SEQ ID NO: 4593 - DNA, 599 bp, Chicken  19866894107647_2
  misc_feature (1)..(32): n is any nucleotide
nnnnnnnnnnnnnnnnnnnnnnnnnnnnnnnncttctcttcttttattcttgagctttcattgaatttgttagatgattgtgcagattcaggcagtttacaaattgtttggttgtcatactgttatgtaagaatttttgcggatgtactctttctctctgataaaatttgttgaatcatactgaaaggaaatttggaaagcaatggaatttttagtagaacttcattagttcagtgaaagatggagcagtcaacaactttatccatacttaagttcccaaagcaagaaggaaatgtwtcrtctccattgagacacaagctagtttattttccatcatttatctaagaagttgatgttcatcatggtaattcatcaagcatttcttgtgaagtgtatctggcaggacttcttggcttcagcctttaaattctgagagtttcttcatcctctgggaacagtgactctcttcttattgcacatctggaaggaatgatgttgctttactcttggattgtgatttcacctctctgagctgtgtrtatcttcagatttttgtagatggaagaagaaaaatgctactatttatacatatctttgta

SEQ ID NO: 4594 - DNA, 600 bp, Chicken  19866894107647_3
gatggagcagtcaacaactttatccatacttaagttcccaaagcaagaaggaaatgtwtcrtctccattgagacacaagctagtttattttccatcatttatctaagaagttgatgttcatcatggtaattcatcaagcatttcttgtgaagtgtatctggcaggacttcttggcttcagcctttaaattctgagagtttcttcatcctctgggaacagtgactctcttcttattgcacatctggaaggaatgatgttgctttactcttggattgtgatttcacctctctgagctgtgtrtatcttcagatttttgtagatggaagaagaaaaatgctactatttatacatatctttgtattgaagtttctgtttgcaaactataaaataatcattgttatgtaagaatagcaatgaaagcgaaagaaacaatagtgggaaattttattaagtgttaccattacattaaagatttcattagcaatatgggtactttactagacctttcatggagagtgaggggataaattatgtgggaatatttatttaatatactatgtgttaaccgtaacgtgttatttaacctcatcaaattcctgg

SEQ ID NO: 4595 - DNA, 600 bp, Chicken  19866894107648_1
tgcccgagtccatacagagtgagtctgtaactcatggattaagctcagattgtggcaggagggaacactctgcagaaagcaacagacctgccttcaggaccaattagtgccagcatccccttgtgtctcacggagctgcagtttgtttgtgcctcagataactgtgggctatggacaaatccccatggacaatagctgggagtccagaagagcagagataatggagtattggaggcaggactgcttggtcttaaacggtagaataagatgagatgcgaaaagccaaggtggatacctgawagctgttaggtgcctcctgtgagtcaagtaattttrgtggaacctgraagtacgatactaaaaagaccaacttgttgttgaaaaaaatggttcacaggcagaaaatattacaatctgtatcttttcccagctctcagatcttgcaaaggtcaacaaatagcacacagcttccaatatggaaatagttctcaggtaccctaaggctattggaccgaatctataaagctttttgtggtgtcaacagagacttgagtatctactgtggcacccaagcctgacagagtgatgtacagcgcaaac

SEQ ID NO: 4596 - DNA, 600 bp, Chicken  19866894107648_2
gattaagctcagattgtggcaggagggaacactctgcagaaagcaacagacctgccttcaggaccaattagtgccagcatccccttgtgtctcacggagctgcagtttgtttgtgcctcagataactgtgggctatggacaaatccccatggacaatagctgggagtccagaagagcagagataatggagtattggaggcaggactgcttggtcttaaacggtagaataagatgagatgcgaaaagccaaggtggatacctgawagctgttaggtgcctcctgtgagtcaagtaattttrgtggaacctgraagtacgatactaaaaagaccaacttgttgttgaaaaaaatggttcacaggcagaaaatattacaatctgtatcttttcccagctctcagatcttgcaaaggtcaacaaatagcacacagcttccaatatggaaatagttctcaggtaccctaaggctattggaccgaatctataaagctttttgtggtgtcaacagagacttgagtatctactgtggcacccaagcctgacagagtgatgtacagcgcaaactacctgctgctcagtgctaaccgcctctacagtcgt

SEQ ID NO: 4597 - DNA, 600 bp, Chicken  19866894107648_3
gattgtggcaggagggaacactctgcagaaagcaacagacctgccttcaggaccaattagtgccagcatccccttgtgtctcacggagctgcagtttgtttgtgcctcagataactgtgggctatggacaaatccccatggacaatagctgggagtccagaagagcagagataatggagtattggaggcaggactgcttggtcttaaacggtagaataagatgagatgcgaaaagccaaggtggatacctgawagctgttaggtgcctcctgtgagtcaagtaattttrgtggaacctgraagtacgatactaaaaagaccaacttgttgttgaaaaaaatggttcacaggcagaaaatattacaatctgtatcttttcccagctctcagatcttgcaaaggtcaacaaatagcacacagcttccaatatggaaatagttctcaggtaccctaaggctattggaccgaatctataaagctttttgtggtgtcaacagagacttgagtatctactgtggcacccaagcctgacagagtgatgtacagcgcaaactacctgctgctcagtgctaaccgcctctacagtcgtctcctgggaag

SEQ ID NO: 4598 - DNA, 600 bp, Chicken  19866894107659_1
acagcacgtcagacgtcaggttttgggttttattttttgtttttacacagtttctggaatgaacgctcacgttcaaccactgcacgcacctcatctagttgcaagacgctctcattctcccatttgcttgcagctgaaaaaattaggacctgctccaaaagccatcatgcagcaacatgtgaaactttagttttgccccgtgcagacttcaacatctgctcattagttactggcaaggattacacaaggcagagtcttgctagctatgacctcttaaatgtaagaccacgagaaccagarctataatccatcagtctaatcctcttaagatgaacaacagaacagaatttattacatgatctttgaagatttctactgtaagaaatacttgatttaatttcagggccttggagcaggagagacatctgttctacttaaacctgccatggtcctaccctctggttttttggttgctttctttttaaagcaccacaaacaattcaatgtttataagaaaagagattactaatgataaagacgactggatcaagttatatccttaatgtttaggatcactttgtttgataaagcaaagcatcc

SEQ ID NO: 4599 - DNA, 600 bp, Chicken  19866894107660_1
tgttaaattctaacaggttttcaattttggagttacacgtaacagtgcacaatgatacttaattgggtcctctgcaaaagaaagatggaaaatagttcctttgacagtgatgtcctgggctggctgtcttggttgtcagctggtgttggagatgtaatgtttcctaccagctatgcttaaaataaataaataaatcttgcatttcctgtaagttgttctctgcaggaagcagaacttggtgcatttccttttctgaaatcctgaagtgaatatgctcatttgagggagaaggccaagaaygttttgtaacaattaaaccccggtgtaattatgcttaccacccagtcttctgcaaarcagtaaagaaatggtctagaagggacctctgtcctttcgctttcttctgccttcattcagccatctctcatttcttttgcctcgatctggaagattcgtgctgaggaggtgttcttttagggagtgcagcgtttcccatacagcagccaatgagaaagactgtgcctaatttgtgtttctgttgttttagagttctttgctgaactggataaagctatgggccctctggtttttaattcaagc

SEQ ID NO: 4600 - DNA, 600 bp, Chicken  19866894107660_2
cttaattgggtcctctgcaaaagaaagatggaaaatagttcctttgacagtgatgtcctgggctggctgtcttggttgtcagctggtgttggagatgtaatgtttcctaccagctatgcttaaaataaataaataaatcttgcatttcctgtaagttgttctctgcaggaagcagaacttggtgcatttccttttctgaaatcctgaagtgaatatgctcatttgagggagaaggccaagaaygttttgtaacaattaaaccccggtgtaattatgcttaccacccagtcttctgcaaarcagtaaagaaatggtctagaagggacctctgtcctttcgctttcttctgccttcattcagccatctctcatttcttttgcctcgatctggaagattcgtgctgaggaggtgttcttttagggagtgcagcgtttcccatacagcagccaatgagaaagactgtgcctaatttgtgtttctgttgttttagagttctttgctgaactggataaagctatgggccctctggtttttaattcaagcatcatgacagacctagtgcgttacacccgtcagggactacactggttgcgcctggat

SEQ ID NO: 4601 - DNA, 600 bp, Chicken  19866894107663_1
ctcctaagttggggaattctagcaagtaggttatggaggcttgtctgaaatccaggtcacacctgacacaaggaaagacaaaggagatgacttctgggaagctacagatcccagcagtaaaagagagagtgagaacaagctccttaagtcgagttctcgaggctccatggtatacaagtgtcagctggtatcttgaactctgtcatgttttgtggctgcgagcatgaagaccattcaaagtgaaaagatcatgacaagagtaccaagcgtagggctgatggtatgaaaacaaatcactckgggagcaggtgggaagcaatgggggccaagcaccttaaccccactccaagcgcatctactgttccagcagcaggaggcggttgcagtgcagtgcagggaatcccgaggcagcttggggctacagctctgtcatgtagagccctgtcactgggatagaagctaaggctgccagagcatttctgttatgcttaaaaattctttcaatagaaagatgggatcatttattttgggcctctaagacaaaagtgggtaaggagttagaaattctcctgaactgcctgctgtagaggtatattgaga

SEQ ID NO: 4602 - DNA, 599 bp, Chicken  19866894107666_1
  misc_feature (1)..(185): n is any nucleotide
nnnnnnnnnnnnnnnnnnnnnnnnnnnnnnnnnnnnnnnnnnnnnnnnnnnnnnnnnnnnnnnnnnnnnnnnnnnnnnnnnnnnnnnnnnnnnnnnnnnnnnnnnnnnnnnnnnnnnnnnnnnnnnnnnnnnnnnnnnnnnnnnnnnnnnnnnnnnnnnnnnnnnnnnnnnnnnnnnnnnnnnnnctgcatcttccttacctgtcgcaggtcacttacattccaagcaagaatgaacagtgtggtgggatgctgacatcatgccttacctgcaacagtgcatcccttccactcactctcrctgcacagcagacagtgtgctttcttgcctttaccttattgctagcaacgagtatttcaaaggcaattgaggtgtttatttatttacttagaacayagcgttagataaaagcattagacaaatttgattaataatagagggtagggccaataaatgtaaacacaggcaaataagtttattttcttaagtgactcatttaagtgtactaatatgtcaagaaatagcagtatgcctttcaaaatgataaagtaaaccgtactcacaaaagaagcgatttgctctatgtacctggtttacct

SEQ ID NO: 4603 - DNA, 599 bp, Chicken  19866894107666_2
  misc_feature (1)..(89): n is any nucleotide
nnnnnnnnnnnnnnnnnnnnnnnnnnnnnnnnnnnnnnnnnnnnnnnnnnnnnnnnnnnnnnnnnnnnnnnnnnnnnnnnnnnnnnnnnctgcatcttccttacctgtcgcaggtcacttacattccaagcaagaatgaacagtgtggtgggatgctgacatcatgccttacctgcaacagtgcatcccttccactcactctcrctgcacagcagacagtgtgctttcttgcctttaccttattgctagcaacgagtatttcaaaggcaattgaggtgtttatttatttacttagaacayagcgttagataaaagcattagacaaatttgattaataatagagggtagggccaataaatgtaaacacaggcaaataagtttattttcttaagtgactcatttaagtgtactaatatgtcaagaaatagcagtatgcctttcaaaatgataaagtaaaccgtactcacaaaagaagcgatttgctctatgtacctggtttacctcggagggtgtggttactacatttgtgtgccctgctggcaaggagggcgggctttgttctgtagctgctttcaagtgtgtcctctgactgagctgca

SEQ ID NO: 4604 - DNA, 600 bp, Chicken  19866894107680_1
aggtgctgacactccacacatctgtgagaactttattttcttttattacattattcagaggaaaggaataatctgcattggcctgagggcaaatttactgaaaagggtgtgatcaaaatgggtcacttgcttgctcacttctttcatatttttctagttttatttatataaagaccctggagcattcttgcacaggctgaggccccagatgtacccaccagttgtcttgagacaacaaacatcgggactgaaatctgatggggattgcctcaggcagctgcatgcaaacctggcagtgcygagcagggctttcctcgccccaggcagatcctgccctcacctacagcatagcctagccaagcagctgcatcatagggtggcaggtttattcctggctgctgttgttttccaaagatgtagatgtagcaggctgaatttatttcttataacttaattccaaacaaacaaacaaccccttcaaactctatgggtttatggcagggcgggtgtgaagagtgaaaggttgcatcatccctaacagactggggcagttctcttgctggtagcaaaatcagtgtttgatttgctgggctaatgtgg

SEQ ID NO: 4605 - DNA, 600 bp, Chicken  19866894107686_1
tataagattcttaatatattttacagtcagaatgtagttttgtatgtgatgatttaagaaggcacacacatgctttcaggtcattaaagtgcattgtaaaaataatagagacacaaagggcttattctcaagaaacgatgcacaccctcttctcaatggaatattgaagatctgtttcatttttcaatataaagcaagttcaagatgctatttccttaccacatacctcagcggtgcatgaccccagaaataaaaagtgaatggatttatatacaaaagaaaaatcttggcgcttcttarcattttactcctcttcctaaataaaagaccttcaagaacatatcttcttactgaagttgaaaagggggttgctctatctggcagcatacaccttattttctgtggatgtcggacagaatgagctgaggaggttgttagatgtttctttgtaacatgcactagggaattaataggttgttaaaattgcactttatccatatctggtggctgacaatccacagtgagaaagaatatcaaacacacacataagagccagttgttactcttctaaaaaatggtaaaaatacagaggatgagcct

SEQ ID NO: 4606 - DNA, 600 bp, Chicken  19866894107690_1
agagtgaatcacacatgcaaaaaacacatcagcaggtgaggaccctttgcaataaggaagttcttaacttacactgctctaatactcgtccctacccatgttaggtagaggagatttcatgataactttgtctggaggtggctgtgagggttgcttacgtgagagaaagttggatagcagtaatactacatgatgagcttggtatatcaggaatctagcaaaaacagcatgtgtatactgtatgtttctttctgtgacagatttgggtttgcattttgtcggctgcgttgcttctcctcrtttctcttcctgttcacgcttcaggagttctaacattgcagtcctgtttgggagagaaacaatttgaaaaatgtaatttttaaggactttgtagacctctcaaatagagaagatgaactcagaagtctgtaaaagttctaataaataaatggaaattatacatatacacctctcctgttttgaagattagggaagatactgctggaaaattttaaaatgaggaaataataccaagctgtatttctgtgrtgacttgtgatgcaacaagttctataagtaattcttgcttcccacttggag

SEQ ID NO: 4607 - DNA, 566 bp, Chicken  19866894107690_2
ttctgtgacagatttgggtttgcattttgtcggctgcgttgcttctcctcrtttctcttcctgttcacgcttcaggagttctaacattgcagtcctgtttgggagagaaacaatttgaaaaatgtaatttttaaggactttgtagacctctcaaatagagaagatgaactcagaagtctgtaaaagttctaataaataaatggaaattatacatatacacctctcctgttttgaagattagggaagatactgctggaaaattttaaaatgaggaaataataccaagctgtatttctgtgrtgacttgtgatgcaacaagttctataagtaattcttgcttcccacttggagtaaagggatggttctcaagataatcatcatagcttcttagtcttgaagtgtgttgattcagtaaattttaagagcttaccaggttactttttaagatgttccctgccaggcttgcatcaaaagactattgaaagtttaggcaggatgcagtatgttttggaatgggaagctatagaggacttagggtagaaaggaggagctctgctgaggttttt

SEQ ID NO: 4608 - DNA, 600 bp, Chicken  19866894107694_1
gtctcttcggtaaatggctcagctaattaagatgtgaaggaactggatcaggaagaaggcatgctaaactcaatttccgaaaggaaaacatcagtgattcatacattacttcattaccgtcccacaatcaagtgggaatttgctgcaatgcatcacttcataacaccttaaattatttttaacctaagcccgtgtgcacatccttatgcatacagcgtgcttttgtacaggtgaggaacagttaaggacacagccatttgcatcgtgattacagcagcgtcagtgcaaagagaaaaaagkaatagagaatttgagatacaagtaatgttctgtgcattcccaaactggatttcaaagcygcattctgatttctgaattgttaattcacaatttcatttctttctgacctttatggtccaaagcggacaattaaattccagcctgcattgataataaagattctcttttgagctcaacacgaccccaggatactccttgcagcactcacgttctggcattggctggcagcagaaacacagccctcctcctgcccgtgcccaccacccccctccacgcacactgtgtccctgcccattccca

SEQ ID NO: 4609 - DNA, 600 bp, Chicken  19866894107694_2
catgctaaactcaatttccgaaaggaaaacatcagtgattcatacattacttcattaccgtcccacaatcaagtgggaatttgctgcaatgcatcacttcataacaccttaaattatttttaacctaagcccgtgtgcacatccttatgcatacagcgtgcttttgtacaggtgaggaacagttaaggacacagccatttgcatcgtgattacagcagcgtcagtgcaaagagaaaaaagkaatagagaatttgagatacaagtaatgttctgtgcattcccaaactggatttcaaagcygcattctgatttctgaattgttaattcacaatttcatttctttctgacctttatggtccaaagcggacaattaaattccagcctgcattgataataaagattctcttttgagctcaacacgaccccaggatactccttgcagcactcacgttctggcattggctggcagcagaaacacagccctcctcctgcccgtgcccaccacccccctccacgcacactgtgtccctgcccattcccagcagcagcacagggcagcacacttaccacaggggccgtctttctccacgcatcagatgg

SEQ ID NO: 4610 - DNA, 599 bp, Chicken  19866894107697_1
  misc_feature (1)..(95): n is any nucleotide
nnnnnnnnnnnnnnnnnnnnnnnnnnnnnnnnnnnnnnnnnnnnnnnnnnnnnnnnnnnnnnnnnnnnnnnnnnnnnnnnnnnnnnnnnnnnnnnacaactttagacaatggctatgtagtggaattccagggtcacagcctgagccaatgggtgtgctacatgagtgtgcgggtgcctggagccaggggtggtctggagccactccttccgtctctgcaatacttcctgtgcagactgaatctgcgcgggtccccctttttgcccccgtccttctcttcggcggcacaacagtacgaaygggggagggtctcattcttcagctcgtccctttctccacactgttgccgggaggggtgagtcaattccttcttgatatcttttcctctagtgcctatttttcaaataaaggctctgtcattgccttcacttgttctacaggctactacaaagaggttttttgtaataaaggaagataaagagaaaaggtagaaaatggaggaagagagacagacaggtatacaaacacagcaaagcraagtggttcaccactcctagatcgagtgatgtcttggtgtcaggtgctgatcttcagtggtg

SEQ ID NO: 4611 - DNA, 527 bp, Chicken  19866894107697_2
tgaatctgcgcgggtccccctttttgcccccgtccttctcttcggcggcacaacagtacgaaygggggagggtctcattcttcagctcgtccctttctccacactgttgccgggaggggtgagtcaattccttcttgatatcttttcctctagtgcctatttttcaaataaaggctctgtcattgccttcacttgttctacaggctactacaaagaggttttttgtaataaaggaagataaagagaaaaggtagaaaatggaggaagagagacagacaggtatacaaacacagcaaagcraagtggttcaccactcctagatcgagtgatgtcttggtgtcaggtgctgatcttcagtggtgataggtcattggaggttgtggtgctcaagtgataagatctaatgataacagtacaaatacttatttatagtccaaagtgtttgagtcagcttttttggagtgacagctttgggatctcagcaggatctcctttgttcctgtcttccaggtcttgcaaatttaaat

SEQ ID NO: 4612 - DNA, 600 bp, Chicken  19866894107699_1
gagagcagtctttgatttcagtaaattcagtcccacactgcccactgaagtggtatttctaacctcaaactgtctctcaagggcccattctagacacagggagctgccagagttcactcatgcagtactaagctttgaatactgcagcaaggatcgaaagcacccctagcattagtggaacagttccaacagaaagatcaatcacagaagcagagctccctatttaacatcaagtagtgtagccagaactgctggtgataataagcattgccccatgcctgcaatacatacctataaaarcatagtgaattgtggtcctaaggatagaagtgtggctctcttctatctctatctctaagttgtgtttggacaacaactccttgacctcttgaggatgacttttttcttccagttattacaagcaaaaacatcckttagatgcagaattcagaaagccattttgccaggaaccctaacccagaacagcgtctgtctttcaacattctgtagtccacagccatcattaataatgttccttaggaggaaatgcatttaagtagaactgaagatctcatttatttattcaagggcagacacata

SEQ ID NO: 4613 - DNA, 585 bp, Chicken  19866894107699_2
ttgaatactgcagcaaggatcgaaagcacccctagcattagtggaacagttccaacagaaagatcaatcacagaagcagagctccctatttaacatcaagtagtgtagccagaactgctggtgataataagcattgccccatgcctgcaatacatacctataaaarcatagtgaattgtggtcctaaggatagaagtgtggctctcttctatctctatctctaagttgtgtttggacaacaactccttgacctcttgaggatgacttttttcttccagttattacaagcaaaaacatcckttagatgcagaattcagaaagccattttgccaggaaccctaacccagaacagcgtctgtctttcaacattctgtagtccacagccatcattaataatgttccttaggaggaaatgcatttaagtagaactgaagatctcatttatttattcaagggcagacacataagcagcataaacaggcaactctgacaaatctgatgcatgaacttcctgatttccatctcgtcttcgctcagctcccagtgaaatctcatttcctggacttgagtagggcagaatgcacg

SEQ ID NO: 4614 - DNA, 600 bp, Chicken  19866894107700_1
cactatcgatatctattgatattgccagcatatgaatctccacctctggaaagcaagaagtggtgtgccaatgcaacaggctttgtcacttacagaatacagaaaggtggcaaggtagcagctgagaagcagttgtataatccttaaccagtataatccttgcttaaggattctgatattcagtgttcacattactttcagccataatagaaaacaatgaaatttccagcctgagcctgaatttgccaattttcctttgattttcattgcatcagtaagtaaacaaaaatgtagttcacrtggccatgttgtgggtctatctgggcctgggtgtacacaggcagtttccagagatcagtacgtgccgtgtgcagatgatactggggatggccagtacaaattactgatagaagtaataaaagcaggcctgggcatcaccgyagaatgctgggcgtatgaacagatatctcttggttgggggtacattgaaacttcagttgagagctgacttcataaggcagctgctttatgacatgcaatcagccagcttaacttaaaatttcactttggaggaggagaaagtaactcagaactgcagaa

SEQ ID NO: 4615 - DNA, 600 bp, Chicken  19866894107700_2
ccttaaccagtataatccttgcttaaggattctgatattcagtgttcacattactttcagccataatagaaaacaatgaaatttccagcctgagcctgaatttgccaattttcctttgattttcattgcatcagtaagtaaacaaaaatgtagttcacrtggccatgttgtgggtctatctgggcctgggtgtacacaggcagtttccagagatcagtacgtgccgtgtgcagatgatactggggatggccagtacaaattactgatagaagtaataaaagcaggcctgggcatcaccgyagaatgctgggcgtatgaacagatatctcttggttgggggtacattgaaacttcagttgagagctgacttcataaggcagctgctttatgacatgcaatcagccagcttaacttaaaatttcactttggaggaggagaaagtaactcagaactgcagaatttatttattaacttatttattttgcagagcgagctttacttttttatatactttgattttatatagctataagaaatgctctggcaaaatgttcaacatctgttggtttctatttagattttgacatgtgttttttatat

SEQ ID NO: 4616 - DNA, 600 bp, Chicken  19866894107701_1
caggtaatcgtaagttgcacatgcactgtaatagaataaaagagaaaacaaacactttcactactgaacttgcattgaggaaatggagaattgaatataagggagtctggataacaagcagctacctaagcactgacagagagatacctacaatgctgtagaataagcacgctaagcatctttaagcatctttataaaatgaacctgtcctgattcaaaggcagacaaaagtaaaaactagcacttcaataaggcattagagaattcctaaagacataacagtaaaagtaaacacagcargttcctctttaggaacaaaaaagtgcatggagtgagatggattctgtgtttctttacagtggactactaaagaggaaaaarccctgaattaaaacccaagaatcaactcaggcttttaagataaagctaaatactgcagaagagcagattcaggtaatagcagctaatgggtttaagaattaagaactttcccataatatcaagaaagtaaamcttacaaagaaatgatttcataacggttaaratgctgcactccacacaaccgctccacttctttagactgagaagagaaatacttgg

SEQ ID NO: 4617 - DNA, 600 bp, Chicken  19866894107701_2
aatggagaattgaatataagggagtctggataacaagcagctacctaagcactgacagagagatacctacaatgctgtagaataagcacgctaagcatctttaagcatctttataaaatgaacctgtcctgattcaaaggcagacaaaagtaaaaactagcacttcaataaggcattagagaattcctaaagacataacagtaaaagtaaacacagcargttcctctttaggaacaaaaaagtgcatggagtgagatggattctgtgtttctttacagtggactactaaagaggaaaaarccctgaattaaaacccaagaatcaactcaggcttttaagataaagctaaatactgcagaagagcagattcaggtaatagcagctaatgggtttaagaattaagaactttcccataatatcaagaaagtaaamcttacaaagaaatgatttcataacggttaaratgctgcactccacacaaccgctccacttctttagactgagaagagaaatacttgggcaatgaagctaatgaaaagcttgtaaaaataattagcaataaaatgctaatagggaaatactatggaaatatgagatcta

SEQ ID NO: 4618 - DNA, 600 bp, Chicken  19866894107701_3
ttcaaaggcagacaaaagtaaaaactagcacttcaataaggcattagagaattcctaaagacataacagtaaaagtaaacacagcargttcctctttaggaacaaaaaagtgcatggagtgagatggattctgtgtttctttacagtggactactaaagaggaaaaarccctgaattaaaacccaagaatcaactcaggcttttaagataaagctaaatactgcagaagagcagattcaggtaatagcagctaatgggtttaagaattaagaactttcccataatatcaagaaagtaaamcttacaaagaaatgatttcataacggttaaratgctgcactccacacaaccgctccacttctttagactgagaagagaaatacttgggcaatgaagctaatgaaaagcttgtaaaaataattagcaataaaatgctaatagggaaatactatggaaatatgagatctacacatcattagctccaagcaatcatgcctgtcatgtggataagtatattaagaaattggctaataaatttaccagattcatttaaaattatattgaagaagagatcaaaagcactaggaacgtttcagaaaa

SEQ ID NO: 4619 - DNA, 600 bp, Chicken  19866894107701_4
ttcaataaggcattagagaattcctaaagacataacagtaaaagtaaacacagcargttcctctttaggaacaaaaaagtgcatggagtgagatggattctgtgtttctttacagtggactactaaagaggaaaaarccctgaattaaaacccaagaatcaactcaggcttttaagataaagctaaatactgcagaagagcagattcaggtaatagcagctaatgggtttaagaattaagaactttcccataatatcaagaaagtaaamcttacaaagaaatgatttcataacggttaaratgctgcactccacacaaccgctccacttctttagactgagaagagaaatacttgggcaatgaagctaatgaaaagcttgtaaaaataattagcaataaaatgctaatagggaaatactatggaaatatgagatctacacatcattagctccaagcaatcatgcctgtcatgtggataagtatattaagaaattggctaataaatttaccagattcatttaaaattatattgaagaagagatcaaaagcactaggaacgtttcagaaaaaaaaattgtacatggtactggccttcggaaa

SEQ ID NO: 4620 - DNA, 600 bp, Chicken  19866894107704_1
tttttttttcctagatcttggaactcatagaaagttagtatttataacataattttgttatattgcttctttgtaggtcagtgactgagacatttttgtttgcagttctcctgtctacctttactactttacaatgtttatgtttgctgggaccaaacatacaagcttggatacgagtattcagtagaaatgggtaagttctattctaatttctaactggaaaagaaatggactgaattgatgtgaatatcatagaatttttatgattattttattttggggaaagaaactctctgaatwatggatgttgtttcacttttgtaatgacaggtctatgaaagcttttctgacaataatagtattayttattttgaagacactgattcagaaaactgaccttttatttctggtatccagagactaagccttactttatatgtgtttggaggaggtaaagtttcaagtgagcattttactggtgtgaaagcatcctgccatccagtataatgcttataataaagaggagacctgtgagtgagctatagaggaagaatcatgcacttgatccaatgttagctctacaaaaacagtttttagagt

SEQ ID NO: 4621 - DNA, 600 bp, Chicken  19866894107704_2
cttctttgtaggtcagtgactgagacatttttgtttgcagttctcctgtctacctttactactttacaatgtttatgtttgctgggaccaaacatacaagcttggatacgagtattcagtagaaatgggtaagttctattctaatttctaactggaaaagaaatggactgaattgatgtgaatatcatagaatttttatgattattttattttggggaaagaaactctctgaatwatggatgttgtttcacttttgtaatgacaggtctatgaaagcttttctgacaataatagtattayttattttgaagacactgattcagaaaactgaccttttatttctggtatccagagactaagccttactttatatgtgtttggaggaggtaaagtttcaagtgagcattttactggtgtgaaagcatcctgccatccagtataatgcttataataaagaggagacctgtgagtgagctatagaggaagaatcatgcacttgatccaatgttagctctacaaaaacagtttttagagtaggaatagcagctaaaatcagtattattttaacagtatttttaacttgaatgtaattgtgaaaat

SEQ ID NO: 4622 - DNA, 600 bp, Chicken  19866894107705_1
ccagcaaggtgctctgtttagctcagtcaccctacagcaccacctctctgaaatactggcgctctgcatcagcacacagggttttatttgtgctagatgactgaccctgagcccaccacccagatgggatggctaatgttattgttctgcctcaacagcgtgagattgaatttctacacctctgtttctctaagtgttgcccatgctcagatgcagagaggccttttcccttcctcattacacgcacttgcagcctgcggtggctgcaatcagagcaggttaaaagcaatcccagccccrctttgccaagcctgcagtttaggaatcagaaagtayttagcctcagtggctatttcacgccagcaccagaagctcacatagtagctattgatcaaatattctgttagcactacagggagctttckctgatggcccagctgtgagaacgttttcyaatgttatgcactgtgtgcctattagaaataaatgcgtttgctgaattctcaaasagctggctcaacaacgtkgagtatggaatggagagatgccaacatgacacaactactgcattgccctttaagattttgagcacatyggctt

SEQ ID NO: 4623 - DNA, 600 bp, Chicken  19866894107705_10
tgctgcagttgcactcagcccatgcagtaggcagctgacacccaggcgcagcagcagctgagctcccacattgctgcagctctgctgtgctcctccgtgcgcacaggcacgctctgttggaggcatgagagagagtgtcctttcagcccttttgcttcaaagtggagggatgtttttctgcaagactgccgcagggacttttagacaggcrtcccattcatccggaggtcaattaacgtaggcacctttggtggtattttcagaagcccccagataccagagggctttgaaacactgccytrcaagcacagagccaggctctgtgaatacctggacccacacagcagcactgaaagccaactagcttatgagcccctggttttgacaaacactcattttgctctgctctccatatacaacagccttgaaagaaagaagggctggtgtaattggggtgccctaatttgctggttgcactactacccatatgcaaaaactctacttttctcacagccatggtgttgaaagagcaacactgtgcaagagagcagcggtagctgggggagacaaggacacactgtaaggttaaacctgtttttt

SEQ ID NO: 4624 - DNA, 600 bp, Chicken  19866894107705_11
ctgcagttgcactcagcccatgcagtaggcagctgacacccaggcgcagcagcagctgagctcccacattgctgcagctctgctgtgctcctccgtgcgcacaggcacgctctgttggaggcatgagagagagtgtcctttcagcccttttgcttcaaagtggagggatgtttttctgcaagactgccgcagggacttttagacaggcrtcccattcatccggaggtcaattaacgtaggcacctttggtggtattttcagaagcccccagataccagagggctttgaaacactgccytrcaagcacagagccaggctctgtgaatacctggacccacacagcagcactgaaagccaactagcttatgagcccctggttttgacaaacactcattttgctctgctctccatatacaacagccttgaaagaaagaagggctggtgtaattggggtgccctaatttgctggttgcactactacccatatgcaaaaactctacttttctcacagccatggtgttgaaagagcaacactgtgcaagagagcagcggtagctgggggagacaaggacacactgtaaggttaaacctgtttttttc

SEQ ID NO: 4625 - DNA, 600 bp, Chicken  19866894107705_2
gcaccacctctctgaaatactggcgctctgcatcagcacacagggttttatttgtgctagatgactgaccctgagcccaccacccagatgggatggctaatgttattgttctgcctcaacagcgtgagattgaatttctacacctctgtttctctaagtgttgcccatgctcagatgcagagaggccttttcccttcctcattacacgcacttgcagcctgcggtggctgcaatcagagcaggttaaaagcaatcccagccccrctttgccaagcctgcagtttaggaatcagaaagtayttagcctcagtggctatttcacgccagcaccagaagctcacatagtagctattgatcaaatattctgttagcactacagggagctttckctgatggcccagctgtgagaacgttttcyaatgttatgcactgtgtgcctattagaaataaatgcgtttgctgaattctcaaasagctggctcaacaacgtkgagtatggaatggagagatgccaacatgacacaactactgcattgccctttaagattttgagcacatyggcttaaaagcataagcactgttcatccaggtttatgaagg

SEQ ID NO: 4626 - DNA, 600 bp, Chicken  19866894107705_3
gggatggctaatgttattgttctgcctcaacagcgtgagattgaatttctacacctctgtttctctaagtgttgcccatgctcagatgcagagaggccttttcccttcctcattacacgcacttgcagcctgcggtggctgcaatcagagcaggttaaaagcaatcccagccccrctttgccaagcctgcagtttaggaatcagaaagtayttagcctcagtggctatttcacgccagcaccagaagctcacatagtagctattgatcaaatattctgttagcactacagggagctttckctgatggcccagctgtgagaacgttttcyaatgttatgcactgtgtgcctattagaaataaatgcgtttgctgaattctcaaasagctggctcaacaacgtkgagtatggaatggagagatgccaacatgacacaactactgcattgccctttaagattttgagcacatyggcttaaaagcataagcactgttcatccaggtttatgaaggtgatgaaatccaattcattgcactctttccagtagtataagaacaggatattatcagatgacctgactgcatccaactctcacgtctcc

SEQ ID NO: 4627 - DNA, 600 bp, Chicken  19866894107705_4
acagcgtgagattgaatttctacacctctgtttctctaagtgttgcccatgctcagatgcagagaggccttttcccttcctcattacacgcacttgcagcctgcggtggctgcaatcagagcaggttaaaagcaatcccagccccrctttgccaagcctgcagtttaggaatcagaaagtayttagcctcagtggctatttcacgccagcaccagaagctcacatagtagctattgatcaaatattctgttagcactacagggagctttckctgatggcccagctgtgagaacgttttcyaatgttatgcactgtgtgcctattagaaataaatgcgtttgctgaattctcaaasagctggctcaacaacgtkgagtatggaatggagagatgccaacatgacacaactactgcattgccctttaagattttgagcacatyggcttaaaagcataagcactgttcatccaggtttatgaaggtgatgaaatccaattcattgcactctttccagtagtataagaacaggatattatcagatgacctgactgcatccaactctcacgtctcctcctggtctcgctgtgtgccccatcccct

SEQ ID NO: 4628 - DNA, 600 bp, Chicken  19866894107705_5
gatgcagagaggccttttcccttcctcattacacgcacttgcagcctgcggtggctgcaatcagagcaggttaaaagcaatcccagccccrctttgccaagcctgcagtttaggaatcagaaagtayttagcctcagtggctatttcacgccagcaccagaagctcacatagtagctattgatcaaatattctgttagcactacagggagctttckctgatggcccagctgtgagaacgttttcyaatgttatgcactgtgtgcctattagaaataaatgcgtttgctgaattctcaaasagctggctcaacaacgtkgagtatggaatggagagatgccaacatgacacaactactgcattgccctttaagattttgagcacatyggcttaaaagcataagcactgttcatccaggtttatgaaggtgatgaaatccaattcattgcactctttccagtagtataagaacaggatattatcagatgacctgactgcatccaactctcacgtctcctcctggtctcgctgtgtgccccatcccctgtgttcaccatttccttggttgtatgctccagcggctaatcacttcactgtgata

SEQ ID NO: 4629 - DNA, 600 bp, Chicken  19866894107705_6
cccttcctcattacacgcacttgcagcctgcggtggctgcaatcagagcaggttaaaagcaatcccagccccrctttgccaagcctgcagtttaggaatcagaaagtayttagcctcagtggctatttcacgccagcaccagaagctcacatagtagctattgatcaaatattctgttagcactacagggagctttckctgatggcccagctgtgagaacgttttcyaatgttatgcactgtgtgcctattagaaataaatgcgtttgctgaattctcaaasagctggctcaacaacgtkgagtatggaatggagagatgccaacatgacacaactactgcattgccctttaagattttgagcacatyggcttaaaagcataagcactgttcatccaggtttatgaaggtgatgaaatccaattcattgcactctttccagtagtataagaacaggatattatcagatgacctgactgcatccaactctcacgtctcctcctggtctcgctgtgtgccccatcccctgtgttcaccatttccttggttgtatgctccagcggctaatcacttcactgtgataaatgtgctgcttaattct

SEQ ID NO: 4630 - DNA, 600 bp, Chicken  19866894107705_7
ccccrctttgccaagcctgcagtttaggaatcagaaagtayttagcctcagtggctatttcacgccagcaccagaagctcacatagtagctattgatcaaatattctgttagcactacagggagctttckctgatggcccagctgtgagaacgttttcyaatgttatgcactgtgtgcctattagaaataaatgcgtttgctgaattctcaaasagctggctcaacaacgtkgagtatggaatggagagatgccaacatgacacaactactgcattgccctttaagattttgagcacatyggcttaaaagcataagcactgttcatccaggtttatgaaggtgatgaaatccaattcattgcactctttccagtagtataagaacaggatattatcagatgacctgactgcatccaactctcacgtctcctcctggtctcgctgtgtgccccatcccctgtgttcaccatttccttggttgtatgctccagcggctaatcacttcactgtgataaatgtgctgcttaattctgtcttgtgcctgtctgccatcagccataggtccttgctctgtcctttctgttcacagggcagtgacaa

SEQ ID NO: 4631 - DNA, 600 bp, Chicken  19866894107705_8
tccaaacgacctctgcttctctctgaatctgtaatgtgacgttcaaatatcccttgtaggaacaggcccaagcccaagcaacctgggtcactgttattatcttaactacctcttatctaaccccacgttcctctctctaagcaaaaagatgctttaaatatcacagatcagatggagtaagtcatcagggttacagctttcaaaacacgtccagaagatcttcccctgctgttcaactcttccctttatctccctttggcactgacattcatcagttctcacagcttctcagatctttcytgaaagagaaaaaataggcaaggagtgaagtagagtgggtgagaaatgatgggggatacaaatcatccacccatgctgcagatccactgagacccatcagtgggtctgtgaggtacatccccactgctagctatagaattttaaatgcagtgagtatcatagaatcatagaaccatagaatggcttgggttgcaagggaactcaaggatcatgaagctccaagcccccaccacaggcagggccatcaatctccacatataatactaggccaggctgtccagggccccatccaacctggcc

SEQ ID NO: 4632 - DNA, 600 bp, Chicken  19866894107705_9
ctcatgatggatgcccatccctccatccatgacaggtggccacaagggttgcagatgatgcagacagtggcacaggaggacctgggacatgctgcagttgcactcagcccatgcagtaggcagctgacacccaggcgcagcagcagctgagctcccacattgctgcagctctgctgtgctcctccgtgcgcacaggcacgctctgttggaggcatgagagagagtgtcctttcagcccttttgcttcaaagtggagggatgtttttctgcaagactgccgcagggacttttagacaggcrtcccattcatccggaggtcaattaacgtaggcacctttggtggtattttcagaagcccccagataccagagggctttgaaacactgccytrcaagcacagagccaggctctgtgaatacctggacccacacagcagcactgaaagccaactagcttatgagcccctggttttgacaaacactcattttgctctgctctccatatacaacagccttgaaagaaagaagggctggtgtaattggggtgccctaatttgctggttgcactactacccatatgcaaaaactctacttttctcac

SEQ ID NO: 4633 - DNA, 600 bp, Chicken  19866894107712_1
ggtactgttgagcagataagacagcatcccgtctcactgttctccttgaaatcctttgtgtgtgcagttcagcttcgtgcaggcagacacttctgtcgtgctttaccaatcagcgtgtggcacctgcccttggctgctctgctcctggcaccctttccccacatgctgactgttgtctcttgtgactcagtgttcctggagaagcccagctccagcacagggacaccgtgagctagcgagggatcccgtgtttttaggaggattgggagggaggagttccagaagtccatctacaaacaragggctgtcagatcattagtgcttacatggggctgagtgacagcatgctgctagcagggcagcgaccagtggttagtttaggtggtaggaactggtttgctattagatatgaagatctgtggtttcatctttttaaaggacttacctttcagaaggtaccagaacgatgctggtactgcacataatacatgtgtttatctgtgggggtacgtgctcagctatactcattcattcttccagaaagatggactgttgagccccaggcagcatctgactgatgaactggtgtcgtgcaaatga

SEQ ID NO: 4634 - DNA, 600 bp, Chicken  19866894107712_2
ttttatgagttgttttcaaggttgtatagcagctagaacagccaaaagttttgagttgatatttcggaatagttcttactccttttgcttttttttaattctgctcacagggagagtatatgcaacataaacttgggtgagaatacttgtctggctcatgagtgcagaggtactgcaaacaattgcttttaaaagcagggcggtggtggggaacagatctatcagcagctgtggtgccctgatttctcactgaaaatgaaaacgcgtggcagtagaaacacagctatgtttgatcttgcygatataaatgtgtggacactgtttgcctcagtgcttttccccctgtccattttttttctcatgcctacctcttaactataatgcagttttgagttgtgcaagtcgcagctagaaaacctgcacaggtataatgtcacacagagctcagggcaaaggaggactttcagaattatagttgtagagatcccagagacatttaaaaaatgagcagtgaaaagtacactaatagagaatattgatttggattccagtttctttaaatgtagctgttaagatgtttgattagattttgtactcaat

SEQ ID NO: 4635 - DNA, 600 bp, Chicken  19866894107723_1
acctggattttttaagctcctcctccttgcatcttgtatttgcaagctttccaggaacacaatcagagatgataatacatgcctctgtactttgaggggacattctagctggttctttggatgcctccatcggcatacttggctactagcagtatctggtgttcttactgcatagtagcagtacggtctgcagtcttttgcacagtgatggtagaacgtgatattcttgtgcaaagtttgttacctcacaataaaaaggaatgtttcatttaaaaatagaagcataggagtctgaagatmttctgcttttgtctgctgttttttacacaggtttctcaagatagcactttatttttgtgacttgttgctgctgtggtttaacccaagtttcctcagccttaatagagaagcatctttaaggggctggaggaggagaaacagccatgatatttctatttctaaatgggcttataaggatgacaagcatgggtgaacatgaaattttgatggagctcaaacacagaatgcaataatgaagaaggtggaaatggggatggctggacaggaggaatagaggaatattgtctaagcttgcaagaa

SEQ ID NO: 4636 - DNA, 600 bp, Chicken  19866894107727_1
tccaattatatgatcgatttcttaaggcaggaattaagtcttcaccatgtacccatggggatcaaaatggagccctcatgttatgaatgtgattgtaaacccgaaactagcctgagtcactattatatacacaagagtagagagactgaattttaagatttttttctcttgctacagaaaatattttcattgctgccagcttccaactaacactctatatctattggtacttttgcaatttctaacatatctaaaagaaataatttgaagataatgtagcccatgatgtttttctccagygagagctgcttttcctggcatcaagaaatgggaaaaataatttattgacaacagtctgtgaaatttcctttttccttatctcttgaggccaagtctccagctagcagggtatttcagaaataatcttagaagtaatatttaaaagaaatagccacaacagctgctctgttcccatggaaatgcatgggaacagttcaagtgagcatccctttrcaatgcagtcatgtgtttgtcctcagacagtaagcagaggtcaggcatctcrtcctctccattgtctgcagggggtatgactggcat

SEQ ID NO: 4637 - DNA, 600 bp, Chicken  19866894107727_2
tctatatctattggtacttttgcaatttctaacatatctaaaagaaataatttgaagataatgtagcccatgatgtttttctccagygagagctgcttttcctggcatcaagaaatgggaaaaataatttattgacaacagtctgtgaaatttcctttttccttatctcttgaggccaagtctccagctagcagggtatttcagaaataatcttagaagtaatatttaaaagaaatagccacaacagctgctctgttcccatggaaatgcatgggaacagttcaagtgagcatccctttrcaatgcagtcatgtgtttgtcctcagacagtaagcagaggtcaggcatctcrtcctctccattgtctgcagggggtatgactggcatggaagatgaaatcccttttgttctggaggttctctacttttctcttggaaaaataagtgaaacagaaatgtcatccaagaggtaagcaggtagctggggcaacttggggctccaggctgcccggagaaggtgtggatgccccatccctgcaggtgttcaaggccaggttggatggagcctgggcagcctgatctgctgggttgcaaccctgcc

SEQ ID NO: 4638 - DNA, 600 bp, Chicken  19866894107727_3
tgaagataatgtagcccatgatgtttttctccagygagagctgcttttcctggcatcaagaaatgggaaaaataatttattgacaacagtctgtgaaatttcctttttccttatctcttgaggccaagtctccagctagcagggtatttcagaaataatcttagaagtaatatttaaaagaaatagccacaacagctgctctgttcccatggaaatgcatgggaacagttcaagtgagcatccctttrcaatgcagtcatgtgtttgtcctcagacagtaagcagaggtcaggcatctcrtcctctccattgtctgcagggggtatgactggcatggaagatgaaatcccttttgttctggaggttctctacttttctcttggaaaaataagtgaaacagaaatgtcatccaagaggtaagcaggtagctggggcaacttggggctccaggctgcccggagaaggtgtggatgccccatccctgcaggtgttcaaggccaggttggatggagcctgggcagcctgatctgctgggttgcaaccctgcccatggcaacagattgtaactagatgatcatccaggtcccttccaacccaaag

SEQ ID NO: 4639 - DNA, 600 bp, Chicken  19866894107730_1
ggaagtactccgcaaattctgtgagtctcagaaccagcgatctgctaactctccagatgtgcaagagaagaaggtaacacagatagtggtagttaaacccggtactgtatgaccagccatagactttaggtcaaaattaagcatcctaaaaagagcagaagtaactgcttctaacatttatgcatcagaatctctgctaacttccataattaaagtaacccaaattacacaactgaactccaaccacaatcacattactgtaggacatccgtgcagagataataatgcaatgtcaaaatmatttgtaaacacctgataaaatggatcactccacgttttgttcaggtctggaggtttaccactgtcaatattaacagtagcacaatactccagagacttccattctgtgaggtggtcatagcattccagagatgcaagttcccagaagtctttctctgcttcagttggctccccgtcttcccaatcttctttggagagtgcctagggaatcaatataagagagaggaaggttcttagagcttytaaagcttcatgtcagyctctgatcaactcacaagtaacttcagaacaattgctcac

SEQ ID NO: 4640 - DNA, 594 bp, Chicken  19866894107730_2
ccacaatcacattactgtaggacatccgtgcagagataataatgcaatgtcaaaatmatttgtaaacacctgataaaatggatcactccacgttttgttcaggtctggaggtttaccactgtcaatattaacagtagcacaatactccagagacttccattctgtgaggtggtcatagcattccagagatgcaagttcccagaagtctttctctgcttcagttggctccccgtcttcccaatcttctttggagagtgcctagggaatcaatataagagagaggaaggttcttagagcttytaaagcttcatgtcagyctctgatcaactcacaagtaacttcagaacaattgctcacctctcataaaaacatttatccatttaccagaatgcgatggcaacgttaaatgccaaaaactgaaactagtcaggatttaaataacatttatataaaaatttatttcagatagccatcttcagtaaacctgcacttttgaaaagtctttaaaagaaagatgagagttccttcttcgtttgtacccacaataactgagatctgccatgaacacaggcagttgctctctcagaggcagca

SEQ ID NO: 4641 - DNA, 577 bp, Chicken  19866894107730_3
taggacatccgtgcagagataataatgcaatgtcaaaatmatttgtaaacacctgataaaatggatcactccacgttttgttcaggtctggaggtttaccactgtcaatattaacagtagcacaatactccagagacttccattctgtgaggtggtcatagcattccagagatgcaagttcccagaagtctttctctgcttcagttggctccccgtcttcccaatcttctttggagagtgcctagggaatcaatataagagagaggaaggttcttagagcttytaaagcttcatgtcagyctctgatcaactcacaagtaacttcagaacaattgctcacctctcataaaaacatttatccatttaccagaatgcgatggcaacgttaaatgccaaaaactgaaactagtcaggatttaaataacatttatataaaaatttatttcagatagccatcttcagtaaacctgcacttttgaaaagtctttaaaagaaagatgagagttccttcttcgtttgtacccacaataactgagatctgccatgaacacaggcagttgctctctcagaggcagca

SEQ ID NO: 4642 - DNA, 600 bp, Chicken  19866894107733_1
acatgaaatagcagatattttcaggcctgtatttgtaaaattatctcctgtcatcataatttactgctcataatgatttttctgacacattttagtagcaagatccactaggtactcatttctatctttgatacagttaagtatattgtacaaaatcctgtggataatattattaatatctctgtagcataatgttcaggggagtttccaacaagtaatgttatctgtcatttcaggatatgtaccatctaggaatcgttcttgtggaaagggcaagacaagatgctcttctaagacaaygcgactaataccacctgggatttcrgggagctcctgcaggggcccatcgtggctgccgtctgcccattctgatggactctgtgaggatccatatcaggctgtgctggagaagaaagcctccagcaactgccatggcactggcaaggcagggggctgtgctctcaatgtgccttctccagatgctgggcatatggtcttgtcctgagagctccaagataatttggcttagctcgctcagtgaaggatgcagctggagcagagagtgtggagagagacttactgcacttccagataacagcc

SEQ ID NO: 4643 - DNA, 583 bp, Chicken  19866894107733_2
cctgtatttgtaaaattatctcctgtcatcataatttactgctcataatgatttttctgacacattttagtagcaagatccactaggtactcatttctatctttgatacagttaagtatattgtacaaaatcctgtggataatattattaatatctctgtagcataatgttcaggggagtttccaacaagtaatgttatctgtcatttcaggatatgtaccatctaggaatcgttcttgtggaaagggcaagacaagatgctcttctaagacaaygcgactaataccacctgggatttcrgggagctcctgcaggggcccatcgtggctgccgtctgcccattctgatggactctgtgaggatccatatcaggctgtgctggagaagaaagcctccagcaactgccatggcactggcaaggcagggggctgtgctctcaatgtgccttctccagatgctgggcatatggtcttgtcctgagagctccaagataatttggcttagctcgctcagtgaaggatgcagctggagcagagagtgtggagagagacttactgcacttccagataacagccttgctgag

SEQ ID NO: 4644 - DNA, 600 bp, Chicken  19866894107737_1
gggggacaagaggggtctagctaagtggaaagtcgaccactgtgcagatgtgtacgttccacagaagtggtaggatttggacccagtcgggaggagagatacccagtgtacaggaatgccatctgattggaggatctgctttgaaaacggttgctcttctaagattgccgtgttagaaccgaggctgctgtggcatgaaagagaaagcgtttgaggtctgctggttcacatctatgtttgactcagattttcacagcctttacagtaagcggtgatttcatggcttcctggaagtgtctygttataggagaggctttagcttttgttcctgtgttatctgaagttttttgtctcgcttgccggtagcaggctcacatacagcatgtgatccaaagcggtgggggaaactgtccccactcctcagatcctttgttgatgtagagcccaaaggcttcgttctggggttttgaaaatgctcactgtcgtggtggacattacatcagctgtttatcttaacctgcattcacaagtgtacctctgcagatcatcatccattaagccttgagtcagtgtcttgttttcttacttgaattatttgac

SEQ ID NO: 4645 - DNA, 600 bp, Chicken  19866894107737_10
atgtcagtgtacgtcagaaaacagaactgcctatcagtgtttgtggcctcactgaatgaatgctgcttgataatggcttggttaactcgggtctctggggactgaactagctgacatccattgccagtattgtacttaacttgtgtgctttcatttcatgcagctttgtyrcactgctagaatggtggggaaaaattagaatagaaaaaagtgacttaagagagtcaaccaaaattaagtgtaattttgatgagggatttcttttctttgtgatgtttcattgctttctytcattttgtmtcttctttgatctttacagaaggatgattatgtttcactgtgaaaagctcaagatgtccagcaggcagtaggagcatagactggagctggaaggactctgtgcaggaaatgacattgtcagacctacagagcactcagtaaggtgcatacaatcactgtttattttgccatcctttggaggtattaggaggactgcaaatactatcaaagtccatctctgaagggattgatgtagtatttataattatagttatcaatccctgcctgtactctttctwtcaggaaggcttttttctgcct

SEQ ID NO: 4646 - DNA, 584 bp, Chicken  19866894107737_11
cattgctttctytcattttgtmtcttctttgatctttacagaaggatgattatgtttcactgtgaaaagctcaagatgtccagcaggcagtaggagcatagactggagctggaaggactctgtgcaggaaatgacattgtcagacctacagagcactcagtaaggtgcatacaatcactgtttattttgccatcctttggaggtattaggaggactgcaaatactatcaaagtccatctctgaagggattgatgtagtatttataattatagttatcaatccctgcctgtactctttctwtcaggaaggcttttttctgcctcttctcacacttgttgtccagagagatggctgcagccctctgggttcagtgtgagcagctcctgccacagtacgatggttcccatcctgaacgctttgtgcaaagataggaaagagggtgtgagtaaatgggcagcactcccagtgagtggagatcacctctggagtggtgcaaggatgtgctgagcaacgttttgcagtgacctggaaaaggggcatggtgcctgactgtcacaatgtttccagctggtttaacattattt

SEQ ID NO: 4647 - DNA, 600 bp, Chicken  19866894107737_2
acagtgcaaagcacagacaaatattctccctgtaaccatacagattaatcccaaatcactaaatgtaggaaatctttcctctgaaaatagaagaaaggcactttctcactcacagacacaagctcataacatgtgcgattcagcatcccagttgaatctcctagagcagcatcttagctgttactgagtttgtctcatgactgatggcaacgtgtgattctctgcatctggttttcctggagagttcaggctgtttgtgcagggcttcaatactaagagctttctttgattagctggccwgaaatctggaggaaatcatctgtcccatccccctgcctgtctacctgtcaaaagtttctyryagracttcagatattactcctctgtaggattgggtatggagcagatcctttgggtgtgagctgaggaggaattctctgcttctgtgcttatgcagggagcacctctgggattcttctgtgggtaaacgtttgtgctctgtgcctttcctcctggtccttaagttgctgtacttcaacagaagcccttaagtggaactctctggatgttatttggatgtttgagggttttagtcacagg

SEQ ID NO: 4648 - DNA, 600 bp, Chicken  19866894107737_3
aaatgtaggaaatctttcctctgaaaatagaagaaaggcactttctcactcacagacacaagctcataacatgtgcgattcagcatcccagttgaatctcctagagcagcatcttagctgttactgagtttgtctcatgactgatggcaacgtgtgattctctgcatctggttttcctggagagttcaggctgtttgtgcagggcttcaatactaagagctttctttgattagctggccwgaaatctggaggaaatcatctgtcccatccccctgcctgtctacctgtcaaaagtttctyryagracttcagatattactcctctgtaggattgggtatggagcagatcctttgggtgtgagctgaggaggaattctctgcttctgtgcttatgcagggagcacctctgggattcttctgtgggtaaacgtttgtgctctgtgcctttcctcctggtccttaagttgctgtacttcaacagaagcccttaagtggaactctctggatgttatttggatgtttgagggttttagtcacaggtttttctttttatcaacgcattaatgagagacatctttggtcactcggtgaactttacaa

SEQ ID NO: 4649 - DNA, 600 bp, Chicken  19866894107737_4
aatgtaggaaatctttcctctgaaaatagaagaaaggcactttctcactcacagacacaagctcataacatgtgcgattcagcatcccagttgaatctcctagagcagcatcttagctgttactgagtttgtctcatgactgatggcaacgtgtgattctctgcatctggttttcctggagagttcaggctgtttgtgcagggcttcaatactaagagctttctttgattagctggccwgaaatctggaggaaatcatctgtcccatccccctgcctgtctacctgtcaaaagtttctyryagracttcagatattactcctctgtaggattgggtatggagcagatcctttgggtgtgagctgaggaggaattctctgcttctgtgcttatgcagggagcacctctgggattcttctgtgggtaaacgtttgtgctctgtgcctttcctcctggtccttaagttgctgtacttcaacagaagcccttaagtggaactctctggatgttatttggatgtttgagggttttagtcacaggtttttctttttatcaacgcattaatgagagacatctttggtcactcggtgaactttacaaa

SEQ ID NO: 4650 - DNA, 600 bp, Chicken  19866894107737_5
atgtaggaaatctttcctctgaaaatagaagaaaggcactttctcactcacagacacaagctcataacatgtgcgattcagcatcccagttgaatctcctagagcagcatcttagctgttactgagtttgtctcatgactgatggcaacgtgtgattctctgcatctggttttcctggagagttcaggctgtttgtgcagggcttcaatactaagagctttctttgattagctggccwgaaatctggaggaaatcatctgtcccatccccctgcctgtctacctgtcaaaagtttctyryagracttcagatattactcctctgtaggattgggtatggagcagatcctttgggtgtgagctgaggaggaattctctgcttctgtgcttatgcagggagcacctctgggattcttctgtgggtaaacgtttgtgctctgtgcctttcctcctggtccttaagttgctgtacttcaacagaagcccttaagtggaactctctggatgttatttggatgtttgagggttttagtcacaggtttttctttttatcaacgcattaatgagagacatctttggtcactcggtgaactttacaaat

SEQ ID NO: 4651 - DNA, 600 bp, Chicken  19866894107737_6
taggaaatctttcctctgaaaatagaagaaaggcactttctcactcacagacacaagctcataacatgtgcgattcagcatcccagttgaatctcctagagcagcatcttagctgttactgagtttgtctcatgactgatggcaacgtgtgattctctgcatctggttttcctggagagttcaggctgtttgtgcagggcttcaatactaagagctttctttgattagctggccwgaaatctggaggaaatcatctgtcccatccccctgcctgtctacctgtcaaaagtttctyryagracttcagatattactcctctgtaggattgggtatggagcagatcctttgggtgtgagctgaggaggaattctctgcttctgtgcttatgcagggagcacctctgggattcttctgtgggtaaacgtttgtgctctgtgcctttcctcctggtccttaagttgctgtacttcaacagaagcccttaagtggaactctctggatgttatttggatgtttgagggttttagtcacaggtttttctttttatcaacgcattaatgagagacatctttggtcactcggtgaactttacaaatcat

SEQ ID NO: 4652 - DNA, 600 bp, Chicken  19866894107737_7
gacatctttggtcactcggtgaactttacaaatcatgagtgttttcaatgctgtcatgtaagtggaaaaaaattactcatagtttttggatgattagccaaatatccccaaaggacgtttgccacacataatgtcagtgtacgtcagaaaacagaactgcctatcagtgtttgtggcctcactgaatgaatgctgcttgataatggcttggttaactcgggtctctggggactgaactagctgacatccattgccagtattgtacttaacttgtgtgctttcatttcatgcagctttgtyrcactgctagaatggtggggaaaaattagaatagaaaaaagtgacttaagagagtcaaccaaaattaagtgtaattttgatgagggatttcttttctttgtgatgtttcattgctttctytcattttgtmtcttctttgatctttacagaaggatgattatgtttcactgtgaaaagctcaagatgtccagcaggcagtaggagcatagactggagctggaaggactctgtgcaggaaatgacattgtcagacctacagagcactcagtaaggtgcatacaatcactgtttattttgcca

SEQ ID NO: 4653 - DNA, 600 bp, Chicken  19866894107737_8
acatctttggtcactcggtgaactttacaaatcatgagtgttttcaatgctgtcatgtaagtggaaaaaaattactcatagtttttggatgattagccaaatatccccaaaggacgtttgccacacataatgtcagtgtacgtcagaaaacagaactgcctatcagtgtttgtggcctcactgaatgaatgctgcttgataatggcttggttaactcgggtctctggggactgaactagctgacatccattgccagtattgtacttaacttgtgtgctttcatttcatgcagctttgtyrcactgctagaatggtggggaaaaattagaatagaaaaaagtgacttaagagagtcaaccaaaattaagtgtaattttgatgagggatttcttttctttgtgatgtttcattgctttctytcattttgtmtcttctttgatctttacagaaggatgattatgtttcactgtgaaaagctcaagatgtccagcaggcagtaggagcatagactggagctggaaggactctgtgcaggaaatgacattgtcagacctacagagcactcagtaaggtgcatacaatcactgtttattttgccat

SEQ ID NO: 4654 - DNA, 600 bp, Chicken  19866894107737_9
gccacacataatgtcagtgtacgtcagaaaacagaactgcctatcagtgtttgtggcctcactgaatgaatgctgcttgataatggcttggttaactcgggtctctggggactgaactagctgacatccattgccagtattgtacttaacttgtgtgctttcatttcatgcagctttgtyrcactgctagaatggtggggaaaaattagaatagaaaaaagtgacttaagagagtcaaccaaaattaagtgtaattttgatgagggatttcttttctttgtgatgtttcattgctttctytcattttgtmtcttctttgatctttacagaaggatgattatgtttcactgtgaaaagctcaagatgtccagcaggcagtaggagcatagactggagctggaaggactctgtgcaggaaatgacattgtcagacctacagagcactcagtaaggtgcatacaatcactgtttattttgccatcctttggaggtattaggaggactgcaaatactatcaaagtccatctctgaagggattgatgtagtatttataattatagttatcaatccctgcctgtactctttctwtcaggaaggctt

SEQ ID NO: 4655 - DNA, 600 bp, Chicken  19866894107745_1
cacagtgtcagcataattactaagaccccatacatcaggagcattttaaatctaaacacacactacccagcttaaacctaaatgatctgatgaggggcacgtaggattaagatcatcatccactacttgctctgcatattcagaatcagagaaaagaaaaaataggagggattctaagagtgaaagaacgtctactagatttctattcaaagtaggagcctttaatctcagtcacagatacaagcttcccacacagcaattaattaaactgtcttgttgctcaaatgggagttagaaagratatagcagaacaagctttaactagaactgttgactcaaaagaacagaaggcagtgggaaactcgagagtggaatgcaatcctgtttgatgaacacatgctcactggtatcccacacactgctggtatggaagtcactgcaaaaacaatggcaactgacatactccttggcagcacttcagctgtctctttccttctgagtactcactcacctgtttttcctaaggcaggagacaataaagcatcacgtttcagaatgaacaatgttacagaaagcagggacacatgtttacagctacag

SEQ ID NO: 4656 - DNA, 600 bp, Chicken  19866894107753_1
ggggctcaaatgtgttctgtaaactcctttatgaatagattttcattctctcaggacagtgaaatataaatgaaaaacagtctactatcaaacatgccacaagttcttgtgactttttaaaatgtaaactttctgtttttgctgattgtcaaatactgagttttagggtgtgttttcattgaaggtgctgattttggtttgtgggttgtttctgttgttggtggtgattttttatgtttttttgtttgtttgtttgtttgtttcatttttgtttgttgatgtttgagtccagaaacacakgtatttattttgttcatcaattattgcagaaagtattcactttttccagtcttctagactttgctttaccagtaaaaatagttcatatgcgtagcctgatttatttcttttataattaactatcaaaatcagtattttaaaaatttgtgttagtaagaagaaaatctagttaggttcagagggacatgatgtaccctgtgtttgcagaatattaattgtgactggaataaatattgattgtgctctttgtcaaatgactgaaaaaagtatctgcattgcttaaacacaagttgcttgatc

SEQ ID NO: 4657 - DNA, 600 bp, Chicken  19866894107757_1
aaaaagcaggctaaaatgcatataatagcagaaatagtgcagctgtcctgagctgccagccttctttttcttgctctgactcttgaggatagtagcagctcccctatttctcctttcccagcaatttctttgcatttacaaggaaaaaaggcaagggagcttttcctgcctcctcaatgatggatggtcctttctgtatgtactcagagatgactaaaggtttatttttaggactgaaattcatgaggtgtgattaattatcagcagcatcctaagtctggattcagcatcaggcaaggraactccaaaggcagggagagaagcacagcaatgcttcagacaaacacaagctgacagcagtaggcttcarcttggttctgagcctgtggtacaacatgatggggctgtccctttcacctcagactgatgcctcagacatcaaaggtcacagttggactgataaacaagatgctttactctgcagattctttgctctggagaaggggaagaaaggctgataaagccctcctcaactaaagagaaggctttgctttctgagcaagtcacatgcactcatagaggtcagagtgctaataaaag

SEQ ID NO: 4658 - DNA, 600 bp, Chicken  19866894107757_2
ttgctctgactcttgaggatagtagcagctcccctatttctcctttcccagcaatttctttgcatttacaaggaaaaaaggcaagggagcttttcctgcctcctcaatgatggatggtcctttctgtatgtactcagagatgactaaaggtttatttttaggactgaaattcatgaggtgtgattaattatcagcagcatcctaagtctggattcagcatcaggcaaggraactccaaaggcagggagagaagcacagcaatgcttcagacaaacacaagctgacagcagtaggcttcarcttggttctgagcctgtggtacaacatgatggggctgtccctttcacctcagactgatgcctcagacatcaaaggtcacagttggactgataaacaagatgctttactctgcagattctttgctctggagaaggggaagaaaggctgataaagccctcctcaactaaagagaaggctttgctttctgagcaagtcacatgcactcatagaggtcagagtgctaataaaagcgtgactgccacgttaccagtgcttgcgaaaataaacctaatgacagtgttgactgaaatagcgaaggtg

SEQ ID NO: 4659 - DNA, 600 bp, Chicken  19866894107759_1
tagcaagtaggaacgtagtctttgcaagtttatagagaaacaaaagtctggatctacaaagaaatatttaattctgcggaatgttagaaatgtaccccacagttcacggcacaattaagaatgtttaatataaactaactcagaaataaagtctaaaggggacagtattaataaaaccaaggcacagtttattagttaaagggctttttggtttggcagtaaatctgtttcatcagaaagagctgccaccatcaaattctattctctttacactaaatctcagggtttctttgccttagragtgggtcaagcacacaccacacagtaagaagcagaagccttacttcacacagcactcttagccaacacctgagtatcaagatgagaccttagactacaggaggctaagagttgccttgagaagtgtgtatgttctgctctggggaagcagagcaaaaccacaaataagatttttcaaagcttcttgatttttaatagatgatatgatagattgatgactcctaaacatgctaaacttagtggagaggtctctctaattcaccacccactatgacatgactgaatctccccatgttgtct

SEQ ID NO: 4660 - DNA, 600 bp, Chicken  19866894107760_1
ctgtagctctgaagtgccctgagaggtatttgaagatggtacttttcctcagctcacgtgtgattccctctttgtgttagctgtgaagctccccagcctcttgcatggctcagattaatgttctcgtttgactgagagaataaactgccttcgaactggaaactttctcagtgtgcagtgctttgtctttctgtagcagctgttacttctcctgtcacatttctgtaagatgtagatgtgttttctgagctttctgatctttggtatttggagggatggtggtcactggggtgatcctgygttkttaattgatgcttttctgttttgatgcttcagcacttggaccgggcctgcatggagcccagcacagagtatctcctcagtcctcatctccatccagtctttgatgactgagaacccgtatcacaatgaacccggctttgagcaggtgagagttggagatggttcatctttagtttttcccttcactccacaccttgacctggtaacaaaatacaatctggaaatggggacaaagcgagactgtgtcacttagtttttttccagcttgctctgcctctggtcagagctggaggggat

SEQ ID NO: 4661 - DNA, 600 bp, Chicken  19866894107760_2
agctctgaagtgccctgagaggtatttgaagatggtacttttcctcagctcacgtgtgattccctctttgtgttagctgtgaagctccccagcctcttgcatggctcagattaatgttctcgtttgactgagagaataaactgccttcgaactggaaactttctcagtgtgcagtgctttgtctttctgtagcagctgttacttctcctgtcacatttctgtaagatgtagatgtgttttctgagctttctgatctttggtatttggagggatggtggtcactggggtgatcctgygttkttaattgatgcttttctgttttgatgcttcagcacttggaccgggcctgcatggagcccagcacagagtatctcctcagtcctcatctccatccagtctttgatgactgagaacccgtatcacaatgaacccggctttgagcaggtgagagttggagatggttcatctttagtttttcccttcactccacaccttgacctggtaacaaaatacaatctggaaatggggacaaagcgagactgtgtcacttagtttttttccagcttgctctgcctctggtcagagctggaggggataaat

SEQ ID NO: 4662 - DNA, 599 bp, Chicken  19866894107763_1
  misc_feature (1)..(166): n is any nucleotide
nnnnnnnnnnnnnnnnnnnnnnnnnnnnnnnnnnnnnnnnnnnnnnnnnnnnnnnnnnnnnnnnnnnnnnnnnnnnnnnnnnnnnnnnnnnnnnnnnnnnnnnnnnnnnnnnnnnnnnnnnnnnnnnnnnnnnnnnnnnnnnnnnnnnnnnnnnnnnnnnnnnnnnttcacctcttcattctgtttctcaatgactcagttagcttcaaaatcagttttaaaattacagcttattttctagatggaatactaggtagtcagatgttttgaaagaatatttaagtgctacattgtgtaacrcaattatagtgctgcattggatgcagtgacagtattctgactctttttgatgagaatactgaaaatgtttgcaagctcctcctcactgtaaggtgtggagggacacccactggtgaccagtccgatggacatctcctgttcttggctacctgtgcttcactctgtcttcattcttacagaggatcacaatggatgttttcacctgcatatcatctcctttcccccttcccacagcacacagagctctacattttcactctgttacttgcactttagttaaacttggttatttccaagtg

SEQ ID NO: 4663 - DNA, 600 bp, Chicken  19866894107765_1
caaaatgaaacaggacgagacagcaacccagacagaatttacgcagaatctgaagcagagcaagtgatcattaacacattttgcataggttccatagcatgtaggagctacctgcaggtttccaaggtgcaattcttggtccatgctctatgagatccgccaaccaggagactgcctctggctaccagatgcagcgtgacagctgaaatttgctggcccaattctgaataaataacaaaatgattttgcactttttctgtgtttttgtctcactgactcaaaaaagatggcctgaccccyaggacgtgcttcgaggcttttggttttgtgttttaaaagtgctgaagggcaatcatgccacagatgcaatggtacrattattaatcattagttcttcatagttattgaattagatacttgggagtagcagttttcttcctacactaattatggtgcttattgtccagatttgttatgctttaagttagttgactgaagtgcctagggaactgatatttctgatcctttttttaaaatcagaagataaatggacaatcatacaaaataagtctgctctgatattaacccacattcaagaaa

SEQ ID NO: 4664 - DNA, 600 bp, Chicken  19866894107765_2
cattttgcataggttccatagcatgtaggagctacctgcaggtttccaaggtgcaattcttggtccatgctctatgagatccgccaaccaggagactgcctctggctaccagatgcagcgtgacagctgaaatttgctggcccaattctgaataaataacaaaatgattttgcactttttctgtgtttttgtctcactgactcaaaaaagatggcctgaccccyaggacgtgcttcgaggcttttggttttgtgttttaaaagtgctgaagggcaatcatgccacagatgcaatggtacrattattaatcattagttcttcatagttattgaattagatacttgggagtagcagttttcttcctacactaattatggtgcttattgtccagatttgttatgctttaagttagttgactgaagtgcctagggaactgatatttctgatcctttttttaaaatcagaagataaatggacaatcatacaaaataagtctgctctgatattaacccacattcaagaaaaatacttcgcaaatacttagctgtttcaaagctttagttgtttagtttagctttttcctgacgctcagtaaaaacc

SEQ ID NO: 4665 - DNA, 600 bp, Chicken  19866894107766_1
ccatagataaatgaattgagaaaaaaaacattccaatggactacacaaaaaagtctgtcttgactgacagcaaaaagttgttctactttcggcacatctcatcttagagggcatggtggtgctgggtcaacggttggatttgatggtcttggagatactttccaaccttaaggatgctgattcaatgaaatggcttttcttctcctgcttttgaaacttggaagtcaggctcaccaaactgccaaatctagacataggtgccagaacaatactgattcacagtcccgggaggtgttaaasaaatgtttagatgctgtactgaaggacatggtttagtggaaataatggtgataggtgaacggttggacggttggatgatcttagaggtcttttccaaccttggtaattctatgattctgtgattttactgataactgaaagactgaaattctgacttcctactgaacttcaacacatcgggtcatttgaatcacagggctacagagttctgcagagaggccacagaatggcctggggctcctgtaggagttgagttatgccttagctctctttaaccagctataggacctgacaccagca

SEQ ID NO: 4666 - DNA, 599 bp, Chicken  19866894107774_1
  misc_feature (1)..(93): n is any nucleotide
nnnnnnnnnnnnnnnnnnnnnnnnnnnnnnnnnnnnnnnnnnnnnnnnnnnnnnnnnnnnnnnnnnnnnnnnnnnnnnnnnnnnnnnnnnnnnagctgagcagtgggaggcagcctggaaatgctgtttccccaaaataaaataaaataaaataaaataaaataaatggattccatgccttcctttggacaaactcagccagattttttctgcaaattaaactagctcagttactgagttaacacgagatacaatacgtctgagagccagcagagaaagaatgtgtccgtcaagttgtcrcagcgtttgtacatcacttccaaatcttgaaaataaaacaacatcggccccaacagggggagaaccgggctggggtgaaggaaacccacttcaggagctgctattccacccccaaatccccttgtcgtaacagcagtacttgcaacagatctgcgggctgtctgtacacacacccctttccccccagttaagcctyttgctctcttggtctattaacaggaatttcacaagggctcaggttggcattctgtgcaygagggtttcagtgcagcaggatcccaccctgatcccagtgaggc

SEQ ID NO: 4667 - DNA, 600 bp, Chicken  19866894107774_2
agccagattttttctgcaaattaaactagctcagttactgagttaacacgagatacaatacgtctgagagccagcagagaaagaatgtgtccgtcaagttgtcrcagcgtttgtacatcacttccaaatcttgaaaataaaacaacatcggccccaacagggggagaaccgggctggggtgaaggaaacccacttcaggagctgctattccacccccaaatccccttgtcgtaacagcagtacttgcaacagatctgcgggctgtctgtacacacacccctttccccccagttaagcctyttgctctcttggtctattaacaggaatttcacaagggctcaggttggcattctgtgcaygagggtttcagtgcagcaggatcccaccctgatcccagtgaggcccatggctgatggcagcacggagcatccgcacagcgcgttcggaaatgaaatctcatcaaagcagagcaaactcttgcagcgtaatgatcagtatttttatttgcacacacttgcttggaaactacaattcatattcaacagaagtgttccatgcaaacaaagactgaagatctcgagggataaggaaaaaaaaaga

SEQ ID NO: 4668 - DNA, 600 bp, Chicken  19866894107774_3
acgtctgagagccagcagagaaagaatgtgtccgtcaagttgtcrcagcgtttgtacatcacttccaaatcttgaaaataaaacaacatcggccccaacagggggagaaccgggctggggtgaaggaaacccacttcaggagctgctattccacccccaaatccccttgtcgtaacagcagtacttgcaacagatctgcgggctgtctgtacacacacccctttccccccagttaagcctyttgctctcttggtctattaacaggaatttcacaagggctcaggttggcattctgtgcaygagggtttcagtgcagcaggatcccaccctgatcccagtgaggcccatggctgatggcagcacggagcatccgcacagcgcgttcggaaatgaaatctcatcaaagcagagcaaactcttgcagcgtaatgatcagtatttttatttgcacacacttgcttggaaactacaattcatattcaacagaagtgttccatgcaaacaaagactgaagatctcgagggataaggaaaaaaaaagaaagatgctgtaatttatacaccagttttgcccactacacctccagtgtggtttttcagg

SEQ ID NO: 4669 - DNA, 600 bp, Chicken  19866894107782_1
ccccgtctgctccctccggcgggttggagccatcagagcaagtgagtgctgtgcacaaacagcattcagtccctgccccggcgccgctccctcctcctggttggctgcagcttctctctgaagaagtggttcatcctcgccaggcaggggttgttgctgtgctgctgggcagggaggccgggatgcgcaaatgggatgaagcagaccatgaagccctgcacgtactctgcagctgggatgagaaattcagcgggtttcagcgccctgagatcccgaatgggaggatctggggctgcgagyggtgcccatagcagtgctttgtgccatccccrtttggggaaacacccsgatgccascaaggctgtgatgagggaatgstgccttccttgcagcctcgtcaaattcggtgccacctctgtcgtggtgcgcgccggcccaagggctgccacagcatcacctgtgcttcatgggccccacgtccctgctgtgggatggcggggataaaaacgtgccacgcacatggctgggagctgaacacgtccccgtgggtgctgtccccattgctcactggctctcctctccccgccaggtcccccacta

SEQ ID NO: 4670 - DNA, 600 bp, Chicken  19866894107782_2
tcagagcaagtgagtgctgtgcacaaacagcattcagtccctgccccggcgccgctccctcctcctggttggctgcagcttctctctgaagaagtggttcatcctcgccaggcaggggttgttgctgtgctgctgggcagggaggccgggatgcgcaaatgggatgaagcagaccatgaagccctgcacgtactctgcagctgggatgagaaattcagcgggtttcagcgccctgagatcccgaatgggaggatctggggctgcgagyggtgcccatagcagtgctttgtgccatccccrtttggggaaacacccsgatgccascaaggctgtgatgagggaatgstgccttccttgcagcctcgtcaaattcggtgccacctctgtcgtggtgcgcgccggcccaagggctgccacagcatcacctgtgcttcatgggccccacgtccctgctgtgggatggcggggataaaaacgtgccacgcacatggctgggagctgaacacgtccccgtgggtgctgtccccattgctcactggctctcctctccccgccaggtcccccactatgagttcctggagctgaagctggagcggcagc

SEQ ID NO: 4671 - DNA, 600 bp, Chicken  19866894107782_3
ctgtgcacaaacagcattcagtccctgccccggcgccgctccctcctcctggttggctgcagcttctctctgaagaagtggttcatcctcgccaggcaggggttgttgctgtgctgctgggcagggaggccgggatgcgcaaatgggatgaagcagaccatgaagccctgcacgtactctgcagctgggatgagaaattcagcgggtttcagcgccctgagatcccgaatgggaggatctggggctgcgagyggtgcccatagcagtgctttgtgccatccccrtttggggaaacacccsgatgccascaaggctgtgatgagggaatgstgccttccttgcagcctcgtcaaattcggtgccacctctgtcgtggtgcgcgccggcccaagggctgccacagcatcacctgtgcttcatgggccccacgtccctgctgtgggatggcggggataaaaacgtgccacgcacatggctgggagctgaacacgtccccgtgggtgctgtccccattgctcactggctctcctctccccgccaggtcccccactatgagttcctggagctgaagctggagcggcagcgggcagcgtacctccg

SEQ ID NO: 4672 - DNA, 600 bp, Chicken  19866894107782_4
aaacagcattcagtccctgccccggcgccgctccctcctcctggttggctgcagcttctctctgaagaagtggttcatcctcgccaggcaggggttgttgctgtgctgctgggcagggaggccgggatgcgcaaatgggatgaagcagaccatgaagccctgcacgtactctgcagctgggatgagaaattcagcgggtttcagcgccctgagatcccgaatgggaggatctggggctgcgagyggtgcccatagcagtgctttgtgccatccccrtttggggaaacacccsgatgccascaaggctgtgatgagggaatgstgccttccttgcagcctcgtcaaattcggtgccacctctgtcgtggtgcgcgccggcccaagggctgccacagcatcacctgtgcttcatgggccccacgtccctgctgtgggatggcggggataaaaacgtgccacgcacatggctgggagctgaacacgtccccgtgggtgctgtccccattgctcactggctctcctctccccgccaggtcccccactatgagttcctggagctgaagctggagcggcagcgggcagcgtacctccgtgacaaac

SEQ ID NO: 4673 - DNA, 587 bp, Chicken  19866894107782_5
cggcgccgctccctcctcctggttggctgcagcttctctctgaagaagtggttcatcctcgccaggcaggggttgttgctgtgctgctgggcagggaggccgggatgcgcaaatgggatgaagcagaccatgaagccctgcacgtactctgcagctgggatgagaaattcagcgggtttcagcgccctgagatcccgaatgggaggatctggggctgcgagyggtgcccatagcagtgctttgtgccatccccrtttggggaaacacccsgatgccascaaggctgtgatgagggaatgstgccttccttgcagcctcgtcaaattcggtgccacctctgtcgtggtgcgcgccggcccaagggctgccacagcatcacctgtgcttcatgggccccacgtccctgctgtgggatggcggggataaaaacgtgccacgcacatggctgggagctgaacacgtccccgtgggtgctgtccccattgctcactggctctcctctccccgccaggtcccccactatgagttcctggagctgaagctggagcggcagcgggcagcgtacctccgtgacaaactgcacaagg

SEQ ID NO: 4674 - DNA, 600 bp, Chicken  19866894107786_1
cgccctgtcacggagcaccgccgggcgccatcgtcctccgcgtggcagcggtgatctgacgccgaggcggcggagccaggagcagcggcggaccaccccctgcgtgtctaaaacctgccactacggagcgcggcgagcagggcgagcgtgcaggacgcggggcggcgcggcggcttgcgcggggcgtaggatctctgcccaacagtaggcctgtttacctgtcggttgcctcccggacaacgtgtctccccatggtctgcagcaggcagaaaggcccggtgagaaatacggtggtgattragagtccctgcctgaagaagtggcaggtcaagtctgcggctgcagcgagtgcctgagtctgctggtgccggagaagggaggcgggaactgcaggtgcgtgaggtgcgagcaggtggatgatctgctcagtgtggtggctgcactccaggaggaggttgagaggttagggagtatcagagtgtgagcaggagacagactcgtggtgtaactctctgcgagacagacatgggggcgatactcaccaggcagcggtggaccccctgccctgccattgccgagcagagcgaggcagtttgagag

SEQ ID NO: 4675 - DNA, 599 bp, Chicken  19866894107789_1
  misc_feature (1)..(58): n is any nucleotide
nnnnnnnnnnnnnnnnnnnnnnnnnnnnnnnnnnnnnnnnnnnnnnnnnnnnnnnnnncggcaggcagaaaggcccggtgagaaatacggtggtgattgagagtccctgcctgaagaagtggcaggtcaagtctgcggctgcagcgagtgcctgagtctgttggtgccggagaagggaggcgggaactgcaggtgcgtgaggtgcgagcaggtggatgatctgctcagtgtggtggctgcactccaggaggaggttgagaggttagggagtatcagagtgtgagcaggagacagactcgwggtgtaactctctgcgagacagacgtgagggcgatactcaccaggcagcagtcatgttcttcatccccctgaatgtaatcctcctcattgaccttatctgcaggaagccttccccagaaccagagaatgctgagtggcagggaatatcgggaggtttaggaaagatctaagaagcgtggggrcccccggtgccatgggattttactcttgaacacctgtgggacccygagaaacgaagcaagtatttaagtcaggggtggtgyggcttaggtagacctgaggagggcttatttggggct

SEQ ID NO: 4676 - DNA, 600 bp, Chicken  19866894107789_2
ggaactgcaggtgcgtgaggtgcgagcaggtggatgatctgctcagtgtggtggctgcactccaggaggaggttgagaggttagggagtatcagagtgtgagcaggagacagactcgwggtgtaactctctgcgagacagacgtgagggcgatactcaccaggcagcagtcatgttcttcatccccctgaatgtaatcctcctcattgaccttatctgcaggaagccttccccagaaccagagaatgctgagtggcagggaatatcgggaggtttaggaaagatctaagaagcgtggggrcccccggtgccatgggattttactcttgaacacctgtgggacccygagaaacgaagcaagtatttaagtcaggggtggtgyggcttaggtagacctgaggagggcttatttggggctcagctcgtgcttatcaagctctctacaatactgttctggacagagagagtttctgagctgagattggagccagagggagaagtctccaagccgaacctgactgatcacagaaggcaccagcatcaatgtcagctgcccccrtggaaggacagaaatggaaatggctgtgtttgttgttgcaaa

SEQ ID NO: 4677 - DNA, 600 bp, Chicken  19866894107789_3
gtgtggtggctgcactccaggaggaggttgagaggttagggagtatcagagtgtgagcaggagacagactcgwggtgtaactctctgcgagacagacgtgagggcgatactcaccaggcagcagtcatgttcttcatccccctgaatgtaatcctcctcattgaccttatctgcaggaagccttccccagaaccagagaatgctgagtggcagggaatatcgggaggtttaggaaagatctaagaagcgtggggrcccccggtgccatgggattttactcttgaacacctgtgggacccygagaaacgaagcaagtatttaagtcaggggtggtgyggcttaggtagacctgaggagggcttatttggggctcagctcgtgcttatcaagctctctacaatactgttctggacagagagagtttctgagctgagattggagccagagggagaagtctccaagccgaacctgactgatcacagaaggcaccagcatcaatgtcagctgcccccrtggaaggacagaaatggaaatggctgtgtttgttgttgcaaactactgtttgcaagatagttgacctggtgctgctcctgtggctgt

SEQ ID NO: 4678 - DNA, 600 bp, Chicken  19866894107789_4
tagggagtatcagagtgtgagcaggagacagactcgwggtgtaactctctgcgagacagacgtgagggcgatactcaccaggcagcagtcatgttcttcatccccctgaatgtaatcctcctcattgaccttatctgcaggaagccttccccagaaccagagaatgctgagtggcagggaatatcgggaggtttaggaaagatctaagaagcgtggggrcccccggtgccatgggattttactcttgaacacctgtgggacccygagaaacgaagcaagtatttaagtcaggggtggtgyggcttaggtagacctgaggagggcttatttggggctcagctcgtgcttatcaagctctctacaatactgttctggacagagagagtttctgagctgagattggagccagagggagaagtctccaagccgaacctgactgatcacagaaggcaccagcatcaatgtcagctgcccccrtggaaggacagaaatggaaatggctgtgtttgttgttgcaaactactgtttgcaagatagttgacctggtgctgctcctgtggctgtggtgtccttgcctgagtctctgtagagctctgattt

SEQ ID NO: 4679 - DNA, 492 bp, Chicken  19866894107789_5
ggaatatcgggaggtttaggaaagatctaagaagcgtggggrcccccggtgccatgggattttactcttgaacacctgtgggacccygagaaacgaagcaagtatttaagtcaggggtggtgyggcttaggtagacctgaggagggcttatttggggctcagctcgtgcttatcaagctctctacaatactgttctggacagagagagtttctgagctgagattggagccagagggagaagtctccaagccgaacctgactgatcacagaaggcaccagcatcaatgtcagctgcccccrtggaaggacagaaatggaaatggctgtgtttgttgttgcaaactactgtttgcaagatagttgacctggtgctgctcctgtggctgtggtgtccttgcctgagtctctgtagagctctgatttgagcatgcttccttaggaaggacccaggggatttttctgcccagggacaggggagtgggcagcacaagg

SEQ ID NO: 4680 - DNA, 599 bp, Chicken  19866894107811_1
  misc_feature (1)..(35): n is any nucleotide
nnnnnnnnnnnnnnnnnnnnnnnnnnnnnnnnnnnaatatgcttggtgatgaaagaaatctgtcggtttgaattgtgtgtcgagaaacaacagcaatttgtgcaacttgaagatacctaaagtcctttggctcaacaggagctgaaaacacagaacatccttccccatgaaaacaaggatcagcttgtttttaaacaaagcacatccatagaaacaaaggtaaaaatatacatataactgataagcagacaaaatatcgtgtccctactactgccatttcaaaaaatgtacctgtggaawttatgagtttctttgtgcacctcacttcagtgccaacacttacagcaatagaagcamgtgtgaaagcgtgtgtctaagtctacatgtaaagtcttctttccagtgtttcgtttgataatgactactattagaatacctcctgggaacttaagacracgcaaaggaatggcacaaagcagcacaagggaatgttccaactgaacatttggaattttcaacaggcttcctagagaggtggttgatatcccacatctttcagtattctggaggcataatatgctttagcttttggttagccc

SEQ ID NO: 4681 - DNA, 600 bp, Chicken  19866894107811_2
atctgtcggtttgaattgtgtgtcgagaaacaacagcaatttgtgcaacttgaagatacctaaagtcctttggctcaacaggagctgaaaacacagaacatccttccccatgaaaacaaggatcagcttgtttttaaacaaagcacatccatagaaacaaaggtaaaaatatacatataactgataagcagacaaaatatcgtgtccctactactgccatttcaaaaaatgtacctgtggaawttatgagtttctttgtgcacctcacttcagtgccaacacttacagcaatagaagcamgtgtgaaagcgtgtgtctaagtctacatgtaaagtcttctttccagtgtttcgtttgataatgactactattagaatacctcctgggaacttaagacracgcaaaggaatggcacaaagcagcacaagggaatgttccaactgaacatttggaattttcaacaggcttcctagagaggtggttgatatcccacatctttcagtattctggaggcataatatgctttagcttttggttagccctgcagcagtcaggaagttggactagatgatcttygtgggtccttttcagctgaactat

SEQ ID NO: 4682 - DNA, 600 bp, Chicken  19866894107811_3
catccttccccatgaaaacaaggatcagcttgtttttaaacaaagcacatccatagaaacaaaggtaaaaatatacatataactgataagcagacaaaatatcgtgtccctactactgccatttcaaaaaatgtacctgtggaawttatgagtttctttgtgcacctcacttcagtgccaacacttacagcaatagaagcamgtgtgaaagcgtgtgtctaagtctacatgtaaagtcttctttccagtgtttcgtttgataatgactactattagaatacctcctgggaacttaagacracgcaaaggaatggcacaaagcagcacaagggaatgttccaactgaacatttggaattttcaacaggcttcctagagaggtggttgatatcccacatctttcagtattctggaggcataatatgctttagcttttggttagccctgcagcagtcaggaagttggactagatgatcttygtgggtccttttcagctgaactattctattccraatttggataatttcagcaccttgtctgtgctgctgctcttaaacagaagcatcataaaaactatcaagtggaagagaacctcagcaag

SEQ ID NO: 4683 - DNA, 600 bp, Chicken  19866894107811_4
caacacttacagcaatagaagcamgtgtgaaagcgtgtgtctaagtctacatgtaaagtcttctttccagtgtttcgtttgataatgactactattagaatacctcctgggaacttaagacracgcaaaggaatggcacaaagcagcacaagggaatgttccaactgaacatttggaattttcaacaggcttcctagagaggtggttgatatcccacatctttcagtattctggaggcataatatgctttagcttttggttagccctgcagcagtcaggaagttggactagatgatcttygtgggtccttttcagctgaactattctattccraatttggataatttcagcaccttgtctgtgctgctgctcttaaacagaagcatcataaaaactatcaagtggaagagaacctcagcaagaaaacacamactaacaaaaaaatcattggatttaactaacgtggatgacaagtagcacatagagaaagaaacacatctatcttatgactgtagacaagatccttcagcaagtgattaagagcacagaccttcctttctccaagcacaggtctaatacatctctttcacaatgtattag

SEQ ID NO: 4684 - DNA, 600 bp, Chicken  19866894107811_5
cgtgtgtctaagtctacatgtaaagtcttctttccagtgtttcgtttgataatgactactattagaatacctcctgggaacttaagacracgcaaaggaatggcacaaagcagcacaagggaatgttccaactgaacatttggaattttcaacaggcttcctagagaggtggttgatatcccacatctttcagtattctggaggcataatatgctttagcttttggttagccctgcagcagtcaggaagttggactagatgatcttygtgggtccttttcagctgaactattctattccraatttggataatttcagcaccttgtctgtgctgctgctcttaaacagaagcatcataaaaactatcaagtggaagagaacctcagcaagaaaacacamactaacaaaaaaatcattggatttaactaacgtggatgacaagtagcacatagagaaagaaacacatctatcttatgactgtagacaagatccttcagcaagtgattaagagcacagaccttcctttctccaagcacaggtctaatacatctctttcacaatgtattagtagactagcattttatacttaaaagttagagtg

SEQ ID NO: 4685 - DNA, 600 bp, Chicken  19866894107811_6
aatggcacaaagcagcacaagggaatgttccaactgaacatttggaattttcaacaggcttcctagagaggtggttgatatcccacatctttcagtattctggaggcataatatgctttagcttttggttagccctgcagcagtcaggaagttggactagatgatcttygtgggtccttttcagctgaactattctattccraatttggataatttcagcaccttgtctgtgctgctgctcttaaacagaagcatcataaaaactatcaagtggaagagaacctcagcaagaaaacacamactaacaaaaaaatcattggatttaactaacgtggatgacaagtagcacatagagaaagaaacacatctatcttatgactgtagacaagatccttcagcaagtgattaagagcacagaccttcctttctccaagcacaggtctaatacatctctttcacaatgtattagtagactagcattttatacttaaaagttagagtgggttttgacagtacctcagatcccttttttacatatacagatgactttgcagctatacacagaagaaatgcaaacatgcattaacttcaaagtaacag

SEQ ID NO: 4686 - DNA, 600 bp, Chicken  19866894107812_1
accctggtgtcttcccatttctttcacacccatcactatttgggctcatgattttaattccctccctatgtatttcaggtgaatcctggtgaaattacgcatttgtttccttgaagtgaaacacaagcagtttggtctcagcctgaatgaggagaattacaattacaccacgcaatcagctgatgcgctacgtgcacagaagaatgagtctaacttcattcttgcaagagcaacacagcagcattatttaaataagctgccttccatcaccacaactgagcgtcagcagatgagcaggastttccatgtctcacagtttaygttgcttagctccaggaactcaaaggaaaaatgcttttcagcatcaccaccctatataaaaagattgccaccagtcaagctgttaagagtttccaagtcataataaagaactcctcttctgaacaccagccaatgccagagccttcaaaggagtcgcaatattctgcacattctcatgcaagctctgatatcaaggagaaggatttccttcagtcccttttcaagatctgagaatgtgacatctaggaagggaaactaaccctctcatgtcacaatact

SEQ ID NO: 4687 - DNA, 600 bp, Chicken  19866894107812_2
tttcacacccatcactatttgggctcatgattttaattccctccctatgtatttcaggtgaatcctggtgaaattacgcatttgtttccttgaagtgaaacacaagcagtttggtctcagcctgaatgaggagaattacaattacaccacgcaatcagctgatgcgctacgtgcacagaagaatgagtctaacttcattcttgcaagagcaacacagcagcattatttaaataagctgccttccatcaccacaactgagcgtcagcagatgagcaggastttccatgtctcacagtttaygttgcttagctccaggaactcaaaggaaaaatgcttttcagcatcaccaccctatataaaaagattgccaccagtcaagctgttaagagtttccaagtcataataaagaactcctcttctgaacaccagccaatgccagagccttcaaaggagtcgcaatattctgcacattctcatgcaagctctgatatcaaggagaaggatttccttcagtcccttttcaagatctgagaatgtgacatctaggaagggaaactaaccctctcatgtcacaatactaaaatgtctgaaacagtcatc

SEQ ID NO: 4688 - DNA, 600 bp, Chicken  19866894107813_1
aagatgatttcacatggctttcattaatttctggaagtctttaacaataaaagtagaaaaatattttaaatgtcgtcaaatagtgcccattatgcgtaagatatgacatagctcttattgctaagaaatccacagcaacatgaagtttcatacaacagaaaaaaaatttaaccataactttcagctaaagcagaagcgtaggtgaagtagtagcatatcaaattttaagtgcagttgaagctctgctcctttatgaacttactggtagtttgtagtcagcagtacaaggaaaaaaagaaygcagtggtaggcatttacattttatacataaaataaatctcctgtattcctactttatactattcaaaaccaaaacaatttcctgaggttcagactgtcatagtgcttcacgcgcatttcctgatacaggctgacagcagaagaaattggagcaatatgctacagaaccatcaaagctccttggcttcttcagatccccctgcatctcccttcaagtcaaaagaaggtctgagtctttccaaactatactacctcaactattagcaggatattactattcctctgtgtttaggtatatcc

SEQ ID NO: 4689 - DNA, 600 bp, Chicken  19866894107814_1
cgtaagaggtgtcttatctttcagttttggtttattacatgacacaatctgttattagagggtacaaccacagcaggggcttggagcttgatgatctttaaggtgccttccaacctaagctattgtattgctctaggaaatagaactgtccaataggacaaaaaaactctgaatgttttactcattacagggaatccaaaatgatgaatgtatttagcccatccatcaggtaattactaaatttttacagttatttcctgtactaaatactattaaaacatgaaaaatacagtcaagccyaagtgtaggttaagtagaagcctgtcaaagctgagagctaacaagtttaggattgaactgtattaattccagagcagcttacatttggaaggaaaaaacaaattgaccttgcagaccttttgggataactcagaaatgtgtgtgcagggacatagtgcccgtgcttgggaccattcctgtgcaccacaggttgcttttgtgcaggcagtgcatagcgagtgatgctttgcaggcaaaactactactgtgggctgccgtgagttgtcagctcgtgttcgacgacgaggtgccgttagatgg

SEQ ID NO: 4690 - DNA, 600 bp, Chicken  19866894107821_1
aggagtgccagagaaaagcagagctcctttaggaagttgtctctgtttgtgagacttcaggagttcatagaggctaagttaaagccccattagctgcagcacaatctgacagctcatgttggttggtagcaggtaccagcttattacagcacgtggtggcgaagccctgagagacaaaagaactcagccagtcccagatgtgctgctggtagtgttgtgtgtaaggctgtgagcagcaatgagcagaaggtgctgcagtcagctgcaaggggtctgtgagcagcagaggttgtttggagyrtagaacactgaccttggggcaaattacttatttattttccccctcttgcagcactcgctatttttaattgcatatttctttggctttatgccaccagatcacgtagcaagaccttgagtttctttggagttgtgattatcaaaatcaagagttaagatgatcgcatccttcctaaactgaaggggrggaattactgtaatcagcagaagtaaaccagcttttctgtgtgtgcctgggtgtgatgccctcaaattcatggggctgaagggacgctgctgtcagtgcgtggtggtgtcttg

SEQ ID NO: 4691 - DNA, 600 bp, Chicken  19866894107821_2
ggagtgccagagaaaagcagagctcctttaggaagttgtctctgtttgtgagacttcaggagttcatagaggctaagttaaagccccattagctgcagcacaatctgacagctcatgttggttggtagcaggtaccagcttattacagcacgtggtggcgaagccctgagagacaaaagaactcagccagtcccagatgtgctgctggtagtgttgtgtgtaaggctgtgagcagcaatgagcagaaggtgctgcagtcagctgcaaggggtctgtgagcagcagaggttgtttggagyrtagaacactgaccttggggcaaattacttatttattttccccctcttgcagcactcgctatttttaattgcatatttctttggctttatgccaccagatcacgtagcaagaccttgagtttctttggagttgtgattatcaaaatcaagagttaagatgatcgcatccttcctaaactgaaggggrggaattactgtaatcagcagaagtaaaccagcttttctgtgtgtgcctgggtgtgatgccctcaaattcatggggctgaagggacgctgctgtcagtgcgtggtggtgtcttgt

SEQ ID NO: 4692 - DNA, 600 bp, Chicken  19866894107821_3
ccagtcccagatgtgctgctggtagtgttgtgtgtaaggctgtgagcagcaatgagcagaaggtgctgcagtcagctgcaaggggtctgtgagcagcagaggttgtttggagyrtagaacactgaccttggggcaaattacttatttattttccccctcttgcagcactcgctatttttaattgcatatttctttggctttatgccaccagatcacgtagcaagaccttgagtttctttggagttgtgattatcaaaatcaagagttaagatgatcgcatccttcctaaactgaaggggrggaattactgtaatcagcagaagtaaaccagcttttctgtgtgtgcctgggtgtgatgccctcaaattcatggggctgaagggacgctgctgtcagtgcgtggtggtgtcttgtaacaatggggcagcctttctaatgtagtcccactgtgcacttacctgggagcaaatggttcgtgttggaataaatgggggatggtgccaggtgttggtttacgacacttttaaaaactctgaggcctgggacaaagcaatcagccttaggaactcagggttgcaaacaggcgttcagaaactttca

SEQ ID NO: 4693 - DNA, 600 bp, Chicken  19866894107823_1
cgtgtctctcacagaagtagaggtagaagttaggatgtactccagattgcttcaaattttataggacatttcttgataatcaaagaacagtggtggcttaaagctattatttcttctatttaactagacttggttctgctggaactgagattctgcttgaagttattttttaataacttagcaagacaaattttattagtagtatttcatagttattctccccacatgctgctgctcagaatactgccctctgtctagttgtcagatcaccatgtgaactaaaaatctaaaagtttggcwttgaaayctgtgtgcagcactccctcttagtcttgaattctgattttttttattttatttttccttattkttgttctcactgagatgagcttaaattttcattttagcttttactttgtggttttatttgtatgtaatttcaaggcccataaatttcgggcaggatgtagtttatgtctgatttttaaagctttacatatctgtgaggattactttgtggtttcagataaattgtcttcttctggcctatatatttgcttgatagctattatatatggtgactggcaacactacttccat

SEQ ID NO: 4694 - DNA, 600 bp, Chicken  19866894107823_2
ctcacagaagtagaggtagaagttaggatgtactccagattgcttcaaattttataggacatttcttgataatcaaagaacagtggtggcttaaagctattatttcttctatttaactagacttggttctgctggaactgagattctgcttgaagttattttttaataacttagcaagacaaattttattagtagtatttcatagttattctccccacatgctgctgctcagaatactgccctctgtctagttgtcagatcaccatgtgaactaaaaatctaaaagtttggcwttgaaayctgtgtgcagcactccctcttagtcttgaattctgattttttttattttatttttccttattkttgttctcactgagatgagcttaaattttcattttagcttttactttgtggttttatttgtatgtaatttcaaggcccataaatttcgggcaggatgtagtttatgtctgatttttaaagctttacatatctgtgaggattactttgtggtttcagataaattgtcttcttctggcctatatatttgcttgatagctattatatatggtgactggcaacactacttccatacaattt

SEQ ID NO: 4695 - DNA, 568 bp, Chicken  19866894107823_3
tcttgataatcaaagaacagtggtggcttaaagctattatttcttctatttaactagacttggttctgctggaactgagattctgcttgaagttattttttaataacttagcaagacaaattttattagtagtatttcatagttattctccccacatgctgctgctcagaatactgccctctgtctagttgtcagatcaccatgtgaactaaaaatctaaaagtttggcwttgaaayctgtgtgcagcactccctcttagtcttgaattctgattttttttattttatttttccttattkttgttctcactgagatgagcttaaattttcattttagcttttactttgtggttttatttgtatgtaatttcaaggcccataaatttcgggcaggatgtagtttatgtctgatttttaaagctttacatatctgtgaggattactttgtggtttcagataaattgtcttcttctggcctatatatttgcttgatagctattatatatggtgactggcaacactacttccatacaatttttcctggttttgatgtgatccacattccatt

SEQ ID NO: 4696 - DNA, 600 bp, Chicken  19866894107825_1
gctgacagcattatatcccagccacacgggaaagagctgtgctgccaaaaatccgtccctggctgctagagctgcacctgggtgctgggagttttgctgcactacggggcattgcagttcctgtgtggttagagcaccgtgtgctcctcgtgccctccgtacccctgcattcccaccaagtgttgctccgtgcagccgctgtgtgcttgctggaggcgaagggtgcagatgctggtgtgaggcagagcacatgtctgtgaatgaagcatggcttgctatctgtttttaagtgctggtgargacgtgatggcacagggtggattttagaaataaatgcaaaggattaagtgtcctaaatggaatagcaaaaacaatgacaaataacgtgtgtgacattttctagtctgccctttccctacagtcatgacaaccaggctgcaaacaatgtgtggctttggggcaggacaccttgcaggaaaactgaattctgtacaagaaataatactgtcctggcagttccactgaggacatggtcatttgtccccaggagtagggaatgaatcagtgtcctgacatgaagcgaagggctccagacctcca

SEQ ID NO: 4697 - DNA, 600 bp, Chicken  19866894107834_1
ccgggcatcatcagtctgctcagcactgcactcatgaggcaagaagctgtgatttctgtcccacatcctctgaactttgttttcacacttatttgccattagctaaaagctcagtcttgattttaaaaagcagataaccctttcacaaacaagaggatgaagctgtcagagaggagctatttgattccagatttgactctttctcacattgctgtaataaaaaattattacaccacagtttcctgaaagaaagtaatggtggatcaggttattaagaggtctgcctccaagggagacacrcttccatcttgcaggcacagcctccacatacttattcacggccaccagcaagcagtttgctcrctcactgaatatacagttctactttctagtgcaagttcagttaagcattccttccaaaggactcactatgccaaggataaaaatatatgtttgctaccatttagtatagcagctagggtggtggtaagccccatgaggggtgggaagagtaaacaattgctatcctgatagcctgtgggcagttgtaacagctgcagggtggctatcttgcacgatgtatgcttttgcagagatcaa

SEQ ID NO: 4698 - DNA, 600 bp, Chicken  19866894107834_2
catcctctgaactttgttttcacacttatttgccattagctaaaagctcagtcttgattttaaaaagcagataaccctttcacaaacaagaggatgaagctgtcagagaggagctatttgattccagatttgactctttctcacattgctgtaataaaaaattattacaccacagtttcctgaaagaaagtaatggtggatcaggttattaagaggtctgcctccaagggagacacrcttccatcttgcaggcacagcctccacatacttattcacggccaccagcaagcagtttgctcrctcactgaatatacagttctactttctagtgcaagttcagttaagcattccttccaaaggactcactatgccaaggataaaaatatatgtttgctaccatttagtatagcagctagggtggtggtaagccccatgaggggtgggaagagtaaacaattgctatcctgatagcctgtgggcagttgtaacagctgcagggtggctatcttgcacgatgtatgcttttgcagagatcaagagccaactgcatttataactcatgttgaggtcagttctcagatctcctttggcagccaagag

SEQ ID NO: 4699 - DNA, 600 bp, Chicken  19866894107834_3
gatgctctgggattggactggatccagattagccctggagctttcatttacctagcatattctatctgccatcacaaacaactttgtacttaatgtattcacactgaatttttaccttagggccatgttccttaatataacactgctgtaatttcaggttgctgccttcttgccaagcacaagtctgctagctttcaaaactaatggtgaatgtatctgcacagacaaagttctgccctcggtaactgcaccagtatcttgtctgtcaagctaaaattctgatattaatactacttaacraaaagattttatacttaggctgtgagcatctcacttgctggaaagcttgagcatgtgtcactaagggtacttgatggaaataccacactgttgctggctatctatatgtagtgagctgagcctgtctaatgcttccatgttcaccagcaaagaaaacatacatacatagctacatccactgaaatctgaagcaaaacmttcctcacagcccaaagctttggagctgtcatgtattgtcagaaggttaataacaacggackagaaatagacagggaagacaatgcaatgmactcaaagcaa

SEQ ID NO: 4700 - DNA, 587 bp, Chicken  19866894107834_4
aactaatggtgaatgtatctgcacagacaaagttctgccctcggtaactgcaccagtatcttgtctgtcaagctaaaattctgatattaatactacttaacraaaagattttatacttaggctgtgagcatctcacttgctggaaagcttgagcatgtgtcactaagggtacttgatggaaataccacactgttgctggctatctatatgtagtgagctgagcctgtctaatgcttccatgttcaccagcaaagaaaacatacatacatagctacatccactgaaatctgaagcaaaacmttcctcacagcccaaagctttggagctgtcatgtattgtcagaaggttaataacaacggackagaaatagacagggaagacaatgcaatgmactcaaagcaaacgtttgtatcacacacagctactgcttgagatacaaccagtgttgccaggagtgccctattcttaggggatatttagctgaataactgccagctactgcagaagagtcttgtttctcagcttacataagttctggttttgtggggccaaatcctgtatacttacccctgagtacaatcacggta

SEQ ID NO: 4701 - DNA, 525 bp, Chicken  19866894107834_5
gtctgtcaagctaaaattctgatattaatactacttaacraaaagattttatacttaggctgtgagcatctcacttgctggaaagcttgagcatgtgtcactaagggtacttgatggaaataccacactgttgctggctatctatatgtagtgagctgagcctgtctaatgcttccatgttcaccagcaaagaaaacatacatacatagctacatccactgaaatctgaagcaaaacmttcctcacagcccaaagctttggagctgtcatgtattgtcagaaggttaataacaacggackagaaatagacagggaagacaatgcaatgmactcaaagcaaacgtttgtatcacacacagctactgcttgagatacaaccagtgttgccaggagtgccctattcttaggggatatttagctgaataactgccagctactgcagaagagtcttgtttctcagcttacataagttctggttttgtggggccaaatcctgtatacttacccctgagtacaatcacggta

SEQ ID NO: 4702 - DNA, 496 bp, Chicken  19866894107834_6
actacttaacraaaagattttatacttaggctgtgagcatctcacttgctggaaagcttgagcatgtgtcactaagggtacttgatggaaataccacactgttgctggctatctatatgtagtgagctgagcctgtctaatgcttccatgttcaccagcaaagaaaacatacatacatagctacatccactgaaatctgaagcaaaacmttcctcacagcccaaagctttggagctgtcatgtattgtcagaaggttaataacaacggackagaaatagacagggaagacaatgcaatgmactcaaagcaaacgtttgtatcacacacagctactgcttgagatacaaccagtgttgccaggagtgccctattcttaggggatatttagctgaataactgccagctactgcagaagagtcttgtttctcagcttacataagttctggttttgtggggccaaatcctgtatacttacccctgagtacaatcacggta

SEQ ID NO: 4703 - DNA, 600 bp, Chicken  19866894107836_1
acttatttgatggctgccacttggatgacttgctgtaacaattataaacattgcaagatttaggtaaataggaaacaataatttcctatgataactatcttccaagcacaaggtatatttgagctacagaccagtgaaagtcaaattctactgtcagttacgtgcaggctgcatcaagaacttctctggatgagatagctgtatccattaagagagaccaatcaactaggttagtttcacagaggagaggttaaaaaggaggaaaagagatctttagctcactatacattaagtcttttwtgtagtcaaatctgcsatttatagaccactgctgcttgccagcccacataaatttgattgacgactgttctgatttggtatactactctgtatttacacttcatactggttataggagctggagcacttatttcaaatcaaattcagcatttccatttacaatgaagaaaaaaatatgcacagataaactgggtaggccttcatggggatgggaatatatatagtttacagtgtcaaataagtgaatacactagattttaagaatataagaacaccaaaaatataagaaaatatagttaa

SEQ ID NO: 4704 - DNA, 600 bp, Chicken  19866894107836_2
ccacttggatgacttgctgtaacaattataaacattgcaagatttaggtaaataggaaacaataatttcctatgataactatcttccaagcacaaggtatatttgagctacagaccagtgaaagtcaaattctactgtcagttacgtgcaggctgcatcaagaacttctctggatgagatagctgtatccattaagagagaccaatcaactaggttagtttcacagaggagaggttaaaaaggaggaaaagagatctttagctcactatacattaagtcttttwtgtagtcaaatctgcsatttatagaccactgctgcttgccagcccacataaatttgattgacgactgttctgatttggtatactactctgtatttacacttcatactggttataggagctggagcacttatttcaaatcaaattcagcatttccatttacaatgaagaaaaaaatatgcacagataaactgggtaggccttcatggggatgggaatatatatagtttacagtgtcaaataagtgaatacactagattttaagaatataagaacaccaaaaatataagaaaatatagttaaatattatatttaaaaa

SEQ ID NO: 4705 - DNA, 537 bp, Chicken  19866894107838_1
aacaaagaagttaacatttgcatttgcacaagaacccttccttctaatttgcttcccccaccggatcctccacaatgacacctaatctcagattttagaaaagcaacaggtgttaccttcctacatccctcacagcgggaggggttcacactctcactgctggtgctgcaccaggatgcgtccatttagatttttctaaacagaagactttcacacgcatctggcctaacgttcacttaatttcaagaacaccaccagattcacctacgctggagctgaaattgagcagactactacctkacactgccagacagaattttagaaagcatttggttgaccacctaaaacagcacattacattttaaaagctaccttgttcatggtgaagactaaggtggaaaagagctagttaaaccagcgagcagccaatcccctcattacttgcctgccaaagcttccgtggagagagcagcccaaaaacatggaggtactgcacggaaataggaaaaagcagcacctactccatgctacagggat

SEQ ID NO: 4706 - DNA, 600 bp, Chicken  19866894107854_1
ctaaaaatctgtttgttttccctgaagtgactgatgtgagatctactcagtggagctaagaacatttcaattaaagcgtcaaacacagaaggaagaatcagattagcacttatgcccaaaccaacatcagcaaaatttattaccaaatccgaccaaagcaactatcccagggaagctttgcaaagtattttaaatctttaagatggtaatgagcaacctttttgcagccagacatatgtaccacccttagtctcaccccggtgacaagataatcacctggtgaggaaatgggtgaacccrgagcaaacagctgaacacaaactaacctgaattttcactgaaggagtgaccatggagcatcagctcccttcagccaccatttataaaaattcagagaatacaagtcatacggccttttaaatccatgtgatgtgtagcttctgtcatatttttcatacttcttgatttacaaattagtctggcagctctaacatacaacattaaggaaggacacagatctctaaacagagacagcttctgtgtttggatggctaaagagggggtgggctttcacacagcagaaagagaaatcagaaaaga

SEQ ID NO: 4707 - DNA, 600 bp, Chicken  19866894107855_1
gtgagtaaaggagtctgcatttccagttcactcacaaatctctttctttttagtatgactctaacattttatatataatatacatagtgtaatctgctgaaatttttcacaataacttcattccattccattcagtacctgtgtatccgccaaggtctttaagaacatggaattgccgcagaaacttagacaatgaatttcatgtatactgtataataaactcaagccattcacctgaatcgtgtaaaatgtatgaagctgggagctgttttatgtaaatggtggcaaagtcctgcatcktgaagcaagtttggctcgagaaaaagagtgtatcaagagatcaaacatccttatgaagaggtaagaaatcaggcatttttacatttctttttcctagtttcccaaatgcgctaattcagtattcagactaatgtcttgtaaagtttccccttaaaaaaacaaagcagttttgagttgtagcagcataaaatagtgtctgaaaccaatacattccatttttatacttccataacttagagacaattaaactgactttttttcccataacctaataaaaaaaatccagtctcattttaagat

SEQ ID NO: 4708 - DNA, 599 bp, Chicken  19866894107856_1
  misc_feature (1)..(73): n is any nucleotide
nnnnnnnnnnnnnnnnnnnnnnnnnnnnnnnnnnnnnnnnnnnnnnnnnnnnnnnnnnnnnnnnnnnnnnnnntgctgtgttcctgctgcccagctgtcacccctgggggaggcagccagcacggcccccttggtctcaacaccgaatgctgtgggtgaagcatcaaacacccacagagagctctgctcccttcgtccttttccgtagagctggggatatccaggtcaggattttatcccccaactccccccccctcgccttgccatggccaatggggaatgcccaggaaggcagcccayggctgctggtggctggaggagatcccagggttgcccaagctgggctgagccacagagcagacagcagaggggccgtcccgttcctctgtttgctccatcrtgccatatccctgacagcctccacagctcagcaaggtcctgctccagcactatccctacccgcagcccagaggggcccttctgccagagaaggtgtggctgcagttccccatgagcccccagcactgctgggacagggatcacagcaccaaccccaaccgctggagatcagcacctgcaaggtgcactccagcacccat

SEQ ID NO: 4709 - DNA, 600 bp, Chicken  19866894107856_2
cccctgggggaggcagccagcacggcccccttggtctcaacaccgaatgctgtgggtgaagcatcaaacacccacagagagctctgctcccttcgtccttttccgtagagctggggatatccaggtcaggattttatcccccaactccccccccctcgccttgccatggccaatggggaatgcccaggaaggcagcccayggctgctggtggctggaggagatcccagggttgcccaagctgggctgagccacagagcagacagcagaggggccgtcccgttcctctgtttgctccatcrtgccatatccctgacagcctccacagctcagcaaggtcctgctccagcactatccctacccgcagcccagaggggcccttctgccagagaaggtgtggctgcagttccccatgagcccccagcactgctgggacagggatcacagcaccaaccccaaccgctggagatcagcacctgcaaggtgcactccagcacccatctgagagtgagaggagcttccgtctgtgggcctggatgctcagccccacatccccaaacaggcayatggagacccccccagtggagccaaagggacaccac

SEQ ID NO: 4710 - DNA, 594 bp, Chicken  19866894107856_3
cagaggggccgtcccgttcctctgtttgctccatcrtgccatatccctgacagcctccacagctcagcaaggtcctgctccagcactatccctacccgcagcccagaggggcccttctgccagagaaggtgtggctgcagttccccatgagcccccagcactgctgggacagggatcacagcaccaaccccaaccgctggagatcagcacctgcaaggtgcactccagcacccatctgagagtgagaggagcttccgtctgtgggcctggatgctcagccccacatccccaaacaggcayatggagacccccccagtggagccaaagggacaccactcccctgctcacaccctccccagccctgcctgcagcattaatggggcgttgtggaggcagcagctctcctccatggctgagtggtgctgagcagcccggggcgatcccaccgctcaccattaactcagcatccccccaagggccagaccccaccgcactgtgttacgtgggaatgacctcgtctgcactacccacagctccaggaacaggggggggggggtacagctgctccccattgactctcctctctgttcagtt

SEQ ID NO: 4711 - DNA, 600 bp, Chicken  19866894107858_1
gagcactgattctgaattcactgtagccagctttgtaggaggcaaaattcatgcttcacactgccttcaacttaaatttcttacactcttttccactggactgccataagccattttctgagtgcaacagatatctgtgaaagatcagtgataatgttactgaactagaagcccctgtcaaaaaaagacctgggggaagctggatggttgccagcaatgtgcccttgcagcccagaaaaccaaccactctgaattgcatcagaagaagcatggccagcagggcgagagaggtgatcctgycccctctgctctgcactggtgagacctcacctggagtaccacgtccacaagtggagtcctctgtacaggagagacatgtatctgttggagcacatccagaggagggttacaaatatgatccatgggatggaacacctctcctatgrggacaggctgagaaagctggggctcttcagcctgaagaagaaaaggctgtgaggtgatctgatagtggcctttcagaatgtaaatgagggctgtgattaaggggacagacactttagcagggtgtgtggtgataagacaagtggaaatgtcatc

SEQ ID NO: 4712 - DNA, 600 bp, Chicken  19866894107858_2
agcactgattctgaattcactgtagccagctttgtaggaggcaaaattcatgcttcacactgccttcaacttaaatttcttacactcttttccactggactgccataagccattttctgagtgcaacagatatctgtgaaagatcagtgataatgttactgaactagaagcccctgtcaaaaaaagacctgggggaagctggatggttgccagcaatgtgcccttgcagcccagaaaaccaaccactctgaattgcatcagaagaagcatggccagcagggcgagagaggtgatcctgtyccctctgctctgcactggtgagacctcacctggagtaccacgtccacaagtggagtcctctgtacaggagagacatgtatctgttggagcacatccagaggagggttacaaatatgatccatgggatggaacacctctcctatgrggacaggctgagaaagctggggctcttcagcctgaagaagaaaaggctgtgaggtgatctgatagtggcctttcagaatgtaaatgagggctgtgattaaggggacagacactttagcagggtgtgtggtgataagacaagtggaaatgtcatca

SEQ ID NO: 4713 - DNA, 600 bp, Chicken  19866894107858_3
agtgataatgttactgaactagaagcccctgtcaaaaaaagacctgggggaagctggatggttgccagcaatgtgcccttgcagcccagaaaaccaaccactctgaattgcatcagaagaagcatggccagcagggcgagagaggtgatcctgtcccctctgctctgcactggtgagacctcacctggagtaccacgtccacaagtggagtcctctgtacaggagagacatgtatctgttggagcacatccagaggagggttacaaatatgatccatgggatggaacacctctcctatgrggacaggctgagaaagctggggctcttcagcctgaagaagaaaaggctgtgaggtgatctgatagtggcctttcagaatgtaaatgagggctgtgattaaggggacagacactttagcagggtgtgtggtgataagacaagtggaaatgtcatcaagctcaaagaaggtaaatttacattagatataaggaaaaaatcttttacagtaagggtggtgaggcactgaaacaggttattcagtgatgtggttaatgccccaactctggagactttcaaggtgagactggctaagtccctggg

SEQ ID NO: 4714 - DNA, 600 bp, Chicken  19866894107862_1
ctgttgggagactggtatggctgtagcaacagatgtggtttcacttgtgtgagtttcatattgctatgtttttttttcccttttttggagtttcttaccttacttgctactgtttcaaggaattaagaatttcatggtagtgttgaaaagctcatgtaatggtggtgatccagaaaactctgtaatcggccttgaggggaggaagagagacattattttagtgcaagacgctgacttctgcaaaaattcctctgctctgatgtgtatactgtgtgtccctgtagctcttaagcatacatrcactgtgtatgccttacacggactgtactgtgagcaatttccagaagagtagcatggtgaggttagccaggtataaggccaaataattttttggatggtggaaataaaaatggcttgtaacagctttttaaagaayatttcaggaaaaactaaattgcaaagataaatttgatatctcaaaccagtctattgacaaaacaaagatgaaatactgcttttctcatatgtagtatctgttgcattgtcgaactagggaagatgaactgtctaattatggttatttatagacttctctgcaaa

SEQ ID NO: 4715 - DNA, 600 bp, Chicken  19866894107862_2
gtagtgttgaaaagctcatgtaatggtggtgatccagaaaactctgtaatcggccttgaggggaggaagagagacattattttagtgcaagacgctgacttctgcaaaaattcctctgctctgatgtgtatactgtgtgtccctgtagctcttaagcatacatgcactgtgtatgccttacacggactgtactgtgagcaatttccagaagagtagcatggtgaggttagccaggtataaggccaaataattttttggatggtggaaataaaaatggcttgtaacagctttttaaagaayatttcaggaaaaactaaattgcaaagataaatttgatatctcaaaccagtctattgacaaaacaaagatgaaatactgcttttctcatatgtagtatctgttgcattgtcgaactagggaagatgaactgtctaattatggttatttatagacttctctgcaaaatctacatgaacacaaggtaagatactcagctatttggaagataaatatttattatagaagggggagggagtatttttacgttacgatagagagataacgaaatcttcaagtgcagatggtgacttgattaaatgc

SEQ ID NO: 4716 - DNA, 600 bp, Chicken  19866894107866_1
atatatcatgttatcttggacatgtactctttgcatttcagaaatactcctgtccagctactgaaacctaagaagatatttttcagataggggactcatgctttttattctcctgtttttcacttctgagtaaaaatacattcagtcccttcccacagctaagaacatgaaaaaatacatcaattatcattttttctactaggatttcttgtattaattaaatgaaaatatctaaaaaataaatcaggaaagctaagaatgcaaagcacaaaaagaaacaagttagttgatcctaatagrcaagaaaaataatgtaacttaggttaacaaaagggtagctgatttagggccaaactttgatacaaaaagcagtataggacatcaggagtgatacaggatttttagtgttagatcacacagcgagacataaataacgtgtacaaagatawgtacctgtgctacatttaatctaattattataatgcatcattagattgaatatttagtacagaatgaatggtaagtaagaaaagatgcagtatgatctacaatgaatattacacttgcccagctgatcactgtagatgaaaaatcatgagg

SEQ ID NO: 4717 - DNA, 600 bp, Chicken  19866894107866_2
ttcccacagctaagaacatgaaaaaatacatcaattatcattttttctactaggatttcttgtattaattaaatgaaaatatctaaaaaataaatcaggaaagctaagaatgcaaagcacaaaaagaaacaagttagttgatcctaatagrcaagaaaaataatgtaacttaggttaacaaaagggtagctgatttagggccaaactttgatacaaaaagcagtataggacatcaggagtgatacaggatttttagtgttagatcacacagcgagacataaataacgtgtacaaagatawgtacctgtgctacatttaatctaattattataatgcatcattagattgaatatttagtacagaatgaatggtaagtaagaaaagatgcagtatgatctacaatgaatattacacttgcccagctgatcactgtagatgaaaaatcatgaggaatgatataactctacatcttgaactgaaaattcaaaaatgctttatgaagggaggttaaatggccaagtacaaccatttagcaaaacagtaaaagtgacagaaggagcgtagacttaaaaccaagagaaagtgattccacacatggag

SEQ ID NO: 4718 - DNA, 599 bp, Chicken  19866894107881_1
  misc_feature (1)..(7): n is any nucleotide
nnnnnnnctcttcttgctgcagagaggaactgcgtttgaccctgagctaaggaagttcacaaaggagacaaggtgaatacaatcccagtacagcatgcccaatgtgaaaggagggagtgagggcttcctctcactgctcttttgttctaacaatagtatctgtgataaaggaggcagcacaagcagggggaaagggtggggagagagaagggggatgagggagaaagagagggaaggaagtgggggagaaatagagggtaagaaagaggctggggaaatgaggaaagaggaggcaaaagrcatgtgaaaagagtggggaagagggggargggaagagggaatgacagagggagtgagaatgggaaagaaagggaggggaaggagacggctatagggatggaggtgagacagagggatggggaagggaatgaattgcaaataatatctgcttaaatacacaaggagttacacacgggtattggggctggcatgattctgctgcacctgcctcarcctgcagaaaaaagtggctggagattttgcagagctccatttctaacattcatgggacactgggcaacctggccttgtaccagatc

SEQ ID NO: 4719 - DNA, 600 bp, Chicken  19866894107881_2
ctgcgtttgaccctgagctaaggaagttcacaaaggagacaaggtgaatacaatcccagtacagcatgcccaatgtgaaaggagggagtgagggcttcctctcactgctcttttgttctaacaatagtatctgtgataaaggaggcagcacaagcagggggaaagggtggggagagagaagggggatgagggagaaagagagggaaggaagtgggggagaaatagagggtaagaaagaggctggggaaatgaggaaagaggaggcaaaagrcatgtgaaaagagtggggaagagggggargggaagagggaatgacagagggagtgagaatgggaaagaaagggaggggaaggagacggctatagggatggaggtgagacagagggatggggaagggaatgaattgcaaataatatctgcttaaatacacaaggagttacacacgggtattggggctggcatgattctgctgcacctgcctcarcctgcagaaaaaagtggctggagattttgcagagctccatttctaacattcatgggacactgggcaacctggccttgtaccagatctggagcgtggtggccctgcctgtggtgggg

SEQ ID NO: 4720 - DNA, 600 bp, Chicken  19866894107881_3
gatgagggagaaagagagggaaggaagtgggggagaaatagagggtaagaaagaggctggggaaatgaggaaagaggaggcaaaagrcatgtgaaaagagtggggaagagggggargggaagagggaatgacagagggagtgagaatgggaaagaaagggaggggaaggagacggctatagggatggaggtgagacagagggatggggaagggaatgaattgcaaataatatctgcttaaatacacaaggagttacacacgggtattggggctggcatgattctgctgcacctgcctcarcctgcagaaaaaagtggctggagattttgcagagctccatttctaacattcatgggacactgggcaacctggccttgtaccagatctggagcgtggtggccctgcctgtggtggggggttggaacttgatgatccctgtggtcccttccagcccgagccattctgtgattcatgctgagagtatgagcaagtaatcctgacatgcagacccatcagaagacacccgacaattaacagtggtgaacacctctctgacttccacaggcaatgactcgggcctggccttcacagaggaatttc

SEQ ID NO: 4721 - DNA, 600 bp, Chicken  19866894107883_1
ttcacgtgtcacccaaggcaaccacttacctttgattgttattttttttttaatagaatgttacaaccagaaagaaaggcagaaaattgaaagaaaaacaaattgtttcactagcagtgaaaataatgaagtttggtttcccgtggtttatcttttgttcagtaattcctaacctttaacccagccacccaactccccctggctaaaaagaagctaaattgttgcagttggagaaagttcaccagcagtgagatttagtaaatcacttttattatgatcttccataagtaaactgtgagrtgcgataagctctaagacagtgctagtagtcccattttaggtcccaccagaagagatctgacagaaattagcagttatataacaggaaacaaccctctgcccacaaagatggacttgacttcaagggcaacatctaatttatgactttcttttgtgtctgaaggttctacccagctagatgtttagatgacgggttcactattgctttggttgtgtaaactgctgagcatatctggcctcagtccaacaatgcacttaagaatgtgcctgtttggctggatcagagccagtacattcagt

SEQ ID NO: 4722 - DNA, 600 bp, Chicken  19866894107886_1
agggagccgcaccatgctgctctgagctggcctttatggctgcaaagctccagcactgcagtcccactccagggcagggctgcctctggccacaggagctgggcaaaccgactgcgataagcagtgggcatgcagtcccttttgccattaatcccttcccagggcaggaaggctattcacctaacagaacaggacgagcaccaaagctccgctcctaccacagtggctgctgcatgctctcccacccatttattttcttcacgcatttcatttcgaagctgaaacaagtgagagcacgcygcagctgctgggagaaaagagccagctcctggccgcagccacatcccacagagggctgtttcttcacacagatgctgacaaacaaccgcctcctcaggcagctcccctgcccgccgcgctgcccctcggctgcaygctggcaccgcggggtcagcagccaatgctgtcctgcaaccactcgcagcacacggaggtaggatgcgctgtgggccgacaccatgattacaactcagaactgacccatttgaagtttaaaaggaatgttttgtcagcagcttcgcgttgctgtggaaacaagat

SEQ ID NO: 4723 - DNA, 600 bp, Chicken  19866894107886_2
tcccttttgccattaatcccttcccagggcaggaaggctattcacctaacagaacaggacgagcaccaaagctccgctcctaccacagtggctgctgcatgctctcccacccatttattttcttcacgcatttcatttcgaagctgaaacaagtgagagcacgcygcagctgctgggagaaaagagccagctcctggccgcagccacatcccacagagggctgtttcttcacacagatgctgacaaacaaccgcctcctcaggcagctcccctgcccgccgcgctgcccctcggctgcaygctggcaccgcggggtcagcagccaatgctgtcctgcaaccactcgcagcacacggaggtaggatgcgctgtgggccgacaccatgattacaactcagaactgacccatttgaagtttaaaaggaatgttttgtcagcagcttcgcgttgctgtggaaacaagattccaagggcacagtcagagataatcgccctaaaatactgaataatgcggcctgcagtctggagaggaaaacacggcttgcaaagcagctgagctgggaagaccttcagcctcttcactcagcctgcatttagctc

SEQ ID NO: 4724 - DNA, 600 bp, Chicken  19866894107886_3
gcagctgagctgggaagaccttcagcctcttcactcagcctgcatttagctcaactgcagatatttccacaatgtgctgacatttatcatgttacaatgcaaataacttgaacttactttttagactgatgtatgaaaaataacagcactgtgatacagttggccaaccaggttgggagcagctacagaacactctccccttttccaagagcaaagagttgaggaggggacaaaagtaggcagtttcagattcagtgaaatccagttgtgccattttctaacactggacatactctcgtycccagctgtgaacaactaagggtaatagaagtctttgataccctgttccgcttacttctaatatttcttaagataaataagcacagtattcattaaagcactggtagtaaccttgcaaatcagcacctacttttaaaagaaacgtgcatatttacattaaggcacattcccctcattttagtggacctctacctacaaaaacacagagcagctcaaagcagagagctgcttctcgtgaaaaattaaacataagaaatcccacccttcaatctccatctgcttttcaaactacacagagat

SEQ ID NO: 4725 - DNA, 600 bp, Chicken  19866894107887_1
tattctttctttgtgctttttttttttttatcttagcagaagggatttactttagattccaaaatccatatttgaaatgaattgcaaacagtttcttgtagtcttggcccatatgaaaaggattattacccaaaacaacacttctgtcagggggaatgtaggttaaagagaaatgggaatgtaaataaatgtgcaggctttgcagtgcgttctgcagggggcatgtttattttctcttttgattccccaagcctggcttcctatgcaattaaagggtccagctcttccctgcaaaacatrctctcatttcttttttgtgtcaccagtaaatatttgggctgaaactgtttaaacataagctttcaataatctttgttttgctttttctggttctctggctgagacctggtttgaatttccatagactaaaaatacatcattttgtttgaagagcttagatgatcttgttcattttgctgtttatctattaccaggagagcctaatccttctctgattgatgttcagcgtcacgtagttaagcagcgatacaggctgtggagcagggagttgttattcttagctgggcttttcaggtacct

SEQ ID NO: 4726 - DNA, 600 bp, Chicken  19866894107897_1
aggaactgtgaaaggcagtctcttccttccctgcagaagtacagtggggcaaaaccacttcctgggagttctttgggtgtccactttcagagaggctcacaaagaatcttgtcagtgtcccaaatgcattgaatgtaaacaagcaaacagtacaaaagctgttacttctgagaggtggcgtgagctctatttgctttaattacaagttgaaatgtgggctattggaagagttcagtcagcgatgagaagtgacattcagtcattgagttcagctgtgattcctccacagtgttacatctrtttgaacttgctagattgtagagagcaactttagaagacagcttacagctatacacacagagaaaaactggggcacaatctaacaaggggagagaggcaatgctggagaagtgagattaatcttcaacaaagaacttgacacaactggactaattataagagtatgtcacrggatgatggcaaatgataatgctcaaatcattctcatacaactccaaagaagtaacccatctgtacaactcaaaagaaagagagaaaaaagatacagaatgtttaaggattctgattcagcaaatataa

SEQ ID NO: 4727 - DNA, 600 bp, Chicken  19866894107897_2
gaggtggcgtgagctctatttgctttaattacaagttgaaatgtgggctattggaagagttcagtcagcgatgagaagtgacattcagtcattgagttcagctgtgattcctccacagtgttacatctrtttgaacttgctagattgtagagagcaactttagaagacagcttacagctatacacacagagaaaaactggggcacaatctaacaaggggagagaggcaatgctggagaagtgagattaatcttcaacaaagaacttgacacaactggactaattataagagtatgtcacrggatgatggcaaatgataatgctcaaatcattctcatacaactccaaagaagtaacccatctgtacaactcaaaagaaagagagaaaaaagatacagaatgtttaaggattctgattcagcaaatataataatagatgaggtggatgtgagaaaggtttgtattgacttgtagcagcactgggagagaagatgaagaacaactggattagcagcaggtgccaggttgttcctgattttgttgtacactctaccatgagtagcatgattgttttttctactttgtttttacttgcagactt

SEQ ID NO: 4728 - DNA, 582 bp, Chicken  19866894107899_1
aaaatatgtgtagatgtgaagaatttcaagtcaacttttgagaatgctcagcttccttctcacttttgagcttctgaaagctttcttcaggatctggcagctgcagctgtcactaggggatggatttctctacgacaagacaaactcaaacggccttttaaagggtagttcttgtgttactcaatattaaatatctttaaatactttaaatgagatcctgaccaccttccacttaaaaattcaccgcttttgttgattcgtgacaccatatcttttctactcttgctttacatagaaaawggaaaaatataatctacaaactcctttttctctttaatccagcagtaggcagtaaataattaatactaattttctgacatcttttcattttgtactcagataaaatttgataattgtcctgctccattgctttttctttgggacagtttctccacacttagaagaaaggtttaccagctttacctggaaatgcgccgaataggaaaaacagaaagataacctgcatagccataattcattaaaataaattaccattatctcaaaaaaaaaaaaaaaaaaaaa

SEQ ID NO: 4729 - DNA, 600 bp, Chicken  19866894107902_1
ctttggaaggtggatgaatatgcatgtagcaatctacttacaaaggaagtaggcaaggaattaaatctcaggagcagtgaaccaaggtggcttgaatctgtcaaagagccaggaaattcaccttttagggccagtcatcttgctggccagcaggcctccttttctccatgcagtacaagcattagccttacttggagtgctctgccttttgccagtttgtctgatggagtctttcttccccttacatcccctctccagagtagtgtccatatggtaggtagacagctgttagctgagagwggatagattgctgctagaaatgctccagggctttgtttgctgccaaattgcagctactgacacttaacagattgttattattatttgggtgttgttattcttatttgctgctgttacttcttagcacaacgccaactggcttaccccacttctaaaatatcacttcaacaatttgaaaagtcagtgtaaatagcccaaggagcaccacaagtctagaaacttctcaaggaacttgccaaatcctcagtccatctgacaggggaggagcagcacaaaacataggcacaagtgaaagatcat

SEQ ID NO: 4730 - DNA, 600 bp, Chicken  19866894107908_1
caggttgcacctcatgctggtggggggtttggagccctcggggcactgggaggtgggcagtgttgcactgtggtcgccgctcttgcagagcacgatgcggtggcggaaacctggtccacagcttggggtgcactgcagggaggagagatgcatgcaatcaaaacatgcaacagggagcagagacagaggtagcattgcccaccaatgttcctgtctgctaaactgcaagaggacaactctccatgttaccctctccatgggcagcatcaccagtggtgatgggtggtgatgcactggaaygggttgcccaaggaggctgtggatgccccatccctggaggcattcaaggccaggctggatgtggctctgggcagcctggtctggtggtcggtgaccccgcacatagcaggggggttgaaactggatgatcactgtgatccttttcaactcaggccattctataattctgtgattctatgaaatcagggactccactggttgttaccaggaaggcttcagattaagtctactctcaactttctgctcagcctagcgcaggagacaaaccaaaagatgagcaaagagtgctaccacggctga

SEQ ID NO: 4731 - DNA, 599 bp, Chicken  19866894107913_1
  misc_feature (1)..(16): n is any nucleotide
nnnnnnnnnnnnnnnnacttgcaacttaactacctctgaatttacctgacgtttgaggaacttccatttagatgctgctgggtagttttacaggtccagctgtacctaacttcatggggctatttcaagaaaacaaatggtttaatctggtcccaggaaacaggcttgtcaggttcctggctcttttcctgtagcttttctgaagattctctaattttccatcaccctttgtgaagtgcgagcacctgctgtcatatcccagtaatcattctgccagtacagtacatagggtaatgttayatctctgtttctgagtgttctcatgtttcatgccaaggctgcagcactgcagcgggatctcatgttctttgttatccacttagtaatccaaaagaacgtctgaggattggtgttttccacttggaaacgtgctgtgggaggtgacttgacttgaaatatcacttttgagttgaaactgtccatagtcctgacaactgttccttatacagccatacttttgacaattcacaggcactctgtattccattacagagatttttattgtgttttcgttgtgtagcagattgtttgatcagtgc

SEQ ID NO: 4732 - DNA, 349 bp, Chicken  19866894107913_2
tccacttagtaatccaaaagaacgtctgaggattggtgttttccacttggaaacgtgctgtgggaggtgacttgacttgaaatatcacttttgagttgaaactgtccatagtcctgacaactgttccttatacagccatacttttgacaattcacaggcactctgtattccattacagagatttttattgtgttttcgttgtgtagcagattgtttgatcagtgctgtgcactattgagtccattattctgcacggactagataaactatcaattacttaagcaactgtgatttttgtakttcgtattgatttggcttttttgtttagttagggttgtgttgatctgtt

SEQ ID NO: 4733 - DNA, 600 bp, Chicken  19866894107916_1
aatctaccatcaaaatgccttcatttcatttcatttcatttccccacttctggcaaaacggaatgctgcttactaactaataatagaggcactccggtctccataacgagaagagagaattagctgtaatcaataaaggaactatggaagaggcaatggtgaaaacacacaaaaccacaattaatgggctatagtataagagaaaggtcccaaaatggataaaggagctgttaaatgagaaattctcaaaatagcaggaggtcattcaggggggtttttgttttcatattatgtcttgcwgaaatggggagagcaagcaggtctgaagagcactagaacaagggcagactgaggaacaggacaggatcataaagaccagataacaggtaataaaatggcaggagcttcaactgataaacactgggagaaaaacttaagcttcactaagactgatggtctccatgctcagaagggggatatggggagctggcagacaactgcaraaaccattagctcaccactcagcaataagccaaaaaaatccaaagtcaaatattaggaatcactggaaaaaccttagaagatgatgaggtcactgca

SEQ ID NO: 4734 - DNA, 600 bp, Chicken  19866894107916_2
aaggtcccaaaatggataaaggagctgttaaatgagaaattctcaaaatagcaggaggtcattcaggggggtttttgttttcatattatgtcttgcwgaaatggggagagcaagcaggtctgaagagcactagaacaagggcagactgaggaacaggacaggatcataaagaccagataacaggtaataaaatggcaggagcttcaactgataaacactgggagaaaaacttaagcttcactaagactgatggtctccatgctcagaagggggatatggggagctggcagacaactgcaraaaccattagctcaccactcagcaataagccaaaaaaatccaaagtcaaatattaggaatcactggaaaaaccttagaagatgatgaggtcactgcacaaatccacggtttgcccatatctttactaagtgtacttctgattcccttatctctaaaaggaaacagtataatggaaaaaggtttagagaaagacaaacagaaagattacagttatgggacaacttcaatacagagaatgatcaagtaggctgtgacttccccacctcaaagacagatcatatcagtgaaacatgactgagg

SEQ ID NO: 4735 - DNA, 600 bp, Chicken  19866894107918_1
ttttgtttcgaatcaggctactttcatttaaagtgtgtaatacagatttagcaacgtaagaatcgacagtcagattcaaatatcttggccgtaaggttcatactgcactgaaatattgaatctgttctcactaatgaggcagtttttcacacattgaagggatatgtctaatgttggatctgttatattcttgaggagtgttggatctctctcctctccaagcagcagtcctcatcattgcaattcaacagtaaaatcttgaaacagtattgaatcaaatggcttctttccatgctttakcctcataaaatgctggaaacaaagctcaattggtccctggagcccaaaatgataattcatcaatgctgctaaaagagaatgtatcttaaagtgctagcataattttttagcattctgtgtccactgcaaatagtattgggaggaaaatgcaaacaaacagccccaaataagtatatataatatgcactgcctaattcttccctttatctttttaggtttactggatggcaccgtccatgcctctgcagagagcttgtttaaaaccaagatgcctattaaggttccttaagccctgtttat

SEQ ID NO: 4736 - DNA, 599 bp, Chicken  19866894107921_1
  misc_feature (1)..(39): n is any nucleotide
nnnnnnnnnnnnnnnnnnnnnnnnnnnnnnnnnnnnnnncacaagaggcttgagagaaactaaatgaatatgcttcacagcgtcttcccacatgctctaaacccggccacaaatcctttgtcagttgtagagcaaataaagttcatgaaagaaagaaggttaaattgcataatttaatattttcagaaataactactgtgcattttggaaactgcatgatttccactgaaaatgggaaaagggctgctatgtcacttcagtttctaaacgtcatctgtgttttttggaatgaggggactsggctagaaaaacaaccttcacactaattaacaaaaatacaaaaataaaaagtcraatttaaactcaaagacttagctttgtatatggttccatcattatatttagtgaagcatgattaaatgaattttacaaaaaaaaaaaaaaaataatgcaattcttgctaataataaggagagaggaaataccgactataaatgcttttcctttaatttctattaattattacatttaatttctcattgtgttgtgtttgaaagcttcagttgtggagccaggacgccattatatcagctgttcta

SEQ ID NO: 4737 - DNA, 600 bp, Chicken  19866894107921_2
agaaactaaatgaatatgcttcacagcgtcttcccacatgctctaaacccggccacaaatcctttgtcagttgtagagcaaataaagttcatgaaagaaagaaggttaaattgcataatttaatattttcagaaataactactgtgcattttggaaactgcatgatttccactgaaaatgggaaaagggctgctatgtcacttcagtttctaaacgtcatctgtgttttttggaatgaggggactsggctagaaaaacaaccttcacactaattaacaaaaatacaaaaataaaaagtcraatttaaactcaaagacttagctttgtatatggttccatcattatatttagtgaagcatgattaaatgaattttacaaaaaaaaaaaaaaaataatgcaattcttgctaataataaggagagaggaaataccgactataaatgcttttcctttaatttctattaattattacatttaatttctcattgtgttgtgtttgaaagcttcagttgtggagccaggacgccattatatcagctgttctacaaaataaaatggtctctttctcaaagggtgcctatatgtctatatatacgaata

SEQ ID NO: 4738 - DNA, 599 bp, Chicken  19866894107929_1
  misc_feature (1)..(93): n is any nucleotide
nnnnnnnnnnnnnnnnnnnnnnnnnnnnnnnnnnnnnnnnnnnnnnnnnnnnnnnnnnnnnnnnnnnnnnnnnnnnnnnnnnnnnnnnnnnnnatctggaacactcacccatagcagggcacatctgaatcgtgtgagacatgattacatttagtaacataatacattatctcctcaagagtttctgctagaatccagactctaaacgaagctttgggtccctcacattgccctgtcatgggccataatgtagtcttttatcatcgtacttttcaattagatcatgacttttaacatgcrgagttggaaattctggttacccatgaaaaactattaaaagatagtgcctggaaaacatagaagccatccaaacactctggtgctgtaggamatatgtccctgtgcagctctcccatgggaagggtgtygtcgcttccaggcttttgtggcaatcagtacctacgtggctgcttaacaggcagaagccctaataataaggtgagtgaaagggcagctgggtgcagtttcttctgctgccttcaagaaatgtcttcttgctgggggtggagtagatgaaactggtatttcttaaccagtat

SEQ ID NO: 4739 - DNA, 599 bp, Chicken  19866894107929_2
  misc_feature (1)..(2): n is any nucleotide
nnatctggaacactcacccatagcagggcacatctgaatcgtgtgagacatgattacatttagtaacataatacattatctcctcaagagtttctgctagaatccagactctaaacgaagctttgggtccctcacattgccctgtcatgggccataatgtagtcttttatcatcgtacttttcaattagatcatgacttttaacatgcrgagttggaaattctggttacccatgaaaaactattaaaagatagtgcctggaaaacatagaagccatccaaacactctggtgctgtaggamatatgtccctgtgcagctctcccatgggaagggtgtygtcgcttccaggcttttgtggcaatcagtacctacgtggctgcttaacaggcagaagccctaataataaggtgagtgaaagggcagctgggtgcagtttcttctgctgccttcaagaaatgtcttcttgctgggggtggagtagatgaaactggtatttcttaaccagtatttcttttgaatgacagatcactttataacacaaaaagaaaaacaaacaaacaaacaaacaaacaaaaaaccaatgcatgtaaaagtgaatt

SEQ ID NO: 4740 - DNA, 600 bp, Chicken  19866894107929_3
atcgtgtgagacatgattacatttagtaacataatacattatctcctcaagagtttctgctagaatccagactctaaacgaagctttgggtccctcacattgccctgtcatgggccataatgtagtcttttatcatcgtacttttcaattagatcatgacttttaacatgcrgagttggaaattctggttacccatgaaaaactattaaaagatagtgcctggaaaacatagaagccatccaaacactctggtgctgtaggamatatgtccctgtgcagctctcccatgggaagggtgtygtcgcttccaggcttttgtggcaatcagtacctacgtggctgcttaacaggcagaagccctaataataaggtgagtgaaagggcagctgggtgcagtttcttctgctgccttcaagaaatgtcttcttgctgggggtggagtagatgaaactggtatttcttaaccagtatttcttttgaatgacagatcactttataacacaaaaagaaaaacaaacaaacaaacaaacaaacaaaaaaccaatgcatgtaaaagtgaattagaggaggcagtactgcttgtgttttaaactwcctttt

SEQ ID NO: 4741 - DNA, 600 bp, Chicken  19866894107929_4
ggtgtygtcgcttccaggcttttgtggcaatcagtacctacgtggctgcttaacaggcagaagccctaataataaggtgagtgaaagggcagctgggtgcagtttcttctgctgccttcaagaaatgtcttcttgctgggggtggagtagatgaaactggtatttcttaaccagtatttcttttgaatgacagatcactttataacacaaaaagaaaaacaaacaaacaaacaaacaaacaaaaaaccaatgcatgtaaaagtgaattagaggaggcagtactgcttgtgttttaaactwcctttttttttctatccttttcagcatctcattagaagagcagtaaacggttctgtcactgatttggaaaatgttgagacgaagcagcgtttcccctcgtgggagactcaggatccctcaaaaacatcactaacgtgttccttcaggtcagccaggcccctagcgcttcggtttcttatctggaatcccagcgaaacagactcaagtgcctccctgcagaaggttgattttgggaggctcgttctcttcattaggtgagaatttgtgcattggatgaaggaaaggttatgggtgaaagtt

SEQ ID NO: 4742 - DNA, 600 bp, Chicken  19866894107931_1
gccctgtgacctaaattgagttaaagatgtgtaaagatgtatgaaagcactgtagggtaaaggacatggatgtgaacctaggcaagctccaactgaagttatgaagtcagagagctgatgttttcttctgtgagtgagcattgttcctggggaggagggcaggaaatggtaaagaaaagcatgcttggagcactgctggttaggaatgatgtcccgctgctcatttagatcattaactgtttgtcaatacaacaattagtgggctaaagattccattgaccacatgacaagaatcgatayacacggtgcttgttagttatttaccacagagtgtattaaagcctatggattcaccataaatcctttaaagctatcctgctatgatccttgccacaacatgcattgacacatcaataaatccttttgacaagggcgatatgtgaaaatcgataccagtttatcagctatttccatgtagtcttttctacaaaggtttaaagatcttttcccaaagctgtgtaactgacaaggtgtagggacagatcttgtacccaacagtgaccttgattaatgctgctcactgaaggaattttataaatc

SEQ ID NO: 4743 - DNA, 600 bp, Chicken  19866894107939_1
tattccacctgaagtgtcttaaaaaaataaaaaggaaaccacttctgcacctcagacttactggcaaaggactctggatggagtatttgggtgtgctctacaggatttacaggatctgaagctttttcctatggcttttggcttttaacatagcagtgtttcttctcagaaacacacctgctggtgtgatggcatctcagcagcagcagaatctcagcctgccatcacgggaaactcctggcagccttgagcagaacttgtcccccagcagcctgctgtgaccgaacctggctttgtttktcctttacctacagcttctgaatgggttaataaggcttcccaaatgaagctgagagcagaagccggcattgggcaggaaaaagctattatttctggagcaatggctcagcgctgctgttttcgctgcttgattgctaggaatgctgtaggaaccaaggcaggctacttgcaattcccacccgttaatctgacgtatctaatgagtaaatgtacttaaatgtgtcttagagtaagcagggtggaagagagacagctccagcagcaccaccaagtacacacaggtgttgctagcaattcttt

SEQ ID NO: 4744 - DNA, 600 bp, Chicken  19866894107944_1
aaaatgatttattgaacagaaaatcatttgttccatgttgctccacaaaggcttttcttcttcttcgctctggagaaggggtctggcagggatatacaaacaccacagtacccggcagccctgctcggccaggagagcacagcaggagagattgtcaggagaggtgcgtgagccaccacagctacaccggaggagctggaactgggaaagtccttgctcaactctgacagcctccctccctccctcgtggtcctgctgttcggtgccctacttttaggcagcctcctgctgagagtgackggggggggaaaaaagtgaaaaaggtgtgagtgcctgcttccctgaactgctctgtgtggagctcagggaacagatttgggactttgaaggtcagggcagcttcactcctgctttcggttggtgtaatcaaaaggagagaatgggtgaaccatgtctggactcagaaggaagtgacccagaccattgcacacatttaataagtttggatgaattaaaccaaacaggtcaaatgtctgatctgcctcttctcctctaaaaaataatgacacaagagaagctaaaaggaatgcggcactgggt

SEQ ID NO: 4745 - DNA, 599 bp, Chicken  19866894107946_1
  misc_feature (1)..(103): n is any nucleotide
nnnnnnnnnnnnnnnnnnnnnnnnnnnnnnnnnnnnnnnnnnnnnnnnnnnnnnnnnnnnnnnnnnnnnnnnnnnnnnnnnnnnnnnnnnnnnnnnnnnnnnnacctctgctttgatgccaccacatctactttctatatgtattaccttaggaaaagtgtgttttccacccttcagtcagaatatggtggtcttctgcacaatctcagctgtgaacgaagaccaagtcaatgctggggctgtacttcattctggagtgggccctgtttttgctaatggatgttttaccatctacacatrgtttccatttggagattacagcaaagtggtaggcagcatcgagttgcactgggaatgagcatgtgaatttaccaggacgtttaagctttcaagaatactattaggacaaaataaaacttctatttgtgatgaagtaggatggtgcaaaagcaagagtactygtctctttttactaagcttgtgcaatagaaattatacagagatattgtatgttgatgcatagatattgttttaactataatggaaagtgtgtgtcaaggtaaaccatttgattctgtaacaggcctgcatgacaactt

SEQ ID NO: 4746 - DNA, 600 bp, Chicken  19866894107946_2
gttttccacccttcagtcagaatatggtggtcttctgcacaatctcagctgtgaacgaagaccaagtcaatgctggggctgtacttcattctggagtgggccctgtttttgctaatggatgttttaccatctacacatrgtttccatttggagattacagcaaagtggtaggcagcatcgagttgcactgggaatgagcatgtgaatttaccaggacgtttaagctttcaagaatactattaggacaaaataaaacttctatttgtgatgaagtaggatggtgcaaaagcaagagtactygtctctttttactaagcttgtgcaatagaaattatacagagatattgtatgttgatgcatagatattgttttaactataatggaaagtgtgtgtcaaggtaaaccatttgattctgtaacaggcctgcatgacaactttgttgctgactgctggggaggagaggtggggagataatagacattgtgccttctaccgctcacctttatggtactcctccagcatcagaggcagtttttaacctcggaaaaatgaggtagtggccaactctatgtgctgctttttaaatccctaagtaatgg

SEQ ID NO: 4747 - DNA, 600 bp, Chicken  19866894107948_1
cacagtctgaggtcataatacttttaaaatgggctgttttataatattcacgaggaatttagctatttactttctccagtagacttttgcagattatttatttgtttgagtacttgagaagttaatggagcaggatttatttatttatttgttagaggaaagaaaaattgtctgcctctagacaagctgctataaaagacaaaataccatttagctgatggaggtatgtttgtgagcctccattgctcagtggggcaccaaagagggtttggggtgcttgttaattttagacatctatgmtgagtgctcttcatctccatctggaggccttatttctctgtagtgtttgtacgtccttaaagagcacctaactttagaagtcctttttgatgctagaagtaactttaagttactgacgttattttaagtgatctgaatcccctggtgttagtatgatgggaactgactagcaagtgaggactgataatgaaacaccagcaaactcaaagttgttgtgagtagaggagttcattcttaggacaaccaactcctctcttgttagccaatggtttagctatcccacagatgttcttcctcagc

SEQ ID NO: 4748 - DNA, 534 bp, Chicken  19866894107949_1
aaaaatgatggaaaagcacacacagctctgttcagggtaagcactaaacctgcccccttttcattttcagtcattacttgagatcagcagtgaagagtgctgactgtggtgttccctaaacacactagcctgaaggaaggtcagtgtccatgtgatgggacaagctgcagagcttgtaattgtggtttggagtgaaatatgacagtgttggcacggtctgaagacaacctcttaggagcggtacctcccaggcacttccaaaaccaaggtctccttcttcaggtttctctgactccagaraaatggcccaaaatacttcagtgactcccatgacgctggtgatgacagcagctcacagcaaattcagtgagatggaaaactcagtgatatcacagaaaygtggacttacgyacttggcagacaatttccagtttgctacaaacccagtgtggtagatccattgtcagtacagtggctgggcaccaaatgcagtgaagtcttggtcttggacacctggtacaccttcagcggtta

SEQ ID NO: 4749 - DNA, 435 bp, Chicken  19866894107949_2
ctgactgtggtgttccctaaacacactagcctgaaggaaggtcagtgtccatgtgatgggacaagctgcagagcttgtaattgtggtttggagtgaaatatgacagtgttggcacggtctgaagacaacctcttaggagcggtacctcccaggcacttccaaaaccaaggtctccttcttcaggtttctctgactccagaraaatggcccaaaatacttcagtgactcccatgacgctggtgatgacagcagctcacagcaaattcagtgagatggaaaactcagtgatatcacagaaaygtggacttacgyacttggcagacaatttccagtttgctacaaacccagtgtggtagatccattgtcagtacagtggctgggcaccaaatgcagtgaagtcttggtcttggacacctggtacaccttcagcggtta

SEQ ID NO: 4750 - DNA, 423 bp, Chicken  19866894107949_3
ttccctaaacacactagcctgaaggaaggtcagtgtccatgtgatgggacaagctgcagagcttgtaattgtggtttggagtgaaatatgacagtgttggcacggtctgaagacaacctcttaggagcggtacctcccaggcacttccaaaaccaaggtctccttcttcaggtttctctgactccagaraaatggcccaaaatacttcagtgactcccatgacgctggtgatgacagcagctcacagcaaattcagtgagatggaaaactcagtgatatcacagaaaygtggacttacgyacttggcagacaatttccagtttgctacaaacccagtgtggtagatccattgtcagtacagtggctgggcaccaaatgcagtgaagtcttggtcttggacacctggtacaccttcagcggtta

SEQ ID NO: 4751 - DNA, 600 bp, Chicken  19866894107952_1
ctggaaaatttgcaccaggtgggtctcatgaatgctcacagaggaagaacatcataaacaagtttattaggactatttgaactaatagaaggctgaaagtgacagtttcctggattacatcattaccagtgacaacatgtggtgccaccattacaagctggagtcaaaacagcagttcagagtggcaacatgtaaattccccatcaaagaaaaagctcaagacatagtgagtaaagtgatgtgtattgtcttttaggataggaaaggaacagtccttctgatttcctgaaacctggactraccatcagctctaactgctacactgtcacactatccaagctgaaggcttgaaccttcagagtcaagccagagatgaagacaacttttctcttgaagcatggtaatgtcaagtcccataccagtttgaagactgcagagcacattgccagtcctggctggattattctactacacccagtgtagtctgaagatggcatcttctgacttccatctgtttgggctgatgaaagatggactgcatgggcaacattttcgtagtgatgacaccatcatagcagatgtgaaacagtgcagattttt

SEQ ID NO: 4752 - DNA, 600 bp, Chicken  19866894107953_1
tgggtactgaaaggctgctatcaggtcacctcgcagccttctcttttccaggctgaacagccccagctctcagcctgtcctcataggagaggtgtttcattccatggaacatttttttggccattctctggatgcactccaacaggtctatgtttctcctgtactgaggactccgcatctggacacagttctccaggcgagactgaccatgcttcttttgaaatcttctatcttatgatggaaggtttcccataacaatcactggtaaaaagaaaacaaacaaacaacaacaacaacaamaaaacaacaaaactcctcagattcttttctgaaatgttttataatgttctttgtgtctctccttgcagtactttttttgggtttcttttggtggcatttatagttatggtatctcacaattttttatgagtatgctatgtcacaatttttgagacataaggaagttgtaytaatattgcaatgaattctgtaatgtcaraaatacattttgaaatacatgacattgtgtgtgcaaagagaatcataaatttggsagaaaaatccagaagaaacattaccacaaaactgaacgttacgtta

SEQ ID NO: 4753 - DNA, 600 bp, Chicken  19866894107953_2
ctccgcatctggacacagttctccaggcgagactgaccatgcttcttttgaaatcttctatcttatgatggaaggtttcccataacaatcactggtaaaaagaaaacaaacaaacaacaacaacaacaamaaaacaacaaaactcctcagattcttttctgaaatgttttataatgttctttgtgtctctccttgcagtactttttttgggtttcttttggtggcatttatagttatggtatctcacaattttttatgagtatgctatgtcacaatttttgagacataaggaagttgtaytaatattgcaatgaattctgtaatgtcaraaatacattttgaaatacatgacattgtgtgtgcaaagagaatcataaatttggsagaaaaatccagaagaaacattaccacaaaactgaacgttacgttatattcactaaaagagatttgcatttttatgttgtttagaaatatgcagcaactagttacatattttgtgtatatttgccagaawtttttgggaaacttcaaaaaatcaatagatgagagtactgccagaatggtatggattcaaaagtagtaatgatcatgctcacaaat

SEQ ID NO: 4754 - DNA, 600 bp, Chicken  19866894107953_3
agactgaccatgcttcttttgaaatcttctatcttatgatggaaggtttcccataacaatcactggtaaaaagaaaacaaacaaacaacaacaacaacaamaaaacaacaaaactcctcagattcttttctgaaatgttttataatgttctttgtgtctctccttgcagtactttttttgggtttcttttggtggcatttatagttatggtatctcacaattttttatgagtatgctatgtcacaatttttgagacataaggaagttgtaytaatattgcaatgaattctgtaatgtcaraaatacattttgaaatacatgacattgtgtgtgcaaagagaatcataaatttggsagaaaaatccagaagaaacattaccacaaaactgaacgttacgttatattcactaaaagagatttgcatttttatgttgtttagaaatatgcagcaactagttacatattttgtgtatatttgccagaawtttttgggaaacttcaaaaaatcaatagatgagagtactgccagaatggtatggattcaaaagtagtaatgatcatgctcacaaattatggccaatttaatcaaaagatgctttt

SEQ ID NO: 4755 - DNA, 600 bp, Chicken  19866894107953_4
acaatcactggtaaaaagaaaacaaacaaacaacaacaacaacaamaaaacaacaaaactcctcagattcttttctgaaatgttttataatgttctttgtgtctctccttgcagtactttttttgggtttcttttggtggcatttatagttatggtatctcacaattttttatgagtatgctatgtcacaatttttgagacataaggaagttgtaytaatattgcaatgaattctgtaatgtcaraaatacattttgaaatacatgacattgtgtgtgcaaagagaatcataaatttggsagaaaaatccagaagaaacattaccacaaaactgaacgttacgttatattcactaaaagagatttgcatttttatgttgtttagaaatatgcagcaactagttacatattttgtgtatatttgccagaawtttttgggaaacttcaaaaaatcaatagatgagagtactgccagaatggtatggattcaaaagtagtaatgatcatgctcacaaattatggccaatttaatcaaaagatgcttttttttttttttttttttaatcatatatctttttgaatggatttcaaagttttcaga

SEQ ID NO: 4756 - DNA, 600 bp, Chicken  19866894107953_5
cttttggtggcatttatagttatggtatctcacaattttttatgagtatgctatgtcacaatttttgagacataaggaagttgtaytaatattgcaatgaattctgtaatgtcaraaatacattttgaaatacatgacattgtgtgtgcaaagagaatcataaatttggsagaaaaatccagaagaaacattaccacaaaactgaacgttacgttatattcactaaaagagatttgcatttttatgttgtttagaaatatgcagcaactagttacatattttgtgtatatttgccagaawtttttgggaaacttcaaaaaatcaatagatgagagtactgccagaatggtatggattcaaaagtagtaatgatcatgctcacaaattatggccaatttaatcaaaagatgcttttttttttttttttttttaatcatatatctttttgaatggatttcaaagttttcagattgaatagtacaaaaaggacaactaaccttgtatagaaaaatasagagaaaattgatgtgagtattgtccaggagagggagggaccaagggagaagaagagacaagttagaaacagaggcagggaatgat

SEQ ID NO: 4757 - DNA, 600 bp, Chicken  19866894107953_6
tatattcactaaaagagatttgcatttttatgttgtttagaaatatgcagcaactagttacatattttgtgtatatttgccagaawtttttgggaaacttcaaaaaatcaatagatgagagtactgccagaatggtatggattcaaaagtagtaatgatcatgctcacaaattatggccaatttaatcaaaagatgcttttttttttttttttttttaatcatatatctttttgaatggatttcaaagttttcagattgaatagtacaaaaaggacaactaaccttgtatagaaaaatasagagaaaattgatgtgagtattgtccaggagagggagggaccaagggagaagaagagacaagttagaaacagaggcagggaatgatccaactgggaaacaaaggtgacctggaacaaacctggggcctttaagtgtgttactctgccccatccttaagaactagttgaaaatyttcagttttaaaataaatctactggtacattgtctactcctgtttttgtggtacagttagactgcttagtgcctaaagctgatcatggaagccttagtaagagtcaagggagcattgattggtgaga

SEQ ID NO: 4758 - DNA, 600 bp, Chicken  19866894107953_7
atggccaatttaatcaaaagatgcttttttttttttttttttttaatcatatatctttttgaatggatttcaaagttttcagattgaatagtacaaaaaggacaactaaccttgtatagaaaaatasagagaaaattgatgtgagtattgtccaggagagggagggaccaagggagaagaagagacaagttagaaacagaggcagggaatgatccaactgggaaacaaaggtgacctggaacaaacctggggcctttaagtgtgttactctgccccatccttaagaactagttgaaaatyttcagttttaaaataaatctactggtacattgtctactcctgtttttgtggtacagttagactgcttagtgcctaaagctgatcatggaagccttagtaagagtcaagggagcattgattggtgagatgcaaccatgagctgtgggtgagaagtagtcatctaaagaatctctgtcccagaaagtatgtacgtaggctgctccaaaagtaatgcattttatttatttccayagaaactacaatagatacaaaaatcacaataatgctatttggttgaacaaattctcagctacaaaacag

SEQ ID NO: 4759 - DNA, 517 bp, Chicken  19866894107953_8
tgacctggaacaaacctggggcctttaagtgtgttactctgccccatccttaagaactagttgaaaatyttcagttttaaaataaatctactggtacattgtctactcctgtttttgtggtacagttagactgcttagtgcctaaagctgatcatggaagccttagtaagagtcaagggagcattgattggtgagatgcaaccatgagctgtgggtgagaagtagtcatctaaagaatctctgtcccagaaagtatgtacgtaggctgctccaaaagtaatgcattttatttatttccayagaaactacaatagatacaaaaatcacaataatgctatttggttgaacaaattctcagctacaaaacagtgtttttgaagatagtcatcaccattagctatgcaatttgctatcaataaacaaaagccagcacgctgcactcaaaaatctgcacgagcagaggtgacccactgtttcacggctgttatgatggtaccattgctagggaaaatgttgc

SEQ ID NO: 4760 - DNA, 599 bp, Chicken  19866894107954_1
  misc_feature (1)..(199): n is any nucleotide
nnnnnnnnnnnnnnnnnnnnnnnnnnnnnnnnnnnnnnnnnnnnnnnnnnnnnnnnnnnnnnnnnnnnnnnnnnnnnnnnnnnnnnnnnnnnnnnnnnnnnnnnnnnnnnnnnnnnnnnnnnnnnnnnnnnnnnnnnnnnnnnnnnnnnnnnnnnnnnnnnnnnnnnnnnnnnnnnnnnnnnnnnnnnnnnnnnnnnnnttttggtgaacttgactgaagcaacgcctgctgtgtaaaggctcagaggtattggtctcacctagggcagaggggaaggtgatggtaggtggagagggcayggaaagctctcagagccatgttcttccctccctgtcaaagcacctggcagagcagcctgaattacagctgcttctaggggtgaagaagtgcttcagcttctctgttacgccactgctgtactgattttacagcacgcrtgtgggtctgcataggatgaaaaagcaagtgagaaaacccccacctgcatgggctgtgaaattccagtagctgcttagcacacaagcttgaaagcaaggttttgctctgaggggatsattgcaatgctcattacagaggaggccaaacctacctggtctcc

SEQ ID NO: 4761 - DNA, 599 bp, Chicken  19866894107954_2
  misc_feature (1)..(61): n is any nucleotide
nnnnnnnnnnnnnnnnnnnnnnnnnnnnnnnnnnnnnnnnnnnnnnnnnnnnnnnnnnnnnttttggtgaacttgactgaagcaacgcctgctgtgtaaaggctcagaggtattggtctcacctagggcagaggggaaggtgatggtaggtggagagggcayggaaagctctcagagccatgttcttccctccctgtcaaagcacctggcagagcagcctgaattacagctgcttctaggggtgaagaagtgcttcagcttctctgttacgccactgctgtactgattttacagcacgcrtgtgggtctgcataggatgaaaaagcaagtgagaaaacccccacctgcatgggctgtgaaattccagtagctgcttagcacacaagcttgaaagcaaggttttgctctgaggggatsattgcaatgctcattacagaggaggccaaacctacctggtctccaagcagctctcaaatatgttattcaaaccaccatgtgaactcagagctgtgagcaactgtgcaaatgaagtggaggtaggaggccatgctagcaaagggctcacagctcatagtctgttgggttacaacgtgctgctg

SEQ ID NO: 4762 - DNA, 600 bp, Chicken  19866894107954_3
ctcacctagggcagaggggaaggtgatggtaggtggagagggcayggaaagctctcagagccatgttcttccctccctgtcaaagcacctggcagagcagcctgaattacagctgcttctaggggtgaagaagtgcttcagcttctctgttacgccactgctgtactgattttacagcacgcrtgtgggtctgcataggatgaaaaagcaagtgagaaaacccccacctgcatgggctgtgaaattccagtagctgcttagcacacaagcttgaaagcaaggttttgctctgaggggatsattgcaatgctcattacagaggaggccaaacctacctggtctccaagcagctctcaaatatgttattcaaaccaccatgtgaactcagagctgtgagcaactgtgcaaatgaagtggaggtaggaggccatgctagcaaagggctcacagctcatagtctgttgggttacaacgtgctgctgctgaggttttgatgctgagatgcagaatgtaatgggatagatctgggccagaagraacagccttaagatgtgatttactgtgacctgttccagtctgcctgcacataaattacttcca

SEQ ID NO: 4763 - DNA, 600 bp, Chicken  19866894107954_4
tgtgaaattccagtagctgcttagcacacaagcttgaaagcaaggttttgctctgaggggatsattgcaatgctcattacagaggaggccaaacctacctggtctccaagcagctctcaaatatgttattcaaaccaccatgtgaactcagagctgtgagcaactgtgcaaatgaagtggaggtaggaggccatgctagcaaagggctcacagctcatagtctgttgggttacaacgtgctgctgctgaggttttgatgctgagatgcagaatgtaatgggatagatctgggccagaagraacagccttaagatgtgatttactgtgacctgttccagtctgcctgcacataaattacttccaccagagggatgttacaaggaggaatgtggctcttctcttttgtcctcatcccttgctgctttctcagctggctggttcattttggcagagaggagtgagacaggagattgggaacacagcatggatgtggagactccattgtgcccgtggtcttggaggcccaagaggatgaagatatgaagaaatgtttcaggagtacaataatgattcctcagtgagtcgttcatttttgtacca

SEQ ID NO: 4764 - DNA, 600 bp, Chicken  19866894107967_1
ttttattgacttaaacagatggaagtcagaagacaccaaatccaggcaatacgattggtgtggtaggacaatccagccaaggttcagtgacacacctttgcttaataagtactcgcatgtgagatgccattctgccagactgcctctctgctgccgtccatcacacaggaacaaaatgaaacagagtattggtgggaagttacctctactgccctaacaccaacaattgcctctgatgttgtgggccagttaaataaagtaggaggaattacttttagagcagtatgcacagatggatgygtgtatgtgataggacaaggggaaatggtttcaaaatataagaggatagatttttgttgaatatatggaaaacatcttttacagtgagagcggtgaggcactggaataggttgattagagaggtggtgcatggccctgtccctgaagactttcatggcaaggctggaccaggctctgagcaacctgatgtagccgaggatgttactgttcattgcaggggagttggattagataatctttaaaggtcctttccatctctgaggattctatgattctattatacatacatacatacatata

SEQ ID NO: 4765 - DNA, 600 bp, Chicken  19866894107970_1
aatctgttgtcaaatttttctcatgtggcctgattgctttgcaaaataccatatcctacatatggccatctgtcaaaacagcagtgacaaaacgaattaatctgaattgcagatgtgttaatgaatccctttgaagggcttaagcatttaattaaaagcaaagcagaacactatggataattgttaaagcttttaaaatattctaatttatctttaatattagaattttattttcaggcacgtgatttatttggtaggattttctctccccagatctaattaaaataatacaaacaagaygtgacctcagtgtgtagcattcactcgttagcaagtatatagaattaaaaatatttgcatagtggaaccaaacattcaatactttctaagttaaatagaagagagaaacgcttgcaggaaattgcagccaccttctggtcaggctgacttaaaggcaatagtgaagggccccttgctcgtttattgagtgaatgggggacagcacttagagctgtgcacttgagcactcagatgtggaggatatctggttaggaggggcctaattttcgtgcagtgggatagtttagaaagtggggctct

SEQ ID NO: 4766 - DNA, 599 bp, Chicken  19866894107975_1
  misc_feature (1)..(191): n is any nucleotide
nnnnnnnnnnnnnnnnnnnnnnnnnnnnnnnnnnnnnnnnnnnnnnnnnnnnnnnnnnnnnnnnnnnnnnnnnnnnnnnnnnnnnnnnnnnnnnnnnnnnnnnnnnnnnnnnnnnnnnnnnnnnnnnnnnnnnnnnnnnnnnnnnnnnnnnnnnnnnnnnnnnnnnnnnnnnnnnnnnnnnnnnnnnnnnncatgaaattctgagcaggcagatggacttcccccagcttctaacaaaggcacagtacaatggataggtgttgacagcacccacattgtgctttctttcagtattgaggrgggaatattctgtaacattcattattttgagggggatgatatttcaagtatatgattctttattcggtgataccttgttcttgggagaaaggaactcagattcattttgagtggggtttgctccagctaaatgagatggttccccagagatctacatgagattctcttcaaagaaggagtgtttttaaacttgttgacttagataactgggtgtcattttgctgaaatcagtggaacaggcagcttcaagtctagccagcttagttaatttgtttatgtggatactgtaatccaatgct

SEQ ID NO: 4767 - DNA, 600 bp, Chicken  19866894107975_2
ataccttgttcttgggagaaaggaactcagattcattttgagtggggtttgctccagctaaatgagatggttccccagagatctacatgagattctcttcaaagaaggagtgtttttaaacttgttgacttagataactgggtgtcattttgctgaaatcagtggaacaggcagcttcaagtctagccagcttagttaatttgtttatgtggatactgtaatccaatgctgaagtgctcagtaatgtatttgatatttgaagattctctgctaggtcgggtattaaaaaaagacgtctgycgtatcagattattacatatctagcatgttaaatgagcacccagagttacaytgaggtacgaatacaagtatcagacatcaacagaaaatagatctcttaggcaggtaaaacagagcacaaaatcacaaggatttctctttactgtatgagaaacttaggtattagaatgggtaactaatccatactagggttatatgatataaatatttccccagaatatttaaatattagtgctaagtcttataatcagtttgaatcaaatcagaaggtttaggatatctgtttttatgtaggacagc

SEQ ID NO: 4768 - DNA, 600 bp, Chicken  19866894107975_3
tccagctaaatgagatggttccccagagatctacatgagattctcttcaaagaaggagtgtttttaaacttgttgacttagataactgggtgtcattttgctgaaatcagtggaacaggcagcttcaagtctagccagcttagttaatttgtttatgtggatactgtaatccaatgctgaagtgctcagtaatgtatttgatatttgaagattctctgctaggtcgggtattaaaaaaagacgtctgycgtatcagattattacatatctagcatgttaaatgagcacccagagttacaytgaggtacgaatacaagtatcagacatcaacagaaaatagatctcttaggcaggtaaaacagagcacaaaatcacaaggatttctctttactgtatgagaaacttaggtattagaatgggtaactaatccatactagggttatatgatataaatatttccccagaatatttaaatattagtgctaagtcttataatcagtttgaatcaaatcagaaggtttaggatatctgtttttatgtaggacagcatgaatagaatgcctatttcctacagtcaatagtggcatactctatctctgg

SEQ ID NO: 4769 - DNA, 600 bp, Chicken  19866894107983_1
ggaggcattccatagtttgcatcatttttgtagccctcctgaggatgcactctaacagggccatgtctctcctgtactgaggaccccacaactggatgtaacagtccaggtgagctctcaccagagcaaagtagatggtcaggatcacctccctcaccctgctcaccacgcttctttggatgaagtgcagggtatgggtggctttctaggctgcaagagcaccttgctggctcatgtccagctgccatccatcagtacccccaagttcatttcaacagcactgcgctctctcctttcatsccccagctggtagtgctggtagggattgccacaacccacgtgcaaggccttgcactgggctttgttgaacctcaggagtttcacctggacccactacttgagcctgcctagatctctcttgtcccttgggcaagttgacctcagctgtttcagggtatgtttggatatgagaaacgggatgtctcatgagtggaggcaagcaagctacgcactcagagaggcacagagggttacgaatttttaacagtacacacacacataggcatctattccagataatctcagttagtagcaagcagg

SEQ ID NO: 4770 - DNA, 599 bp, Chicken  19866894107984_1
  misc_feature (1)..(132): n is any nucleotide
nnnnnnnnnnnnnnnnnnnnnnnnnnnnnnnnnnnnnnnnnnnnnnnnnnnnnnnnnnnnnnnnnnnnnnnnnnnnnnnnnnnnnnnnnnnnnnnnnnnnnnnnnnnnnnnnnnnnnnnnnnnnnnnnnnnnatgcctatgtgtgcgtgtactgttaaaattcgtaaccctctgtgcctctctgagtgcgtagcttgcttgcctccactcatgagacatcccgtttctcatatccaaacataccctgaaacagctgaggtcaacttgcccaagggacaagagagatctaggcaggctcargtagtgggtccaggtgaaactcctgaggttcaacaaagcccagtgcaaggccttgcacgtgggttgtggcagtccctaccagcactaccagctgggggatgaaaggagagagcgcagtgctgttgaaatgaacttgggggtactgatggatggcagctggacatgagccagcaasgtgctcttgcagcctagaaagccacccataccctgcacttcatccaaagaagcgtggcgagcagggtgagggaggtgatcctgaccatctmctttgctctggtgagagctcacctggactgtta

SEQ ID NO: 4771 - DNA, 600 bp, Chicken  19866894107984_2
gcctctctgagtgcgtagcttgcttgcctccactcatgagacatcccgtttctcatatccaaacataccctgaaacagctgaggtcaacttgcccaagggacaagagagatctaggcaggctcargtagtgggtccaggtgaaactcctgaggttcaacaaagcccagtgcaaggccttgcacgtgggttgtggcagtccctaccagcactaccagctgggggatgaaaggagagagcgcagtgctgttgaaatgaacttgggggtactgatggatggcagctggacatgagccagcaasgtgctcttgcagcctagaaagccacccataccctgcacttcatccaaagaagcgtggcgagcagggtgagggaggtgatcctgaccatctmctttgctctggtgagagctcacctggactgttacatccagtwgtggggtcctcagtacaggagagacatggccctgttagagtgcatccacaggagggctacaaaaatgatgcaaactatggaatgcctcccctgcraggacaggctgagagagctggggctgtgcagcctggaggagggaaggctccagggagaccagggagcagact

SEQ ID NO: 4772 - DNA, 600 bp, Chicken  19866894107984_3
gcccaagggacaagagagatctaggcaggctcargtagtgggtccaggtgaaactcctgaggttcaacaaagcccagtgcaaggccttgcacgtgggttgtggcagtccctaccagcactaccagctgggggatgaaaggagagagcgcagtgctgttgaaatgaacttgggggtactgatggatggcagctggacatgagccagcaasgtgctcttgcagcctagaaagccacccataccctgcacttcatccaaagaagcgtggcgagcagggtgagggaggtgatcctgaccatctmctttgctctggtgagagctcacctggactgttacatccagtwgtggggtcctcagtacaggagagacatggccctgttagagtgcatccacaggagggctacaaaaatgatgcaaactatggaatgcctcccctgcraggacaggctgagagagctggggctgtgcagcctggaggagggaaggctccagggagaccagggagcagactttcaggatctaaaggagacctcaaaggaaaaagcagacagactctttagcagtgtgaggagtgtggctgtgaagcagaaaagtagattatg

SEQ ID NO: 4773 - DNA, 600 bp, Chicken  19866894107984_4
tccaggtgaaactcctgaggttcaacaaagcccagtgcaaggccttgcacgtgggttgtggcagtccctaccagcactaccagctgggggatgaaaggagagagcgcagtgctgttgaaatgaacttgggggtactgatggatggcagctggacatgagccagcaasgtgctcttgcagcctagaaagccacccataccctgcacttcatccaaagaagcgtggcgagcagggtgagggaggtgatcctgaccatctmctttgctctggtgagagctcacctggactgttacatccagtwgtggggtcctcagtacaggagagacatggccctgttagagtgcatccacaggagggctacaaaaatgatgcaaactatggaatgcctcccctgcraggacaggctgagagagctggggctgtgcagcctggaggagggaaggctccagggagaccagggagcagactttcaggatctaaaggagacctcaaaggaaaaagcagacagactctttagcagtgtgaggagtgtggctgtgaagcagaaaagtagattatgtttttgcagtagaataaaacatgtacagacttttgctaaact

SEQ ID NO: 4774 - DNA, 594 bp, Chicken  19866894107984_5
aggagagagcgcagtgctgttgaaatgaacttgggggtactgatggatggcagctggacatgagccagcaasgtgctcttgcagcctagaaagccacccataccctgcacttcatccaaagaagcgtggcgagcagggtgagggaggtgatcctgaccatctmctttgctctggtgagagctcacctggactgttacatccagtwgtggggtcctcagtacaggagagacatggccctgttagagtgcatccacaggagggctacaaaaatgatgcaaactatggaatgcctcccctgcraggacaggctgagagagctggggctgtgcagcctggaggagggaaggctccagggagaccagggagcagactttcaggatctaaaggagacctcaaaggaaaaagcagacagactctttagcagtgtgaggagtgtggctgtgaagcagaaaagtagattatgtttttgcagtagaataaaacatgtacagacttttgctaaacttcctttcataatgacgacaggagctgctgttcacaatgtagcacaatatgttgacacagttgacaaataaccagcctgtccaaagcctt

SEQ ID NO: 4775 - DNA, 596 bp, Chicken  19866894107987_1
atctcagttagtagcaagcaggagactccttaagcaaatgtaatgttatgtactgactcttgagagacgggcaaaagaccaagtaggacgaagagaagaaacgctgtagtggattcggcaggaagtgtcagcagggtgtcccctgcttcaaggtgcacgttttctctctctcaaatccaccacagcctctctcctgcttggtttttttgttctttttgttttgtttttaaattctctccagggtctgtgaggttttttccacttgcatgccgtatctgcatggccagtgcatgatgttgygcccaagcagaacacctgcttgcagaaaacaagttatttgccaaacaagacaaactagtaaggtcagtttcctaccaaaacaagataagcagctctagctggaaatgcggtcatcctcaaaactgtcgtgcagcccatggttctagtcacacagtcatccagttatgctgtctgtcaggaagctttgtcccagttcaggatcattctttggccaggacctttgggtccctgacacgtcaccccacagcttggggtcacagaatcatagaaccctttgagttggaagggacctctga

SEQ ID NO: 4776 - DNA, 600 bp, Chicken  19866894107997_1
aaaaaacaggatgaagaagaaaggagaggacagtgaaaaagaacagaagagtgtagatgaagaggtgtggggacacaaagatcagaagaggagtacagtcagaagaagaggagagaagatatagggaaagaaagaacagcagcagaagacaagacatgatatagggaatcaagaagagcagagctgtcagaagaaaaaagtgaagagagagagaaaaaaaaacagacgaggaacagatgcagaagtagcgagaacacagggaacaaagaaaagcagagaggagagcagaggcagaaggawtaggagagaggagactgaagaaaacaggagaaaagctgcgcagatgcagaagaaaaaggagtgtagatagagggaagaagtgaaagcagacgaggaacacggatgcagaagaaagaggactgaggagacaggaaagaaagaacagtggtagaggagtgcagatgcagaagaaagcagtacggaaatggaaaaaaaagcaggagggcagatggagaagaaaggagtgaggaatcaggggaaaacaagaataggagaagaggaatgcagatgcaaaacagtgaggatgtgggggaaaaaaaa

SEQ ID NO: 4777 - DNA, 600 bp, Chicken  19866894108010_1
gagacagatgacatcagtggctcttcctcttgtccactgatggaataacaccatcataaaaggccaccaggttggtcaacaggatttgcccttggtgaagccatgctggttctcccatatcacctccctgccttccatgcgcctcagcatagcttcccggaggatctgttccatgatatttcccagtacagaggtgagactggcacgttggttgttcccagcatctttttaccctttttaaaaatgggtatgatgtttccttttttccagttaccagggactacacctgattgccacaasttttgagatatcagagtggcttggcaaccacatcagccaattcccctaggaccgtcagatgcatctcatcgggacccatagacttgtggatgttcatgtttcacatgtggttgcagacctgatcttcactcacagtgggtaggacgttgctccccaaatcccctcctatcaaaccaaaggtttgagggctctgtgtggcaagcagttatcagggaagactgtagcaaaaaaagtaccccaaccgtctccgtgtctgttgttaccaacctgcctgtgtcactcactagggtgggcacacat

SEQ ID NO: 4778 - DNA, 600 bp, Chicken  19866894108020_1
ggttgcctcaacccaggtgaaagtccttgcacctcatgaggttcacctgggcccgctgcttaagcctccgaatgacatcctgtccctctggtgtgttgactgcaccccacacctcgttgtcatcagcaagcttactgagggtgtacgcaaccccactactgatgtaattgatgaaggtattaaagtgtatcagtgttagcaccaactcctgggcgacactgctcgtcaaagttctccgttgactactactactttttggattcagtcctgcagccagtcctttgtctgttgaacagtccwcccatcaaatccatagcttccyaatctggaacgaatgatactatagtctactgtgtaaagcccttactgaatttgagatagatgacatcagtggctcttcctcttstccactgatgraataacaccatcataaaaggccaccaggttggtcaacaggatttgcccttggtgaagccatgctggttctcccatatcacctccctgccttccatgtgcctcagcatagcttcctggaggatctttcccagtacagaggtgagactggcaggtttggttgttcccagcatcatcttttttacc

SEQ ID NO: 4779 - DNA, 600 bp, Chicken  19866894108020_2
gtccttgcacctcatgaggttcacctgggcccgctgcttaagcctccgaatgacatcctgtccctctggtgtgttgactgcaccccacacctcgttgtcatcagcaagcttactgagggtgtacgcaaccccactactgatgtaattgatgaaggtattaaagtgtatcagtgttagcaccaactcctgggcgacactgctcgtcaaagttctccgttgactactactactttttggattcagtcctgcagccagtcctttgtctgttgaacagtccwcccatcaaatccatagcttccyaatctggaacgaatgatactatagtctactgtgtaaagcccttactgaatttgagatagatgacatcagtggctcttcctcttstccactgatgraataacaccatcataaaaggccaccaggttggtcaacaggatttgcccttggtgaagccatgctggttctcccatatcacctccctgccttccatgtgcctcagcatagcttcctggaggatctttcccagtacagaggtgagactggcaggtttggttgttcccagcatcatcttttttacccttttttaaaatgagtatgatg

SEQ ID NO: 4780 - DNA, 600 bp, Chicken  19866894108020_3
ccacacctcgttgtcatcagcaagcttactgagggtgtacgcaaccccactactgatgtaattgatgaaggtattaaagtgtatcagtgttagcaccaactcctgggcgacactgctcgtcaaagttctccgttgactactactactttttggattcagtcctgcagccagtcctttgtctgttgaacagtccwcccatcaaatccatagcttccyaatctggaacgaatgatactatagtctactgtgtaaagcccttactgaatttgagatagatgacatcagtggctcttcctcttstccactgatgraataacaccatcataaaaggccaccaggttggtcaacaggatttgcccttggtgaagccatgctggttctcccatatcacctccctgccttccatgtgcctcagcatagcttcctggaggatctttcccagtacagaggtgagactggcaggtttggttgttcccagcatcatcttttttacccttttttaaaatgagtatgatgtttcctttttttccagttaccaggcactacacctgattgccacaacttttgagatatcagagagtggcttggcaaccacatcag

SEQ ID NO: 4781 - DNA, 600 bp, Chicken  19866894108020_4
tgtcatcagcaagcttactgagggtgtacgcaaccccactactgatgtaattgatgaaggtattaaagtgtatcagtgttagcaccaactcctgggcgacactgctcgtcaaagttctccgttgactactactactttttggattcagtcctgcagccagtcctttgtctgttgaacagtccwcccatcaaatccatagcttccyaatctggaacgaatgatactatagtctactgtgtaaagcccttactgaatttgagatagatgacatcagtggctcttcctcttstccactgatgraataacaccatcataaaaggccaccaggttggtcaacaggatttgcccttggtgaagccatgctggttctcccatatcacctccctgccttccatgtgcctcagcatagcttcctggaggatctttcccagtacagaggtgagactggcaggtttggttgttcccagcatcatcttttttacccttttttaaaatgagtatgatgtttcctttttttccagttaccaggcactacacctgattgccacaacttttgagatatcagagagtggcttggcaaccacatcagccaattcccct

SEQ ID NO: 4782 - DNA, 600 bp, Chicken  19866894108022_1
gggtaacgctcagcagtgctgcacggccaccacggaacacaacacccacatacagcggggggatgttgggacctggagcaccgagagctcacccagcctgcagcacggggctgcaacaccaaccctccacactgtgggtgggggaaaggagctcccctgaaggcccagcaggttgttaggagaaaggcctgcatgtcttggccaatgcctcagccagcacagccccatgctgagatgaaggacaatggtcctacagccccgcggtgccgcagcccgggaacaggtggtgtttgtgtgcasggagggcaggcagtacttacggattggggcactgccagtccccagcacggtgctgcacgctgcccccagaggggtttcccctggatccccgtggtcctctggaggagaagcctcccctgtcgccacctctgcctcccatccggcccatgggaccgctcggcccaccgggcccccctgggcctccaggccccccaggacctgcaaggagagccccgttaacaccaccgggcagcggctgcgggtggaggatgctgcgccgcaagctgagcccctcgggggcccgagggaacgggaggttac

SEQ ID NO: 4783 - DNA, 588 bp, Chicken  19866894108035_1
ctgtgttaaataaactgtggtggtctcactcccatcaggcttacagatgctctttgctggggatttgtttcttgtggtttaccaggtagccagacttctggctttttctgctgtgcccctaattcactggcaccttgactggatttcacactgcaagtgctagggctgacctcaatgcagcaaggaggaaaacggccttaattctaaatctcctccatagtgtgttttgtttaggttagctgacatcatgagacactgatctatgctgtctgttcttccctccccccccagccctaaaamataccactgcaacttcccttcttcagcagagatgaggcctcagaaatgagctttgttttcaggtgtgctggaatgggtgaagcaggaaggatcagctctcatatctgttgttgctggagttatttttttcctacatacaaagaatgatcaagcctgtaaagttataaataagctggtaccagccccaagcttacttggggtgaatgggttgcctgggaggactcctcagtgtctttctctggccaggcatcttagtgctttgttgggccatttagagtgaagtcacag

SEQ ID NO: 4784 - DNA, 600 bp, Chicken  19866894108036_1
aggtgttgggcaagaatgccaggagggggtaaagtcaggagaggagaggggtaatttaggcaaaaatatgcaacaaatccatatttaagataacttctgaagtcatcaaatgaaacttaatgaagatgtgaacaaagtccagtaggatgcctgtggaatcactgatacattgatggccaaggatgttcaataatcctgaactgaagtcatctacactagcaagctgctaaaatggtcccttcatattttctgcctgaatcaatcagccttctctgtgtgcactttgcctcaatacctggraaccttcctgggaacgtgccatttacagatataaaatgtagcctctgttgtcagtagacacgcaatcacccagtataacttcatttatgcatctatttagaaggaaaaggaaaagaggcatacgctgtatttctttgattaaaggctgggtcctgcagaatccaaacgtgtcagtcatttggatacacagacatctcargcatgtggaataggaatctgacccttgccctgtccttagtcagtctggctagatgtataccaagtttaatgcacagttgatgtgagcacatcagcaattat

SEQ ID NO: 4785 - DNA, 600 bp, Chicken  19866894108036_2
actgaagtcatctacactagcaagctgctaaaatggtcccttcatattttctgcctgaatcaatcagccttctctgtgtgcactttgcctcaatacctggraaccttcctgggaacgtgccatttacagatataaaatgtagcctctgttgtcagtagacacgcaatcacccagtataacttcatttatgcatctatttagaaggaaaaggaaaagaggcatacgctgtatttctttgattaaaggctgggtcctgcagaatccaaacgtgtcagtcatttggatacacagacatctcargcatgtggaataggaatctgacccttgccctgtccttagtcagtctggctagatgtataccaagtttaatgcacagttgatgtgagcacatcagcaattatcctgcacacatcacacctcaacctatttactttgaatagggcggaagagagcacygtattacaccgtattgatttgtgagccacaccttgttattaccttatctttggactacaactgtgagacatcctctggtatttacatttatgccattggttttctctgcaacctgggacaacttatttaaacatgttatggctg

SEQ ID NO: 4786 - DNA, 600 bp, Chicken  19866894108036_3
agacacgcaatcacccagtataacttcatttatgcatctatttagaaggaaaaggaaaagaggcatacgctgtatttctttgattaaaggctgggtcctgcagaatccaaacgtgtcagtcatttggatacacagacatctcargcatgtggaataggaatctgacccttgccctgtccttagtcagtctggctagatgtataccaagtttaatgcacagttgatgtgagcacatcagcaattatcctgcacacatcacacctcaacctatttactttgaatagggcggaagagagcacygtattacaccgtattgatttgtgagccacaccttgttattaccttatctttggactacaactgtgagacatcctctggtatttacatttatgccattggttttctctgcaacctgggacaacttatttaaacatgttatggctgcatttcttcatctctaaattgtgggtaattctttccttatgagattgttatgaatccacattaattaatgtttatagagcacacagacaatatcctggggtgaatgatacagacatgtgaaaagtattcttattgttcataataggacagcaaatt

SEQ ID NO: 4787 - DNA, 600 bp, Chicken  19866894108039_1
ccccggtgctcccttacgtccttccacgctgggccctcccacagccaagtggatgctgatgacaaaagccgtgggcacccacggcccctctgcttcctcgatgtgcgctcgcggaaggaggtggcatcgggccggggctctctgcacttcccacagcggtgacgttggcgtggcagccgttgtcctccacgggcagcactgaagctgtttgtgctgcctgtgctgctgccctgtatccaggctgggccttggcacgtgccggggtggccaagagccatgcgggaacctgcggggccaccycctaccgccaacatagccactcaatggagccataggcaatgctatgcaccgttgtcccacgcgctggtggcagcaagcaggagcagatcccgtgaggctgcctttgggcacctctgtctgctttggagccccacatctcttyctcagcatgcctggggggcgactgcacgtgccgttgcatctttctcatgctgtgctgctctggcttctgtgcatccctcttggatcccgctgtctcacagcactcacaaagcatttggcaggacacaggcaatgcagaaggctcctgggcttgttgtc

SEQ ID NO: 4788 - DNA, 476 bp, Chicken  19866894108039_2
tgcacttcccacagcggtgacgttggcgtggcagccgttgtcctccacgggcagcactgaagctgtttgtgctgcctgtgctgctgccctgtatccaggctgggccttggcacgtgccggggtggccaagagccatgcgggaacctgcggggccaccycctaccgccaacatagccactcaatggagccataggcaatgctatgcaccgttgtcccacgcgctggtggcagcaagcaggagcagatcccgtgaggctgcctttgggcacctctgtctgctttggagccccacatctcttyctcagcatgcctggggggcgactgcacgtgccgttgcatctttctcatgctgtgctgctctggcttctgtgcatccctcttggatcccgctgtctcacagcactcacaaagcatttggcaggacacaggcaatgcagaaggctcctgggcttgttgtcccagcaacgttgtccctg

SEQ ID NO: 4789 - DNA, 599 bp, Chicken  19866894108041_1
  misc_feature (1)..(220): n is any nucleotide
nnnnnnnnnnnnnnnnnnnnnnnnnnnnnnnnnnnnnnnnnnnnnnnnnnnnnnnnnnnnnnnnnnnnnnnnnnnnnnnnnnnnnnnnnnnnnnnnnnnnnnnnnnnnnnnnnnnnnnnnnnnnnnnnnnnnnnnnnnnnnnnnnnnnnnnnnnnnnnnnnnnnnnnnnnnnnnnnnnnnnnnnnnnnnnnnnnnnnnnnnnnnnnnnnnnnnnnnnnnngtatatgcagagcacaggagtggaagtggtgaatgtgtctggcagtttggtgtgttgagcagaaaagcacaggtgggatragatgccgggtgttttaatttgactctgttgcaggtggaaagagaaaaggccattctcctggccaacctgcaggaatctcagacrcagctggagcacaccaaaggagccctgactgaacaacatgagcgagtccacaggctcacagagcaygtcaacgccatgaggggcttgcagagcaacaaggagatgaaaacggagcatgactgtgagaaggggcgagaccccagtgaggaagcacaygactacgaagtggacatcaatggtttggagatcctagaatgtaaatacaaagtagctg

SEQ ID NO: 4790 - DNA, 599 bp, Chicken  19866894108041_2
  misc_feature (1)..(135): n is any nucleotide
nnnnnnnnnnnnnnnnnnnnnnnnnnnnnnnnnnnnnnnnnnnnnnnnnnnnnnnnnnnnnnnnnnnnnnnnnnnnnnnnnnnnnnnnnnnnnnnnnnnnnnnnnnnnnnnnnnnnnnnnnnnnnnnnnnnnnnngtatatgcagagcacaggagtggaagtggtgaatgtgtctggcagtttggtgtgttgagcagaaaagcacaggtgggatragatgccgggtgttttaatttgactctgttgcaggtggaaagagaaaaggccattctcctggccaacctgcaggaatctcagacrcagctggagcacaccaaaggagccctgactgaacaacatgagcgagtccacaggctcacagagcaygtcaacgccatgaggggcttgcagagcaacaaggagatgaaaacggagcatgactgtgagaaggggcgagaccccagtgaggaagcacaygactacgaagtggacatcaatggtttggagatcctagaatgtaaatacaaagtagctgttacggaagtgatagaccttaaagcagaaatcaaagccttaaaggagaaatataataactatgtggaaaactacactgaagagaa

SEQ ID NO: 4791 - DNA, 599 bp, Chicken  19866894108041_3
  misc_feature (1)..(69): n is any nucleotide
nnnnnnnnnnnnnnnnnnnnnnnnnnnnnnnnnnnnnnnnnnnnnnnnnnnnnnnnnnnnnnnnnnnnngtatatgcagagcacaggagtggaagtggtgaatgtgtctggcagtttggtgtgttgagcagaaaagcacaggtgggatragatgccgggtgttttaatttgactctgttgcaggtggaaagagaaaaggccattctcctggccaacctgcaggaatctcagacrcagctggagcacaccaaaggagccctgactgaacaacatgagcgagtccacaggctcacagagcaygtcaacgccatgaggggcttgcagagcaacaaggagatgaaaacggagcatgactgtgagaaggggcgagaccccagtgaggaagcacaygactacgaagtggacatcaatggtttggagatcctagaatgtaaatacaaagtagctgttacggaagtgatagaccttaaagcagaaatcaaagccttaaaggagaaatataataactatgtggaaaactacactgaagagaaggccaagtatgagagcagaatccagacttacaatgaacaggtgacaagcctagagaagtcaaccaa

SEQ ID NO: 4792 - DNA, 600 bp, Chicken  19866894108041_4
ggaagtggtgaatgtgtctggcagtttggtgtgttgagcagaaaagcacaggtgggatragatgccgggtgttttaatttgactctgttgcaggtggaaagagaaaaggccattctcctggccaacctgcaggaatctcagacrcagctggagcacaccaaaggagccctgactgaacaacatgagcgagtccacaggctcacagagcaygtcaacgccatgaggggcttgcagagcaacaaggagatgaaaacggagcatgactgtgagaaggggcgagaccccagtgaggaagcacaygactacgaagtggacatcaatggtttggagatcctagaatgtaaatacaaagtagctgttacggaagtgatagaccttaaagcagaaatcaaagccttaaaggagaaatataataactatgtggaaaactacactgaagagaaggccaagtatgagagcagaatccagacttacaatgaacaggtgacaagcctagagaagtcaaccaaggaaagccaggaaaagatggtccacatggaaaaggagttgcaaaggatgacaagcatagcgaatgaaaaccacaataccctcaacaccgcc

SEQ ID NO: 4793 - DNA, 600 bp, Chicken  19866894108041_5
tcctagaatgtaaatacaaagtagctgttacggaagtgatagaccttaaagcagaaatcaaagccttaaaggagaaatataataactatgtggaaaactacactgaagagaaggccaagtatgagagcagaatccagacttacaatgaacaggtgacaagcctagagaagtcaaccaaggaaagccaggaaaagatggtccacatggaaaaggagttgcaaaggatgacaagcatagcgaatgaaaaccacaataccctcaacaccgcccaggacgagctggtgacgtttagcgaggagytggctcagctgtaccatcatgtctgcctgtgcaacaacgagacacctaacagggtcatgttggactattacaggcagagcagagttacccgcagtggcagcctgaaaggcccggatgacccacggggtctcctttccccgcggcttgccagaaggggaatggcatcgcctgtggaagccaggactccgaccgagcaggtgacaaaagaggccgcagagcctggcaaggagcagagcccaacaaaaacacctacaatttcccctgtcatcactgcccctccttcctccccagtctccgaca

SEQ ID NO: 4794 - DNA, 600 bp, Chicken  19866894108044_1
cctgaggcccccagtacaagaaggatgtggagctgttggagcaggtccagaggaggcccatgaagatgatcagagtgctggagcacctcccctatggagaaacattgaggaagctgggcttgttcagtctagacaaaagaagactccagggagaccttcttgaggccttctagtatttcagaggagcttataaccaggaagaagacagacttctttacacagctttaaattaaaaggggaaattcaagctggatgtaaggggaaaatttttcacgcagggtggtgagacagagagagagrttaccatargaacttctggatctcccatccctggaggtgttcaaggccaggttggatggagttttgggcaacctgatctagtgggtggcaaccccacccatggcagggggtttggaactagatgttctttaatatcccttccaacccaagccattctatgattccatgataatcaaaggtgcataggttgcatcctraaacggctgtgtgaaacaagctagtggttgggtgtcttgagtcccactcagtaacaggcaaataaaagcaagtacaccgcgtatctgttcagtatcctgtatc

SEQ ID NO: 4795 - DNA, 600 bp, Chicken  19866894108044_2
cccagtacaagaaggatgtggagctgttggagcaggtccagaggaggcccatgaagatgatcagagtgctggagcacctcccctatggagaaacattgaggaagctgggcttgttcagtctagacaaaagaagactccagggagaccttcttgaggccttctagtatttcagaggagcttataaccaggaagaagacagacttctttacacagctttaaattaaaaggggaaattcaagctggatgtaaggggaaaatttttcacgcagggtggtgagacagagagagagrttaccatargaacttctggatctcccatccctggaggtgttcaaggccaggttggatggagttttgggcaacctgatctagtgggtggcaaccccacccatggcagggggtttggaactagatgttctttaatatcccttccaacccaagccattctatgattccatgataatcaaaggtgcataggttgcatcctraaacggctgtgtgaaacaagctagtggttgggtgtcttgagtcccactcagtaacaggcaaataaaagcaagtacaccgcgtatctgttcagtatcctgtatctatagacta

SEQ ID NO: 4796 - DNA, 600 bp, Chicken  19866894108044_3
gaagaagacagacttctttacacagctttaaattaaaaggggaaattcaagctggatgtaaggggaaaatttttcacgcagggtggtgagacagagagagagrttaccatargaacttctggatctcccatccctggaggtgttcaaggccaggttggatggagttttgggcaacctgatctagtgggtggcaaccccacccatggcagggggtttggaactagatgttctttaatatcccttccaacccaagccattctatgattccatgataatcaaaggtgcataggttgcatcctraaacggctgtgtgaaacaagctagtggttgggtgtcttgagtcccactcagtaacaggcaaataaaagcaagtacaccgcgtatctgttcagtatcctgtatctatagactattgttacaccacgatataacctgaaaccatcctctgcttacttatgttatctggacatatttttgtatccttgtagaaaaatcttggttttatatatgattttaaagataaagaaacaaagaaactgaaaatgatggaaagccttttttcctgtttgattaatatatacatatatatatatatttaag

SEQ ID NO: 4797 - DNA, 600 bp, Chicken  19866894108049_1
ccaagcaccagtctctttcttgttctactcattggatagatactggaagccctctaggttgaagatcgaggacctcatttttcaccaattccctccttacgtgtctctcggagaagttttaattcacgggcattattcaaactgggtttatttttctactccagcgtttcactatttgtgtatgtgtcatctaatgtaagggttgcagtggtaattgctacctttctgtggaaacgctcagtaatcactgcagcaaaacttgcatagcatccagaaagcagctcagacttggctccagayagccttcatttacatattcaaatgtatttctgtaaagttgaacaaaatgcttgtttatcacacaagtcatacgttcaaaactaccaactagcatgttctcagcctcttctccataaagaaagcccttagaagggagctagaatttattactaggctgccagttatcagtgagctgaagctcttctgcctggggagcacatgctaattccattcccagaccaaatctaaaattgtcctaaagcaaaatacttatccccattgcataatcagttatatccactagggaaaagaaagtacaca

SEQ ID NO: 4798 - DNA, 600 bp, Chicken  19866894108057_1
aaaagctgttcaaaactttactttgaaactttccattcctagtgaatccttttaatctgtactataaccttttcctaaccttctcttctctgctacaacatttagtttctctaactgtttctctttctagaaaatcctttgctgtcataaaaacggccctttctcctacaccttgatatagatcttactaatccttcacattttagcatcatatctttagtcattatgaaattccttttttattattctgagctctgctggattccatgtctccactgtccatgttaaaactgcaagtartctggggcaggaattcattgttcacgttttgcttcttagtaattcaggcttcttgcagtgtttttgtttgtttggttkgttkgttttttttgctctgtcatatgtggcaaggtccattcctatgggaggaaaaggcaaaggtcttccaaatactgagttctcacctacctcatgcaaaaataggtgatgaaaggtgagagcactttgaaatgcccctgcttagaggtagttggctcaaattcaatccttattagacagcaaatttgtattgagaagagcctgtcctgcagcaaatatgtg

SEQ ID NO: 4799 - DNA, 600 bp, Chicken  19866894108057_2
ctataaccttttcctaaccttctcttctctgctacaacatttagtttctctaactgtttctctttctagaaaatcctttgctgtcataaaaacggccctttctcctacaccttgatatagatcttactaatccttcacattttagcatcatatctttagtcattatgaaattccttttttattattctgagctctgctggattccatgtctccactgtccatgttaaaactgcaagtartctggggcaggaattcattgttcacgttttgcttcttagtaattcaggcttcttgcagtgrttttgtttgtttggttkgttkgttttttttgctctgtcatatgtggcaaggtccattcctatgggaggaaaaggcaaaggtcttccaaatactgagttctcacctacctcatgcaaaaataggtgatgaaaggtgagagcactttgaaatgcccctgcttagaggtagttggctcaaattcaatccttattagacagcaaatttgtattgagaagagcctgtcctgcagcaaatatgtggtgctgaggaacatgatcagtgagcatggtggtgatgggttgatggttggacttaatgatc

SEQ ID NO: 4800 - DNA, 600 bp, Chicken  19866894108057_3; identical to SEQ ID NO: 4799

SEQ ID NO: 4801 - DNA, 600 bp, Chicken  19866894108057_4
ccttctcttctctgctacaacatttagtttctctaactgtttctctttctagaaaatcctttgctgtcataaaaacggccctttctcctacaccttgatatagatcttactaatccttcacattttagcatcatatctttagtcattatgaaattccttttttattattctgagctctgctggattccatgtctccactgtccatgttaaaactgcaagtartctggggcaggaattcattgttcacgttttgcttcttagtaattcaggcttcttgcagtgtttttgtttgtttggttkgttkgttttttttgctctgtcatatgtggcaaggtccattcctatgggaggaaaaggcaaaggtcttccaaatactgagttctcacctacctcatgcaaaaataggtgatgaaaggtgagagcactttgaaatgcccctgcttagaggtagttggctcaaattcaatccttattagacagcaaatttgtattgagaagagcctgtcctgcagcaaatatgtggtgctgaggaacatgatcagtgagcatggtggtgatgggttgatggttggacttaatgatctttgtggtctttcctag

SEQ ID NO: 4802 - DNA, 600 bp, Chicken  19866894108057_5
ctcttctctgctacaacatttagtttctctaactgtttctctttctagaaaatcctttgctgtcataaaaacggccctttctcctacaccttgatatagatcttactaatccttcacattttagcatcatatctttagtcattatgaaattccttttttattattctgagctctgctggattccatgtctccactgtccatgttaaaactgcaagtartctggggcaggaattcattgttcacgttttgcttcttagtaattcaggcttcttgcagtgtttttgtttgtttggttkgttkgttttttttgctctgtcatatgtggcaaggtccattcctatgggaggaaaaggcaaaggtcttccaaatactgagttctcacctacctcatgcaaaaataggtgatgaaaggtgagagcactttgaaatgcccctgcttagaggtagttggctcaaattcaatccttattagacagcaaatttgtattgagaagagcctgtcctgcagcaaatatgtggtgctgaggaacatgatcagtgagcatggtggtgatgggttgatggttggacttaatgatctttgtggtctttcctagcctt

SEQ ID NO: 4803 - DNA, 600 bp, Chicken  19866894108061_1
ttgcttcagagagaggggtgtgttgtagataccttcaaatcgcagtcagccattacttttacctagactaggtaaacccagggtgcaatggatgatcttcagtctactattaagttaaattatggcaatttaacttcatctgatgaacttctccttaatttccaggctctaagtaagttccagttgagagcagtactctcttaagtatcacatggggtttgcgagagtacttatcatctgagggagtgatgatacgaaatagtgcttttcaattctattccaccacttcaaatccaaacraagaaatttattaggaagtgaagcctgtccagagactcttgtgaaatagaggtgttttcagtacagtccattttaattaagtgttcgtcttgtagagaatacttcccaaactgatactagctggcactttatgagtacgctggcagagaatgaaatggcattgagattgtgctatgtgtgcagctctggggcatttttctggtcatggatttgagaggagaaaaaaagcaatttttaaaaaagattattcttcatgattctttttttttttcttttcccgacctttgagttagaacagag

SEQ ID NO: 4804 - DNA, 600 bp, Chicken  19866894108061_2
tgtaggagctgcccctgacagagccaattctcttctgtcagcagcactttccacaacccctgtggagagttccaccccctcagttatcctggatgctgaatcgactgtctctgtggacatgctgtgaaggggcagaatcctccgctgtgggaaaatgagggtggagaaagcagcagaggacagggggaaaaaaactgtcaaaacaataattgcaaggcaaaatttctgacatttgtggaaacgatacagaacaaaccattttcctcattcataattagagaagcatagaagtgaattctmgattggttttgtaccatagagataccacgggtccttgttgcaagtgggtatattcagtgacatgaccacagtcacctgctgcttactttcacatgtggtatattcagcagcactaaaggaaacattttctcccacagggtctaaaatcacgtgggctccagctgtagctcttactgacttcagtgggagtgcaggggtttcctgaggtacatcccatctgctatactgggcagaggtttacaacttgttgcggggcttcagggagcaaagtggcactgtgtattaccctttgttttgttt

SEQ ID NO: 4805 - DNA, 476 bp, Chicken  19866894108063_1
aggtaatgtttctaccctcctcatatttcgttggatttcagtcatagaatcgtatcatagaatcagaaaatggcttgaattagaagggaccttaaagaccatctagttccaactccctgctgtatacaccacccttcatctccctctaaggtctaccagttatccagcatatctcaaatatctgccaagacagaggtattaatgtgcaatatggactgcttgggtacatcctcctttccagcagctctttcccttcctttccatccatgctagctggtgtctcagaatggcattgtgccyactcagggaatctgctccaaatacctggcactgctgagcacattcagacagcatagaaaccttccatctcctgcctaacctctccctgtaggcttcagatggaatgactgcttaacacttcccagaaatactcaagctgccatatactcaagcataagatacatcagaatacttct

SEQ ID NO: 4806 - DNA, 517 bp, Chicken  19866894108064_1
tgtagatttcacacactcttttgttcgtgttttgcttctactgctgctgctatagtaactataaaacagtaaatctccccatgtagcatctaataacatataccacaagctatgctgatgcatatttacaagtgtagtaagtgctgagtctaaaatacaaggaaaactttgcttttggaatagtatgtttgttttgaggttcttgtttattcagcgaaatgaggtgttgttcagtgcaaagtactccatatacttataagctaattatacctttgttaaaggtttcacagcatcacacayctgcagttggtaaagatgaaccagagcccagggactggaaaaatctgctatcacagaaatagtaaaggggggaaacagtgatcaggagagggaggaaatacatctttcaaccttaaccatgtggttctctgaatgaactataacatcaagagagtttcagtcaaaagttgttttccatttggttagcacagagaaagaaaaaaaactttgaatgtgt

SEQ ID NO: 4807 - DNA, 600 bp, Chicken  19866894108066_1
tcaaactgaaattctctccctttcctttatttttcctcccacgactaaatgttacataattacaaaagataaatgaatatgtttaattccctgatttgctaattctgctgtttctgaaatttttcttcactaattaatgttctacttccaggtaatataggccctgaactatcagacaatgacatcagtatgtttgtttcttctgatgctggaaacacatggagacaggtacatgacacagaatcacaggatttaagagtaattgtaggaactgtcaaagagatatattcaaaatgttgyttcgtttttgtttcttttgattcaaaatagctttttgaaaatctgcacraaagggaaggcttcttttcccttcctgagaggtgcagaagtgcccaaagaaaaatagtgtgtatgtcattatgcatcatataacagaaaattatttttataattctattcagtttggcttcagtttaaccctgtagcagaaaggattatttcttttcatccattattatactttcccaagaattaacagttacagtgttctacttttccctcactgtgcatgggactggatgatgaagttaaatcataata

SEQ ID NO: 4808 - DNA, 600 bp, Chicken  19866894108066_2
tgttacataattacaaaagataaatgaatatgtttaattccctgatttgctaattctgctgtttctgaaatttttcttcactaattaatgttctacttccaggtaatataggccctgaactatcagacaatgacatcagtatgtttgtttcttctgatgctggaaacacatggagacaggtacatgacacagaatcacaggatttaagagtaattgtaggaactgtcaaagagatatattcaaaatgttgtttcgtttttgtttcttttgattcaaaatagctttttgaaaatctgcacraaagggaaggcttcttttcccttcctgagaggtgcagaagtgcccaaagaaaaatagtgtgtatgtcattatgcatcatataacagaaaattatttttataattctattcagtttggcttcagtttaaccctgtagcagaaaggattatttcttttcatccattattatactttcccaagaattaacagttacagtgttctacttttccctcactgtgcatgggactggatgatgaagttaaatcataataatatttagtggaatcccacctgataacagagcactaccctgcagtgtgt

SEQ ID NO: 4809 - DNA, 600 bp, Chicken  19866894108075_1
ttctttccattgaaaatacaacagctacaaagagcacaataacagtacttggtaagttctcaactacaaaatactgtttttcaacagttaccaccattagctatgcatttttaccagtgatgaataagaacctgcatactgtgctcaaaaaaatctgcaccaccactgtcactgctgcagaattgcaccatccaccgcctcactgtgctgacatccataaatgttcaacaaacgttgatgaatgtcaatggatggcattgtttccacatggaggagttcaatgacacacctctgcttcaygtgcacttccacgtcagacccattgtgtcagactgcccctctgctgccatctgtcgcacggcaataacgtcatggaataccggtgggaaggttcggcccctactgccacaccaccarcatccgcctctgatgtcatggaccaacataacggaatgtgaggcattactttcagagcagccctcatagcaacaggtatccaaatggcctaggcagttcctctgtaactactgctgatacaatgagagcaaaattgactgacattttttaatctgcaagaattgagagatctctatcrtatat

SEQ ID NO: 4810 - DNA, 600 bp, Chicken  19866894108075_2
tgatgaataagaacctgcatactgtgctcaaaaaaatctgcaccaccactgtcactgctgcagaattgcaccatccaccgcctcactgtgctgacatccataaatgttcaacaaacgttgatgaatgtcaatggatggcattgtttccacatggaggagttcaatgacacacctctgcttcaygtgcacttccacgtcagacccattgtgtcagactgcccctctgctgccatctgtcgcacggcaataacgtcatggaataccggtgggaaggttcggcccctactgccacaccaccarcatccgcctctgatgtcatggaccaacataacggaatgtgaggcattactttcagagcagccctcatagcaacaggtatccaaatggcctaggcagttcctctgtaactactgctgatacaatgagagcaaaattgactgacattttttaatctgcaagaattgagagatctctatcrtatattgaaatcagttattaatgaatatgaaaggaaggaaagcagtgacggaaatacgcctcaaacctgtttcaacaggactgtgattggccttatctgaattagtcattgtcacctatttc

SEQ ID NO: 4811 - DNA, 600 bp, Chicken  19866894108075_3
ttcaygtgcacttccacgtcagacccattgtgtcagactgcccctctgctgccatctgtcgcacggcaataacgtcatggaataccggtgggaaggttcggcccctactgccacaccaccarcatccgcctctgatgtcatggaccaacataacggaatgtgaggcattactttcagagcagccctcatagcaacaggtatccaaatggcctaggcagttcctctgtaactactgctgatacaatgagagcaaaattgactgacattttttaatctgcaagaattgagagatctctatcrtatattgaaatcagttattaatgaatatgaaaggaaggaaagcagtgacggaaatacgcctcaaacctgtttcaacaggactgtgattggccttatctgaattagtcattgtcacctatttctttctctcaccactgtcagtgaaaaacaaggacacagtttttcctttttggctacagtttgtggggggcaggaggtctgttttcttcagcttattccctgcattgtttacattttcctctaggtttgaatgtaatgtgtcattcatgtttggcttycttctatgtatcagagttgyat

SEQ ID NO: 4812 - DNA, 564 bp, Chicken  19866894108075_4
aagaattgagagatctctatcrtatattgaaatcagttattaatgaatatgaaaggaaggaaagcagtgacggaaatacgcctcaaacctgtttcaacaggactgtgattggccttatctgaattagtcattgtcacctatttctttctctcaccactgtcagtgaaaaacaaggacacagtttttcctttttggctacagtttgtggggggcaggaggtctgttttcttcagcttattccctgcattgtttacattttcctctaggtttgaatgtaatgtgtcattcatgtttggcttycttctatgtatcagagttgyattaccacagtataacatgatattgttctcggtgaaacttttcaatccttgccctaaggagcgtctgctgtcttttgttgaggatgtcagaagtttgtggttttgattgtgatagattgagtgtggttacctagttcttctctatgggcactgaaaagatctatgcactcgtagtgacactcgctttgttgagaaattactcctgttagaactgaaggagacaaaaagcctttctctgctaggg

SEQ ID NO: 4813 - DNA, 544 bp, Chicken  19866894108075_5
crtatattgaaatcagttattaatgaatatgaaaggaaggaaagcagtgacggaaatacgcctcaaacctgtttcaacaggactgtgattggccttatctgaattagtcattgtcacctatttctttctctcaccactgtcagtgaaaaacaaggacacagtttttcctttttggctacagtttgtggggggcaggaggtctgttttcttcagcttattccctgcattgtttacattttcctctaggtttgaatgtaatgtgtcattcatgtttggcttycttctatgtatcagagttgyattaccacagtataacatgatattgttctcggtgaaacttttcaatccttgccctaaggagcgtctgctgtcttttgttgaggatgtcagaagtttgtggttttgattgtgatagattgagtgtggttacctagttcttctctatgggcactgaaaagatctatgcactcgtagtgacactcgctttgttgagaaattactcctgttagaactgaaggagacaaaaagcctttctctgctaggg

SEQ ID NO: 4814 - DNA, 600 bp, Chicken  19866894108076_1
tgtctctcaatgtaagcatgcctagtttaggatttttttggaagggctttttgctccattcagggagtgggacatgctttcaccccggtcttgttctgaaaatgagtactgatttaattagagcatcttcaatttccatcatagatatatagaagaacatcttaagttttgggttgggtaatagactggaaaaaacaaaggtaataactacttttatctcagagcattcataagatgcacattgaactaatactgattttaattcacattttctgctatcatggtgtaagttgaggttayaaacaagctgtgttctgggttattttaacatgaactgagacaacaagttttgtgcttcacagttatacgtagaactaccagaaaacaccggagatcaaacaaccaacacaacctttttagctaagattatttgcacataagaatacacatacatatagaaagggcaactcaacggcagatcatgcaaacactgaagctgtaccttctcatctctgctcgttgcaatgtttaacgtttgaggctcctcaaactgatactacttctcacctccccctgttatgggatgactgcctaagagca

SEQ ID NO: 4815 - DNA, 599 bp, Chicken  19866894108078_1
  misc_feature (1)..(127): n is any nucleotide
nnnnnnnnnnnnnnnnnnnnnnnnnnnnnnnnnnnnnnnnnnnnnnnnnnnnnnnnnnnnnnnnnnnnnnnnnnnnnnnnnnnnnnnnnnnnnnnnnnnnnnnnnnnnnnnnnnnnnnnnnnnnnnntggacagggtaggagaggataccaaatatggaagcagtctgaaacgctagagtcatcctttcatctataggcccgtgtagcttcaagcaacctgaaaagagaactgctgtcaactgggctaagttcatgaagttgcttgcaacttgttaagcaagaaaaatggtttagtgagytttatggtacataacctgttcacttctttgcattttaaattccagcaagttgtgaataaattcatgatacagcttagattgctagtaatggccagataacrttgcaaagttacatgatgccaatttttatttcctcccttttcatctcatcactggtttccagatgacattgacttacattaacactcttcaagtcagcagtttttgaagagcttctttataaatgtacttgttacctgccaaacattggatctcyccacgcatgaagtcattcatgtgagagaaaaagattaacgtca

SEQ ID NO: 4816 - DNA, 599 bp, Chicken  19866894108078_2
  misc_feature (1)..(26): n is any nucleotide
nnnnnnnnnnnnnnnnnnnnnnnnnntggacagggtaggagaggataccaaatatggaagcagtctgaaacgctagagtcatcctttcatctataggcccgtgtagcttcaagcaacctgaaaagagaactgctgtcaactgggctaagttcatgaagttgcttgcaacttgttaagcaagaaaaatggtttagtgagytttatggtacataacctgttcacttctttgcattttaaattccagcaagttgtgaataaattcatgatacagcttagattgctagtaatggccagataacrttgcaaagttacatgatgccaatttttatttcctcccttttcatctcatcactggtttccagatgacattgacttacattaacactcttcaagtcagcagtttttgaagagcttctttataaatgtacttgttacctgccaaacattggatctcyccacgcatgaagtcattcatgtgagagaaaaagattaacgtcagcagctgatactgtttttgggatgttttttaagtacacttaaacataccaagaatacctaacaagaataaggctaatcttgcattaaatctggtatagcca

SEQ ID NO: 4817 - DNA, 552 bp, Chicken  19866894108078_3
aagttgcttgcaacttgttaagcaagaaaaatggtttagtgagytttatggtacataacctgttcacttctttgcattttaaattccagcaagttgtgaataaattcatgatacagcttagattgctagtaatggccagataacrttgcaaagttacatgatgccaatttttatttcctcccttttcatctcatcactggtttccagatgacattgacttacattaacactcttcaagtcagcagtttttgaagagcttctttataaatgtacttgttacctgccaaacattggatctcyccacgcatgaagtcattcatgtgagagaaaaagattaacgtcagcagctgatactgtttttgggatgttttttaagtacacttaaacataccaagaatacctaacaagaataaggctaatcttgcattaaatctggtatagccacaagcatttaaaattgttgttctcatgctgtcataggaagaaatactgaaaatagcaggacgttctgctagattacatgcatttctcaacctgttcctcttagatctg

SEQ ID NO: 4818 - DNA, 600 bp, Chicken  19866894108079_1
gggtatcctgggagaggcacggagttcgaaaatccagactgactcgacattgccttcaggtattgtatccacttagatggctcctatattccgcatgttatttccttacagaaaaaaaaacgcgtgcacgtatccatccgtacgctcgctccaagctaactaaacagaaaccaacagcatattcgaaggtcttgaaaattctgcccgcatatcagactgctgcctccgtagtgaaattcctcaaagccaacaccctcgtgacatcacgtactacagagccatcgacacgcaactgtttckgcaaggmaagggcagcccggcgcttccgacttgacgsgaagccccgcaccgcattcccgctggcagcgcggtgccgcgcaggcggaggcagcgaccggccgcctccagcagcagcccggctctggcagccgcccaggaggcagcacaacttattgccaatgccgcaaatccctcccatcggctaacgaggagcgggactgcaggtggaaggcgatttcagcccgcgacaaggatttccttgcaaatgcwtgagagccgtgaccttgagctcagtgacaaatcaattcttttaaaattctc

SEQ ID NO: 4819 - DNA, 600 bp, Chicken  19866894108079_2
ctgggagaggcacggagttcgaaaatccagactgactcgacattgccttcaggtattgtatccacttagatggctcctatattccgcatgttatttccttacagaaaaaaaaacgcgtgcacgtatccatccgtacgctcgctccaagctaactaaacagaaaccaacagcatattcgaaggtcttgaaaattctgcccgcatatcagactgctgcctccgtagtgaaattcctcaaagccaacaccctcgtgacatcacgtactacagagccatcgacacgcaactgtttckgcaaggmaagggcagcccggcgcttccgacttgacgsgaagccccgcaccgcattcccgctggcagcgcggtgccgcgcaggcggaggcagcgaccggccgcctccagcagcagcccggctctggcagccgcccaggaggcagcacaacttattgccaatgccgcaaatccctcccatcggctaacgaggagcgggactgcaggtggaaggcgatttcagcccgcgacaaggatttccttgcaaatgcwtgagagccgtgaccttgagctcagtgacaaatcaattcttttaaaattctcagttaaa

SEQ ID NO: 4820 - DNA, 600 bp, Chicken  19866894108079_3
actgactcgacattgccttcaggtattgtatccacttagatggctcctatattccgcatgttatttccttacagaaaaaaaaacgcgtgcacgtatccatccgtacgctcgctccaagctaactaaacagaaaccaacagcatattcgaaggtcttgaaaattctgcccgcatatcagactgctgcctccgtagtgaaattcctcaaagccaacaccctcgtgacatcacgtactacagagccatcgacacgcaactgtttckgcaaggmaagggcagcccggcgcttccgacttgacgsgaagccccgcaccgcattcccgctggcagcgcggtgccgcgcaggcggaggcagcgaccggccgcctccagcagcagcccggctctggcagccgcccaggaggcagcacaacttattgccaatgccgcaaatccctcccatcggctaacgaggagcgggactgcaggtggaaggcgatttcagcccgcgacaaggatttccttgcaaatgcwtgagagccgtgaccttgagctcagtgacaaatcaattcttttaaaattctcagttaaaccaacgacgcatasgattgttttataagca

SEQ ID NO: 4821 - DNA, 600 bp, Chicken  19866894108079_4
acaccctcgtgacatcacgtactacagagccatcgacacgcaactgtttckgcaaggmaagggcagcccggcgcttccgacttgacgsgaagccccgcaccgcattcccgctggcagcgcggtgccgcgcaggcggaggcagcgaccggccgcctccagcagcagcccggctctggcagccgcccaggaggcagcacaacttattgccaatgccgcaaatccctcccatcggctaacgaggagcgggactgcaggtggaaggcgatttcagcccgcgacaaggatttccttgcaaatgcwtgagagccgtgaccttgagctcagtgacaaatcaattcttttaaaattctcagttaaaccaacgacgcatasgattgttttataagcaccatcagactgcatttctgcacttcacrggagtgtgagaaatcacactgagcttttctctgctaataaggaaccgcatcacgctaccctttcaaccacgggaaggcaggagggaaggatcggagccggaatttcaagcaacattacttgagctactgaatagagaaatgaaattatctgcctgcactcctgcaggatttaactacagtttaa

SEQ ID NO: 4822 - DNA, 600 bp, Chicken  19866894108079_5
gcttccgacttgacgsgaagccccgcaccgcattcccgctggcagcgcggtgccgcgcaggcggaggcagcgaccggccgcctccagcagcagcccggctctggcagccgcccaggaggcagcacaacttattgccaatgccgcaaatccctcccatcggctaacgaggagcgggactgcaggtggaaggcgatttcagcccgcgacaaggatttccttgcaaatgcwtgagagccgtgaccttgagctcagtgacaaatcaattcttttaaaattctcagttaaaccaacgacgcatasgattgttttataagcaccatcagactgcatttctgcacttcacrggagtgtgagaaatcacactgagcttttctctgctaataaggaaccgcatcacgctaccctttcaaccacgggaaggcaggagggaaggatcggagccggaatttcaagcaacattacttgagctactgaatagagaaatgaaattatctgcctgcactcctgcaggatttaactacagtttaaatcaaagaaatatcaaaagcagcatttcttttgatatcgagtacaatggtgagttacatgaaagttcattct

SEQ ID NO: 4823 - DNA, 600 bp, Chicken  19866894108079_6
gcgcggtgccgcgcaggcggaggcagcgaccggccgcctccagcagcagcccggctctggcagccgcccaggaggcagcacaacttattgccaatgccgcaaatccctcccatcggctaacgaggagcgggactgcaggtggaaggcgatttcagcccgcgacaaggatttccttgcaaatgcwtgagagccgtgaccttgagctcagtgacaaatcaattcttttaaaattctcagttaaaccaacgacgcatasgattgttttataagcaccatcagactgcatttctgcacttcacrggagtgtgagaaatcacactgagcttttctctgctaataaggaaccgcatcacgctaccctttcaaccacgggaaggcaggagggaaggatcggagccggaatttcaagcaacattacttgagctactgaatagagaaatgaaattatctgcctgcactcctgcaggatttaactacagtttaaatcaaagaaatatcaaaagcagcatttcttttgatatcgagtacaatggtgagttacatgaaagttcattctgggcatgccttcctcaggaaggggaaagacaattacggagcagg

SEQ ID NO: 4824 - DNA, 600 bp, Chicken  19866894108082_1
cctggggaagtgctttgggctcaagctgaggagtccaagataagaatatgcagaatgttttatgtctttgggttttcttgcctacccaccagtttggtcacctgatgacactctaagcaatttctttgtgatgctctaccaagcttcagctaacctagtaactctgtcacctccaggagcttcatagaatagaaacaccagagctgggagttatgggctaacctttcagtttgaagtcggtactttctagaccctgctgttcgggagctcagttgtattcatactcgcactgtgaaacargttgcctygtggagtgtttaaatgcagatttggagagtctcacttttcacaaagctggcagacttctttgaatccctttggctttggtgacaattggtagcagctcagacattaatgacaatcatgtttagagcttaagtaaagtgcaaacgtgtttatggagatgattctacataatagtttcctgttaagactcttttatgattaggaaygasttacagctatctgatttactttccctggagggttcattattttgttgcctccatacttccttgttttgtttgtctcctttctaaa

SEQ ID NO: 4825 - DNA, 600 bp, Chicken  19866894108082_2
agtgctttgggctcaagctgaggagtccaagataagaatatgcagaatgttttatgtctttgggttttcttgcctacccaccagtttggtcacctgatgacactctaagcaatttctttgtgatgctctaccaagcttcagctaacctagtaactctgtcacctccaggagcttcatagaatagaaacaccagagctgggagttatgggctaacctttcagtttgaagtcggtactttctagaccctgctgttcgggagctcagttgtattcatactcgcactgtgaaacargttgcctygtggagtgtttaaatgcagatttggagagtctcacttttcacaaagctggcagacttctttgaatccctttggctttggtgacaattggtagcagctcagacattaatgacaatcatgtttagagcttaagtaaagtgcaaacgtgtttatggagatgattctacataatagtttcctgttaagactcttttatgattaggaaygasttacagctatctgatttactttccctggagggttcattattttgttgcctccatacttccttgttttgtttgtctcctttctaaagagttatc

SEQ ID NO: 4826 - DNA, 600 bp, Chicken  19866894108082_3
atgggctaacctttcagtttgaagtcggtactttctagaccctgctgttcgggagctcagttgtattcatactcgcactgtgaaacargttgcctygtggagtgtttaaatgcagatttggagagtctcacttttcacaaagctggcagacttctttgaatccctttggctttggtgacaattggtagcagctcagacattaatgacaatcatgtttagagcttaagtaaagtgcaaacgtgtttatggagatgattctacataatagtttcctgttaagactcttttatgattaggaaygasttacagctatctgatttactttccctggagggttcattattttgttgcctccatacttccttgttttgtttgtctcctttctaaagagttatcactttattagtccagtcatctcctctrgcatcatatttgtgctttacattagtgtatgatttatattcactgttttcatgctcctcagctgttgcacagactgacccaacaaaatatctgaaatcaactagaaaaatgtagagatttgtttaacagatgttactccactgccctccctccmcacccctcccatgctgacagtca

SEQ ID NO: 4827 - DNA, 600 bp, Chicken  19866894108082_4
ggctaacctttcagtttgaagtcggtactttctagaccctgctgttcgggagctcagttgtattcatactcgcactgtgaaacargttgcctygtggagtgtttaaatgcagatttggagagtctcacttttcacaaagctggcagacttctttgaatccctttggctttggtgacaattggtagcagctcagacattaatgacaatcatgtttagagcttaagtaaagtgcaaacgtgtttatggagatgattctacataatagtttcctgttaagactcttttatgattaggaaygasttacagctatctgatttactttccctggagggttcattattttgttgcctccatacttccttgttttgtttgtctcctttctaaagagttatcactttattagtccagtcatctcctctrgcatcatatttgtgctttacattagtgtatgatttatattcactgttttcatgctcctcagctgttgcacagactgacccaacaaaatatctgaaatcaactagaaaaatgtagagatttgtttaacagatgttactccactgccctccctccmcacccctcccatgctgacagtcagcc

SEQ ID NO: 4828 - DNA, 600 bp, Chicken  19866894108082_5
agtctcacttttcacaaagctggcagacttctttgaatccctttggctttggtgacaattggtagcagctcagacattaatgacaatcatgtttagagcttaagtaaagtgcaaacgtgtttatggagatgattctacataatagtttcctgttaagactcttttatgattaggaaygasttacagctatctgatttactttccctggagggttcattattttgttgcctccatacttccttgttttgtttgtctcctttctaaagagttatcactttattagtccagtcatctcctctrgcatcatatttgtgctttacattagtgtatgatttatattcactgttttcatgctcctcagctgttgcacagactgacccaacaaaatatctgaaatcaactagaaaaatgtagagatttgtttaacagatgttactccactgccctccctccmcacccctcccatgctgacagtcagcctttgactcaataccaggcaatggctgctgggcttttatttttcatgtgcttgttaaaacttagtgacctttgtcaagttcacagctttattttttgccccgatgtcttcctggagctgat

SEQ ID NO: 4829 - DNA, 600 bp, Chicken  19866894108082_6
aagactcttttatgattaggaaygasttacagctatctgatttactttccctggagggttcattattttgttgcctccatacttccttgttttgtttgtctcctttctaaagagttatcactttattagtccagtcatctcctctrgcatcatatttgtgctttacattagtgtatgatttatattcactgttttcatgctcctcagctgttgcacagactgacccaacaaaatatctgaaatcaactagaaaaatgtagagatttgtttaacagatgttactccactgccctccctccmcacccctcccatgctgacagtcagcctttgactcaataccaggcaatggctgctgggcttttatttttcatgtgcttgttaaaacttagtgacctttgtcaagttcacagctttattttttgccccgatgtcttcctggagctgatctctctcacacagaagcaatatttgcttttcactgctgctgtgtttcatttaatattaactgatggtttttcctttatcttcttcccacgccctagaatcatcaatttttagagcctatgcaggttccccctggggaatttttcagaccacgaa

SEQ ID NO: 4830 - DNA, 600 bp, Chicken  19866894108082_7
gctggattcaaaagatttcctgggtaaacccaaggtaacaggcatgtgatgattaagttaaacagcgaacggattaacaccccaccttctgacatctgcagagagcattattactgcccactccaccaatcactgcactggtggagacccaatggcaggactctcagtcaaggtacctgggacacacaagccaaaatctgttagaagattattatagagaccttatctatcaaaaatgcacattgctgctaaaatccttcccaatcttagtcactttaaactggaaaaaaacaaccaacyacaactgagcaggtgcttacacaaatccctgtggttatcattttgctgacaacaacattttcaaaggagcacattcctcctacttgttactgcattcccaatgggacaaacgtgcactttggagaaaaatgctttgccatgtactttaatgcaaaccagcagagaattcttccaatcccttccgtggccagtgcagtcagcagaagtgccacaggccagataactcctgcatgaagaaaggaaagggaaaataaccactcacacttttgaagggctttggaaagatggaagatgcatgga

SEQ ID NO: 4831 - DNA, 600 bp, Chicken  19866894108087_1
aacatatgtacagacgtatatactaaagaataactccatcagaactgatcagagatgttccagctgaatcttctttagatgacactgcatcccaaaagtcctcaattgctacaaattcaattgttctgttccctgtggagcacgagctcccaggtcttgatcttcccaggactgcagatagactgctgctgtgaattggatttgggtttatctccatccagttctatgtatctttcctcagcacagccagaatgcaacatataatgctatatatctgaataagtgccctatgcagagatrtgttataggagcgcgtgctgcagaggtgcttcatttcaaaggcygaggcagttagaaatgtcagggaatcgtgcagtccagcagagtgagagacatgagtaatctgcattgtgtttcccacctctgacatttgtgactgtaacccattgctgcagcagttgccacattgcagcaccatcccaggagggctataggggcaggtcacccctttgggcacattgcctccatcactggttttgtgaacttccataaaaatgggcctctagagcttacattcttttaattttcatgctcaaagac

SEQ ID NO: 4832 - DNA, 600 bp, Chicken  19866894108087_2
ctgatcagagatgttccagctgaatcttctttagatgacactgcatcccaaaagtcctcaattgctacaaattcaattgttctgttccctgtggagcacgagctcccaggtcttgatcttcccaggactgcagatagactgctgctgtgaattggatttgggtttatctccatccagttctatgtatctttcctcagcacagccagaatgcaacatataatgctatatatctgaataagtgccctatgcagagatrtgttataggagcgcgtgctgcagaggtgcttcatttcaaaggcygaggcagttagaaatgtcagggaatcgtgcagtccagcagagtgagagacatgagtaatctgcattgtgtttcccacctctgacatttgtgactgtaacccattgctgcagcagttgccacattgcagcaccatcccaggagggctataggggcaggtcacccctttgggcacattgcctccatcactggttttgtgaacttccataaaaatgggcctctagagcttacattcttttaattttcatgctcaaagacaaaccttgatatcccaactgcagaatctgctgtacattttagag

SEQ ID NO: 4833 - DNA, 599 bp, Chicken  19866894108088_1
  misc_feature (1)..(120): n is any nucleotide
nnnnnnnnnnnnnnnnnnnnnnnnnnnnnnnnnnnnnnnnnnnnnnnnnnnnnnnnnnnnnnnnnnnnnnnnnnnnnnnnnnnnnnnnnnnnnnnnnnnnnnnnnnnnnnnnnnnnnnnnaagctaaggacaagagcgagtgagtctgtgcctgcaagcaaggtcagctaacagagagcacagatactcctccctggtaacaagctcacttaaataagatatccgaggtattaagatctattagcaccggttgtgataccgaaggcaaacacatcacatgcacacatgcagactctgcaytgctgtcagaaacactgcatgctcagagggctccgggtgggtactgcatctcatgcaaagaagtgctgcaaaggaacagtatttgatccctaccttctttaggaatgcatatgggaatccgagacaagaggagaaaagtcaacccctctttatgacccattcccaatggaccacggcaatggtaactaaagcaatccttctttcaccaaaattatgtccgaaaaatcaaagtaagcagtgactgagtgggcttaaaatgatttttttctaaatagaaagaaaaaataattatctcctgg

SEQ ID NO: 4834 - DNA, 600 bp, Chicken  19866894108088_2
tggaaggctggaagaggacaaacggccatttccaggcagccgcccaggacacccaccattctgtgtgtcacacccatactgcagcctgcatctgccccgaggaatcactactgacatacaaacagcgtcagaaaggactcttcccttgggtatcctccacgcaaatgggaaaggcagaacgaaatcagggacaaggaatgggcatctcttcccacagcagcaactgcaaggctccagagaggccctaatgtttagtagggattgtgctgtgaagcacttgtttgtgtgtcaccttcctcygcttccagcttcatggaggggaaaaaaagcagcaattttcatcagcaaagcacaacagcttcagaacaacagagaaacagtccgtgagggatttgacagagccttcccttgaagtgctgacagcgtgcctggttcctaaaagcaaacacagttcccagcacctcagactctaatctatatcgyatagactgacttacttttattagaacttcaaagtaaccttctgcattccctgggctaatgggagtgtaggctcgctggacctccaaaccattcaccactcctctgaggaaagaaata

SEQ ID NO: 4835 - DNA, 600 bp, Chicken  19866894108088_3
atcagggacaaggaatgggcatctcttcccacagcagcaactgcaaggctccagagaggccctaatgtttagtagggattgtgctgtgaagcacttgtttgtgtgtcaccttcctcygcttccagcttcatggaggggaaaaaaagcagcaattttcatcagcaaagcacaacagcttcagaacaacagagaaacagtccgtgagggatttgacagagccttcccttgaagtgctgacagcgtgcctggttcctaaaagcaaacacagttcccagcacctcagactctaatctatatcgyatagactgacttacttttattagaacttcaaagtaaccttctgcattccctgggctaatgggagtgtaggctcgctggacctccaaaccattcaccactcctctgaggaaagaaatacaggaaacccctgtaaggtgtgtcattgacagacattaccaacactcctgcttttctctggggagaccaggcagcgccgagggaggcagcagaacccctcctcggtggctcagcctgtgcacagctgcaaaacactcccctgtgagaggtacaaatccgtggggaacataacttataacacag

SEQ ID NO: 4836 - DNA, 600 bp, Chicken  19866894108091_1
gacagcctgcagtgagcatgttgcgtcctaccagcagccacagcactgtaggtggaaaaggcaccttggggttgccctgtttgatgagtctgagaacagctggcatcgttggctgcatgggatgggttgctacgtgacctctcctgaagagctttctgcttccttctgcattctggtctggtgcagatatcggaaggatttggagcacccaaagaggcatcagggaagaggaaagctccacttttctgcaaggaagtggtgtacaggcattcctcaaaaacttcctcaactctcaggccrgaaagaattgaaataagcagaagatgtctaagctaagatacaaccatcttttgttttttttttcctacagccataatttttaacagtactttaaagactgatttaatatctgtggaaaatgcatattctagagtgataggaatcctttcttaaattctggaatacaaaataacaattttagccttcaactagacttatttcttaataccaagacaatagcacattatccaagaacgatccccaaatcataagaatcttcaaataaaaatctctgctatccacgagagtaacctgccgttt

SEQ ID NO: 4837 - DNA, 600 bp, Chicken  19866894108102_1
tgatttccctgttacgctccggagattgggcagataatttgtcgtaatattcatcgcggcatctccgggagcggtgtgtgaagccagcgatggtgagagatctcgcttctgggctcctactgcaggttgatgtggtttgctttttgtttagattcttgccttgaaattgctgtcataattgagcggaaaagttgaggcagaaattgctgtgatctgttatgtgctttctgtcatctaagtagctagcaaactactgcagtgagttgtgaagggaggtgtggggctctgagaacaaatacrtactctggagaaagaatgcctattttaatgtgctaattttttatgtttaggagagctaccagtaaatgcttgagggtaaaacaaaataatgtaccrtatcgagtttatagagatgcactgaaagttgttttctgaagtttggaatggtacttggctttgggataaacaattatctcctgaattagagaagtgcagtgccagcactgctctcctgtgctgacaggcagaggagatgggattacataaagatgcactaatttctcctctctgaggtgaagtggatgggactatctggaatgc

SEQ ID NO: 4838 - DNA, 550 bp, Chicken  19866894108102_2
gagatctcgcttctgggctcctactgcaggttgatgtggtttgctttttgtttagattcttgccttgaaattgctgtcataattgagcggaaaagttgaggcagaaattgctgtgatctgttatgtgctttctgtcatctaagtagctagcaaactactgcagtgagttgtgaagggaggtgtggggctctgagaacaaatacrtactctggagaaagaatgcctattttaatgtgctaattttttatgtttaggagagctaccagtaaatgcttgagggtaaaacaaaataatgtaccrtatcgagtttatagagatgcactgaaagttgttttctgaagtttggaatggtacttggctttgggataaacaattatctcctgaattagagaagtgcagtgccagcactgctctcctgtgctgacaggcagaggagatgggattacataaagatgcactaatttctcctctctgaggtgaagtggatgggactatctggaatgcctatgagctggctatgaactgagtgttactcctgtatcatacagca

SEQ ID NO: 4839 - DNA, 600 bp, Chicken  19866894108105_1
ccagaataaaagtaataaacatttaaaagaaattaaaaagaaaaacaaaaacccctcctgctgtagaatttcaggacctacaaggaatgtcagatagaagttaatttcttactcgtctccaaccttgatgtaactgtttttacaaacagcataacaacgcagtcaatccagaatggattatcgggtattatcccctaaactccaagtatacacaccaagtaggatttcctgcccttacacatctaaagcatcatattttgctccacgaatcactgcaactcctggaaatgggcagtgtaygaaggctctttttgcactgtctggcaacaggtacacaacaatattgctacacggcccaaagcgtctgccttccaagaaacacaactggctgcttagttcggactaaacaatgtcactgtcttaagcatcattaagaagattttcacaaaattgcagatttaaactcctaatgccattctaaagcctggctacatcttgtctactcaatgcacatggcaaacatgcatttctacggtgttctatccatttagcattacatcttycacagaacaggtaaacagtttttgaatatgcagtagt

SEQ ID NO: 4840 - DNA, 600 bp, Chicken  19866894108105_2
cacgaatcactgcaactcctggaaatgggcagtgtaygaaggctctttttgcactgtctggcaacaggtacacaacaatattgctacacggcccaaagcgtctgccttccaagaaacacaactggctgcttagttcggactaaacaatgtcactgtcttaagcatcattaagaagattttcacaaaattgcagatttaaactcctaatgccattctaaagcctggctacatcttgtctactcaatgcacatggcaaacatgcatttctacggtgttctatccatttagcattacatcttycacagaacaggtaaacagtttttgaatatgcagtagtctacttccaagcatctgaaactgcctaatcacatgcctgctacaagactacaggcaaaaattaagtatgttattggagtacacttgaaaatagaagaattgtacaatcttgattgttggcattgaatagtaccaacatttgcttttgrttgttactgtaaattttgaaacagtttatattgcttgtgccactttgttctggctagcacaaaacagaggatgtcagctggggagtcagaagagaagtaggaagaaaggcagaga

SEQ ID NO: 4841 - DNA, 600 bp, Chicken  19866894108105_3
aattgcagatttaaactcctaatgccattctaaagcctggctacatcttgtctactcaatgcacatggcaaacatgcatttctacggtgttctatccatttagcattacatcttycacagaacaggtaaacagtttttgaatatgcagtagtctacttccaagcatctgaaactgcctaatcacatgcctgctacaagactacaggcaaaaattaagtatgttattggagtacacttgaaaatagaagaattgtacaatcttgattgttggcattgaatagtaccaacatttgcttttgrttgttactgtaaattttgaaacagtttatattgcttgtgccactttgttctggctagcacaaaacagaggatgtcagctggggagtcagaagagaagtaggaagaaaggcagagagctttaagaggatgtgacaattctgaaacatatataagaacacttaagaaagcatgcttaatatcctagaaatccagatgttcacaatgaatttccataggtttgcctgatgaagttgagaaaaccaccacagtgtatccctattacacaaagaatgatccaaaagcagtcacaygataaagayg

SEQ ID NO: 4842 - DNA, 528 bp, Chicken  19866894108105_4
ttgcttttgrttgttactgtaaattttgaaacagtttatattgcttgtgccactttgttctggctagcacaaaacagaggatgtcagctggggagtcagaagagaagtaggaagaaaggcagagagctttaagaggatgtgacaattctgaaacatatataagaacacttaagaaagcatgcttaatatcctagaaatccagatgttcacaatgaatttccataggtttgcctgatgaagttgagaaaaccaccacagtgtatccctattacacaaagaatgatccaaaagcagtcacaygataaagaygcttgagctcawgcatgagacgtccctctgtcacacatctaccacagctccctgcctgcatgcactgtggggattcagacatcgccgggcagctgagatcccaccattcacctccaggatttcctcattccaaatttcgaggtacacatagctttctcagtaggaaaaatgctgaaggcactgcagtggtaggaaagaaaaataattcaggctgatttt

SEQ ID NO: 4843 - DNA, 519 bp, Chicken  19866894108105_5
rttgttactgtaaattttgaaacagtttatattgcttgtgccactttgttctggctagcacaaaacagaggatgtcagctggggagtcagaagagaagtaggaagaaaggcagagagctttaagaggatgtgacaattctgaaacatatataagaacacttaagaaagcatgcttaatatcctagaaatccagatgttcacaatgaatttccataggtttgcctgatgaagttgagaaaaccaccacagtgtatccctattacacaaagaatgatccaaaagcagtcacaygataaagaygcttgagctcawgcatgagacgtccctctgtcacacatctaccacagctccctgcctgcatgcactgtggggattcagacatcgccgggcagctgagatcccaccattcacctccaggatttcctcattccaaatttcgaggtacacatagctttctcagtaggaaaaatgctgaaggcactgcagtggtaggaaagaaaaataattcaggctgatttt

SEQ ID NO: 4844 - DNA, 507 bp, Chicken  19866894108105_6
aattttgaaacagtttatattgcttgtgccactttgttctggctagcacaaaacagaggatgtcagctggggagtcagaagagaagtaggaagaaaggcagagagctttaagaggatgtgacaattctgaaacatatataagaacacttaagaaagcatgcttaatatcctagaaatccagatgttcacaatgaatttccataggtttgcctgatgaagttgagaaaaccaccacagtgtatccctattacacaaagaatgatccaaaagcagtcacaygataaagaygcttgagctcawgcatgagacgtccctctgtcacacatctaccacagctccctgcctgcatgcactgtggggattcagacatcgccgggcagctgagatcccaccattcacctccaggatttcctcattccaaatttcgaggtacacatagctttctcagtaggaaaaatgctgaaggcactgcagtggtaggaaagaaaaataattcaggctgatttt

SEQ ID NO: 4845 - DNA, 599 bp, Chicken  19866894108108_1
  misc_feature (1)..(212): n is any nucleotide
nnnnnnnnnnnnnnnnnnnnnnnnnnnnnnnnnnnnnnnnnnnnnnnnnnnnnnnnnnnnnnnnnnnnnnnnnnnnnnnnnnnnnnnnnnnnnnnnnnnnnnnnnnnnnnnnnnnnnnnnnnnnnnnnnnnnnnnnnnnnnnnnnnnnnnnnnnnnnnnnnnnnnnnnnnnnnnnnnnnnnnnnnnnnnnnnnnnnnnnnnnnnnnnnnnnntattttgaaaacaactataattggatttctgcttatgatactctgaaataggttgcctacttttcgaaagttcaaacaattcaacaamtcctgaggtattttaaaaggtatctttaagagacacaaaatagcttcattgaaccaccaggtttaaatattagcaaggcagcgcatttcctggagtccagcatcccagtgtgtgcacagcaccaagcacactgctgaagccaccaacactgaagataacgaaagccacaaatacrtgaagtgccrtggacaacaaggaraggaaagcactgacataaaaatatgctctcaaactataaatattcaagatggaaaaagtttcagcgatatgtctagcaagagacagctttttttcagaat

SEQ ID NO: 4846 - DNA, 599 bp, Chicken  19866894108108_2
  misc_feature (1)..(37): n is any nucleotide
nnnnnnnnnnnnnnnnnnnnnnnnnnnnnnnnnnnnntattttgaaaacaactataattggatttctgcttatgatactctgaaataggttgcctacttttcgaaagttcaaacaattcaacaamtcctgaggtattttaaaaggtatctttaagagacacaaaatagcttcattgaaccaccaggtttaaatattagcaaggcagcgcatttcctggagtccagcatcccagtgtgtgcacagcaccaagcacactgctgaagccaccaacactgaagataacgaaagccacaaatacrtgaagtgccrtggacaacaaggaraggaaagcactgacataaaaatatgctctcaaactataaatattcaagatggaaaaagtttcagcgatatgtctagcaagagacagctttttttcagaatcctgaaataggatttatttattatgtggatattgtacaaattgaatactgaattcgtttgcataaatagggctgaactttgtgattctttcccacagatctatcaaagctgctgaacttattaactgtttaattctgcccctgaccagaacttaatcatactccaaattccaacm

SEQ ID NO: 4847 - DNA, 599 bp, Chicken  19866894108108_3
  misc_feature (1)..(27): n is any nucleotide
nnnnnnnnnnnnnnnnnnnnnnnnnnntattttgaaaacaactataattggatttctgcttatgatactctgaaataggttgcctacttttcgaaagttcaaacaattcaacaamtcctgaggtattttaaaaggtatctttaagagacacaaaatagcttcattgaaccaccaggtttaaatattagcaaggcagcgcatttcctggagtccagcatcccagtgtgtgcacagcaccaagcacactgctgaagccaccaacactgaagataacgaaagccacaaatacrtgaagtgccrtggacaacaaggaraggaaagcactgacataaaaatatgctctcaaactataaatattcaagatggaaaaagtttcagcgatatgtctagcaagagacagctttttttcagaatcctgaaataggatttatttattatgtggatattgtacaaattgaatactgaattcgtttgcataaatagggctgaactttgtgattctttcccacagatctatcaaagctgctgaacttattaactgtttaattctgcccctgaccagaacttaatcatactccaaattccaacmtaaaactttg

SEQ ID NO: 4848 - DNA, 599 bp, Chicken  19866894108108_4
  misc_feature (1)..(13): n is any nucleotide
nnnnnnnnnnnnntattttgaaaacaactataattggatttctgcttatgatactctgaaataggttgcctacttttcgaaagttcaaacaattcaacaamtcctgaggtattttaaaaggtatctttaagagacacaaaatagcttcattgaaccaccaggtttaaatattagcaaggcagcgcatttcctggagtccagcatcccagtgtgtgcacagcaccaagcacactgctgaagccaccaacactgaagataacgaaagccacaaatacrtgaagtgccrtggacaacaaggaraggaaagcactgacataaaaatatgctctcaaactataaatattcaagatggaaaaagtttcagcgatatgtctagcaagagacagctttttttcagaatcctgaaataggatttatttattatgtggatattgtacaaattgaatactgaattcgtttgcataaatagggctgaactttgtgattctttcccacagatctatcaaagctgctgaacttattaactgtttaattctgcccctgaccagaacttaatcatactccaaattccaacmtaaaactttgggatctgcttgttt

SEQ ID NO: 4849 - DNA, 536 bp, Chicken  19866894108108_5
rtgaagtgccrtggacaacaaggaraggaaagcactgacataaaaatatgctctcaaactataaatattcaagatggaaaaagtttcagcgatatgtctagcaagagacagctttttttcagaatcctgaaataggatttatttattatgtggatattgtacaaattgaatactgaattcgtttgcataaatagggctgaactttgtgattctttcccacagatctatcaaagctgctgaacttattaactgtttaattctgcccctgaccagaacttaatcatactccaaattccaacmtaaaactttgggatctgcttgtttggcttcaaacagcactattctccacagcttgagatctgaatttcccaagtacagaaggaattctctacaaccttaaatgaagaatgtgtttttcacaagtatattgctgcttcagcacacgtagggatagatactgtctttataagatgaagttcatttccaaagatatatgaagagactgattaagtgaaactcacacgttcagctttaat

SEQ ID NO: 4850 - DNA, 600 bp, Chicken  19866894108110_1
aaggatggctttctcaacagaaacattcagatatgccagaaaaactttggcatgaaaaggtactccaaggctgcagatctttggcagcagactgtgccctgtccattctttctgattcagtcttctcccactcaaggctatatgatcacatccactcctttgcagtgattttgtccttgctggaacctatcatcaaccactttattttaatatgtcagtggaaaactaccagactttttttgctaagcttgttctctggtacatgctttttaagtgtattacaatagagaacacatgagmatgtgtggtatactgaggaaaaaggaaaaggagtagcttgtagcaatactgaacttttagaacccttgacctgtaaaagaagcttgcagcacttgggtttgggcagcttagaaattagaaagggggaagtccatcttcgatttgtaaaaaaaaaatcactataaagaagcagtactcacttcttacctagagctcagaacggagaagaggaaacaagaaactaatggtttaatttgcttcaaaggtgactttggaaaggcagtggaagaaaaagctttctatctgggtgtctagactaag

SEQ ID NO: 4851 - DNA, 599 bp, Chicken  19866894108113_1
  misc_feature (1)..(47): n is any nucleotide
nnnnnnnnnnnnnnnnnnnnnnnnnnnnnnnnnnnnnnnnnnnnnnntcccgacctacctgcagagagcagattgtccaaggttcaatactttctgaaaatatttctcttcaatgggcccaacctcaggctcccagaacagacacccaagctgccaaacatttcataaaccattttccctatagttacattacaaagtcacattttcttttctaaacaatttcccccacactgtaattctgttcagcttgacagaggctgggctgaaggatttactctaaaccgagtctgtttaaaatgkctgcaacgttcatttcaagctaggaaatataacacaaaaagttctgctttccccaccatggaggtaacagcccagtatagacccttttggggaaaacatttgcaacagcaaatgctgatcaaaccrgcaacatgaaaaatattagcaagcccacaaagagggttttgcattcagtccactgtgctccaaagcagagrgctgtgctaatggccttcctgggcctcattgggtgcgtgcagctgttcctgcagccagcactygtgctagcctggagggtaaagagactcattttgggtttg

SEQ ID NO: 4852 - DNA, 600 bp, Chicken  19866894108113_2
aggctcccagaacagacacccaagctgccaaacatttcataaaccattttccctatagttacattacaaagtcacattttcttttctaaacaatttcccccacactgtaattctgttcagcttgacagaggctgggctgaaggatttactctaaaccgagtctgtttaaaatgkctgcaacgttcatttcaagctaggaaatataacacaaaaagttctgctttccccaccatggaggtaacagcccagtatagacccttttggggaaaacatttgcaacagcaaatgctgatcaaaccrgcaacatgaaaaatattagcaagcccacaaagagggttttgcattcagtccactgtgctccaaagcagagrgctgtgctaatggccttcctgggcctcattgggtgcgtgcagctgttcctgcagccagcactygtgctagcctggagggtaaagagactcattttgggtttgtggtggctgctgcagctccatcagcatgatttatgtgctgatctgcatatgctcacctgctaacgctgagaattgtgcttttccatgatactgtgcccgtagcagccacatgtgtttgccttgtgtg

SEQ ID NO: 4853 - DNA, 600 bp, Chicken  19866894108113_3
tcacattttcttttctaaacaatttcccccacactgtaattctgttcagcttgacagaggctgggctgaaggatttactctaaaccgagtctgtttaaaatgkctgcaacgttcatttcaagctaggaaatataacacaaaaagttctgctttccccaccatggaggtaacagcccagtatagacccttttggggaaaacatttgcaacagcaaatgctgatcaaaccrgcaacatgaaaaatattagcaagcccacaaagagggttttgcattcagtccactgtgctccaaagcagagrgctgtgctaatggccttcctgggcctcattgggtgcgtgcagctgttcctgcagccagcactygtgctagcctggagggtaaagagactcattttgggtttgtggtggctgctgcagctccatcagcatgatttatgtgctgatctgcatatgctcacctgctaacgctgagaattgtgcttttccatgatactgtgcccgtagcagccacatgtgtttgccttgtgtggatcctggatgctcagggcttcgcggctcccatcggcacatggtggtgatgctgataatgctccgtatgca

SEQ ID NO: 4854 - DNA, 600 bp, Chicken  19866894108113_4
ggctgaaggatttactctaaaccgagtctgtttaaaatgkctgcaacgttcatttcaagctaggaaatataacacaaaaagttctgctttccccaccatggaggtaacagcccagtatagacccttttggggaaaacatttgcaacagcaaatgctgatcaaaccrgcaacatgaaaaatattagcaagcccacaaagagggttttgcattcagtccactgtgctccaaagcagagrgctgtgctaatggccttcctgggcctcattgggtgcgtgcagctgttcctgcagccagcactygtgctagcctggagggtaaagagactcattttgggtttgtggtggctgctgcagctccatcagcatgatttatgtgctgatctgcatatgctcacctgctaacgctgagaattgtgcttttccatgatactgtgcccgtagcagccacatgtgtttgccttgtgtggatcctggatgctcagggcttcgcggctcccatcggcacatggtggtgatgctgataatgctccgtatgcaaaacatgccagagatgatgctatggcacatcactgcagccagaactgggggtatcagggcctg

SEQ ID NO: 4855 - DNA, 600 bp, Chicken  19866894108115_1
gacctaaatggtctttccttgttaaaaaagggaaaaaaaggttttgcagaggcttcttggacacaatgtgatttttgaaatgagtttctggaaaaatgtttgatgtagcaaaaaatatttcagccagctttcctcaggacccatcacgtccaggggcagatctagaaatcatttcagcaaagaagtgggctgtatagctcagatttcagtgcctgcgtttaaacaaacatcactacagtcaggcaaagtatacaaatgttaactacgcagataatacaaataatcaaaatataaaaaaarttactttgcaaatgacactgctgaattgtacctgcagtcctaatttcttatattggttaaacaagatgaattctttggaatatgagctgtgcaaatcasctctcctgagccgctgtaaagttggaggttacaacttgggcactcacactgaaatgcagacgacgtaatgtttcattacccaagcttcttcagttcatttaaaccagggtaaaataactactttgatttgttactgagataaacctggcagtgcactggcataaattagtatgtcagatgtaaaatgataaagtaaggatt

SEQ ID NO: 4856 - DNA, 600 bp, Chicken  19866894108115_2
ttgatgtagcaaaaaatatttcagccagctttcctcaggacccatcacgtccaggggcagatctagaaatcatttcagcaaagaagtgggctgtatagctcagatttcagtgcctgcgtttaaacaaacatcactacagtcaggcaaagtatacaaatgttaactacgcagataatacaaataatcaaaatataaaaaaarttactttgcaaatgacactgctgaattgtacctgcagtcctaatttcttatattggttaaacaagatgaattctttggaatatgagctgtgcaaatcasctctcctgagccgctgtaaagttggaggttacaacttgggcactcacactgaaatgcagacgacgtaatgtttcattacccaagcttcttcagttcatttaaaccagggtaaaataactactttgatttgttactgagataaacctggcagtgcactggcataaattagtatgtcagatgtaaaatgataaagtaaggattagtattcggatttctatgtgtcaattgaacattgtagcataaaaatactatatctgaatgcaggggtacagcaagaaattgttctcacaccaggttttg

SEQ ID NO: 4857 - DNA, 600 bp, Chicken  19866894108118_1
gcccccagcagcccagacacatgtctgggaacggagcttttgccgtggagaaaatcataagcctggtgtgttttatgtcattttgcacatccggaactggtggtaggtgctgccaaagtgatgggaatgttcagtgctctttcagccacagcccagagccactgctctggaggcaaggggccttgggtccccagcttttatcttttcagcccgctgcctcaagtatccggtagagaaatggtgcaagaggattggttcttctatggcaataagtattgtaaagcctggtgaagcttgacrtgcctgcagatgttctgcagctcccactgcttatgaaatcactaaagcttctcaaaagtcacggggctcctttcctgcgggaatacagctgctgtctgtggcagtgtggctgaactctgatgggctcagttcagcctgtgctggtcggggctggagaagatcctgctttcctcaaggaagatggtgttggtgtcttacccgagtgctcttggcctcyggggtaaaaccccatkgcaawctcagtgagtaggggcacagagctgcagttttgtgtcagacaaarcggtgccaccagttcag

SEQ ID NO: 4858 - DNA, 600 bp, Chicken  19866894108118_2
ctcaagtatccggtagagaaatggtgcaagaggattggttcttctatggcaataagtattgtaaagcctggtgaagcttgacrtgcctgcagatgttctgcagctcccactgcttatgaaatcactaaagcttctcaaaagtcacggggctcctttcctgcgggaatacagctgctgtctgtggcagtgtggctgaactctgatgggctcagttcagcctgtgctggtcggggctggagaagatcctgctttcctcaaggaagatggtgttggtgtcttacccgagtgctcttggcctcyggggtaaaaccccatkgcaawctcagtgagtaggggcacagagctgcagttttgtgtcagacaaarcggtgccaccagttcagcttttaaacagtgatgtgtcagacttatttcttgagctctcaaacagaaatgagcttgatgaaggggcacattgctctgccctgttggctcacagcgcaggctggtcacaagcctcagctctgagcagcagagcctgtatttttgatcttgcgacttgtagcccaatagagctcaagggaggattgcctgatgctgtatcgtgggttattcttcact

SEQ ID NO: 4859 - DNA, 600 bp, Chicken  19866894108118_3
agaaatggtgcaagaggattggttcttctatggcaataagtattgtaaagcctggtgaagcttgacrtgcctgcagatgttctgcagctcccactgcttatgaaatcactaaagcttctcaaaagtcacggggctcctttcctgcgggaatacagctgctgtctgtggcagtgtggctgaactctgatgggctcagttcagcctgtgctggtcggggctggagaagatcctgctttcctcaaggaagatggtgttggtgtcttacccgagtgctcttggcctcyggggtaaaaccccatkgcaawctcagtgagtaggggcacagagctgcagttttgtgtcagacaaarcggtgccaccagttcagcttttaaacagtgatgtgtcagacttatttcttgagctctcaaacagaaatgagcttgatgaaggggcacattgctctgccctgttggctcacagcgcaggctggtcacaagcctcagctctgagcagcagagcctgtatttttgatcttgcgacttgtagcccaatagagctcaagggaggattgcctgatgctgtatcgtgggttattcttcacttgcaggaattatcatt

SEQ ID NO: 4860 - DNA, 600 bp, Chicken  19866894108118_4
tggtgcaagaggattggttcttctatggcaataagtattgtaaagcctggtgaagcttgacrtgcctgcagatgttctgcagctcccactgcttatgaaatcactaaagcttctcaaaagtcacggggctcctttcctgcgggaatacagctgctgtctgtggcagtgtggctgaactctgatgggctcagttcagcctgtgctggtcggggctggagaagatcctgctttcctcaaggaagatggtgttggtgtcttacccgagtgctcttggcctcyggggtaaaaccccatkgcaawctcagtgagtaggggcacagagctgcagttttgtgtcagacaaarcggtgccaccagttcagcttttaaacagtgatgtgtcagacttatttcttgagctctcaaacagaaatgagcttgatgaaggggcacattgctctgccctgttggctcacagcgcaggctggtcacaagcctcagctctgagcagcagagcctgtatttttgatcttgcgacttgtagcccaatagagctcaagggaggattgcctgatgctgtatcgtgggttattcttcacttgcaggaattatcattatttg

SEQ ID NO: 4861 - DNA, 600 bp, Chicken  19866894108118_5
cctggtgaagcttgacrtgcctgcagatgttctgcagctcccactgcttatgaaatcactaaagcttctcaaaagtcacggggctcctttcctgcgggaatacagctgctgtctgtggcagtgtggctgaactctgatgggctcagttcagcctgtgctggtcggggctggagaagatcctgctttcctcaaggaagatggtgttggtgtcttacccgagtgctcttggcctcyggggtaaaaccccatkgcaawctcagtgagtaggggcacagagctgcagttttgtgtcagacaaarcggtgccaccagttcagcttttaaacagtgatgtgtcagacttatttcttgagctctcaaacagaaatgagcttgatgaaggggcacattgctctgccctgttggctcacagcgcaggctggtcacaagcctcagctctgagcagcagagcctgtatttttgatcttgcgacttgtagcccaatagagctcaagggaggattgcctgatgctgtatcgtgggttattcttcacttgcaggaattatcattatttgatgtggtaatcctgagcgtgaccaaccctgtggctgcgcaattcc

SEQ ID NO: 4862 - DNA, 600 bp, Chicken  19866894108118_6
agggacgaggtgctgtcgcagcagtgccaggacaagcaagcagcaaaaggagagcttgcaaggaccacgcgtggtctgctcgggtctgtgagagtgctgaagagcctggtctggtgactggagaccctgctcgtgacaggggggttgaaactagatgatctttgaggtccttttcaacccaggccattctatgattctacgaaggaggaggggaacccagttcagcagcctgcctggtgtaagcaaacgctggcacccccagcaggatatttagtgacccagtgctgtgttactcaactmaaccttattattttgtaatatctttatcactgcctgaagctagtgctccatcctccaagtccaactgcagcagtgggatcctgggacctgaagcaggcagaaatttccagggtattgctggctctctggggggcttttcctgggaaagaatagagccagttttgaaacacttatcgtcatagccctttccagcaagttacactgatatttgggaaaagtcagtaggttttgggttgcgggaattaaatcaggacttwagaaactctgaggtttctctatctgccctgattctgattgtaa

SEQ ID NO: 4863 - DNA, 600 bp, Chicken  19866894108118_7
cccagcaggatatttagtgacccagtgctgtgttactcaactmaaccttattattttgtaatatctttatcactgcctgaagctagtgctccatcctccaagtccaactgcagcagtgggatcctgggacctgaagcaggcagaaatttccagggtattgctggctctctggggggcttttcctgggaaagaatagagccagttttgaaacacttatcgtcatagccctttccagcaagttacactgatatttgggaaaagtcagtaggttttgggttgcgggaattaaatcaggacttwagaaactctgaggtttctctatctgccctgattctgattgtaaaagtgagccatcaataagcaaaaccccccctcttcatgctcttcctccttttgcatatgataggttttcttttctgcagcaaatgactctcatacagaagggttttcccctgtggtggtgatggactcttgatgtcaatgcacccattctcaagggcaaccatgggaattgccctggaagaagaaatgttctacttaagtaagagacccagaaacacgatttttatgcatcgagttcagctaacaagagaaagtcat

SEQ ID NO: 4864 - DNA, 600 bp, Chicken  19866894108121_1
tgcagcgtaagcacgaggcaggagctgacagccccacctgcactcacatcttgctgggcctgatgacagcatctggtgagtttccattcttcccccgtgctcacggtggggaacgtgccttaatttaaccccactgccccgttacacaaagcagacagctgggtgcctgactgtgctgctacaacaagtgttttcctgttggccaaagttcaaatcaatcaggaggtcaggcttgtttcaggctgattatcggcgcaatgggtgataagaggggatggctccggaagcccattccaggcrctggagcaaagccagcccrgctgcggaagggctgcagatagcactgatcctggatcctgtggctgctctcaagctgaggttggcaggagggaattcttggcagattctgtaggagaaaactgggccctggtggacagggttgtggataattgtcctgccaagggctgggccagagttgggtcctggtgtcttcaatttagtgaggtgttcagtcagatggttgggtggccctgtgagggaaacgtgattttctgagcagaaagmtctctcctgtgaagcacacgaggaggttgtgtttat

SEQ ID NO: 4865 - DNA, 600 bp, Chicken  19866894108121_2
aggagctgacagccccacctgcactcacatcttgctgggcctgatgacagcatctggtgagtttccattcttcccccgtgctcacggtggggaacgtgccttaatttaaccccactgccccgttacacaaagcagacagctgggtgcctgactgtgctgctacaacaagtgttttcctgttggccaaagttcaaatcaatcaggaggtcaggcttgtttcaggctgattatcggcgcaatgggtgataagaggggatggctccggaagcccattccaggcrctggagcaaagccagcccrgctgcggaagggctgcagatagcactgatcctggatcctgtggctgctctcaagctgaggttggcaggagggaattcttggcagattctgtaggagaaaactgggccctggtggacagggttgtggataattgtcctgccaagggctgggccagagttgggtcctggtgtcttcaatttagtgaggtgttcagtcagatggttgggtggccctgtgagggaaacgtgattttctgagcagaaagmtctctcctgtgaagcacacgaggaggttgtgtttatcactgtgtgctcgcagcac

SEQ ID NO: 4866 - DNA, 600 bp, Chicken  19866894108121_3
ataagaggggatggctccggaagcccattccaggcrctggagcaaagccagcccrgctgcggaagggctgcagatagcactgatcctggatcctgtggctgctctcaagctgaggttggcaggagggaattcttggcagattctgtaggagaaaactgggccctggtggacagggttgtggataattgtcctgccaagggctgggccagagttgggtcctggtgtcttcaatttagtgaggtgttcagtcagatggttgggtggccctgtgagggaaacgtgattttctgagcagaaagmtctctcctgtgaagcacacgaggaggttgtgtttatcactgtgtgctcgcagcacagcagtgcgctgcagcagcagggctgggcagcatctctgctgccagggaaagggtggctggggaaagatgtgcagaactgctggggaagtcagaactgcagcctcagggatcagtgctgcagtttgcacggctgccccttgagyrmtgcgatggctttgctttagaggagcaaacggaaaaataaattacgtttaaaaagggagagaggatgaggacttcttgcaataggcttctcctgtttgca

SEQ ID NO: 4867 - DNA, 600 bp, Chicken  19866894108121_4
gctgggccagagttgggtcctggtgtcttcaatttagtgaggtgttcagtcagatggttgggtggccctgtgagggaaacgtgattttctgagcagaaagmtctctcctgtgaagcacacgaggaggttgtgtttatcactgtgtgctcgcagcacagcagtgcgctgcagcagcagggctgggcagcatctctgctgccagggaaagggtggctggggaaagatgtgcagaactgctggggaagtcagaactgcagcctcagggatcagtgctgcagtttgcacggctgccccttgagyrmtgcgatggctttgctttagaggagcaaacggaaaaataaattacgtttaaaaagggagagaggatgaggacttcttgcaataggcttctcctgtttgcattaaggtgggggacatttgccagggagttaaaaagcccattacacccatggcgcattgccacgctttcacaagcttgcaagggatggattttttacatttacttattttgtcaaagagagcattctccaggggccagctacaggaaaacctctccagccttcttggcagaagtccccctcacttacacagccagggctt

SEQ ID NO: 4868 - DNA, 600 bp, Chicken  19866894108121_5
ctgggccagagttgggtcctggtgtcttcaatttagtgaggtgttcagtcagatggttgggtggccctgtgagggaaacgtgattttctgagcagaaagmtctctcctgtgaagcacacgaggaggttgtgtttatcactgtgtgctcgcagcacagcagtgcgctgcagcagcagggctgggcagcatctctgctgccagggaaagggtggctggggaaagatgtgcagaactgctggggaagtcagaactgcagcctcagggatcagtgctgcagtttgcacggctgccccttgagyrmtgcgatggctttgctttagaggagcaaacggaaaaataaattacgtttaaaaagggagagaggatgaggacttcttgcaataggcttctcctgtttgcattaaggtgggggacatttgccagggagttaaaaagcccattacacccatggcgcattgccacgctttcacaagcttgcaagggatggattttttacatttacttattttgtcaaagagagcattctccaggggccagctacaggaaaacctctccagccttcttggcagaagtccccctcacttacacagccagggcttc

SEQ ID NO: 4869 - DNA, 600 bp, Chicken  19866894108121_6
tgggccagagttgggtcctggtgtcttcaatttagtgaggtgttcagtcagatggttgggtggccctgtgagggaaacgtgattttctgagcagaaagmtctctcctgtgaagcacacgaggaggttgtgtttatcactgtgtgctcgcagcacagcagtgcgctgcagcagcagggctgggcagcatctctgctgccagggaaagggtggctggggaaagatgtgcagaactgctggggaagtcagaactgcagcctcagggatcagtgctgcagtttgcacggctgccccttgagyrmtgcgatggctttgctttagaggagcaaacggaaaaataaattacgtttaaaaagggagagaggatgaggacttcttgcaataggcttctcctgtttgcattaaggtgggggacatttgccagggagttaaaaagcccattacacccatggcgcattgccacgctttcacaagcttgcaagggatggattttttacatttacttattttgtcaaagagagcattctccaggggccagctacaggaaaacctctccagccttcttggcagaagtccccctcacttacacagccagggcttcc

SEQ ID NO: 4870 - DNA, 600 bp, Chicken  19866894108134_1
tttccggaaggcgagctagtacatcacaccatcacccctcatcagagacctgcagtcaaattaggctttttacttaaaattaaattagtccttttaattgtcagcaaagaaacttacactgacataacatagttctgtctggatttcagaatgtcctctcactgcccaggaaagtggtggatgccccatttctgcaaacactccaggtcagactggacggagctctgagcaacctgatctagctgtaggtgtccctgttcattgcagggagttggactagatggcgtttaaaggttcaastcaaacagttctattattctataacatgctgggctgcccaggccaatgtgaacatatctttgaagttttctgaatgcttcagtggctgtctggtaagtactagcacagggaagagccgacaaagcatcgaagaggcctgcattggactaccgtgaattatagtattgacagcacagaccatctgtgataatagaaatcctcaggaaaatagaaaatctgcattttagtagagaataagggataygtagtttaaaagaaattatactgctgcagttagtgtgacaatttgtgacctttaga

SEQ ID NO: 4871 - DNA, 600 bp, Chicken  19866894108134_2
gtaggtgtccctgttcattgcagggagttggactagatggcgtttaaaggttcaastcaaacagttctattattctataacatgctgggctgcccaggccaatgtgaacatatctttgaagttttctgaatgcttcagtggctgtctggtaagtactagcacagggaagagccgacaaagcatcgaagaggcctgcattggactaccgtgaattatagtattgacagcacagaccatctgtgataatagaaatcctcaggaaaatagaaaatctgcattttagtagagaataagggataygtagtttaaaagaaattatactgctgcagttagtgtgacaatttgtgacctttagaaggacaacaatgacccacagtcctcctcgttgccttttcttgttcaaaaaatttacttttccagcacaggaattgtgttcaacattttcacttaattccagccatgtgcttaaacaatagatggcaagacctctgtggaaaacacacttgtaaacttacagaactggggatttatgaagacccttatttcttgtaccactatcagattcaagacacagttgtgaggccagtttttcacataact

SEQ ID NO: 4872 - DNA, 492 bp, Chicken  19866894108134_3
tacgccatttccaaataaaggacatttcatttccaaacagaggacaatgagaaggtattcagaggattattgtttttcttcataatgttctatctacagctttcaagaccaacattataatggttccataccgtgaagctgttgttgacattttttgtgctcgattcagctacactggcatcagacaggtcaacttcatcaaatattagagactgtgaatggaaaaaaacacaaaaacattaaatatagcctgggtccaatgtgaagcatgtttacattctctgctttcgtttcctcctrtccactctaactggaagataaaartaaaataaaaacaaaaaagtaaaagcagaaaacactagtgaggagatagacagaacttccttcttcaccaccaaatacatttctatttgatagctaagagaatgcaaaacagtggctcccaaaaaacatattgcacttaggtttgaggcaactccagatatcagtgca

SEQ ID NO: 4873 - DNA, 468 bp, Chicken  19866894108134_4
tttcatttccaaacagaggacaatgagaaggtattcagaggattattgtttttcttcataatgttctatctacagctttcaagaccaacattataatggttccataccgtgaagctgttgttgacattttttgtgctcgattcagctacactggcatcagacaggtcaacttcatcaaatattagagactgtgaatggaaaaaaacacaaaaacattaaatatagcctgggtccaatgtgaagcatgtttacattctctgctttcgtttcctcctrtccactctaactggaagataaaartaaaataaaaacaaaaaagtaaaagcagaaaacactagtgaggagatagacagaacttccttcttcaccaccaaatacatttctatttgatagctaagagaatgcaaaacagtggctcccaaaaaacatattgcacttaggtttgaggcaactccagatatcagtgca

SEQ ID NO: 4874 - DNA, 552 bp, Chicken  19866894108141_1
aggcaggactggtgcttttcagcagcagtgcaaatgtataacctaattatgcaaccattaaaaaaaaaaaaaagcttgatggtgaaaatgcacctcagggaaggaaccactagaattttcttgtgttaagaaaatcatcagtgttggttacttgtagtctgggtatatggtaaaagatactctcagttaacagtggattgtaggtgaaggaaatcttttgcagttagtcatttctgaaaagagcagagtgcatctgggtatgcaaatgcagtgcgttggtacaggcatgaagcagaactygttcgactgacttacctcagtacatgaaattggtgtcccagcttctgataagacagttcaagtaacttgtatcacgaacactgtaaycagaacgtttgatttgatactgcttcatacattttggccaactgcatgtttaaatcaatgtttttatgtcagtattgatttggtgggctatgagtttcagtttactattgggagatgctgttctaaagcaaatgatttgggaaaagtttaatgattgttataaat

SEQ ID NO: 4875 - DNA, 465 bp, Chicken  19866894108141_2
atgcacctcagggaaggaaccactagaattttcttgtgttaagaaaatcatcagtgttggttacttgtagtctgggtatatggtaaaagatactctcagttaacagtggattgtaggtgaaggaaatcttttgcagttagtcatttctgaaaagagcagagtgcatctgggtatgcaaatgcagtgcgttggtacaggcatgaagcagaactygttcgactgacttacctcagtacatgaaattggtgtcccagcttctgataagacagttcaagtaacttgtatcacgaacactgtaaycagaacgtttgatttgatactgcttcatacattttggccaactgcatgtttaaatcaatgtttttatgtcagtattgatttggtgggctatgagtttcagtttactattgggagatgctgttctaaagcaaatgatttgggaaaagtttaatgattgttataaat

SEQ ID NO: 4876 - DNA, 600 bp, Chicken  19866894108144_1
tttattgcctgaaaaagaaatacttacacttcgtaattaaaaactaagcaggacacaaagaagacaaaaataaattgtagtatgtacacacattagaaaggataaatagcgtatatattgtaatactgcattacatgtatgcatatgtgaattccagacccctcccccccccaaaatgttgtgtacataattcaaaggataaataagtgctaatatatgacagagaattccttagtgtaaacaacgccacaggctttttaataggttttgggccaacttacaaaaagcatgtattgcctytcacactccataccacttaatttgaatagcagtcttcacatatacaattcyaagatagtataaaaatttatggatctagtaagcattcttcacactcaacaaaaacaggctgcagatgctctaaggattttctattaactttcacaagaccacagactgaagacacgctgattcatatgtgagtccttcctataagcagtgcaaaggttctcacacgtaaaatgtcatattagcaatcactgctccaacctgccagaaaggacttctgtgccccatttcaattctgagtttggatccaca

SEQ ID NO: 4877 - DNA, 600 bp, Chicken  19866894108144_2
gacacaaagaagacaaaaataaattgtagtatgtacacacattagaaaggataaatagcgtatatattgtaatactgcattacatgtatgcatatgtgaattccagacccctcccccccccaaaatgttgtgtacataattcaaaggataaataagtgctaatatatgacagagaattccttagtgtaaacaacgccacaggctttttaataggttttgggccaacttacaaaaagcatgtattgcctytcacactccataccacttaatttgaatagcagtcttcacatatacaattcyaagatagtataaaaatttatggatctagtaagcattcttcacactcaacaaaaacaggctgcagatgctctaaggattttctattaactttcacaagaccacagactgaagacacgctgattcatatgtgagtccttcctataagcagtgcaaaggttctcacacgtaaaatgtcatattagcaatcactgctccaacctgccagaaaggacttctgtgccccatttcaattctgagtttggatccacactaacacgatgtcaaagctgtcactattgcctgccataggtgaggacgata

SEQ ID NO: 4878 - DNA, 548 bp, Chicken  19866894108149_1
acagttgtttggggttcacaattacagacacagtggtccaccatgaagagtaaaaagggctctgttgcccgaaagaatcatacagcaattgtaacatattcacgtaatggtccaactggctgccaagaaggtgaaaacaggatatactcacccaaaataagtgtctgggaacattctgtgaaggtctaagtgcccaccgaggttaaagaggtgacctggttgcccaagccaaatggtcagagctgttttggccatggaatgtccccataacggtccaaacagacatcgcagagaaatcaragggatctgatagctaaaaaaaaaaaaatatatcaacatctgatatatcctgggcaaccgatgcatcccaataacggccacaagaggcctccacgttcaagggcactcagtttccacatgtaaatgtttgttatttcggacgcacatggcacgtcctcttaattacgtgctcacagaggtggccgaagtgggacgaagtgacccaaaataagcacccagcagcactccaggccacttgtcaccaagaa

SEQ ID NO: 4879 - DNA, 600 bp, Chicken  19866894108151_1
taaatatacactccagatacatacagatggatacatacatacatagaatacagagagagcgttaaatggagcagatataaacaaatgatataaaaagatataaaccgatgctacactattataagccagttatttatgtagatttattttaaaatatgtctgattgcattcatagcactgatgaagagaacagtaacgcactaaacatcattaaacacttagactaaaactcccccttgatcatctcacaggcactttgtttctgttttaccacccaggaaaataataaccacgtgaccygatggtcagaaaattcttactctggtaygagaayaagttaaataatttccaaaagcaggggtctctcccaggcaccgtcctactttcagctctcccacctcagactggcactaatttaaattagcgagtggtagcttcagcacttcagttgatatcaattaccattacatcatgtaaagcactccctgaagaaatcaggaaccaagctgcttatggaaatagcacaaaaaccacaccaggaatgaaacagaagccagtataaagcagagatgtaaccaacccctctgcaagtaagggggg

SEQ ID NO: 4880 - DNA, 582 bp, Chicken  19866894108151_2
ggatacatacatacatagaatacagagagagcgttaaatggagcagatataaacaaatgatataaaaagatataaaccgatgctacactattataagccagttatttatgtagatttattttaaaatatgtctgattgcattcatagcactgatgaagagaacagtaacgcactaaacatcattaaacacttagactaaaactcccccttgatcatctcacaggcactttgtttctgttttaccacccaggaaaataataaccacgtgaccygatggtcagaaaattcttactctggtaygagaayaagttaaataatttccaaaagcaggggtctctcccaggcaccgtcctactttcagctctcccacctcagactggcactaatttaaattagcgagtggtagcttcagcacttcagttgatatcaattaccattacatcatgtaaagcactccctgaagaaatcaggaaccaagctgcttatggaaatagcacaaaaaccacaccaggaatgaaacagaagccagtataaagcagagatgtaaccaacccctctgcaagtaaggggggaggggggggg

SEQ ID NO: 4881 - DNA, 576 bp, Chicken  19866894108151_3
atacatacatagaatacagagagagcgttaaatggagcagatataaacaaatgatataaaaagatataaaccgatgctacactattataagccagttatttatgtagatttattttaaaatatgtctgattgcattcatagcactgatgaagagaacagtaacgcactaaacatcattaaacacttagactaaaactcccccttgatcatctcacaggcactttgtttctgttttaccacccaggaaaataataaccacgtgaccygatggtcagaaaattcttactctggtaygagaayaagttaaataatttccaaaagcaggggtctctcccaggcaccgtcctactttcagctctcccacctcagactggcactaatttaaattagcgagtggtagcttcagcacttcagttgatatcaattaccattacatcatgtaaagcactccctgaagaaatcaggaaccaagctgcttatggaaatagcacaaaaaccacaccaggaatgaaacagaagccagtataaagcagagatgtaaccaacccctctgcaagtaaggggggaggggggggg

SEQ ID NO: 4882 - DNA, 600 bp, Chicken  19866894108155_1
ctattaggagtttatattacattttagatgaagaaatctttgagctccaaactactgtttattcgtttatttctacagtccctgcaaaagcagcactgtgaagttggagcctgcagaacctactctaactcaaataaaacttgcaattcagctcagagtcgccacctgctgattttatcttttattatatgtttgcttttttttgtaagttatccttgagttaccttaggtaaaaggagatgaatggcttctaagctcgttatagggcaagctgtgtcaatcttcttatcatagccactyagttcaaatactgtctaatagaaataagctgtatgctcacatttttttcagcaacatctgcagtagcatcctatcaaatgattttgctcttgtcaatcttctgtgcctttggtcatctggctgctgttttgtaactgtcaagagaagtcccatacaactcacragtgtatgctatgagttcattactaacaactccctgcataacctgactggaggaagagagaaggaggagatgcatagcttttgtggattgtcctagttccatcagagatgaayggatgaacatgtaagctaagagtt

SEQ ID NO: 4883 - DNA, 600 bp, Chicken  19866894108155_2
acctgctgattttatcttttattatatgtttgcttttttttgtaagttatccttgagttaccttaggtaaaaggagatgaatggcttctaagctcgttatagggcaagctgtgtcaatcttcttatcatagccactyagttcaaatactgtctaatagaaataagctgtatgctcacatttttttcagcaacatctgcagtagcatcctatcaaatgattttgctcttgtcaatcttctgtgcctttggtcatctggctgctgttttgtaactgtcaagagaagtcccatacaactcacragtgtatgctatgagttcattactaacaactccctgcataacctgactggaggaagagagaaggaggagatgcatagcttttgtggattgtcctagttccatcagagatgaayggatgaacatgtaagctaagagtttggcccaggaagtttaaagaagcrtgtttaaatttgcctctctgaaacatcctcaagttcttggcaggttgaagatatccaagaaggtatggtcctttcaggttcctcagcatgactgcaaacagggatgggctttcaagaaggttttcactcctgttcttta

SEQ ID NO: 4884 - DNA, 600 bp, Chicken  19866894108155_3
tcaatcttcttatcatagccactyagttcaaatactgtctaatagaaataagctgtatgctcacatttttttcagcaacatctgcagtagcatcctatcaaatgattttgctcttgtcaatcttctgtgcctttggtcatctggctgctgttttgtaactgtcaagagaagtcccatacaactcacragtgtatgctatgagttcattactaacaactccctgcataacctgactggaggaagagagaaggaggagatgcatagcttttgtggattgtcctagttccatcagagatgaayggatgaacatgtaagctaagagtttggcccaggaagtttaaagaagcrtgtttaaatttgcctctctgaaacatcctcaagttcttggcaggttgaagatatccaagaaggtatggtcctttcaggttcctcagcatgactgcaaacagggatgggctttcaagaaggttttcactcctgttctttactcataaattatcctgcaaaaatattacggtccccttgagatacctgtaatttgatgacacactatcagcaagacagaaatgaaagatcggagaagaatattggccagcacat

SEQ ID NO: 4885 - DNA, 600 bp, Chicken  19866894108155_4
taagctgtatgctcacatttttttcagcaacatctgcagtagcatcctatcaaatgattttgctcttgtcaatcttctgtgcctttggtcatctggctgctgttttgtaactgtcaagagaagtcccatacaactcacragtgtatgctatgagttcattactaacaactccctgcataacctgactggaggaagagagaaggaggagatgcatagcttttgtggattgtcctagttccatcagagatgaayggatgaacatgtaagctaagagtttggcccaggaagtttaaagaagcrtgtttaaatttgcctctctgaaacatcctcaagttcttggcaggttgaagatatccaagaaggtatggtcctttcaggttcctcagcatgactgcaaacagggatgggctttcaagaaggttttcactcctgttctttactcataaattatcctgcaaaaatattacggtccccttgagatacctgtaatttgatgacacactatcagcaagacagaaatgaaagatcggagaagaatattggccagcacatacaaatgtccatgaaacatttcagttagctttgcttgagagacactgt

SEQ ID NO: 4886 - DNA, 600 bp, Chicken  19866894108160_1
aaggagaagaaccgctacgtgaacattttgccctgtaggtatcggtggggctgggggctgagggagggcaccgccagggtgggctcacccagaggggctgctgcatctgcattagccttagatgcacagtagggactccctggagctgtgagcagccaggaggatgtggaaaatgaagcagatgggaaatgcagaacttccccatgtaaggaaggtccatcatctccctggctatgagcatggaaggatttcagggcataaagttacttatgtatgctgggaaccccctaagcctgggcwgcactccaaaaagtcagctcaactctgtggggctttggttttaatgcagaattgtcatctttctccagatgatcattccagggttcacctgactcctgttgaaggggttcctgactctgactacattaacgcctccttcattaatgtaagtgcctgtcctgcctgagtgaccgccttccctaaaagcaaggcttggctgtgtgtgtggcctttatggggtgcaactttagtctggaagaagccaaaagaacacagcccagcaactggagtacaaggcagagggctgggactaataaattc

SEQ ID NO: 4887 - DNA, 600 bp, Chicken  19866894108162_1
ataaaagcacacagtgtacaaaagagcatttcatttccaacagaatccaaacgtggattagcaaatagaacatgtcctttcttctatcctgtttttcaggctgttaatgatgcttaggctgttttcttccctgtgctcctgatttttgctcactgctgaacagaaccctgctcccctacctttgtagccctttactgtgcatcctcaaagcaccagagacaggcaacaccagattttggtatagtcacaacacactgatgcatattctgctactgttagtttaggatggaactgtataarcttgttgatttaaagcaaggcaagccatgcttcccttaaaagaagaaaagcccataacaagacacgttattgtcctttattagaaatacaagtctttaaaagtcctaaagctttcagtcaaagaggttggcaggggtaagaaataaggggagatgttttaatgggaggtgttgtcagcattgcccattttacaaaatagatgtgacaaaagacagtgttctccccaccccttactgcatttccagtacacttggaagaggaatgacttttctaagtcccagactgacatggcgccatata

SEQ ID NO: 4888 - DNA, 599 bp, Chicken  19866894108165_1
  misc_feature (1)..(68): n is any nucleotide
nnnnnnnnnnnnnnnnnnnnnnnnnnnnnnnnnnnnnnnnnnnnnnnnnnnnnnnnnnnnnnnnnnnntacctcattcatagctgtgcagctcacagtctcagtgagtccaggttttctcttcatcactgtgtgcactttgcttttgttgacatactctgtgtctatcaatacaggaccaaatgggtagagcaaaactgctggtggtgaggactgtttggcaattgcgctgttcacatttcaggatggggtcagctacctgtctgccaccggcccacatagaccaaacatctggcacatwagaggcactcctgggggtacccttcagtttggcatcatccaaaaggaatccagtcygcactctgatgtgaaccaaagagtggcatgagagtgtaattggaggatttgctctgcaagtgcactcctgatctatccaaaaagccttccaaaaagcacttcctaccaacatccattacaacaatgaaccatgttagcagtagtaagaaaagaggtcatttgttgagcctgtctatttgaatctcagtacattgcttacagaaagccaggagtagaccacatgtcacacttggatccttcaca

SEQ ID NO: 4889 - DNA, 599 bp, Chicken  19866894108165_2
  misc_feature (1)..(12): n is any nucleotide
nnnnnnnnnnnntacctcattcatagctgtgcagctcacagtctcagtgagtccaggttttctcttcatcactgtgtgcactttgcttttgttgacatactctgtgtctatcaatacaggaccaaatgggtagagcaaaactgctggtggtgaggactgtttggcaattgcgctgttcacatttcaggatggggtcagctacctgtctgccaccggcccacatagaccaaacatctggcacatwagaggcactcctgggggtacccttcagtttggcatcatccaaaaggaatccagtcygcactctgatgtgaaccaaagagtggcatgagagtgtaattggaggatttgctctgcaagtgcactcctgatctatccaaaaagccttccaaaaagcacttcctaccaacatccattacaacaatgaaccatgttagcagtagtaagaaaagaggtcatttgttgagcctgtctatttgaatctcagtacattgcttacagaaagccaggagtagaccacatgtcacacttggatccttcacagatctgaaaatgcttttctttgtgtgataagttttaaggaaatctatctggttgat

SEQ ID NO: 4890 - DNA, 600 bp, Chicken  19866894108166_1
cagaccacggctaaaataagatagatatacacacacagcactgtacttgcagcctaactgaggatcatacaaaggcaacttattccttattcagggtctagatgcaatcgtacaactttaatcccaaaggacagaacaacagcaggccgcagttttacatttgcccgactgaactacaatcgttgtcacaagagccaatttcacgttggctgtttcttgctcttgttgcaattcatcacgagaagacatgagatctaagataccttgcccaggctcagcccatgaataatacagcacatygcttcaaccttttcagtttgctttgtagtgcgattggccaaccattgctgtcctcccctgttaaccaccccattaacctgagaggaaaaggtggaacggacggacaattagccagcagaatactgaaaaggttaacgctgaggcacagggccctggctttcttcagctttaatggtattaagattctttctcttcctttttcaaagtctgcagtgaagaaaaaaaaataagaaactgcacaagatgaacctttgttctcatttcagattataatcatgtagttcttttcagatgtcacac

SEQ ID NO: 4891 - DNA, 600 bp, Chicken  19866894108167_1
gagtttatggttgccttaggatgtctgcaggaaaactacctggcagatgcttggctagtttgcatctcagccagaatttttaaaaaattgtgagtggtaataaataattccactgctgcataggaaagttacattttgttgatttgttttggtgagaggagttcctgtttgctaagggtaagagttttgttcctcacacttcgggcaacatataaatgtcactgcagtcagagcagctgtcctgacttttgcactaagtcaccctctggttctctgaatggggagagcaccaggaacacygaagagtcagataggtgcagattcagtctcagcccatgagtagactcactcctttctcagctaccacgtaaataacaatgccaagatgcactcagaatattccagttgtgcccttagtgaattatttactgggtagtgtatgaaaaagcactggaaagctggctacagcttgtgttactgcttggcaaacttcttaatctgtatttccatttcaatacatatcaaccgattacatttttatggaatttcaagtgcactccaagtgaagccctagatgatgggtgtgtttggaggtctctg

SEQ ID NO: 4892 - DNA, 600 bp, Chicken  19866894108168_1
ttcttccaggaaggtgaccacataacagcagtggcactgcagaaaccatgggtttggcagacaggcaatagaaatagctgaacaggttatcccacccttatcgacgcctggcaaagccataaggaaatacaacgatcgttactggaccaactgacacatcgtttttctcctccttccacataagccctgaaacagagccctccttcacaagcggaccaaagcagaggcatccaagcagagagactgaaaacaactactgcacatctatgtttattgctgcttttgagagaacacagaggwrttcctggtgggataggaagagttgctgtggggcagaacacrgagcgcgtggccwcccaggaaaacacccttttaattactgcctgtggaacactcagaggctgcccaggtctgcagagagagggggcagcacacctccagcacaacagcagcagctccgcgtctgcgattttcaacacccagctgcattctgaatctgagaactaacatttcttttcggaatatttgtgggttcccttaaagatcaaagtcccagaagacaaagaagtggcggctgcgtaaaaacaaacaaacaaaagc

SEQ ID NO: 4893 - DNA, 600 bp, Chicken  19866894108168_2
tcttccaggaaggtgaccacataacagcagtggcactgcagaaaccatgggtttggcagacaggcaatagaaatagctgaacaggttatcccacccttatcgacgcctggcaaagccataaggaaatacaacgatcgttactggaccaactgacacatcgtttttctcctccttccacataagccctgaaacagagccctccttcacaagcggaccaaagcagaggcatccaagcagagagactgaaaacaactactgcacatctatgtttattgctgcttttgagagaacacagaggwrttcctggtgggataggaagagttgctgtggggcagaacacrgagcgcgtggccwcccaggaaaacacccttttaattactgcctgtggaacactcagaggctgcccaggtctgcagagagagggggcagcacacctccagcacaacagcagcagctccgcgtctgcgattttcaacacccagctgcattctgaatctgagaactaacatttcttttcggaatatttgtgggttcccttaaagatcaaagtcccagaagacaaagaagtggcggctgcgtaaaaacaaacaaacaaaagca

SEQ ID NO: 4894 - DNA, 600 bp, Chicken  19866894108168_3
aaaccatgggtttggcagacaggcaatagaaatagctgaacaggttatcccacccttatcgacgcctggcaaagccataaggaaatacaacgatcgttactggaccaactgacacatcgtttttctcctccttccacataagccctgaaacagagccctccttcacaagcggaccaaagcagaggcatccaagcagagagactgaaaacaactactgcacatctatgtttattgctgcttttgagagaacacagaggwrttcctggtgggataggaagagttgctgtggggcagaacacrgagcgcgtggccwcccaggaaaacacccttttaattactgcctgtggaacactcagaggctgcccaggtctgcagagagagggggcagcacacctccagcacaacagcagcagctccgcgtctgcgattttcaacacccagctgcattctgaatctgagaactaacatttcttttcggaatatttgtgggttcccttaaagatcaaagtcccagaagacaaagaagtggcggctgcgtaaaaacaaacaaacaaaagcactctgtggctcagttaactcggaggcttttctccatcacac

SEQ ID NO: 4895 - DNA, 600 bp, Chicken  19866894108168_4
ggcagacaggcaatagaaatagctgaacaggttatcccacccttatcgacgcctggcaaagccataaggaaatacaacgatcgttactggaccaactgacacatcgtttttctcctccttccacataagccctgaaacagagccctccttcacaagcggaccaaagcagaggcatccaagcagagagactgaaaacaactactgcacatctatgtttattgctgcttttgagagaacacagaggwrttcctggtgggataggaagagttgctgtggggcagaacacrgagcgcgtggccwcccaggaaaacacccttttaattactgcctgtggaacactcagaggctgcccaggtctgcagagagagggggcagcacacctccagcacaacagcagcagctccgcgtctgcgattttcaacacccagctgcattctgaatctgagaactaacatttcttttcggaatatttgtgggttcccttaaagatcaaagtcccagaagacaaagaagtggcggctgcgtaaaaacaaacaaacaaaagcactctgtggctcagttaactcggaggcttttctccatcacacgattcagatgcac

SEQ ID NO: 4896 - DNA, 600 bp, Chicken  19866894108168_5
cacatacaccaatagacaccagagttctcaaggatgaaaacactgcagttgtaaacacaaggacttcaaaaataatattttcttcctgttatctgggcgtccgccccctcccaataacttctgttttaacccgtgagtcgtgattaaaggacaacccgctaattgcttcagccaacaggcttaaatacccgttcttatcaccaaagaaatctcagcgcagagcggtgcccgtcagagccaaccgaaggacccgaacattctcctcatttacacaacaattcgatccgggtctgtgattcrtatctgcctgaaccggagcgcagacactgaatatcgggaacttcagacagccctcgtgtaggagccgtccctgtctgcaaagagagggttcagaatacgcttttttccattattaaactgaaatacgtattagtcagttttagaagcgtttcaccattttcagtctcaggaaatgccacggttcctaagagctgcagccacaaagcagaaccccgttgtgtcagcggctgcagcaaaagacaaacgctttacacaggcagtgccttctcccatgtataagtaaagtgggaaattagaagt

SEQ ID NO: 4897 - DNA, 600 bp, Chicken  19866894108169_1
gaagggatatctttagtaggtacctaagcacgtagcagctgggggatgagaacgttctccagcccctagattaataaatagtgtactcagatggccctgtgttaccaataaacttcagcattaccttctgtttccccattttgtcagggacaagttcttctgtcttcagctgctgttttcaggaagaataacagttctccatcccactgcagtatacatgcaaaggtatattctttggaagaagggcaaatcttaggcagtactgaacactgctgcaggtctctaaatgtgaagataaaygaaagtaatgttctaaagagaacaagagaagatttaccaattgtgtaagttagaaaaaagtgcctgaattcaaaatacagtgaaatttatacaatagtgagggaattataagatgattatcggaacttagcctttttagtaagcattagaaccatttaggaagggaggaagagaaattttgagaacaggagattaatatgcagttcwtgtcttctttgggaagatgtgaccacacataaattcagcagagccttttggaaacacggcatgctttctgtcacaggttttgggcaggcagga

SEQ ID NO: 4898 - DNA, 571 bp, Chicken  19866894108169_2
tgcagtatacatgcaaaggtatattctttggaagaagggcaaatcttaggcagtactgaacactgctgcaggtctctaaatgtgaagataaaygaaagtaatgttctaaagagaacaagagaagatttaccaattgtgtaagttagaaaaaagtgcctgaattcaaaatacagtgaaatttatacaatagtgagggaattataagatgattatcggaacttagcctttttagtaagcattagaaccatttaggaagggaggaagagaaattttgagaacaggagattaatatgcagttcwtgtcttctttgggaagatgtgaccacacataaattcagcagagccttttggaaacacggcatgctttctgtcacaggttttgggcaggcaggatggcatgagcagggatagagcatatcagggtgctgagagctccccttgtttatacttataaatgcagaaggccacgtggaagccattagttgggatgaagcaattatctatctccttttattcacacgctacctggtagcactctctccagctttctttactttggtatgcagactaa

SEQ ID NO: 4899 - DNA, 599 bp, Chicken  19866894108170_1
  misc_feature (1)..(85): n is any nucleotide
nnnnnnnnnnnnnnnnnnnnnnnnnnnnnnnnnnnnnnnnnnnnnnnnnnnnnnnnnnnnnnnnnnnnnnnnnnnnnnnnnnnnncagcttgcttgctcctatgtgtgtaaagctatgcaaagcctgccataataggaaaactctaaaggattttttctgagttacagcataagtgacattgaccttaatatcactgcatttaagcttcagtctttcaggcagaacagagaaagagaagagtttcttgaacagtaatgaagaattgaaaccctcagtgtagaagatgaatctgttgaagrgtacattaaacaaggagttttaacacaatctctttttatcccttctgcttcataacacgctgataagctgagacatgggtgaaatcaaactgaagggggstgtacccctctcctttgcacatagtaaatgtgtaaaatattctggctcttgaaggatgagaacaggtttaaaacagagaacatcccttaaaatgtggttatgctgcaaggackgggatggagctgcacgatcccagagttgcgctgagacctgaaaatggagaagaaaattgctgagtttttgttttgttttgttttgt

SEQ ID NO: 4900 - DNA, 600 bp, Chicken  19866894108170_2
tatgtgtgtaaagctatgcaaagcctgccataataggaaaactctaaaggattttttctgagttacagcataagtgacattgaccttaatatcactgcatttaagcttcagtctttcaggcagaacagagaaagagaagagtttcttgaacagtaatgaagaattgaaaccctcagtgtagaagatgaatctgttgaagrgtacattaaacaaggagttttaacacaatctctttttatcccttctgcttcataacacgctgataagctgagacatgggtgaaatcaaactgaagggggstgtacccctctcctttgcacatagtaaatgtgtaaaatattctggctcttgaaggatgagaacaggtttaaaacagagaacatcccttaaaatgtggttatgctgcaaggackgggatggagctgcacgatcccagagttgcgctgagacctgaaaatggagaagaaaattgctgagtttttgttttgttttgttttgttttgtttggggcagggacagcctatgtttaaacaagtgtmttaaaaaagtgataaaaagaatggattgatcaaaactaacataagtyggacccacagcggt

SEQ ID NO: 4901 - DNA, 600 bp, Chicken  19866894108170_3
tttcaggcagaacagagaaagagaagagtttcttgaacagtaatgaagaattgaaaccctcagtgtagaagatgaatctgttgaagrgtacattaaacaaggagttttaacacaatctctttttatcccttctgcttcataacacgctgataagctgagacatgggtgaaatcaaactgaagggggstgtacccctctcctttgcacatagtaaatgtgtaaaatattctggctcttgaaggatgagaacaggtttaaaacagagaacatcccttaaaatgtggttatgctgcaaggackgggatggagctgcacgatcccagagttgcgctgagacctgaaaatggagaagaaaattgctgagtttttgttttgttttgttttgttttgtttggggcagggacagcctatgtttaaacaagtgtmttaaaaaagtgataaaaagaatggattgatcaaaactaacataagtyggacccacagcggtatctctatgtctgaaaactcttgttgtttcacagggtgtggactccaaagtgggagtgcaagtctctgcagtaaataaaatttcaactaatgaccctactttaaatgtatttg

SEQ ID NO: 4902 - DNA, 600 bp, Chicken  19866894108170_4
cccttctgcttcataacacgctgataagctgagacatgggtgaaatcaaactgaagggggstgtacccctctcctttgcacatagtaaatgtgtaaaatattctggctcttgaaggatgagaacaggtttaaaacagagaacatcccttaaaatgtggttatgctgcaaggackgggatggagctgcacgatcccagagttgcgctgagacctgaaaatggagaagaaaattgctgagtttttgttttgttttgttttgttttgtttggggcagggacagcctatgtttaaacaagtgtmttaaaaaagtgataaaaagaatggattgatcaaaactaacataagtyggacccacagcggtatctctatgtctgaaaactcttgttgtttcacagggtgtggactccaaagtgggagtgcaagtctctgcagtaaataaaatttcaactaatgaccctactttaaatgtatttgcctttactgacagatcttaggttgtgaaaatgaaagaaaaagtcctccccttccttgcagagctatactacccacaagatgaaaacatgaaaatatgagttgtgttcttcatatgataatgcaggg

SEQ ID NO: 4903 - DNA, 600 bp, Chicken  19866894108170_5
ccttctgcttcataacacgctgataagctgagacatgggtgaaatcaaactgaagggggstgtacccctctcctttgcacatagtaaatgtgtaaaatattctggctcttgaaggatgagaacaggtttaaaacagagaacatcccttaaaatgtggttatgctgcaaggackgggatggagctgcacgatcccagagttgcgctgagacctgaaaatggagaagaaaattgctgagtttttgttttgttttgttttgttttgtttggggcagggacagcctatgtttaaacaagtgtmmtaaaaaagtgataaaaagaatggattgatcaaaactaacataagtyggacccacagcggtatctctatgtctgaaaactcttgttgtttcacagggtgtggactccaaagtgggagtgcaagtctctgcagtaaataaaatttcaactaatgaccctactttaaatgtatttgcctttactgacagatcttaggttgtgaaaatgaaagaaaaagtcctccccttccttgcagagctatactacccacaagatgaaaacatgaaaatatgagttgtgttcttcatatgataatgcagggg

SEQ ID NO: 4904 - DNA, 600 bp, Chicken  19866894108170_6
aaactgaagggggstgtacccctctcctttgcacatagtaaatgtgtaaaatattctggctcttgaaggatgagaacaggtttaaaacagagaacatcccttaaaatgtggttatgctgcaaggackgggatggagctgcacgatcccagagttgcgctgagacctgaaaatggagaagaaaattgctgagtttttgttttgttttgttttgttttgtttggggcagggacagcctatgtttaaacaagtgtmttaaaaaagtgataaaaagaatggattgatcaaaactaacataagtyggacccacagcggtatctctatgtctgaaaactcttgttgtttcacagggtgtggactccaaagtgggagtgcaagtctctgcagtaaataaaatttcaactaatgaccctactttaaatgtatttgcctttactgacagatcttaggttgtgaaaatgaaagaaaaagtcctccccttccttgcagagctatactacccacaagatgaaaacatgaaaatatgagttgtgttcttcatatgataatgcaggggaaaaaaaaaaaaagaaataatgaaatgaaaaaataatatcaactca

SEQ ID NO: 4905 - DNA, 588 bp, Chicken  19866894108171_1
tcctcatggaaagatctttcatgtatattaagtgaccatgcatgcaggttcaaaaacattactaacaactgataaagtttacacctgtgcaatctgtgcgtgaggagccgatgtctgttagcacatcagtagtatatcggaacaaaacaacagggtcacttacacttattggacagccagtttgctgtgtttgccttgttactaaagttcccacctttttttcttctggtgatgccaaatgatccatcacagaattttggtgagatgcagtaggcaccagtcaagggtgtctacttaaayaaaaaagatgtttcctgaagtaacttcttgccatttttagaacctcagagagctgtggaaattaatattaacaagcaaaaggagatatacttttgcagtacaccttttctcagtaaattagtgaagcactgaacaatgctgttttcttgccaaagaaacacaaggcacaaaagctaaaaggcctcatttagtatggaggaacaacacctatgaaatgcattgtggaacatgatgttctatacatgaaagctccattctctctttctcaagttggtaatttattaagat

SEQ ID NO: 4906 - DNA, 600 bp, Chicken  19866894108172_1
tggccacgtttccattctcatggctgaatgggtgcaccaacgtagaagaataccttgtatagatgagaaaattgaaacctgcatatagcagtcttataagaggtctgtagagttaatcaggacacagctacaaccttacccccaaatacaaaccttgatcaagagagagagatactatttcatgtgtaatgtcagtttccattcagactttatctgcttaaaattctttttcttcctgtcacttgaaccatgttgtggttgtatggaatcttctaagaattttactgattcatatgttgkttttttttgccttccttctgaggcaatgcagaactttgctgtccactccctgcacgcacagtggtatcgtcctcttgcatagcccttcttttgtcttccttcttgttttcaagtaatcttctctgtgttccataagtctgctgtgtcatcaaaccctcattatttgaattatccttaaaatacccttttgcaaaatttcaatcatgctttgtgaagtatgaatccactttgaaatatatcttcctgacgcagcaaaggaattcatccttcatctaatatgaatctgaaggaactagattt

SEQ ID NO: 4907 - DNA, 600 bp, Chicken  19866894108173_1
aggatgatcatctgaattgttcaagcattaactcatcgatcctcaactgtacaatgaggtaattattaatacctcacctttgcattcaggatcaggaggcacagacaactgaagtaattactgcgtcttctactgcatggttcattataacaccagggatggttctcctacttgttttggcctttgttttcaataggaaatatacctgctcagttagcaacatactactgagaatgattaaaattaaagtgcctgtgcctctggatacaatcacagagctcaccaagcgtccccaggaamatacagcattggagcacatagcccttcttcaaaacatcagaaacgccatgccagggttagcaatatctccactaaccacawgacttcyctggactttagatgtactaatgtatggagttatcttggtgtacattcaaggtatttactgaaaattacatgctgttactcttctcaccttcacattacccaacataaagaaatgtattgctttcagagcacaaatacccggacttcagacctggttttgttatttctggaagaaagctgcccttattttcttgcctgaattcgtccaaaagg

SEQ ID NO: 4908 - DNA, 600 bp, Chicken  19866894108173_2
gcattcaggatcaggaggcacagacaactgaagtaattactgcgtcttctactgcatggttcattataacaccagggatggttctcctacttgttttggcctttgttttcaataggaaatatacctgctcagttagcaacatactactgagaatgattaaaattaaagtgcctgtgcctctggatacaatcacagagctcaccaagcgtccccaggaamatacagcattggagcacatagcccttcttcaaaacatcagaaacgccatgccagggttagcaatatctccactaaccacawgacttcyctggactttagatgtactaatgtatggagttatcttggtgtacattcaaggtatttactgaaaattacatgctgttactcttctcaccttcacattacccaacataaagaaatgtattgctttcagagcacaaatacccggacttcagacctggttttgttatttctggaagaaagctgcccttattttcttgcctgaattcgtccaaaaggtcttgcaaggcaagacttttttgctacggtaaagcgtgtgtcatcaattttgggcctcttaacatagctcaacattgtaag

SEQ ID NO: 4909 - DNA, 600 bp, Chicken  19866894108173_3
ggatcaggaggcacagacaactgaagtaattactgcgtcttctactgcatggttcattataacaccagggatggttctcctacttgttttggcctttgttttcaataggaaatatacctgctcagttagcaacatactactgagaatgattaaaattaaagtgcctgtgcctctggatacaatcacagagctcaccaagcgtccccaggaamatacagcattggagcacatagcccttcttcaaaacatcagaaacgccatgccagggttagcaatatctccactaaccacawgacttcyctggactttagatgtactaatgtatggagttatcttggtgtacattcaaggtatttactgaaaattacatgctgttactcttctcaccttcacattacccaacataaagaaatgtattgctttcagagcacaaatacccggacttcagacctggttttgttatttctggaagaaagctgcccttattttcttgcctgaattcgtccaaaaggtcttgcaaggcaagacttttttgctacggtaaagcgtgtgtcatcaattttgggcctcttaacatagctcaacattgtaagggttttg

SEQ ID NO: 4910 - DNA, 600 bp, Chicken  19866894108173_4
ctcaccttcacattacccaacataaagaaatgtattgctttcagagcacaaatacccggacttcagacctggttttgttatttctggaagaaagctgcccttattttcttgcctgaattcgtccaaaaggtcttgcaaggcaagacttttttgctacggtaaagcgtgtgtcatcaattttgggcctcttaacatagctcaacattgtaagggttttgaaagaaaagctaagctgcatgttttttcaggagttaatttaaaatgatacggctcttgaaaagatgggatttctttgtggtrgtcagccatatgtgctggctttagagacatgcgttcacttccacttattttctagtcctactgaatggtttcacatgcgggctatcagtcaggaagctggattttgttatggctcataactcataaacagaactgataatcaagtttagtttgatcagttttatgagagccagaaaaggagtagctggctttcaaacttcagacatcatgaactgtttaagtgtttattagtttttctttaaggaaagtgcagtgcctacactcacatgtactgaacttatactcccacctgaagtagtt

SEQ ID NO: 4911 - DNA, 600 bp, Chicken  19866894108184_1
atgtctgattttctttctggcttagaaaataacacccactttgtttacacagtctgagtctagattgatgaaatgacttatacagaaaatatcgcaggggagaataatgccaaaaaccatcatattttatctccctgacttacgagggtagtacagacacactccccctgcatggtaggataaaagagcagttggggtgaaaggcgtgtctattgcagtgggagaaatcactcagtttctgatctagtggttatgttgaaagtgcttcttaagcaaggtcaacactacagttacaattgraattgatgctttcttacctgacatgctggagagaaacctggggatttttgcaagctgtatttttctgaattgttgcatttctgatcatacttactcaggttacctcctttattgattacatcatctccagcttcaaacatgagctttctctactggactatgtttgtctgatgttaaggttctcagactttcagttcagttttgagtagtgtgttttcctttgcttgtttgttggtctttttttttttcttcagagtttggctaacaaatgatactaaccctccatacagaatttcatct

SEQ ID NO: 4912 - DNA, 600 bp, Chicken  19866894108186_1
aggtgctaataaatcaaaaaacaaacatttggaaggtcacagaagtacattttacaatcatgtttgctaaaatatatgaggcattaaaattctgattctacattcttatgacaatggctgtaatgagaacagaaaatactataagcctaatctattctcctgacaatttaaatataactgtaacccagttgttatcttgtactccaattccataaatagggaaggtcataatgatagtgaaaataaattacagaatttaaacccctgacattttcctaaactggagaactagggagagtrtgwgaatgatattgcatgactttctttgctagaaggaatttagagtaagagttaacttctccacttttattaatcagattttattaataatagttctgtgattttattctgcattctcttgcccactcagattatattaccaaagcacatcgttcattaagcttttttaaaattaacacataataataatcataactttcctgtgataattcttgttacaatctacaatcagaacactgagagttgtcaacatcttctgtacatcatttttttaacatttctcttttaataatggacaca

SEQ ID NO: 4913 - DNA, 600 bp, Chicken  19866894108186_2
tgctaataaatcaaaaaacaaacatttggaaggtcacagaagtacattttacaatcatgtttgctaaaatatatgaggcattaaaattctgattctacattcttatgacaatggctgtaatgagaacagaaaatactataagcctaatctattctcctgacaatttaaatataactgtaacccagttgttatcttgtactccaattccataaatagggaaggtcataatgatagtgaaaataaattacagaatttaaacccctgacattttcctaaactggagaactagggagagtrtgwgaatgatattgcatgactttctttgctagaaggaatttagagtaagagttaacttctccacttttattaatcagattttattaataatagttctgtgattttattctgcattctcttgcccactcagattatattaccaaagcacatcgttcattaagcttttttaaaattaacacataataataatcataactttcctgtgataattcttgttacaatctacaatcagaacactgagagttgtcaacatcttctgtacatcatttttttaacatttctcttttaataatggacacatcc

SEQ ID NO: 4914 - DNA, 600 bp, Chicken  19866894108189_1
cttcagagtgctgggaaacactgccaaaacagtgtttcagaagtggtgtataatcacaaaatatttgccggtgtagtgaatagcaggcttgggtgaggggtaagcatccttaatctctaattcttcccttcttccttacagctgttagatatctgacttttcaaacagtttcttcggaattcataaatatcgatctttctagaaaaaaaaaataatatgccactgcataaggtacataatcctttgagaaagaccttaacatagggcaaaagtagtacagcaggtcaagtatcatttcayactcttcccattgagttaacatctgtgtttctcaagaatctaaatttgagatttgtggaagcatgaagcatgttagaggaaaaatattgttaaatactgttaaaaatcatagacctttgtcttgaaagttacaatatttgagtatatgttttgttcttaatttttatattggtaattttaagttctattacatttcataattattcatttagataattttttgcataaatatttgttgaaataatgtctaacaaaaaaagctctctttaaaagacatataacaaaatacagctattaata

SEQ ID NO: 4915 - DNA, 599 bp, Chicken  19866894108196_1
  misc_feature (1)..(2): n is any nucleotide
nnccctgacctccttttctcctgaaggtggataaagtgatttcctctttcgaaagcctcatttaaatacaaagccatgttattgttactgtgggagactacacattgcagtagcgctggggagtgaaggtcttacctgggtcttgcaggtattatcttgctcaaaatgcacaatgttttttctttcacattgtccccttctctgtcataatggccgaattcctcagaaaagaagcctcaaatatacagtcttgttctaggttttgacggccatctgaaacagtacagagtgactagaatrtgttgtgaaagacctgtgtcatttaggaatattggtaataatcactcactgaattcaggcagcgcagaggctgctggctcacttaggatgttgctcccagagaggwcatttcactgctgaatgttgtctcctctctgaatgtgtctgccttcaggttgccaacacatttggcatcctaatgcccgcagtcactgggacctcccatgccagggcattgggtaggtatttatggactataactcagttagtattgatgcaacagcatcataccagccaagaaacccacaggagcagaggaa

SEQ ID NO: 4916 - DNA, 600 bp, Chicken  19866894108196_2
gcagtagcgctggggagtgaaggtcttacctgggtcttgcaggtattatcttgctcaaaatgcacaatgttttttctttcacattgtccccttctctgtcataatggccgaattcctcagaaaagaagcctcaaatatacagtcttgttctaggttttgacggccatctgaaacagtacagagtgactagaatrtgttgtgaaagacctgtgtcatttaggaatattggtaataatcactcactgaattcaggcagcgcagaggctgctggctcacttaggatgttgctcccagagaggwcatttcactgctgaatgttgtctcctctctgaatgtgtctgccttcaggttgccaacacatttggcatcctaatgcccgcagtcactgggacctcccatgccagggcattgggtaggtatttatggactataactcagttagtattgatgcaacagcatcataccagccaagaaacccacaggagcagaggaaactgctgctctgctcccacagtgcctcccaccagtagctcacacatgccagagccactgctgaatttatgacattcatgtctagccactgcttcagcctcaaaataa

SEQ ID NO: 4917 - DNA, 600 bp, Chicken  19866894108199_1
agttctccctaactctttcattctacattccatccttctcatccactggcacctccacaggcaagaataatactaactcagcttgtccagaatttcacacagcgtgtacaagatttcagagaaggcatttgcagctaacagtacaactcagtccataaatacaagctgccaaattttttgactgtgtggagaatactcagacctgactagcacaagtaacaagccttgttttaatatcctaacatttgtggctaaataacaccctggggcacagctctaccactgctagcaaaggcttcwgtacgatgagattgctgccatgactaagttgtacactggcccgtgtggtgggtgccttaatttctcactgacgtgtgagcacttgaacatacttacagaatacgtgtggagaaggctctgtcatgaatgctttaccttatagcagcggtatttataaagcacaactaagaacacggtcattacaacgatgacgctgatcattatgatagtgttcaacactgagttcaagagacgctggcccacggatggggtgtcctcactgaaaggggtgtagatcctgtggtataaagcaaagccatg

SEQ ID NO: 4918 - DNA, 600 bp, Chicken  19866894108200_1
caataatcctcacatcagcataatttaatcatcaacataagctaatggaaagttaaatttgatgtaatttttttctgttttatatgttccgtgcctatagatttttcaaaacggttaatttttctttatttatattatgtctttccagacataaatgctgttatgcatttttatactttttatacttttatattttttatgcgaaggaaaatatctcaattttattctatatacttcaagaattatgtttttattcttctgcaaaatattttctgatacatacctttcaataaattaagyatatatctktctgtgctggggactttgataatagataactttaagtggcagaagttttcactgggatactgttgacaaccgtacaaaatattctgtttcacctacaaaatattttcaatattttcctataaaggcaaatggcctaagtgaagctcataaaaatcctttcacttttgatatgaatctgttccaaagattttctctaggctattgtaaccaaggggtacagaatagtacctgcagatgtcacactggaagacagagcaaggttagcacaacagaccagtgctgtaggtggag

SEQ ID NO: 4919 - DNA, 600 bp, Chicken  19866894108200_2
tcacatcagcataatttaatcatcaacataagctaatggaaagttaaatttgatgtaatttttttctgttttatatgttccgtgcctatagatttttcaaaacggttaatttttctttatttatattatgtctttccagacataaatgctgttatgcatttttatactttttatacttttatattttttatgcgaaggaaaatatctcaattttattctatatacttcaagaattatgtttttattcttctgcaaaatattttctgatacatacctttcaataaattaagyatatatctktctgtgctggggactttgataatagataactttaagtggcagaagttttcactgggatactgttgacaaccgtacaaaatattctgtttcacctacaaaatattttcaatattttcctataaaggcaaatggcctaagtgaagctcataaaaatcctttcacttttgatatgaatctgttccaaagattttctctaggctattgtaaccaaggggtacagaatagtacctgcagatgtcacactggaagacagagcaaggttagcacaacagaccagtgctgtaggtggaggaagagatc

SEQ ID NO: 4920 - DNA, 600 bp, Chicken  19866894108200_3
agcaggttagcactggaaacctttgccttaccaagttaaatgaagaggataactggggccagtatctcttgtgacactctgtctggatcagatgacaaaagaaattacagatttttgacagtgacaccattacaggtttttctatagtaggcaaaagttactttgtttatttgaattgtggcacactgtaagctcagtaaccatcccaggaaagggtagattttgtacttagggacatggtttagtgggcaatattgatggtatgaggatggttaaactagatgatcttggaagtctctyccaatcttaatartgctatgattctatgatttcaaaactctcttttaaaatcacctcctctgtgtctaaaagtggtattaccacagcttttattatagacactaagttcatatttaatatgcccaatcaataaagagataaaacacagatactcatctttaggttttttccaggctctcctatatttttcttttcacagagtgattgcttgacctcttacgacttcatttaatccctaaaacctgctgggcccttcatcactgatgcaggggccttgtatggatttgattttgattgtgc

SEQ ID NO: 4921 - DNA, 600 bp, Chicken  19866894108200_4
tggaaacctttgccttaccaagttaaatgaagaggataactggggccagtatctcttgtgacactctgtctggatcagatgacaaaagaaattacagatttttgacagtgacaccattacaggtttttctatagtaggcaaaagttactttgtttatttgaattgtggcacactgtaagctcagtaaccatcccaggaaagggtagattttgtacttagggacatggtttagtgggcaatattgatggtatgaggatggttaaactagatgatcttggaagtctctyccaatcttaatartgctatgattctatgatttcaaaactctcttttaaaatcacctcctctgtgtctaaaagtggtattaccacagcttttattatagacactaagttcatatttaatatgcccaatcaataaagagataaaacacagatactcatctttaggttttttccaggctctcctatatttttcttttcacagagtgattgcttgacctcttacgacttcatttaatccctaaaacctgctgggcccttcatcactgatgcaggggccttgtatggatttgattttgattgtgcgtgtgaaaccatg

SEQ ID NO: 4922 - DNA, 600 bp, Chicken  19866894108201_1
gtgcagtgaaatctttagttcctcctgtaagactatgcatgaagaatacctttgaagaaagggaaaatctgcactgaaatttcagacacaccagtggagaatgtagcatgtttagaagacttatattgagcaaccaaatttgtgtttacagaagtgttgaacagataatgaagtcctgtaatcgcaatctacacactgaaagagtgggaatggacattagaattcttttaaacaaacttttaaagattacatttgaagatccaaatggcatttctgcacaagtcttaaaaacacacactygtttgtcctaaactaaaacttgcatatcatacaccgtgcttgttttggaaagacagtctttcatacacagtgaaccacagatgctgccttacactggcagacagtttctcttactgctcatatctgtatcatgctttaataaagtaaatcctgctttgaatacattaactgagaaactggtaatatagctaatcmgtacagctcacagaagtagcatagaaggttttcgctgaagccctgtaaagaaaggatggcacacatgacctcacaacctcaatattaaagggaacagttccaagg

SEQ ID NO: 4923 - DNA, 600 bp, Chicken  19866894108201_2
ctgaaagagtgggaatggacattagaattcttttaaacaaacttttaaagattacatttgaagatccaaatggcatttctgcacaagtcttaaaaacacacactygtttgtcctaaactaaaacttgcatatcatacaccgtgcttgttttggaaagacagtctttcatacacagtgaaccacagatgctgccttacactggcagacagtttctcttactgctcatatctgtatcatgctttaataaagtaaatcctgctttgaatacattaactgagaaactggtaatatagctaatcmgtacagctcacagaagtagcatagaaggttttcgctgaagccctgtaaagaaaggatggcacacatgacctcacaacctcaatattaaagggaacagttccaaggagctcccacaacacacatttcagtaaatacaggatagaaggcattcacaaattttaaaaccagtgttcattctgacctgctcaaaagagacccctcacaagcatacaaacaaacaaacaaccctttgaaaataattccatgactttcctctgagaatagactatttttcaggaaaaaaaaaaaatgctgaaagat

SEQ ID NO: 4924 - DNA, 600 bp, Chicken  19866894108203_1
tatgccacattcttctcaaccaaactacttcagaattttctgagtcccagaaaacccatgagggtatcaccacattttcttctctctccaatgtcatcagcccagctgtgctggccacagaatactctgaccaccaaaaggagggctcggggtgggagtggaggccagacaggctgaatttgagttttgcttagcatactctgcatgtcttgatgggtgcactgtcactatccagtcactctttgtttgctcaacattattctatggatgtttctgatctggaaacagatcagaaaggcrcaaagatggtgagcttttccataaactctacagtttaagtctcataattctcctgctgttccttttgctatagggatttaacgcaggttggtgaaattcagtacacgctgcccatccccttgccaaatacaggtgtactgcctaagcagtgggcctgttggagccatgcctctgctttctctctgtttttagaagagcaatagaagaagttgtacatacctccccaaatacatacatctactactttatttccaaatgaaagacaaataatgatgcttttaaagagacagccctgaccag

SEQ ID NO: 4925 - DNA, 560 bp, Chicken  19866894108204_1
aaacgcgcgtaacacctggaaggcagcgctcaggtggaaggggggggaggaagcgggatgatggccaagagcttttgtcatgctctgggctgcctgcacggagctgcccggggaaggaggaatgggtagctgcagggaagcgcacagtcacacacgcgtggctcttgccttgcattctgaacaaggatttttggtcgctttcaagtgaattacaagacctcttttgcaaggaattaataaataaataggcacgccctgaaatggtcgaggattaattccaagaacaaggaggaggtggtratgagccactgctggccaaacccagagctgggaaatggccgaatgacccagcagctgtgggagagcgtggagcagctgccagcaggctgaacatgtacctgcgagcctggggagctgcacgccccgtttgctgcttyttatgcaaggaatgaccgtgagcaggtctgcctgagtcttctaaagaccagcttaggaggacagaggtattgctcgtggctttaccttaagagattgcccctcagagatgagttcttgcaatt

SEQ ID NO: 4926 - DNA, 423 bp, Chicken  19866894108204_2
aagcgcacagtcacacacgcgtggctcttgccttgcattctgaacaaggatttttggtcgctttcaagtgaattacaagacctcttttgcaaggaattaataaataaataggcacgccctgaaatggtcgaggattaattccaagaacaaggaggaggtggtratgagccactgctggccaaacccagagctgggaaatggccgaatgacccagcagctgtgggagagcgtggagcagctgccagcaggctgaacatgtacctgcgagcctggggagctgcacgccccgtttgctgcttyttatgcaaggaatgaccgtgagcaggtctgcctgagtcttctaaagaccagcttaggaggacagaggtattgctcgtggctttaccttaagagattgcccctcagagatgagttcttgcaatt

SEQ ID NO: 4927 - DNA, 600 bp, Chicken  19866894108210_1
tgttctttctgtttctgtgtgagtattcatgggacccacctgttacaaactttgtgatattccaatggtgtcaccatcatttccagtgcattgaagccaatattcagctctgtataccgttccctgatcataatctgctgattcacatgaataagctgatcaagacgcttcattttgtgtgtggcaactgtgcacggctgtcaggaatgtggcttgtctttcacatcactgttgccgctgctgaaatgcaccccccactgcctcactgttctcatatccaccgtttgctctccttaaacrttcatcaaatgtcaatgaatgtcagtgggtaccattttttccacatggagggattcagttacacacctttgcttcatccatacttccaagtaagatgtcgttttgtcagactgcccctctgctgccatctgtcacacagttacaaagtgtgatggaatactggtgggaaggttcaacctccattgccataccaccaacatctgcctatgacattgtgtgccaacgtattaaagtaggagacattactttcagagcagtcttcatacataaaaaggtttttttaggaatatcagcagttca

SEQ ID NO: 4928 - DNA, 600 bp, Chicken  19866894108210_2
gctctaggtctaacgcctcttctcacttcctggcctccactgcccttcttaccaccataggccttttaagcagcgcaggagggtgaagttaggatggtttctttcagtggtgccttcctccttgcttgtttttttctcctctagtgatggtcctccacaggctgcctcacaggcatgaggtgcctctccagccatgactcttccacatgcgtcctcctgcatctcctgaagccctactccccttggttaccatcccttcctcacaaagctctgagaaggtgccataaccccactgactgrgtgatgctttaggcagggcagggagtgttgtggagctggttgggaactggcttggagtgactaggtgtgctgaaaccagctgggaccagctgggaccmgtagtgcacagggcagtgcacagtcacctgccacaaatgctgctgggcagcttctgcagccagaccttaccgagtatgcccagtaaagttgcagcgttttttaatattaattgcttcagctaccatttagtggcggctcatcagcttataattggtcacctcacaaggaagcccatgtctaacttgagttggggtcgataga

SEQ ID NO: 4929 - DNA, 600 bp, Chicken  19866894108210_3
ttctttcagtggtgccttcctccttgcttgtttttttctcctctagtgatggtcctccacaggctgcctcacaggcatgaggtgcctctccagccatgactcttccacatgcgtcctcctgcatctcctgaagccctactccccttggttaccatcccttcctcacaaagctctgagaaggtgccataaccccactgactgrgtgatgctttaggcagggcagggagtgttgtggagctggttgggaactggcttggagtgactaggtgtgctgaaaccagctgggaccagctgggaccmgtagtgcacagggcagtgcacagtcacctgccacaaatgctgctgggcagcttctgcagccagaccttaccgagtatgcccagtaaagttgcagcgttttttaatattaattgcttcagctaccatttagtggcggctcatcagcttataattggtcacctcacaaggaagcccatgtctaacttgagttggggtcgatagagttgaaaatgaaacccaaaatgtaggaaactttcaaggactgaaggcttttaaagatattttcctttttttatcctgacaaatggctctgtcttgctc

SEQ ID NO: 4930 - DNA, 599 bp, Chicken  19866894108212_1
  misc_feature (1)..(89): n is any nucleotide
nnnnnnnnnnnnnnnnnnnnnnnnnnnnnnnnnnnnnnnnnnnnnnnnnnnnnnnnnnnnnnnnnnnnnnnnnnnnnnnnnnnnnnnnncccaccggtgtcaccgggtgcttctgtcccagcctacagtgatctcacaacaaaatgcacttgggcagactcagcttcaacccagcaaaaaacagataaaggctgttgcacagctaaccaagcaaagaagagagaagattaaaaaatatttgtcaacgtgtcaaatctgtcatgccaaaaggcagagcctttcaactggcaatttaaaaayacaaacttctagcacaaatattactgctgatgaaagatattaagatgcaatctttcaaagtaacaagctgtattctttcactgcttccaggatttactttaacccttcgatagatgcatttatccttaaccatcactagcagaaaatgcaccctgaaagcagccgcagccttctgcaaaactccagagaggccggagggcggctcrcccctggcctggcacagaggcagwgatggcctygtccaggcagggctgcattcagagcactgcagccacgttcctaatagacrcagaatacag

SEQ ID NO: 4931 - DNA, 600 bp, Chicken  19866894108212_2
ccaagcaaagaagagagaagattaaaaaatatttgtcaacgtgtcaaatctgtcatgccaaaaggcagagcctttcaactggcaatttaaaaayacaaacttctagcacaaatattactgctgatgaaagatattaagatgcaatctttcaaagtaacaagctgtattctttcactgcttccaggatttactttaacccttcgatagatgcatttatccttaaccatcactagcagaaaatgcaccctgaaagcagccgcagccttctgcaaaactccagagaggccggagggcggctcrcccctggcctggcacagaggcagwgatggcctygtccaggcagggctgcattcagagcactgcagccacgttcctaatagacrcagaatacagggaagtgtttattgtgcaaaagcagagaggggaaaattaaaaaaaaaaaaaagcaaggctacatggtctgaatcacaggaggataagtgggatgcaaagagacctctgacctcaggtacatcaacactgagcccattgtgagccaccaacaccaaaaagaaaaaaaagtaatgttcatttgtgaataagcattcaggaaaaaaaggc

SEQ ID NO: 4932 - DNA, 600 bp, Chicken  19866894108212_3
aaaaatatttgtcaacgtgtcaaatctgtcatgccaaaaggcagagcctttcaactggcaatttaaaaayacaaacttctagcacaaatattactgctgatgaaagatattaagatgcaatctttcaaagtaacaagctgtattctttcactgcttccaggatttactttaacccttcgatagatgcatttatccttaaccatcactagcagaaaatgcaccctgaaagcagccgcagccttctgcaaaactccagagaggccggagggcggctcrcccctggcctggcacagaggcagwgatggcctygtccaggcagggctgcattcagagcactgcagccacgttcctaatagacrcagaatacagggaagtgtttattgtgcaaaagcagagaggggaaaattaaaaaaaaaaaaaagcaaggctacatggtctgaatcacaggaggataagtgggatgcaaagagacctctgacctcaggtacatcaacactgagcccattgtgagccaccaacaccaaaaagaaaaaaaagtaatgttcatttgtgaataagcattcaggaaaaaaaggcagagaggggacccccgggatctct

SEQ ID NO: 4933 - DNA, 600 bp, Chicken  19866894108212_4
tgtcaacgtgtcaaatctgtcatgccaaaaggcagagcctttcaactggcaatttaaaaayacaaacttctagcacaaatattactgctgatgaaagatattaagatgcaatctttcaaagtaacaagctgtattctttcactgcttccaggatttactttaacccttcgatagatgcatttatccttaaccatcactagcagaaaatgcaccctgaaagcagccgcagccttctgcaaaactccagagaggccggagggcggctcrcccctggcctggcacagaggcagwgatggcctygtccaggcagggctgcattcagagcactgcagccacgttcctaatagacrcagaatacagggaagtgtttattgtgcaaaagcagagaggggaaaattaaaaaaaaaaaaaagcaaggctacatggtctgaatcacaggaggataagtgggatgcaaagagacctctgacctcaggtacatcaacactgagcccattgtgagccaccaacaccaaaaagaaaaaaaagtaatgttcatttgtgaataagcattcaggaaaaaaaggcagagaggggacccccgggatctctgctcttgtt

SEQ ID NO: 4934 - DNA, 600 bp, Chicken  19866894108212_5
aatttaaaaayacaaacttctagcacaaatattactgctgatgaaagatattaagatgcaatctttcaaagtaacaagctgtattctttcactgcttccaggatttactttaacccttcgatagatgcatttatccttaaccatcactagcagaaaatgcaccctgaaagcagccgcagccttctgcaaaactccagagaggccggagggcggctcrcccctggcctggcacagaggcagwgatggcctygtccaggcagggctgcattcagagcactgcagccacgttcctaatagacrcagaatacagggaagtgtttattgtgcaaaagcagagaggggaaaattaaaaaaaaaaaaaagcaaggctacatggtctgaatcacaggaggataagtgggatgcaaagagacctctgacctcaggtacatcaacactgagcccattgtgagccaccaacaccaaaaagaaaaaaaagtaatgttcatttgtgaataagcattcaggaaaaaaaggcagagaggggacccccgggatctctgctcttgttcatcttccctgagaagatttgcaatccagttgccccctccttccccacca

SEQ ID NO: 4935 - DNA, 599 bp, Chicken  19866894108214_1
  misc_feature (1)..(73): n is any nucleotide
nnnnnnnnnnnnnnnnnnnnnnnnnnnnnnnnnnnnnnnnnnnnnnnnnnnnnnnnnnnnnnnnnnnnnnnnncaggattttttccttctgggcagagaagctgcagtgtggctcaaggctttataccacataaccacagcttcaaatcccaacagcatgaaagcactggcaaagcaccttgtgccctgtacatggcatgttgtagctctgctcaaaagcaaacactcaagatcatgttgcttctccctgaaacagccaacacctgacctacctcctcacagaagtcccagctctcaccrgcataaatgttcttggatgctccaaacctgaacaagaagaggacacacaacttgctttactctgttagccacagggcagagccataggcattcaatccgcacgggaaacaggatacaaaagtgtcatggttttataactgtagagaactggggcaccagctctcttgaccttggagccacaaaacaaaccacttatgtttccttctcctttccactgctaacaagagaataacatgctgttcccaaggactttgtaaacagcaggagagtggcactgcatggcttctcctgcacaagag

SEQ ID NO: 4936 - DNA, 600 bp, Chicken  19866894108214_2
cacaacttgctttactctgttagccacagggcagagccataggcattcaatccgcacgggaaacaggatacaaaagtgtcatggttttataactgtagagaactggggcaccagctctcttgaccttggagccacaaaacaaaccacttatgtttccttctcctttccactgctaacaagagaataacatgctgttcccaaggactttgtaaacagcaggagagtggcactgcatggcttctcctgcacaagagttgctgctcttctggggaactatcttgtggacacatttttcaacasacttcctagagcacccccatatctcactgcagaggtgcaatttaatcaagaagagaagagcccacctgtaaaaaatggtagctagtgctttagccactgacaaggcatctttcttctgcagaggaacagcctcaatccatttagtgaagtagtcggtcacaatgaggacatgtgtattgttctggcttgtctcaggaaaaggtcctgcataaacaagcatttaaaaataaatacataaataaataaatgtgatgctgtaatatcacccaaaccgggwasgtaaaaacygagcccagaaaa

SEQ ID NO: 4937 - DNA, 600 bp, Chicken  19866894108214_3
cttgtggacacatttttcaacasacttcctagagcacccccatatctcactgcagaggtgcaatttaatcaagaagagaagagcccacctgtaaaaaatggtagctagtgctttagccactgacaaggcatctttcttctgcagaggaacagcctcaatccatttagtgaagtagtcggtcacaatgaggacatgtgtattgttctggcttgtctcaggaaaaggtcctgcataaacaagcatttaaaaataaatacataaataaataaatgtgatgctgtaatatcacccaaaccgggwasgtaaaaacygagcccagaaaacaactgctgccaaaaggcaaaatactttaactcttttctgctgtcatttagacagtacagttctgtgacctttgtcagcaacaacacacccatcacagcctcaattctgagtggtaactcacacccacaactcccattgtgtatgcagtgggagctgtgccagtcatttggatcaggttgcaccctggtaagctgctacggcttycttggcagttcttcaccgcagaggtaggcggctgtcactcacgtgtgaccataaatctgccacgcttcccar

SEQ ID NO: 4938 - DNA, 600 bp, Chicken  19866894108214_4
tgtggacacatttttcaacasacttcctagagcacccccatatctcactgcagaggtgcaatttaatcaagaagagaagagcccacctgtaaaaaatggtagctagtgctttagccactgacaaggcatctttcttctgcagaggaacagcctcaatccatttagtgaagtagtcggtcacaatgaggacatgtgtattgttctggcttgtctcaggaaaaggtcctgcataaacaagcatttaaaaataaatacataaataaataaatgtgatgctgtaatatcacccaaaccgggwasgtaaaaacygagcccagaaaacaactgctgccaaaaggcaaaatactttaactcttttctgctgtcatttagacagtacagttctgtgacctttgtcagcaacaacacacccatcacagcctcaattctgagtggtaactcacacccacaactcccattgtgtatgcagtgggagctgtgccagtcatttggatcaggttgcaccctggtaagctgctacggcttycttggcagttcttcaccgcagaggtaggcggctgtcactcacgtgtgaccataaatctgccacgcttcccarca

SEQ ID NO: 4939 - DNA, 600 bp, Chicken  19866894108214_5
atttttcaacasacttcctagagcacccccatatctcactgcagaggtgcaatttaatcaagaagagaagagcccacctgtaaaaaatggtagctagtgctttagccactgacaaggcatctttcttctgcagaggaacagcctcaatccatttagtgaagtagtcggtcacaatgaggacatgtgtattgttctggcttgtctcaggaaaaggtcctgcataaacaagcatttaaaaataaatacataaataaataaatgtgatgctgtaatatcacccaaaccgggwasgtaaaaacygagcccagaaaacaactgctgccaaaaggcaaaatactttaactcttttctgctgtcatttagacagtacagttctgtgacctttgtcagcaacaacacacccatcacagcctcaattctgagtggtaactcacacccacaactcccattgtgtatgcagtgggagctgtgccagtcatttggatcaggttgcaccctggtaagctgctacggcttycttggcagttcttcaccgcagaggtaggcggctgtcactcacgtgtgaccataaatctgccacgcttcccarcagcgggtgca

SEQ ID NO: 4940 - DNA, 600 bp, Chicken  19866894108214_6
tgcataaacaagcatttaaaaataaatacataaataaataaatgtgatgctgtaatatcacccaaaccgggwasgtaaaaacygagcccagaaaacaactgctgccaaaaggcaaaatactttaactcttttctgctgtcatttagacagtacagttctgtgacctttgtcagcaacaacacacccatcacagcctcaattctgagtggtaactcacacccacaactcccattgtgtatgcagtgggagctgtgccagtcatttggatcaggttgcaccctggtaagctgctacggcttycttggcagttcttcaccgcagaggtaggcggctgtcactcacgtgtgaccataaatctgccacgcttcccarcagcgggtgcagaaaccttgaagagcttgtgagacaaccagaaacactcaccatgaacagctaatcccagcacttcccagggggactctactttaacaggtctggttttccgtgatatgtttttgttgtgctctgcattctggcatgtttcacacattttgatctggaaagggaaaaactgtatcaaaggattttaaaatatgctggcaagttatgtcagattctgaa

SEQ ID NO: 4941 - DNA, 600 bp, Chicken  19866894108214_7
asgtaaaaacygagcccagaaaacaactgctgccaaaaggcaaaatactttaactcttttctgctgtcatttagacagtacagttctgtgacctttgtcagcaacaacacacccatcacagcctcaattctgagtggtaactcacacccacaactcccattgtgtatgcagtgggagctgtgccagtcatttggatcaggttgcaccctggtaagctgctacggcttycttggcagttcttcaccgcagaggtaggcggctgtcactcacgtgtgaccataaatctgccacgcttcccarcagcgggtgcagaaaccttgaagagcttgtgagacaaccagaaacactcaccatgaacagctaatcccagcacttcccagggggactctactttaacaggtctggttttccgtgatatgtttttgttgtgctctgcattctggcatgtttcacacattttgatctggaaagggaaaaactgtatcaaaggattttaaaatatgctggcaagttatgtcagattctgaacaagttataagtgggtaagagggacagtacctctgtgcaccttccttctacccaataaaaacagagggatgc

SEQ ID NO: 4942 - DNA, 600 bp, Chicken  19866894108219_1
tttgaagaaccactcccattttccacacgagagcaataattacggtgtcaacagcacaacacagacatctctaaaccttcccagcaccactgtgagtgtaagaatattattttagagacggagaaccacagacattttgaggttaagacctacagcttcaaaaacctccactagccctggtgggttggacacaccttgggtctgattcttgtagacactcaacttttcctgttttctctctactttggaacttctcacacatttctcacacttctctatgcaatattggatccctatcartttgcacacctcttccagaagacaaaacctttgagaaacttcaactaaaagcgtcgtgttctttcttcmcatttatcaataaagttgatgggagttatcaaaaaaaatgatctattccacaaaatggatttaacttcttcctacggattttctttgagcacctcttaacatttcttaatgtatacctgcaacccctatgattcatcagtctgctcagtgagcactttctgctttgcagaacagctacagttaggcaggaatctccaaaatctggcctgtgtcagctacataaagcacaca

SEQ ID NO: 4943 - DNA, 600 bp, Chicken  19866894108219_2
tctaaaccttcccagcaccactgtgagtgtaagaatattattttagagacggagaaccacagacattttgaggttaagacctacagcttcaaaaacctccactagccctggtgggttggacacaccttgggtctgattcttgtagacactcaacttttcctgttttctctctactttggaacttctcacacatttctcacacttctctatgcaatattggatccctatcartttgcacacctcttccagaagacaaaacctttgagaaacttcaactaaaagcgtcgtgttctttcttcmcatttatcaataaagttgatgggagttatcaaaaaaaatgatctattccacaaaatggatttaacttcttcctacggattttctttgagcacctcttaacatttcttaatgtatacctgcaacccctatgattcatcagtctgctcagtgagcactttctgctttgcagaacagctacagttaggcaggaatctccaaaatctggcctgtgtcagctacataaagcacacagaaagttttggttcctagagcagaaaattcacaagcagtaattaagcagcctagcatgaatccacactg

SEQ ID NO: 4944 - DNA, 600 bp, Chicken  19866894108221_1
ttcacatctcaaagccactgctgctgtagcagtgtgaggggagatcagtcagagagtaaaataaaacaagaatttcagagcatataatttctttgcagaagcaaatggcacaaggctacggtataaaatagctataacctacagcgctggtgcagtgccctcatcattccatccatgcagcacctcaccatggaagcacagagctcccattgcactccaattgttctccaagtttttaagccttgctaattgtgaagagcatttaacgtttttcatatgtcatcatttgtttgtaaggcwctattcagcgtgacatgaaagtgagccaaactgagagggatacagtctgaacacatatgcatgcaggcaagtaattaaaggcctttacacttygtgtgtgtgtgtggatataaatgtgaacaaaacttttacctaagtttccattcagattctgattagatttgggttttgttttgagaaaacgtgttgccagatactggccggcctggatgtagagagcttaaaaaatagggggagaaaaaggaagaaaaagaaaaaaaaacccctaaaataaaattagtacacaaatttgaacccgca

SEQ ID NO: 4945 - DNA, 600 bp, Chicken  19866894108221_2
tgcagaagcaaatggcacaaggctacggtataaaatagctataacctacagcgctggtgcagtgccctcatcattccatccatgcagcacctcaccatggaagcacagagctcccattgcactccaattgttctccaagtttttaagccttgctaattgtgaagagcatttaacgtttttcatatgtcatcatttgtttgtaaggcwctattcagcgtgacatgaaagtgagccaaactgagagggatacagtctgaacacatatgcatgcaggcaagtaattaaaggcctttacacttygtgtgtgtgtgtggatataaatgtgaacaaaacttttacctaagtttccattcagattctgattagatttgggttttgttttgagaaaacgtgttgccagatactggccggcctggatgtagagagcttaaaaaatagggggagaaaaaggaagaaaaagaaaaaaaaacccctaaaataaaattagtacacaaatttgaacccgcagttaccatgcctaaagcagaaactgccgaacaagtcaagaggcttattagcattttatgtaaatcagttattactgttctccacttccttaat

SEQ ID NO: 4946 - DNA, 600 bp, Chicken  19866894108221_3
aagagcatttaacgtttttcatatgtcatcatttgtttgtaaggcwctattcagcgtgacatgaaagtgagccaaactgagagggatacagtctgaacacatatgcatgcaggcaagtaattaaaggcctttacacttygtgtgtgtgtgtggatataaatgtgaacaaaacttttacctaagtttccattcagattctgattagatttgggttttgttttgagaaaacgtgttgccagatactggccggcctggatgtagagagcttaaaaaatagggggagaaaaaggaagaaaaagyaaaaaaaacccctaaaataaaattagtacacaaatttgaacccgcagttaccatgcctaaagcagaaactgccgaacaagtcaagaggcttattagcattttatgtaaatcagttattactgttctccacttccttaattatccatgttatttcaatacaaccctttctttgatgtcccaattctatatttaaatagtgcaagatttctatcatatcctcccgctgaggtttgttccatgcaaaaaacatgccaagagcagctattttagagactactgggaaatgtttaattggttaat

SEQ ID NO: 4947 - DNA, 600 bp, Chicken  19866894108224_1
ctagtccaactgccctgcagtgaacagggacacctatagctacatcaggttgctcagatccccatccagcctgaccttgaatgtcaacagagatggaagatctctgggcaacctgagcaatcagtcagcagtttccacagaagacaccacttaggacctcagttactacttcatctggtgttggttacttcagcccttgtcccaccacagagtcagggagatatagatcattcttgacaatttttcacctatcatattctgagacaccccataacagcccaggcaatcagggtagagagrgtgagaactaggtaatctttgaggtcccttccaactcaagtcattctatgattctatgactctatcgtatgattcctcccaccctgtagagaaaaattcccattcagcagaggggcagagcccactagtaattcgtaaagaacataaggagaaactggaatgagcatttgcagagaaggaggagaaaaggagaacttccaagtgtgaaatagggacactttggattacgtaggcggaggagcctctgaacaggaacaagttacatctcagtgtagtaatagaagcagtgaggaggccaga

SEQ ID NO: 4948 - DNA, 600 bp, Chicken  19866894108227_1
cagccagagtcctctatccaaagagccgtatttcctatcttaaatccaaatccagtcgcctttatcctgcctcacctagctgctgagagcaagctaggtggctcagcaggcatgctgcactagttggctcactgcgtctgctgcagatcccgctctctgcagtgagaactcctgacacgctctgtgaccgtaatgggtgctgtgattctgcatcacgtccagaaggaaggagccatgcaagcagggctgtcacacgtgatgtctttccaggatgtatcttcctccctaacagtttcaaaygagaggaatgggttgagcagtaagagtccacattgyggataagagtccacagatagttccacagtctaattgcaagtgctctcctaaacaagcagcccgtgatgcccagctgggttagtcagagcttccagtgctcagcaccttagcacatgcagccatgggrctgctcctggtttcatgcaagccagagtgtgagcagtggcygcagtgtgggaactggcaggcacccagctcacagccacgggcctttcttcgaagggttcctgagctcatagattcagaagaccaacttatctcctt

SEQ ID NO: 4949 - DNA, 600 bp, Chicken  19866894108227_2
atcttaaatccaaatccagtcgcctttatcctgcctcacctagctgctgagagcaagctaggtggctcagcaggcatgctgcactagttggctcactgcgtctgctgcagatcccgctctctgcagtgagaactcctgacacgctctgtgaccgtaatgggtgctgtgattctgcatcacgtccagaaggaaggagccatgcaagcagggctgtcacacgtgatgtctttccaggatgtatcttcctccctaacagtttcaaaygagaggaatgggttgagcagtaagagtccacattgyggataagagtccacagatagttccacagtctaattgcaagtgctctcctaaacaagcagcccgtgatgcccagctgggttagtcagagcttccagtgctcagcaccttagcacatgcagccatgggrctgctcctggtttcatgcaagccagagtgtgagcagtggcygcagtgtgggaactggcaggcacccagctcacagccacgggcctttcttcgaagggttcctgagctcatagattcagaagaccaacttatctcctttcccaaacgttctgccmaccgcagtgatctctcctg

SEQ ID NO: 4950 - DNA, 600 bp, Chicken  19866894108227_3
gagaactcctgacacgctctgtgaccgtaatgggtgctgtgattctgcatcacgtccagaaggaaggagccatgcaagcagggctgtcacacgtgatgtctttccaggatgtatcttcctccctaacagtttcaaaygagaggaatgggttgagcagtaagagtccacattgyggataagagtccacagatagttccacagtctaattgcaagtgctctcctaaacaagcagcccgtgatgcccagctgggttagtcagagcttccagtgctcagcaccttagcacatgcagccatgggrctgctcctggtttcatgcaagccagagtgtgagcagtggcygcagtgtgggaactggcaggcacccagctcacagccacgggcctttcttcgaagggttcctgagctcatagattcagaagaccaacttatctcctttcccaaacgttctgccmaccgcagtgatctctcctgttaggttctcaccacatcttctagcagatggcctgatgagcctggaccagtctgaatgagtacctgagagctgtctctgtttggccacttctgtgtagcattaaatggagaaacaaayagaagagca

SEQ ID NO: 4951 - DNA, 600 bp, Chicken  19866894108227_4
attctgcatcacgtccagaaggaaggagccatgcaagcagggctgtcacacgtgatgtctttccaggatgtatcttcctccctaacagtttcaaaygagaggaatgggttgagcagtaagagtccacattgyggataagagtccacagatagttccacagtctaattgcaagtgctctcctaaacaagcagcccgtgatgcccagctgggttagtcagagcttccagtgctcagcaccttagcacatgcagccatgggrctgctcctggtttcatgcaagccagagtgtgagcagtggcygcagtgtgggaactggcaggcacccagctcacagccacgggcctttcttcgaagggttcctgagctcatagattcagaagaccaacttatctcctttcccaaacgttctgccmaccgcagtgatctctcctgttaggttctcaccacatcttctagcagatggcctgatgagcctggaccagtctgaatgagtacctgagagctgtctctgtttggccacttctgtgtagcattaaatggagaaacaaayagaagagcaatgaaaagcaatctgcctttgagacaggatcagtgctgtag

SEQ ID NO: 4952 - DNA, 600 bp, Chicken  19866894108227_5
cagtaagagtccacattgyggataagagtccacagatagttccacagtctaattgcaagtgctctcctaaacaagcagcccgtgatgcccagctgggttagtcagagcttccagtgctcagcaccttagcacatgcagccatgggrctgctcctggtttcatgcaagccagagtgtgagcagtggcygcagtgtgggaactggcaggcacccagctcacagccacgggcctttcttcgaagggttcctgagctcatagattcagaagaccaacttatctcctttcccaaacgttctgccmaccgcagtgatctctcctgttaggttctcaccacatcttctagcagatggcctgatgagcctggaccagtctgaatgagtacctgagagctgtctctgtttggccacttctgtgtagcattaaatggagaaacaaayagaagagcaatgaaaagcaatctgcctttgagacaggatcagtgctgtagtggtaaatagacgagtaggtaactttctgagcttgggtgtctgtgtatctggcgaggaatgagcaaactctgcttcccaaacgagcagtgtatgtaccccattcacttgcgta

SEQ ID NO: 4953 - DNA, 600 bp, Chicken  19866894108227_6
gccatgggrctgctcctggtttcatgcaagccagagtgtgagcagtggcygcagtgtgggaactggcaggcacccagctcacagccacgggcctttcttcgaagggttcctgagctcatagattcagaagaccaacttatctcctttcccaaacgttctgccmaccgcagtgatctctcctgttaggttctcaccacatcttctagcagatggcctgatgagcctggaccagtctgaatgagtacctgagagctgtctctgtttggccacttctgtgtagcattaaatggagaaacaaayagaagagcaatgaaaagcaatctgcctttgagacaggatcagtgctgtagtggtaaatagacgagtaggtaactttctgagcttgggtgtctgtgtatctggcgaggaatgagcaaactctgcttcccaaacgagcagtgtatgtaccccattcacttgcgtagagcctggaaggttctgcgatcctctcctccttccttctctctgctcatctgcctgctgaccaaagaggctgattttggggtaggcactacatcttctctcgtttctattatacatcaagagaatctggtcctctga

SEQ ID NO: 4954 - DNA, 599 bp, Chicken  19866894108242_1
  misc_feature (1)..(15): n is any nucleotide
nnnnnnnnnnnnnnnatggcagttactggctatcttatagaaaaaattacatcttgcagcatattagttctttacctaaaagaaagtgtggaaatacatctcaaatgtaggcatcatacctcatattccctcagagttgtcagctgcagccttactactaacttcagtacttaggcatcattgtaaaagtcttgttgatgaagagcactggttcaactgtctaataaacctaagaaaactcactagaagatcaaccacaacagagtgagaaaatctccatgaagggattgtaccacaacwgttttatcaaatattaatgatgtgaatttgccctatatttgaaaccagaacttcacagaactgcactaactttcacaacacacattaagctaactcccggcaggcagtaagyaagcagagtccaagaggcttktctaagattcatgaagtaaatcttccctctgtactttgtggaatctgtcttgatttgttttctttcaggcattatattgtccttggaaaggagtgtaaatgacagagagacatttctggctcccacagtggagaaatgtatgactcgtagtcacaagtactctgat

SEQ ID NO: 4955 - DNA, 600 bp, Chicken  19866894108242_2
atcatacctcatattccctcagagttgtcagctgcagccttactactaacttcagtacttaggcatcattgtaaaagtcttgttgatgaagagcactggttcaactgtctaataaacctaagaaaactcactagaagatcaaccacaacagagtgagaaaatctccatgaagggattgtaccacaacwgttttatcaaatattaatgatgtgaatttgccctatatttgaaaccagaacttcacagaactgcactaactttcacaacacacattaagctaactcccggcaggcagtaagyaagcagagtccaagaggcttktctaagattcatgaagtaaatcttccctctgtactttgtggaatctgtcttgatttgttttctttcaggcattatattgtccttggaaaggagtgtaaatgacagagagacatttctggctcccacagtggagaaatgtatgactcgtagtcacaagtactctgataatgtttgctattgtgttgcaggaaaatcccccttgcccatcccgaagcttttcttttttccttatccctcatttgcattctccctttaattgaagcaacaacacgagctcag

SEQ ID NO: 4956 - DNA, 600 bp, Chicken  19866894108242_3
gagttgtcagctgcagccttactactaacttcagtacttaggcatcattgtaaaagtcttgttgatgaagagcactggttcaactgtctaataaacctaagaaaactcactagaagatcaaccacaacagagtgagaaaatctccatgaagggattgtaccacaacwgttttatcaaatattaatgatgtgaatttgccctatatttgaaaccagaacttcacagaactgcactaactttcacaacacacattaagctaactcccggcaggcagtaagyaagcagagtccaagaggcttktctaagattcatgaagtaaatcttccctctgtactttgtggaatctgtcttgatttgttttctttcaggcattatattgtccttggaaaggagtgtaaatgacagagagacatttctggctcccacagtggagaaatgtatgactcgtagtcacaagtactctgataatgtttgctattgtgttgcaggaaaatcccccttgcccatcccgaagcttttcttttttccttatccctcatttgcattctccctttaattgaagcaacaacacgagctcagtgcttcgataggttgccatcg

SEQ ID NO: 4957 - DNA, 513 bp, Chicken  19866894108242_4
tttgtggaatctgtcttgatttgttttctttcaggcattatattgtccttggaaaggagtgtaaatgacagagagacatttctggctcccacagtggagaaatgtatgactcgtagtcacaagtactctgataatgtttgctattgtgttgcaggaaaatcccccttgcccatcccgaagcttttcttttttccttatccctcatttgcattctccctttaattgaagcaacaacacgagctcagtgcttcgataggttgccatcggtatcatttctatcctgagggctagatccataamgtacaatcgttctccacatcctctttcatctttactatagagtgttaaggaagatgcaaaaacatttcgatattttatcatgcatgactgtagaaagggaggatagcactagcattcaaaagggtggattccagattagtaagacaaacctggaagaagctggatagacagccagaaagagatgacctaaggtgcaggagaatggatttttaa

SEQ ID NO: 4958 - DNA, 599 bp, Chicken  19866894108244_1
  misc_feature (1)..(144): n is any nucleotide
nnnnnnnnnnnnnnnnnnnnnnnnnnnnnnnnnnnnnnnnnnnnnnnnnnnnnnnnnnnnnnnnnnnnnnnnnnnnnnnnnnnnnnnnnnnnnnnnnnnnnnnnnnnnnnnnnnnnnnnnnnnnnnnnnnnnnnnnnnnnnnnnactgagattcactggcctttatccacttgccaccagtccctctgggtttccacagcaatgagacaatttcaggctggccacatcttttgttgtgtgtttggcttctcttcatcccaccagtacagggaaggcatcactgatttggggagctggcaycactgcttcaaacctttcgtttttcagtcatgagttgacttgcaaaggaagtgcacgytcatagaaagcatcagagtaactgaggaacccaaactctagccagttcctcacagtgtctcattttgcaggtgagcgccgactcttctcgtgtcagcccagtggtaacaaaaaaaaactatgcccctttccttgtcacctctgggcacctgcaggtggaggcctgtgtatggagtgcccccagcaaggtgagtccaggcagttttacctccacgacagaagggccccagcacaatgcactt

SEQ ID NO: 4959 - DNA, 599 bp, Chicken  19866894108244_2
  misc_feature (1)..(86): n is any nucleotide
nnnnnnnnnnnnnnnnnnnnnnnnnnnnnnnnnnnnnnnnnnnnnnnnnnnnnnnnnnnnnnnnnnnnnnnnnnnnnnnnnnnnnnactgagattcactggcctttatccacttgccaccagtccctctgggtttccacagcaatgagacaatttcaggctggccacatcttttgttgtgtgtttggcttctcttcatcccaccagtacagggaaggcatcactgatttggggagctggcaycactgcttcaaacctttcgtttttcagtcatgagttgacttgcaaaggaagtgcacgytcatagaaagcatcagagtaactgaggaacccaaactctagccagttcctcacagtgtctcattttgcaggtgagcgccgactcttctcgtgtcagcccagtggtaacaaaaaaaaactatgcccctttccttgtcacctctgggcacctgcaggtggaggcctgtgtatggagtgcccccagcaaggtgagtccaggcagttttacctccacgacagaagggccccagcacaatgcacttctctgtaatggtgagaaagatcatagagtcatggaatctaagaygtccaccagcaaac

SEQ ID NO: 4960 - DNA, 600 bp, Chicken  19866894108244_3
aaaggaagtgcacgytcatagaaagcatcagagtaactgaggaacccaaactctagccagttcctcacagtgtctcattttgcaggtgagcgccgactcttctcgtgtcagcccagtggtaacaaaaaaaaactatgcccctttccttgtcacctctgggcacctgcaggtggaggcctgtgtatggagtgcccccagcaaggtgagtccaggcagttttacctccacgacagaagggccccagcacaatgcacttctctgtaatggtgagaaagatcatagagtcatggaatctaagaygtccaccagcaaactctggggtctccagcttgctgagagggcaacaccagctctaaacagcctcgaaggcactcatcaaatcttactgactacactcaacagttccaaatagcagcacagccagggcaaatccttygtaaatgcttcccgcatacttttaagatgaagtgatcgcacaagacctactcccacaggaaacaaagcatccagaatgatcctcccttgtctctcgcacgacatgagacctcttggcacgactaaacgccatacagtcaccacagccaccgcccagcacagccc

SEQ ID NO: 4961 - DNA, 600 bp, Chicken  19866894108244_4
gcccctttccttgtcacctctgggcacctgcaggtggaggcctgtgtatggagtgcccccagcaaggtgagtccaggcagttttacctccacgacagaagggccccagcacaatgcacttctctgtaatggtgagaaagatcatagagtcatggaatctaagaygtccaccagcaaactctggggtctccagcttgctgagagggcaacaccagctctaaacagcctcgaaggcactcatcaaatcttactgactacactcaacagttccaaatagcagcacagccagggcaaatccttygtaaatgcttcccgcatacttttaagatgaagtgatcgcacaagacctactcccacaggaaacaaagcatccagaatgatcctcccttgtctctcgcacgacatgagacctcttggcacgactaaacgccatacagtcaccacagccaccgcccagcacagccctctcccagggtccctgaccatcaacagcaccggcaccatttcagccaccatgtgtgagggccgccatcttctccagccttctctgcacctattgcacaggcagcagtgacaacacctgtctgaaggatgggctctg

SEQ ID NO: 4962 - DNA, 600 bp, Chicken  19866894108246_1
tgagtggcaatgaactttctgctctcagggaatggttgtacagtgcttagtctcatgattcattcagacactcgggtttaagtcttgccttgattttgtgctgtagatcttccattgacatactgatgatgagtatcatcttattgaggctaggtctaagtgttcctccaagttacatgagaatgtttaaaatattataccttgatcggaaacacagtttgactgaacttctctaggcttctaaagaacccgctttcatagaatcatagaatcatagaatggtttgggttggaaggaacmtttaagatcacctaattccaaccccttgctataggcagggacacctcccactagaccagattgctcaaagccccatccatcttggccttgagtgctttgagggaaggakcattcacagcctcactggggatgtgtgtacctatcttgtgtcaagtgaaccacatcaaggaaggtaactcattcattgcagaaaaagtgttaaagcaatgcaggtgttgcaactatgaaaaaaaaatgagcttttcttgatctttttttttttctttttccattaccagtcatatgccatgcataaatata

SEQ ID NO: 4963 - DNA, 600 bp, Chicken  19866894108246_2
ttccattgacatactgatgatgagtatcatcttattgaggctaggtctaagtgttcctccaagttacatgagaatgtttaaaatattataccttgatcggaaacacagtttgactgaacttctctaggcttctaaagaacccgctttcatagaatcatagaatcatagaatggtttgggttggaaggaacmtttaagatcacctaattccaaccccttgctataggcagggacacctcccactagaccagattgctcaaagccccatccatcttggccttgagtgctttgagggaaggakcattcacagcctcactggggatgtgtgtacctatcttgtgtcaagtgaaccacatcaaggaaggtaactcattcattgcagaaaaagtgttaaagcaatgcaggtgttgcaactatgaaaaaaaaatgagcttttcttgatctttttttttttctttttccattaccagtcatatgccatgcataaatatatacatatttataggcacaatgaccttctgatgacatcaagtggaagttgagtttaaagttgctccttctttcttcccttcctccccctttctctgttcctcatgcttcc

SEQ ID NO: 4964 - DNA, 600 bp, Chicken  19866894108247_1
ggaagtattacctagcacgctgtaagagacaagacaatttcagagccatttaaaaacaataaccctccagtcaggttttgtgctgcaaccaagaaccttctaaagggaaacaggcaaagcttttatagtcaagtgaagtaagaatacaatactgcggaagaaatgcattatttcttgaaagagtgctgaacagaaaatgacttctcattttatcaacaccatttaacacaccacccaaacatccgaaccctgaaaatgtgcaagttccaacaccagtttctgagcctgcatgaaagtctytccctctaaaaagtacctcagtaatcaacattaataattaaacacaaacactaattagtgagttagaagactgacatattttaagctgatgaggacaagctccttcattttttatgattcctttaatcttttaaattcacatggatatgcaatacaaaatgcgtttcgaagaaagaatattctgattactgctgaagtgtttatatcagaggaacgatttcagaaccagtgattaagaaaacagccccatgcgttctttctgctcctttgcccaactacagaactgcaatctctaaaggc

SEQ ID NO: 4965 - DNA, 599 bp, Chicken  19866894108252_1
  misc_feature (1)..(20): n is any nucleotide
nnnnnnnnnnnnnnnnnnnntggccttgagtgcctccagggatggggcaccacagcttctctgggcagctgtgtcagcacttcactgccctctggggaaagcatttcctcctaacatctaacctaaattgcccctcttttagttcctgttctgtaacagttactgatatttgatcagggatgtttttcatttatttgttcatttatttttgttttttgttgtttgtttgtttttatgccggtcagcactgccaactgagccagacagatactgctctttaaaggcagaaacacccttagraatgaaatcagtattttacagaggtgtaacaaatcactggaagacacaggatacgtgtgaggaatttctgatgttcaaacaaacaaaatagaagtaagcagaattagtcacatagtggccctccgtaatttttgccctccgtcatcccatagtacatatggttgtcccaaaaccaccttgacaggtgacttctgtgtgctctgagagcttttccagttcagaaaccctcacgttctggttaaagttcacattagcatttatatttgcactgacttccaattaatatttttcaaatacag

SEQ ID NO: 4966 - DNA, 600 bp, Chicken  19866894108261_1
cagaaatacatgttcttgtctgataaaagacttggcagagaaaagcaagtagaattctctcccatctcgtatataatgaaacattaatataaagtctcaatgaagcttttcaactgaggaaaatacagacaattttcattatattaagtcaaagccttcaattcattttgtctgcagtagaaagacacgcaacagtaacttactgtaggcaacatttcataagttaatatctagatcattattcttgtgtatgtttcctggaaagaatgttaggtgtttcttttttttttttttcctccygtggaatacatattcaattagcttatgaactttccattattattgcttgtattctgcttattggactgctctgacaagtaactacaagtcaaactactgaactgaactcagaggatatattcccatttactcctgattcagtctgctttttcagctaccaccctaacagttattaagtaggagcatttactatgtatagttaacacttctactctatgttaccctcattttaccttttaaatttgcccgtctgagtgttggtactcttgattacttcaaattactcatctcccagcatgc

SEQ ID NO: 4967 - DNA, 600 bp, Chicken  19866894108268_1
ttaattaaggggcagaggaacaagaggctttatcagctctttgtctacaggccgtaattttgtggcggatgggctatctgttattgtaaacgtccacctttttgaaggatttactgcaaaatcaaatggtgtttttatttaaatagttgagcgtcgcgtgattctcatttatttaatatggaggcattgttacaaagaagaatgtggcacttaatttgtattgcttgagggagctcggatccacccgggagcgctgctttgcatgcttcgtggtatcgtttgttgaaaacagaacacacrggaaaatgaagaggagraaaatgtgaaggtgaagttgcaaaatccccatcrggcttttcctgcgagcatttcttaaaagatcagggaatctttggtccgtaaagagaaggtgtgttgcaaaataatgatgaagaaaagctttcctgggtggcagtcgagggcaggagttggcaatttggagaagttctttttcatggccctctccaatttgtgttttcaggaagtggtatcagcaaggccaactcttgcaagtggtggtttttcaaatgttgttgaaaaataaggctgttgcatttgtac

SEQ ID NO: 4968 - DNA, 600 bp, Chicken  19866894108268_2
gaacaagaggctttatcagctctttgtctacaggccgtaattttgtggcggatgggctatctgttattgtaaacgtccacctttttgaaggatttactgcaaaatcaaatggtgtttttatttaaatagttgagcgtcgcgtgattctcatttatttaatatggaggcattgttacaaagaagaatgtggcacttaatttgtattgcttgagggagctcggatccacccgggagcgctgctttgcatgcttcgtggtatcgtttgttgaaaacagaacacacrggaaaatgaagaggagraaaatgtgaaggtgaagttgcaaaatccccatcrggcttttcctgcgagcatttcttaaaagatcagggaatctttggtccgtaaagagaaggtgtgttgcaaaataatgatgaagaaaagctttcctgggtggcagtcgagggcaggagttggcaatttggagaagttctttttcatggccctctccaatttgtgttttcaggaagtggtatcagcaaggccaactcttgcaagtggtggtttttcaaatgttgttgaaaaataaggctgttgcatttgtactggtaaaaccccttggc

SEQ ID NO: 4969 - DNA, 600 bp, Chicken  19866894108268_3
ccgtaattttgtggcggatgggctatctgttattgtaaacgtccacctttttgaaggatttactgcaaaatcaaatggtgtttttatttaaatagttgagcgtcgcgtgattctcatttatttaatatggaggcattgttacaaagaagaatgtggcacttaatttgtattgcttgagggagctcggatccacccgggagcgctgctttgcatgcttcgtggtatcgtttgttgaaaacagaacacacrggaaaatgaagaggagraaaatgtgaaggtgaagttgcaaaatccccatcrggcttttcctgcgagcatttcttaaaagatcagggaatctttggtccgtaaagagaaggtgtgttgcaaaataatgatgaagaaaagctttcctgggtggcagtcgagggcaggagttggcaatttggagaagttctttttcatggccctctccaatttgtgttttcaggaagtggtatcagcaaggccaactcttgcaagtggtggtttttcaaatgttgttgaaaaataaggctgttgcatttgtactggtaaaaccccttggctgagaggttatcattttcttgttaaatgccaccg

SEQ ID NO: 4970 - DNA, 479 bp, Chicken  19866894108269_1
tgctctatggatggaaaattacatcccatagtcagttatttcttattatattttctattttaaacagaatttagcacaactagtaaacaagcatatttatttccagtattgagtatcagctagtaccctacatctaacaccattattgccaaggctaatagtaaaacagctatgatttttgtgtgtattatggtactgctaagaatctcaatttacataaacagcattaggactgcaggtcctcacagggaaaggcaacttacatcaccaaagtatattcagtctgagcaaacaaggctwgaaatatactcaagtaagtgaaaattcaacatcgctaatgtacaggaaattcactcatgaagttcagtaaaaaacttaatgcaaaccaagaagttttgggaagaatgagcattaaacatgggtaaacactgaaccttataacagcatatgtctcagacacaaaatactcatctcaggca

SEQ ID NO: 4971 - DNA, 599 bp, Chicken  19866894108271_1
  misc_feature (1)..(93): n is any nucleotide
nnnnnnnnnnnnnnnnnnnnnnnnnnnnnnnnnnnnnnnnnnnnnnnnnnnnnnnnnnnnnnnnnnnnnnnnnnnnnnnnnnnnnnnnnnnnnacagctaaaagatactactgtagcagtttaacattcattcctgaataaacccatgaaagaaacacatttgacttgaccagaagacccaaagtaaaaatttcgtagtcttctactcctgaacacttcacttttaacagacattttcagttcttgattttagtccaaggaaaacattcatgggaagtttaagaaaatactttcatcccygtaattaaaaaagattatatactcraaggaaactttctcttaattaaaaaaaatgctgaattacatagtattatacatatgcatgcacaccaaattttttgagcccacctgaagaaatcaacaaaaatacataagaaaagtacatgttaccctcagtaacatgttgcactgtcaaatcaggcagaggtatctcgtggaagtacttcttgctctgagtaactgagatgcactgaacagtttgggattaacaaaagcatgtcacctcttaaagaactgctgaattgttagcatttttaaag

SEQ ID NO: 4972 - DNA, 599 bp, Chicken  19866894108271_2
  misc_feature (1)..(68): n is any nucleotide
nnnnnnnnnnnnnnnnnnnnnnnnnnnnnnnnnnnnnnnnnnnnnnnnnnnnnnnnnnnnnnnnnnnnacagctaaaagatactactgtagcagtttaacattcattcctgaataaacccatgaaagaaacacatttgacttgaccagaagacccaaagtaaaaatttcgtagtcttctactcctgaacacttcacttttaacagacattttcagttcttgattttagtccaaggaaaacattcatgggaagtttaagaaaatactttcatcccygtaattaaaaaagattatatactcraaggaaactttctcttaattaaaaaaaatgctgaattacatagtattatacatatgcatgcacaccaaattttttgagcccacctgaagaaatcaacaaaaatacataagaaaagtacatgttaccctcagtaacatgttgcactgtcaaatcaggcagaggtatctcgtggaagtacttcttgctctgagtaactgagatgcactgaacagtttgggattaacaaaagcatgtcacctcttaaagaactgctgaattgttagcatttttaaagagtagttatggcttattaatagaac

SEQ ID NO: 4973 - DNA, 600 bp, Chicken  19866894108278_1
ggaaagagaggctgtctcgggagcagcacagctgtgctagtacctattaccaagtcaccatcacttttgtatcttactatttccatctcaattttgctgctccattggagttgcgagatgacaataatcaaggaagaagaggcttttgagcctgcttatttgccccccagctatctgaagggtaatgcatagagctctttccccagaactgcagtggctgcagtggggtctgtgacactacagcaggagggtgtacgaatcctgaccccttgggattgcacataccaaggaagccatttygcaggatattttttcttcattttgctgcctgtttctcacactgaaaaaatgcagctctttacctgaggctacaggctcgtacaagcttctcttgtgactaagctgcatactgctttgcaatacaatgctttttgtatggagcaaggacaggagtgcatgggggagctggcagaataacctagccctgatctgatctttcagcgtgcctcattgttctgtcgggacagaaaatgtcagcttgctgttgctttgctcacagtctcagaggaggagggtgaatggaaaaggttatcacagcaa

SEQ ID NO: 4974 - DNA, 588 bp, Chicken  19866894108278_2
ttgctgcctgtttctcacactgaaaaaatgcagctctttacctgaggctacaggctcgtacaagcttctcttgtgactaagctgcatactgctttgcaatacaatgctttttgtatggagcaaggacaggagtgcatgggggagctggcagaataacctagccctgatctgatctttcagcgtgcctcattgttctgtcgggacagaaaatgtcagcttgctgttgctttgctcacagtctcagaggaggagggtgaatggaaaaggttatcacagcaaagagaaatggatctcagtgaygggcagcaaaagctagctggttaagttaataagcacttcctttggtaccactcgaggaaragagagaaatagaatctagactgccctgggcttttggggggatgggcaaaaagggaggctttctttgcaacgtgtgtgagaaatggaggaagggtgttttctcctggacttggtgctcaccctgcatgtgtgagggaggttgctataagcaatgcatgtgatcatgcagaataagaaggatcactgaacgggtgacgcagggaaaggaggattacaccgcatgtgatg

SEQ ID NO: 4975 - DNA, 528 bp, Chicken  19866894108278_3
caagcttctcttgtgactaagctgcatactgctttgcaatacaatgctttttgtatggagcaaggacaggagtgcatgggggagctggcagaataacctagccctgatctgatctttcagcgtgcctcattgttctgtcgggacagaaaatgtcagcttgctgttgctttgctcacagtctcagaggaggagggtgaatggaaaaggttatcacagcaaagagaaatggatctcagtgaygggcagcaaaagctagctggttaagttaataagcacttcctttggtaccactcgaggaaragagagaaatagaatctagactgccctgggcttttggggggatgggcaaaaagggaggctttctttgcaacgtgtgtgagaaatggaggaagggtgttttctcctggacttggtgctcaccctgcatgtgtgagggaggttgctataagcaatgcatgtgatcatgcagaataagaaggatcactgaacgggtgacgcagggaaaggaggattacaccgcatgtgatg

SEQ ID NO: 4976 - DNA, 600 bp, Chicken  19866894108292_1
aaaggttgtctgagttaacagtgttgccaatatcaagctttcaagaataatgatccaggcctcgaaagtcaagagattagctttaaatagggagcgttttaggttgttgggtgtttggtttttattttatttatttatttatttttaaatataaaaacaagcgttgaaatttggcattcgttttatttaccttttcttactaaatctttggcatatgctcaagtcacactttcaagctgttctcctgtaactgttaaaaagcagaagctgacactctgaggagctgaatcctaagacccrkggagctgagatttgtgaaaatgaattcaggcataattacaataaaatcacaagaattgggaccactgagttggtaggtgtacagattggtagaaataacatgatcttgactttagtttgcatgatctttgggctcagttcaagcctgtctatcttaacatgcctaactctgtttattaagtcatcttattctggtccatatgtactttataaactttatttatttctccaaagaccatggacaaatatctgtcttcctctgttcttcacaataatattttgagtaggtattagatccag

SEQ ID NO: 4977 - DNA, 600 bp, Chicken  19866894108292_2
aaggttgtctgagttaacagtgttgccaatatcaagctttcaagaataatgatccaggcctcgaaagtcaagagattagctttaaatagggagcgttttaggttgttgggtgtttggtttttattttatttatttatttatttttaaatataaaaacaagcgttgaaatttggcattcgttttatttaccttttcttactaaatctttggcatatgctcaagtcacactttcaagctgttctcctgtaactgttaaaaagcagaagctgacactctgaggagctgaatcctaagacccrkggagctgagatttgtgaaaatgaattcaggcataattacaataaaatcacaagaattgggaccactgagttggtaggtgtacagattggtagaaataacatgatcttgactttagtttgcatgatctttgggctcagttcaagcctgtctatcttaacatgcctaactctgtttattaagtcatcttattctggtccatatgtactttataaactttatttatttctccaaagaccatggacaaatatctgtcttcctctgttcttcacaataatattttgagtaggtattagatccaga

SEQ ID NO: 4978 - DNA, 600 bp, Chicken  19866894108298_1
attattctagtttttaaatataactattccccacctccctgcaccatgaaaactgatagtacaaatgggcaccatttggttttttgaaacagattttcacaggacagggagggaacaaagcggactgagtgatttttggagtgccagctcctggaataggatttgctttctgtggccccgagcaacccacctcctcctgtcccactgccacctacaacacgaacaccaaagctccctttttaacacaaatatagcagcatatcaaagcgtggcatttagcagcaggggaggaaaggcaayggagtgcagtggtaggtgagggaaagaacaataacagttttataacagttttttcgctacattcttgtggatctatggcagcagaaactttttacaattttttttttcggggcttttttgtacaacgccaatactttacctctcccttagtaatttttttttgtgtaataaataaatatatacacgaacacacacactttgtactctctctcattctccagctataaatatgcaaattcctttaaaataccagaccctaattttgaaaagtaactagaagtgcataatatacaaaagacc

SEQ ID NO: 4979 - DNA, 600 bp, Chicken  19866894108303_1
acagaattctcacttgaccccttccccacctcgcagctgtactgaaaataagactctatttaatattgtatttgatgttgatgattgagtttgtcagtctaaacaaggagtgaatgggcatggaaacagaaactccttttcctcctcagccatgttttcggagaagcatgcggatggttacattatcactgaacaattgtgtgttttctatagttactcatagttaaacagcaagctctcaactttctcagcagaaaactaatacaaaacatcctaaaagataatgatgagactttgccrtttcttaccagtcctaccgaagcctgcatgccagacctgcccagcagtggaggaactcttcacgcacaaaagacttctcgaagttttctgtgacagtaatttcggtaagtccttgttaatatggctgctattaaactatcagttctccttctaaaatgctttaaaattaggattaaaatagctatcagcttctgctgggatttcaaaatcttcatcctgagagcttggatactgagtcaactttaggttatttttcagaatatgttctttctgagctaaatttaaggatttattttgcac

SEQ ID NO: 4980 - DNA, 600 bp, Chicken  19866894108305_1
tttctctctatcttattatcttaaaaaatcagataatatcagatcatggcattaaaatatcctgtctttctccagtctgactaactatagagaaacctgtgaccagtctaggaatgtctggaatagaccttagagacctcaccatctagcaaattacagtaatcaagttttttgcttgagaaaaactacttcttacacaaatactcacacaaatacataaagcttcactcatttgcctcagaaatcattattttaaatgtaacgaccattggaagagaacaataagacatttatctaaaygggtactacagaaaagaaggagacagagtctttagcagggtctgtggtgatagggcaaggggaaatggtttcaaacttaaagagggtagatttaggttggatataaggaaaaactctaaagtgagggtggtgaggcactggaacatgttgcctagtgatttggtggatgccttgtccctggagattttctatgccaggctggatcaggctctgagcaacctaatctagctgtggtgaccctgttcattgaaggggagttctagatgacccttaaggtcccttccaactctaaggattcta

SEQ ID NO: 4981 - DNA, 599 bp, Chicken  19866894108306_1
  misc_feature (1)..(118): n is any nucleotide
nnnnnnnnnnnnnnnnnnnnnnnnnnnnnnnnnnnnnnnnnnnnnnnnnnnnnnnnnnnnnnnnnnnnnnnnnnnnnnnnnnnnnnnnnnnnnnnnnnnnnnnnnnnnnnnnnnnnnncgtatcgcagggatgctggctagaaatgttccaccctatccaggtggctgcctttgtgtgatattcatgctcatcaggaaattaattactccttccagcaggctgcctgagccaggaggattgcctcttgtacctggagctcctcctgggggtggtgtgtgcatgagcaagtctgtctgcaygcctcaccgagatgtgctgtgcacacaggtgcgtgcaggcagcaggagatgtgtttgactgcaggcacagagagggagatacagaggtgatgcagaaattgggaagactccttgctctgtgtgtgtgagagagagagggtgcccttggtcatactcagtggctttgtctgcatgagagagctcccagataaggagagctgtatgcagggaacagaggttgcagggtaggtggcaatgcattgcttgtctttaccttggtgtgtgaagagcatacagatggcccaggccatgcccccatg

SEQ ID NO: 4982 - DNA, 600 bp, Chicken  19866894108309_1
tgctgggacttctaattattaccaagcagaaaaatcaatttacttcattttttttgcttctaagaaccattaaaaattatgatttctataaaaattttgaagcaccaggcttcagcacttctctctgcaggctatcactgattctaatcctttcaatatttacatataatttagcaacaaagagattttcttcctccaaattcatctggctgatagctcaattaaattggtaaacacttgagtttttaaatgaattttaacaacaaaaaatgaatacattctgggtgtttcatataaaakaatctgcaatcatggaaaaaaataaaatgtgtatgggaacctaaggactacaaaataatactgaggctattttgaaagtyctttttcttcttgccttaaaaatacttaagaccacactgagtcatgtttagcaagaagaaacaytttttaaaaacttttgtctatcaaactgcatgttcaattctgaagttactctgtctcctattacttcacagcyactgtattctttctggaaaataaaaattacagtattatgatgcagttctgaaagtaatgcctcctatttaattatgttggccc

SEQ ID NO: 4983 - DNA, 600 bp, Chicken  19866894108309_2
gatttctataaaaattttgaagcaccaggcttcagcacttctctctgcaggctatcactgattctaatcctttcaatatttacatataatttagcaacaaagagattttcttcctccaaattcatctggctgatagctcaattaaattggtaaacacttgagtttttaaatgaattttaacaacaaaaaatgaatacattctgggtgtttcatataaaakaatctgcaatcatggaaaaaaataaaatgtgtatgggaacctaaggactacaaaataatactgaggctattttgaaagtyctttttcttcttgccttaaaaatacttaagaccacactgagtcatgtttagcaagaagaaacaytttttaaaaacttttgtctatcaaactgcatgttcaattctgaagttactctgtctcctattacttcacagcyactgtattctttctggaaaataaaaattacagtattatgatgcagttctgaaagtaatgcctcctatttaattatgttggcccacagtgtcagaggcagatggtggtggtatagcagcagaggttcaaccttcccaccaatattccattacaygttgctgtgt

SEQ ID NO: 4984 - DNA, 600 bp, Chicken  19866894108309_3
taatcctttcaatatttacatataatttagcaacaaagagattttcttcctccaaattcatctggctgatagctcaattaaattggtaaacacttgagtttttaaatgaattttaacaacaaaaaatgaatacattctgggtgtttcatataaaakaatctgcaatcatggaaaaaaataaaatgtgtatgggaacctaaggactacaaaataatactgaggctattttgaaagtyctttttcttcttgccttaaaaatacttaagaccacactgagtcatgtttagcaagaagaaacaytttttaaaaacttttgtctatcaaactgcatgttcaattctgaagttactctgtctcctattacttcacagcyactgtattctttctggaaaataaaaattacagtattatgatgcagttctgaaagtaatgcctcctatttaattatgttggcccacagtgtcagaggcagatggtggtggtatagcagcagaggttcaaccttcccaccaatattccattacaygttgctgtgtgacagatggcagcagaggggtactctgacagaatggcatctgacatggaagtgcagataaagca

SEQ ID NO: 4985 - DNA, 600 bp, Chicken  19866894108309_4
tcaattaaattggtaaacacttgagtttttaaatgaattttaacaacaaaaaatgaatacattctgggtgtttcatataaaakaatctgcaatcatggaaaaaaataaaatgtgtatgggaacctaaggactacaaaataatactgaggctattttgaaagtyctttttcttcttgccttaaaaatacttaagaccacactgagtcatgtttagcaagaagaaacaytttttaaaaacttttgtctatcaaactgcatgttcaattctgaagttactctgtctcctattacttcacagcyactgtattctttctggaaaataaaaattacagtattatgatgcagttctgaaagtaatgcctcctatttaattatgttggcccacagtgtcagaggcagatggtggtggtatagcagcagaggttcaaccttcccaccaatattccattacaygttgctgtgtgacagatggcagcagaggggtactctgacagaatggcatctgacatggaagtgcagataaagcaaaggtgtgtcactgaattcctccatgcagaaaaaaatggcactcactgacattcactgatgcttgctgaatgt

SEQ ID NO: 4986 - DNA, 600 bp, Chicken  19866894108309_5
tttgaaagtyctttttcttcttgccttaaaaatacttaagaccacactgagtcatgtttagcaagaagaaacaytttttaaaaacttttgtctatcaaactgcatgttcaattctgaagttactctgtctcctattacttcacagcyactgtattctttctggaaaataaaaattacagtattatgatgcagttctgaaagtaatgcctcctatttaattatgttggcccacagtgtcagaggcagatggtggtggtatagcagcagaggttcaaccttcccaccaatattccattacaygttgctgtgtgacagatggcagcagaggggtactctgacagaatggcatctgacatggaagtgcagataaagcaaaggtgtgtcactgaattcctccatgcagaaaaaaatggcactcactgacattcactgatgcttgctgaatgtttatggagaccaaaatgtggatgtgagcacagtgaggagctggactgtgcagacaatgacactcatattcacaatgacactcatattcacagcagctacgaaacagtgggtcacttctgatggtgcaaaagcgggacacaggctcttgttcat

SEQ ID NO: 4987 - DNA, 599 bp, Chicken  19866894108310_1
  misc_feature (1)..(186): n is any nucleotide
nnnnnnnnnnnnnnnnnnnnnnnnnnnnnnnnnnnnnnnnnnnnnnnnnnnnnnnnnnnnnnnnnnnnnnnnnnnnnnnnnnnnnnnnnnnnnnnnnnnnnnnnnnnnnnnnnnnnnnnnnnnnnnnnnnnnnnnnnnnnnnnnnnnnnnnnnnnnnnnnnnnnnnnnnnnnnnnnnnnnnnnnnnccattatcctgctttggctgtacttggtgctgtacaaacacataactctcacgccttgtgcttctaactctcacattttaagttctttactctttgcaactgggaccttctgcrtcttcatgcttttaaatayttccttacttcacagtaataaaagagcatatctgacaagacgttcattgtcttccttctmatgctcctgaaaaagaacccatgactcagatttcagaacrcagcacagaacggttgaatataaatcctttctgaaaggtctccctttcaatgtctgctttactgatmtcccagcaactgctcttgaggaccaaaagaagatgtgtcttggtcacatagtatcatcacatctctggacatctaaaaattgattccaatctttaaatacttcagaacactcc

SEQ ID NO: 4988 - DNA, 599 bp, Chicken  19866894108310_2
  misc_feature (1)..(167): n is any nucleotide
nnnnnnnnnnnnnnnnnnnnnnnnnnnnnnnnnnnnnnnnnnnnnnnnnnnnnnnnnnnnnnnnnnnnnnnnnnnnnnnnnnnnnnnnnnnnnnnnnnnnnnnnnnnnnnnnnnnnnnnnnnnnnnnnnnnnnnnnnnnnnnnnnnnnnnnnnnnnnnnnnnnnnnnccattatcctgctttggctgtacttggtgctgtacaaacacataactctcacgccttgtgcttctaactctcacattttaagttctttactctttgcaactgggaccttctgcrtcttcatgcttttaaatayttccttacttcacagtaataaaagagcatatctgacaagacgttcattgtcttccttctmatgctcctgaaaaagaacccatgactcagatttcagaacrcagcacagaacggttgaatataaatcctttctgaaaggtctccctttcaatgtctgctttactgatmtcccagcaactgctcttgaggaccaaaagaagatgtgtcttggtcacatagtatcatcacatctctggacatctaaaaattgattccaatctttaaatacttcagaacactccagaacttaaaatcttgaaa

SEQ ID NO: 4989 - DNA, 599 bp, Chicken  19866894108310_3
  misc_feature (1)..(107): n is any nucleotide
nnnnnnnnnnnnnnnnnnnnnnnnnnnnnnnnnnnnnnnnnnnnnnnnnnnnnnnnnnnnnnnnnnnnnnnnnnnnnnnnnnnnnnnnnnnnnnnnnnnnnnnnnnnccattatcctgctttggctgtacttggtgctgtacaaacacataactctcacgccttgtgcttctaactctcacattttaagttctttactctttgcaactgggaccttctgcrtcttcatgcttttaaatayttccttacttcacagtaataaaagagcatatctgacaagacgttcattgtcttccttctmatgctcctgaaaaagaacccatgactcagatttcagaacrcagcacagaacggttgaatataaatcctttctgaaaggtctccctttcaatgtctgctttactgatmtcccagcaactgctcttgaggaccaaaagaagatgtgtcttggtcacatagtatcatcacatctctggacatctaaaaattgattccaatctttaaatacttcagaacactccagaacttaaaatcttgaaaatagagcattcttaggtagaaatgcagagcacacagcatagtactcgtgtaactttcact

SEQ ID NO: 4990 - DNA, 599 bp, Chicken  19866894108310_4
  misc_feature (1)..(67): n is any nucleotide
nnnnnnnnnnnnnnnnnnnnnnnnnnnnnnnnnnnnnnnnnnnnnnnnnnnnnnnnnnnnnnnnnnnccattatcctgctttggctgtacttggtgctgtacaaacacataactctcacgccttgtgcttctaactctcacattttaagttctttactctttgcaactgggaccttctgcrtcttcatgcttttaaatayttccttacttcacagtaataaaagagcatatctgacaagacgttcattgtcttccttctmatgctcctgaaaaagaacccatgactcagatttcagaacrcagcacagaacggttgaatataaatcctttctgaaaggtctccctttcaatgtctgctttactgatmtcccagcaactgctcttgaggaccaaaagaagatgtgtcttggtcacatagtatcatcacatctctggacatctaaaaattgattccaatctttaaatacttcagaacactccagaacttaaaatcttgaaaatagagcattcttaggtagaaatgcagagcacacagcatagtactcgtgtaactttcactcatattatataaactgtacagaaataatctcctggcattt

SEQ ID NO: 4991 - DNA, 600 bp, Chicken  19866894108310_5
ccattatcctgctttggctgtacttggtgctgtacaaacacataactctcacgccttgtgcttctaactctcacattttaagttctttactctttgcaactgggaccttctgcrtcttcatgcttttaaatayttccttacttcacagtaataaaagagcatatctgacaagacgttcattgtcttccttctmatgctcctgaaaaagaacccatgactcagatttcagaacrcagcacagaacggttgaatataaatcctttctgaaaggtctccctttcaatgtctgctttactgatmtcccagcaactgctcttgaggaccaaaagaagatgtgtcttggtcacatagtatcatcacatctctggacatctaaaaattgattccaatctttaaatacttcagaacactccagaacttaaaatcttgaaaatagagcattcttaggtagaaatgcagagcacacagcatagtactcgtgtaactttcactcatattatataaactgtacagaaataatctcctggcatttgcctggaatgacagccatcatttcctacacatttatttaaaaacttacgtagaaacaaacacaaacgt

SEQ ID NO: 4992 - DNA, 599 bp, Chicken  19866894108316_1
  misc_feature (1)..(170): n is any nucleotide
nnnnnnnnnnnnnnnnnnnnnnnnnnnnnnnnnnnnnnnnnnnnnnnnnnnnnnnnnnnnnnnnnnnnnnnnnnnnnnnnnnnnnnnnnnnnnnnnnnnnnnnnnnnnnnnnnnnnnnnnnnnnnnnnnnnnnnnnnnnnnnnnnnnnnnnnnnnnnnnnnnnnnnnnnnaccgaggtggcctgcagggcagcagcacgtgggggcacactgctgtgaaacgccttctgaccaggtaaaaaaaagtgcatgggaccacttagaaaaacagcttcaaaatgataacccagcagatgcagtstccatcacaggcggaagcaccgctgcttaaattggctggaagatgaagaaatgagaccccagatttcctcacgtgaaacgagagcagcgttaagcaacccatgcaggtcatccacaggagatgacttcagcgccataccccgagctggtggcagtcacactgcgtgtgcacacggtgcagtgattgctgcacgcattacagacaacgagggcaccacagtcacacacatagaggtgctgttggtactcactggtgaaaggctgccatcgtgttctccaggttctccccagcacctatag

SEQ ID NO: 4993 - DNA, 600 bp, Chicken  19866894108322_1
aaacatactgaaactgtaagagccaaatgcaacaacatcctcctgctgtgccgttagctttttccaaatgctgagatattcacaggtcgtgctctgcctctgcaatacagaggagagaaaaagcaaaggcacttctggactgcgggcagcagaaagagaaatcatgggggagtgaagtggaagggtaaagcaatgagatgtgaaggatttaactactaaatctatgtcctgccatcacaggccctggaaagtgcaaggcagaggtcctcatctccaacctactgcttggcagctgtaagraaagggacctggaatggctcagtgtgatacaagtgtatccaaataggatctctgttttgtgctgtatattgaattaatttgcctgatggcagcctattgctttatgtttctgatgcccctgaggagagggcaggaaaccttccctgcatcttagctcaagggcttgctttgggcacacttcagtccctgtccccttattttcctgtgctggcaagcatgatgtcggtcactgggacgtgttcaatgacaggcagagcctggccagctggaaagaagtcctttggctttgcttagatgcat

SEQ ID NO: 4994 - DNA, 599 bp, Chicken  19866894108326_1
  misc_feature (1)..(73): n is any nucleotide
nnnnnnnnnnnnnnnnnnnnnnnnnnnnnnnnnnnnnnnnnnnnnnnnnnnnnnnnnnnnnnnnnnnnnnnnncaatgtggtgttgacttggaattagacaggacacacaactgaattacacttctaaacactatgatccacaaatgtaggcagaggagagagaacagtgcttaaaggttttaggttttgagttattacttatgaggttaagttaatgtttgaaagaaatttctgcaatgttagtagaagaaaggagtgtattgcacagagtgtattagtttatgacatatcatagcgaktgcactgccataaatacggcacagatcgtcacctccaggattgtgttaatgggtttagataaggagaactgcctctcatgggagatggtgagaaatcagttggtcttcattaaacgcttatccttaaaaggctcacgtacttaggaatttatgacctgtttcctccctttgctgcagtatacttaactatgtacctctaattattaaagccttcacagtagtaagtggcttactccacattttacaaggcagaaagccttgtacagtgcatgaagtacagttgcagtgtgttaagtgac

SEQ ID NO: 4995 - DNA, 600 bp, Chicken  19866894108328_1
tctaactgcattattggaaatggttggagcactgtaatatatgggggagagtttttgtggtccttgagaaatcctttattcataaagagctaaaaagtccatttaatgctttcaggaaagaaactttgaagagatttttctgcttcaggagagtgggagtcatgaatacttaactctaggtgcattcaagagagagatgtgggctgtggaggtgggaactgtgcttgttgtgaggcaaaaaataattaaaggtcaggaaataatttgtagttcaacaggaaaatctcttgaatactcttyactcctaatgttattaccctctgtgaagcaggtattaacactctgtgttgccccaattagtttactaggccrtgtattccaggtaaactctacttgcagttgacccggtgtgattaatgtggcattcagatgaacaactgaacatcatgtagacactgctgtgggtcagtgaatgtcaggaagcaaagacaggttgggagcwacagccaaaaataaggaatagaagtatgagctgtgtgtgagaaaagctttgtagaatttctggcccaaatgaaatgggtatggaagcagagagtctgg

SEQ ID NO: 4996 - DNA, 600 bp, Chicken  19866894108328_2
cctttattcataaagagctaaaaagtccatttaatgctttcaggaaagaaactttgaagagatttttctgcttcaggagagtgggagtcatgaatacttaactctaggtgcattcaagagagagatgtgggctgtggaggtgggaactgtgcttgttgtgaggcaaaaaataattaaaggtcaggaaataatttgtagttcaacaggaaaatctcttgaatactcttyactcctaatgttattaccctctgtgaagcaggtattaacactctgtgttgccccaattagtttactaggccrtgtattccaggtaaactctacttgcagttgacccggtgtgattaatgtggcattcagatgaacaactgaacatcatgtagacactgctgtgggtcagtgaatgtcaggaagcaaagacaggttgggagcwacagccaaaaataaggaatagaagtatgagctgtgtgtgagaaaagctttgtagaatttctggcccaaatgaaatgggtatggaagcagagagtctggtcaggaactgtaacttaaaatattaatactgacaaagaacaggagaacaactccacttactttatctcaagc

SEQ ID NO: 4997 - DNA, 600 bp, Chicken  19866894108328_3
gctgtggaggtgggaactgtgcttgttgtgaggcaaaaaataattaaaggtcaggaaataatttgtagttcaacaggaaaatctcttgaatactcttyactcctaatgttattaccctctgtgaagcaggtattaacactctgtgttgccccaattagtttactaggccrtgtattccaggtaaactctacttgcagttgacccggtgtgattaatgtggcattcagatgaacaactgaacatcatgtagacactgctgtgggtcagtgaatgtcaggaagcaaagacaggttgggagcwacagccaaaaataaggaatagaagtatgagctgtgtgtgagaaaagctttgtagaatttctggcccaaatgaaatgggtatggaagcagagagtctggtcaggaactgtaacttaaaatattaatactgacaaagaacaggagaacaactccacttactttatctcaagccattagctttgatttagtgcagccatggaagcctttcagtacttgccttagtgtcttcacactctgctttaatagcatttgtttaaatgaggagtggaccctcaagcaatatttctttttaacaggcaag

SEQ ID NO: 4998 - DNA, 600 bp, Chicken  19866894108333_1
cttgggagaaagaggttgcgacctcatccaaatataatccaggtgatccgagctttcacatcctctgtcccgttgctgcctggagccctcacagactatcctgatgttcttccagtgagcctgaatcccagagggatcggtcgcagccacacgctcttcttagtgatgaaaaagtaggtggggagaagcttgtcgggggctgggacttggtgggattgcccagcagggctgtgtgttctgctgctacatgggtcctgctcgggatttggcctgggttgctgccaaaagccagagcacacrcttggaaacatgcctcctgagagttgttgagatccttgagattttaactcttgttcaacaataaagacaagctgtccatgggagttactgccacaaaggaatgcagaacatgccccgaaaagtgaatgttgcctctaggtggaacatactgctggaggcagaggagaagcagtgatgagatttggtgtctctggctgtctcagttcagttttgtcttttgttgggtatggctgtgccactgatrtaagatcaccttctatttcccacttctctgttctgtgtgcgtctggaggagccctc

SEQ ID NO: 4999 - DNA, 600 bp, Chicken  19866894108333_2
tacatgggtcctgctcgggatttggcctgggttgctgccaaaagccagagcacacrcttggaaacatgcctcctgagagttgttgagatccttgagattttaactcttgttcaacaataaagacaagctgtccatgggagttactgccacaaaggaatgcagaacatgccccgaaaagtgaatgttgcctctaggtggaacatactgctggaggcagaggagaagcagtgatgagatttggtgtctctggctgtctcagttcagttttgtcttttgttgggtatggctgtgccactgatrtaagatcaccttctatttcccacttctctgttctgtgtgcgtctggaggagccctctgtcctctttgtagctcaagaaagtgttctttctctcgatttgcacttctytattaggctcctacagtctgtgtcagtgatctgtcccctctctgatgcaaggaataaaacctgtatgtatgtagatccctgtaagamggtgtacctggagaccctcacygtgctagttactcaaaaamgggaaggcatggcaaagttcaggaagaatttggcacttctaaatgcagcatatccccatccagac

SEQ ID NO: 5000 - DNA, 600 bp, Chicken  19866894108333_3
tgttcaacaataaagacaagctgtccatgggagttactgccacaaaggaatgcagaacatgccccgaaaagtgaatgttgcctctaggtggaacatactgctggaggcagaggagaagcagtgatgagatttggtgtctctggctgtctcagttcagttttgtcttttgttgggtatggctgtgccactgatrtaagatcaccttctatttcccacttctctgttctgtgtgcgtctggaggagccctctgtcctctttgtagctcaagaaagtgttctttctctcgatttgcacttctytattaggctcctacagtctgtgtcagtgatctgtcccctctctgatgcaaggaataaaacctgtatgtatgtagatccctgtaagamggtgtacctggagaccctcacygtgctagttactcaaaaamgggaaggcatggcaaagttcaggaagaatttggcacttctaaatgcagcatatccccatccagacagcactggggtcaaatgggaagggaaaagcttctgggatgctaattcaggtatcttccatgttctgactagctatccgtgcaccctgtgccagtatttgagggacaa

SEQ ID NO: 5001 - DNA, 600 bp, Chicken  19866894108333_4
gtggaacatactgctggaggcagaggagaagcagtgatgagatttggtgtctctggctgtctcagttcagttttgtcttttgttgggtatggctgtgccactgatrtaagatcaccttctatttcccacttctctgttctgtgtgcgtctggaggagccctctgtcctctttgtagctcaagaaagtgttctttctctcgatttgcacttctytattaggctcctacagtctgtgtcagtgatctgtcccctctctgatgcaaggaataaaacctgtatgtatgtagatccctgtaagamggtgtacctggagaccctcacygtgctagttactcaaaaamgggaaggcatggcaaagttcaggaagaatttggcacttctaaatgcagcatatccccatccagacagcactggggtcaaatgggaagggaaaagcttctgggatgctaattcaggtatcttccatgttctgactagctatccgtgcaccctgtgccagtatttgagggacaacagcccggatagccgcctctccaccatgatgattttgcagttgttggaaggtgtggaccatctcgttcgacacaggatagcacacag

SEQ ID NO: 5002 - DNA, 600 bp, Chicken  19866894108333_5
gaggagaagcagtgatgagatttggtgtctctggctgtctcagttcagttttgtcttttgttgggtatggctgtgccactgatrtaagatcaccttctatttcccacttctctgttctgtgtgcgtctggaggagccctctgtcctctttgtagctcaagaaagtgttctttctctcgatttgcacttctytattaggctcctacagtctgtgtcagtgatctgtcccctctctgatgcaaggaataaaacctgtatgtatgtagatccctgtaagamggtgtacctggagaccctcacygtgctagttactcaaaaamgggaaggcatggcaaagttcaggaagaatttggcacttctaaatgcagcatatccccatccagacagcactggggtcaaatgggaagggaaaagcttctgggatgctaattcaggtatcttccatgttctgactagctatccgtgcaccctgtgccagtatttgagggacaacagcccggatagccgcctctccaccatgatgattttgcagttgttggaaggtgtggaccatctcgttcgacacaggatagcacacagagacctgaagtctgacaacatc

SEQ ID NO: 5003 - DNA, 600 bp, Chicken  19866894108333_6
atttggtgtctctggctgtctcagttcagttttgtcttttgttgggtatggctgtgccactgatrtaagatcaccttctatttcccacttctctgttctgtgtgcgtctggaggagccctctgtcctctttgtagctcaagaaagtgttctttctctcgatttgcacttctytattaggctcctacagtctgtgtcagtgatctgtcccctctctgatgcaaggaataaaacctgtatgtatgtagatccctgtaagamggtgtacctggagaccctcacygtgctagttactcaaaaamgggaaggcatggcaaagttcaggaagaatttggcacttctaaatgcagcatatccccatccagacagcactggggtcaaatgggaagggaaaagcttctgggatgctaattcaggtatcttccatgttctgactagctatccgtgcaccctgtgccagtatttgagggacaacagcccggatagccgcctctccaccatgatgattttgcagttgttggaaggtgtggaccatctcgttcgacacaggatagcacacagagacctgaagtctgacaacatcttggttgagttcgattctg

SEQ ID NO: 5004 - DNA, 523 bp, Chicken  19866894108333_7
ttcaggtatcttccatgttctgactagctatccgtgcaccctgtgccagtatttgagggacaacagcccggatagccgcctctccaccatgatgattttgcagttgttggaaggtgtggaccatctcgttcgacacaggatagcacacagagacctgaagtctgacaacatcttggttgagttcgattctggtatgtagatcactgggtgtaagtctgtgtctatggacatagaaggttgtgctgtaacctgagggagaggtgcagtgttactaaagcagcgtgttgcacaatcaaagcmaatgttggcttgaagacatggcaggactgccacactcacactgctggaggtgccctggcattaggctgtgtcattcctcactggccaaacagcacagagcagttcttaaaatgctgctgcacccttccatggctgcacatctgttgaaaggcagggaactgacagagtattaaaaccaaaagcagcatttttgtcacaactttctcctgttggcccttctaac

SEQ ID NO: 5005 - DNA, 599 bp, Chicken  19866894108335_1
  misc_feature (1)..(32): n is any nucleotide
nnnnnnnnnnnnnnnnnnnnnnnnnnnnnnnntctgggagtgcagattgagtgtgactgactttgtctcctcaaccgtaatcaaactctactaaggtgataacatgacccaactggtataggatgatgcagatgatgcagatccatgaaaataatagttgtggattttttttttcctacttttctagatgcagggtctctctaaccaaagattcattatgtttgttctggaagagtgttcaaaacaactcaactttctgaaatattcagttttaagaaaaataacttattaaattgatgktgtttccaaaaactgttctgtggaaactcatttcatagaagggctcccaaactcacgcagatctccttgacttacaaggctttcagaagcggtcatcattcagggaagattctgtgagtggttttccatttctctggctgaatttaggaggtaaaaagcacagaaactatccttccagtgagagatgacagatcttcaagctgaactgcaagtttagatgagctttaaaggtgttacattttttaaaatactgaagaaaaatccagtttgttacacttgtactttatgagaaaaaaaag

SEQ ID NO: 5006 - DNA, 600 bp, Chicken  19866894108337_1
aagcaacctaaaaaatccagctgaaaaatccaggcattttaatgatgacaatgttaaataccatcttttggagatcttacagtaagtgtattttcaaatcagcaagcaagccactcattcctcagtctgtgtgtatttcatacgaatgtgcattatatgtaagctctacatttaatcacaactttattcattgcttagacatgagcgaagatgtgcgtgtgcaaatgttgagggaggagaggcagcagggttgctatttgtaagagcaaaatgtattgcttcagttctgagtagaaaaaygcatctcagcagagtgctagagaggggtatttttgccattgaggaatgttttccttctcaaaagcaagattacttctgtttgcattcagagatttaccactgacttccgtggaaagagagcagtgttcaatggtttgctgtgttgaagaattctggaaacttttacgtgatggagcaatcgtgtgataatattcagaagtcgttgggaagacagatgctaccactgttgatcaaaggatgccgtacatttggcaactcccctttctgctacgtttttgtgccgtgtgtgtttatagtttg

SEQ ID NO: 5007 - DNA, 600 bp, Chicken  19866894108344_1
cagtaaataaaatactacaatgtatggctttcctatgaaagtttcattcatttatctctgctccttactttatatttttttccccccagtaacggagtgaaggagaaagtaaacatagctcaggttcagaaaaccattaaaacagataatcacaccaaaaaaacccatcactttctacagtcatttaaatcacattgatgtcaggtcatccaaaaatgatatcacacacattttaggcttttatgacgtcaaatttgacaggaaagatgaggcaaagtttctcagaaacatttgaaacaraagtgtcaattttttgatccctccagaagagaaacgttagccctgacagctgcttgaagttgcacgtarccaagaaaactgtaattgaaattgtgttccttcacattctacaaaatatgtggctggaaacagtaaagaaaaagtgtgctatcgtagttcataatcacagtatggcagtgatgggaaatacttctcattaacaacaaatgcagctacagttcttgagtcatcattgcacaggaagtccagccttatcaagttcattttttttgcacatctattgatgtttgactgtgtttt

SEQ ID NO: 5008 - DNA, 600 bp, Chicken  19866894108344_2
ttatatttttttccccccagtaacggagtgaaggagaaagtaaacatagctcaggttcagaaaaccattaaaacagataatcacaccaaaaaaacccatcactttctacagtcatttaaatcacattgatgtcaggtcatccaaaaatgatatcacacacattttaggcttttatgacgtcaaatttgacaggaaagatgaggcaaagtttctcagaaacatttgaaacaraagtgtcaattttttgatccctccagaagagaaacgttagccctgacagctgcttgaagttgcacgtarccaagaaaactgtaattgaaattgtgttccttcacattctacaaaatatgtggctggaaacagtaaagaaaaagtgtgctatcgtagttcataatcacagtatggcagtgatgggaaatacttctcattaacaacaaatgcagctacagttcttgagtcatcattgcacaggaagtccagccttatcaagttcattttttttgcacatctattgatgtttgactgtgttttcctctctattttgctaagttctctttgctgttacatgataatgtacactctactgtactaccatcaaaa

SEQ ID NO: 5009 - DNA, 600 bp, Chicken  19866894108344_3
ctacaaaatatgtggctggaaacagtaaagaaaaagtgtgctatcgtagttcataatcacagtatggcagtgatgggaaatacttctcattaacaacaaatgcagctacagttcttgagtcatcattgcacaggaagtccagccttatcaagttcattttttttgcacatctattgatgtttgactgtgttttcctctctattttgctaagttctctttgctgttacatgataatgtacactctactgtactaccatcaaaagcatctggaaaggtggaagtgaagaaatgctctctggraaagttagcttaatgcttgcacttcagagccgcccataatcaacatttcatagcragttcctttattttcaggtccccagggtaaaagcagtaaattatgacttgaactaaacaagtcacacttggctccaaaatcagattttcctacctctagtttcaggtcccagaggtgggcagaggaaatcctggtcacagccaaagaagtcatttttggctctgaaatacattttcctgcttcacaagagccaaaccctaccattgagagcaccgtagctttaagcaatacttcaacatttcttt

SEQ ID NO: 5010 - DNA, 600 bp, Chicken  19866894108344_4
atcacagtatggcagtgatgggaaatacttctcattaacaacaaatgcagctacagttcttgagtcatcattgcacaggaagtccagccttatcaagttcattttttttgcacatctattgatgtttgactgtgttttcctctctattttgctaagttctctttgctgttacatgataatgtacactctactgtactaccatcaaaagcatctggaaaggtggaagtgaagaaatgctctctggraaagttagcttaatgcttgcacttcagagccgcccataatcaacatttcatagcragttcctttattttcaggtccccagggtaaaagcagtaaattatgacttgaactaaacaagtcacacttggctccaaaatcagattttcctacctctagtttcaggtcccagaggtgggcagaggaaatcctggtcacagccaaagaagtcatttttggctctgaaatacattttcctgcttcacaagagccaaaccctaccattgagagcaccgtagctttaagcaatacttcaacatttcttttatatattttgctttagcaacctgattcttcagcaatatgaaaccattttcaatc

SEQ ID NO: 5011 - DNA, 600 bp, Chicken  19866894108344_5
agtcatttttggctctgaaatacattttcctgcttcacaagagccaaaccctaccattgagagcaccgtagctttaagcaatacttcaacatttcttttatatattttgctttagcaacctgattcttcagcaatatgaaaccattttcaatcatacaaaattatgggtttggcctctctttcttaacacagtattgttattattaagtacacttatgaaccctaatcattgcttccttcctaacactgacaaagagttttagactcttctctttgtgacagcgagtgaatgtaagataycacgtgcttaaaattcttaagtggagcaactggaaaagaaacaaaattacattccttaaaggctctacacaaaataatgcaacatacaaaagcatacagttactgaaggagaccaaacgctccccttttaacacctgaagttgtagcatatatttacaacacacatatggagaacataatattggatattttacatcatatttggtgatgagtttcttgtccaggaatgatgtctgtatccaaaatgctacaattcaaaatatataacaggaattaatgagtagtatgttagcatcagat

SEQ ID NO: 5012 - DNA, 600 bp, Chicken  19866894108348_1
gaaatctggttttaactgtactccattaatacactttgactatgtatcactagtctatatacagaatcccgtgcctgtaactgaattatgacatagataatgttccataggccacctgcactcactcagggctgcaaatcacacttggccaaatacaggtgcctgctcaaccacctcaacttgaacatcgtttgcaaagggcctgaacaaaaattcctgtttagaagggtatgtgaagacacatcgtatgtgcagatcaaacatagatcactatccagagagcatttgccccaagacaaytgtggttaaataaaaaagtatcagctggactaaatagttagtgggtattttcacaattacttttgaaacaaaggaatgacatattgaaaatacatgaaaatctgtagcaagtaaagcaatcttggagtaagagatgtagcagtttcagtcttgtctggtgccaccagaaattcctccatggcatcaccatccttcctggtctggtcctaacaccctcccctgagataccacaggcatggcacccatccaggaagacagccagggagtcaagtggagaactctaggtgagtgagggtgcat

SEQ ID NO: 5013 - DNA, 599 bp, Chicken  19866894108349_1
  misc_feature (1)..(98): n is any nucleotide
nnnnnnnnnnnnnnnnnnnnnnnnnnnnnnnnnnnnnnnnnnnnnnnnnnnnnnnnnnnnnnnnnnnnnnnnnnnnnnnnnnnnnnnnnnnnnnnnnntaatttacattaaaatgctaatttaatttggagtagaagaactcaaccatcatttcttgtcttcaaagtatctttctcatcccattccagcacttcaaggaaactgttctagagtgagttcagggagtcctctcccccacatacagtggtctgttaaatgcaggatgcaacttcagctgaactcaacactgggacactggarctggaaaaatgccctgtaagtgttccttgaatcaagaagatttgagccaaatgagactgcagagtctcgtagtcattgctctgagttgcacaggcgatgagatggtgcaccttgcagtacatagtggggatagtgactcaggaagtaatgctcctggtataacataatacrttatcacagcttttcatccagcagccacctaatgcagaacacagygggagtcctctttacaaggacaaaaaggagtgctcactgccatgcaagcgcccaactttactcattttacttctgcactggtg

SEQ ID NO: 5014 - DNA, 600 bp, Chicken  19866894108349_2
ttctcatcccattccagcacttcaaggaaactgttctagagtgagttcagggagtcctctcccccacatacagtggtctgttaaatgcaggatgcaacttcagctgaactcaacactgggacactggarctggaaaaatgccctgtaagtgttccttgaatcaagaagatttgagccaaatgagactgcagagtctcgtagtcattgctctgagttgcacaggcgatgagatggtgcaccttgcagtacatagtggggatagtgactcaggaagtaatgctcctggtataacataatacrttatcacagcttttcatccagcagccacctaatgcagaacacagygggagtcctctttacaaggacaaaaaggagtgctcactgccatgcaagcgcccaactttactcattttacttctgcactggtgttccattcagcttttctccccttctccacttattgtccccatcaaccaaacccttaatagacccctccaagtccatccatcctgtgttaaatcccaggggaggctgtgccctcctragaggtgcagtgcttccaggagacacgtagtcctgtgcctcaacgtatgtgggygg

SEQ ID NO: 5015 - DNA, 600 bp, Chicken  19866894108349_3
ttcagggagtcctctcccccacatacagtggtctgttaaatgcaggatgcaacttcagctgaactcaacactgggacactggarctggaaaaatgccctgtaagtgttccttgaatcaagaagatttgagccaaatgagactgcagagtctcgtagtcattgctctgagttgcacaggcgatgagatggtgcaccttgcagtacatagtggggatagtgactcaggaagtaatgctcctggtataacataatacrttatcacagcttttcatccagcagccacctaatgcagaacacagygggagtcctctttacaaggacaaaaaggagtgctcactgccatgcaagcgcccaactttactcattttacttctgcactggtgttccattcagcttttctccccttctccacttattgtccccatcaaccaaacccttaatagacccctccaagtccatccatcctgtgttaaatcccaggggaggctgtgccctcctragaggtgcagtgcttccaggagacacgtagtcctgtgcctcaacgtatgtgggygggaaggtaaagagacacaggagctggagaagctgcttctcccctag

SEQ ID NO: 5016 - DNA, 562 bp, Chicken  19866894108349_4
agtacatagtggggatagtgactcaggaagtaatgctcctggtataacataatacrttatcacagcttttcatccagcagccacctaatgcagaacacagygggagtcctctttacaaggacaaaaaggagtgctcactgccatgcaagcgcccaactttactcattttacttctgcactggtgttccattcagcttttctccccttctccacttattgtccccatcaaccaaacccttaatagacccctccaagtccatccatcctgtgttaaatcccaggggaggctgtgccctcctragaggtgcagtgcttccaggagacacgtagtcctgtgcctcaacgtatgtgggygggaaggtaaagagacacaggagctggagaagctgcttctcccctagtgtacgatatgagctcagcccattccccctatgactcacactgttaggagactaattaagcagaggaatatctctgtatggattataaatagcctgagggagtacatagggtaaatcaaaggaagaccttgatcactgtcattggcagcttaaatcaggca

SEQ ID NO: 5017 - DNA, 508 bp, Chicken  19866894108349_5
crttatcacagcttttcatccagcagccacctaatgcagaacacagygggagtcctctttacaaggacaaaaaggagtgctcactgccatgcaagcgcccaactttactcattttacttctgcactggtgttccattcagcttttctccccttctccacttattgtccccatcaaccaaacccttaatagacccctccaagtccatccatcctgtgttaaatcccaggggaggctgtgccctcctragaggtgcagtgcttccaggagacacgtagtcctgtgcctcaacgtatgtgggygggaaggtaaagagacacaggagctggagaagctgcttctcccctagtgtacgatatgagctcagcccattccccctatgactcacactgttaggagactaattaagcagaggaatatctctgtatggattataaatagcctgagggagtacatagggtaaatcaaaggaagaccttgatcactgtcattggcagcttaaatcaggca

SEQ ID NO: 5018 - DNA, 600 bp, Chicken  19866894108352_1
catccaaacactcctctgctcaccatacttgaaaattaaacttaaagattcagcgaaaagtaagtattaaagccaagcaagttgctcccagaagcttttagtgtcattacatggggagaggataaaaagaaagctaaatatgagttcttgaacataagtacacacctctctcctccaactgatagccactagatatctaacaacagcatgaaaaccaccgaactggtaaggtaatttaaatgctcacctgctttcagaaggtgatcaatacagtgtcaatataaaaaacagtggcaacayyggcccttctgaacttttctgcatgaaacacacaatactgtgcagatgaggactacctgagatcccatagctggtattaagcagaagttgtttaaaggcastacataataccaacacaaattccatcttccagtataaagaacttgaatgaaattctgaggtttgaggaacacgtgcaggaggagatgagcaacgtatgttaagaactatgaagtatttggttgaaatcataactacttctcaaaatctgtgggaaatctctgccctcattattataatgaattacagaaatgaacacaa

SEQ ID NO: 5019 - DNA, 600 bp, Chicken  19866894108352_2
atccaaacactcctctgctcaccatacttgaaaattaaacttaaagattcagcgaaaagtaagtattaaagccaagcaagttgctcccagaagcttttagtgtcattacatggggagaggataaaaagaaagctaaatatgagttcttgaacataagtacacacctctctcctccaactgatagccactagatatctaacaacagcatgaaaaccaccgaactggtaaggtaatttaaatgctcacctgctttcagaaggtgatcaatacagtgtcaatataaaaaacagtggcaacayyggcccttctgaacttttctgcatgaaacacacaatactgtgcagatgaggactacctgagatcccatagctggtattaagcagaagttgtttaaaggcastacataataccaacacaaattccatcttccagtataaagaacttgaatgaaattctgaggtttgaggaacacgtgcaggaggagatgagcaacgtatgttaagaactatgaagtatttggttgaaatcataactacttctcaaaatctgtgggaaatctctgccctcattattataatgaattacagaaatgaacacaac

SEQ ID NO: 5020 - DNA, 600 bp, Chicken  19866894108352_3
tgtcattacatggggagaggataaaaagaaagctaaatatgagttcttgaacataagtacacacctctctcctccaactgatagccactagatatctaacaacagcatgaaaaccaccgaactggtaaggtaatttaaatgctcacctgctttcagaaggtgatcaatacagtgtcaatataaaaaacagtggcaacayyggcccttctgaacttttctgcatgaaacacacaatactgtgcagatgaggactacctgagatcccatagctggtattaagcagaagttgtttaaaggcastacataataccaacacaaattccatcttccagtataaagaacttgaatgaaattctgaggtttgaggaacacgtgcaggaggagatgagcaacgtatgttaagaactatgaagtatttggttgaaatcataactacttctcaaaatctgtgggaaatctctgccctcattattataatgaattacagaaatgaacacaaccttggcaagaggtgcctgaactacagcctaagggaaaataggcacacatgaatgtttccctagaaacaagcagcccaaatacctgccccgttaggccaac

SEQ ID NO: 5021 - DNA, 600 bp, Chicken  19866894108352_4
ggtgcctgaactacagcctaagggaaaataggcacacatgaatgtttccctagaaacaagcagcccaaatacctgccccgttaggccaacagctagggtaagccttctttcagcagagcagactggctgggggaatgaactgccatgctgtgttagtggccatgtagtaccataaaatcagaacattaatgaagacaagccagtctggaaagtttcctgttcatgctgacatgtacaataaaaagacaaagtaaaacactatctctagaattacctcctattagaagcagtcaaggacakcttagcgtcccttccctccccagcaaagattatttactttgcaatctagaactgcctagcratggcttgcactgtaagcagcacttttatagtttggtccttggtgtacacaggacagggctagggcacaaacgtattttcccataacctgctcactgattcacaaaaatactttcattcttgattgcagagagatttccaaataggcttaactgctttcatggatcagaacttcagactgccaagacttcttagcgtatcggacaccattctagcagacaggaaaaaggcctgtcagaa

SEQ ID NO: 5022 - DNA, 600 bp, Chicken  19866894108352_5
agcccaaatacctgccccgttaggccaacagctagggtaagccttctttcagcagagcagactggctgggggaatgaactgccatgctgtgttagtggccatgtagtaccataaaatcagaacattaatgaagacaagccagtctggaaagtttcctgttcatgctgacatgtacaataaaaagacaaagtaaaacactatctctagaattacctcctattagaagcagtcaaggacakcttagcgtcccttccctccccagcaaagattatttactttgcaatctagaactgcctagcratggcttgcactgtaagcagcacttttatagtttggtccttggtgtacacaggacagggctagggcacaaacgtattttcccataacctgctcactgattcacaaaaatactttcattcttgattgcagagagatttccaaataggcttaactgctttcatggatcagaacttcagactgccaagacttcttagcgtatcggacaccattctagcagacaggaaaaaggcctgtcagaacttgtaatggacttaacatggatgataatcaggctctggactatctcagctcactctacct

SEQ ID NO: 5023 - DNA, 600 bp, Chicken  19866894108359_1
cagggtgtgaagccaatcatcagacttgatgtgcctcataacatagctggtaaaacagtaacagattttggaggagaattaaaagctgcaaagagagcaagtagaaaggaagccagcagagagacttaagtaataaactaataaactaatatattctaacgtaaaagagactttcatcagttttagctggagaagatacacacagcaatgaagcattttaaaataatctcaaacgaagaccagtagaacttcccagagacatcatactgacaccaacatcacagcaacttgaaaaaaaaygagggctgctccaaaagtaatgcctcctattttattatattggcccacaacatcaggggtggatgttgttcaaatgtcagtagaggttgaaccttcctaccagtattctgatacagtttgttgccttgtgacagatggcaacasagggacagtctgataaaatggtgtctgaggygtgtcactgaattcctccatgaggaaagaattccacccactgacatttatcagtcgttgctgaaatcttatgaagcccaaacagtggawgcaagcacagtgaggcgctgagcagagcatttcacc

SEQ ID NO: 5024 - DNA, 600 bp, Chicken  19866894108359_2
actaatatattctaacgtaaaagagactttcatcagttttagctggagaagatacacacagcaatgaagcattttaaaataatctcaaacgaagaccagtagaacttcccagagacatcatactgacaccaacatcacagcaacttgaaaaaaaaygagggctgctccaaaagtaatgcctcctattttattatattggcccacaacatcaggggtggatgttgttcaaatgtcagtagaggttgaaccttcctaccagtattctgatacagtttgttgccttgtgacagatggcaacasagggacagtctgataaaatggtgtctgaggygtgtcactgaattcctccatgaggaaagaattccacccactgacatttatcagtcgttgctgaaatcttatgaagcccaaacagtggawgcaagcacagtgaggcgctgagcagagcatttcaccagcagtgacagtgatgtgagagacaagccatattcagcatggccatgtagattgttgtgagcacattatgcaggtccttgttcatggttggagaaaatctatagctaatggagatgactatggcaaaaaatagtgttctgcagc

SEQ ID NO: 5025 - DNA, 600 bp, Chicken  19866894108359_3
atcagttttagctggagaagatacacacagcaatgaagcattttaaaataatctcaaacgaagaccagtagaacttcccagagacatcatactgacaccaacatcacagcaacttgaaaaaaaaygagggctgctccaaaagtaatgcctcctattttattatattggcccacaacatcaggggtggatgttgttcaaatgtcagtagaggttgaaccttcctaccagtattctgatacagtttgttgccttgtgacagatggcaacasagggacagtctgataaaatggtgtctgaggygtgtcactgaattcctccatgaggaaagaattccacccactgacatttatcagtcgttgctgaaatcttatgaagcccaaacagtggawgcaagcacagtgaggcgctgagcagagcatttcaccagcagtgacagtgatgtgagagacaagccatattcagcatggccatgtagattgttgtgagcacattatgcaggtccttgttcatggttggagaaaatctatagctaatggagatgactatggcaaaaaatagtgttctgcagctgagaattagaattactgtgttctttgtatc

SEQ ID NO: 5026 - DNA, 600 bp, Chicken  19866894108359_4
tactgacaccaacatcacagcaacttgaaaaaaaaygagggctgctccaaaagtaatgcctcctattttattatattggcccacaacatcaggggtggatgttgttcaaatgtcagtagaggttgaaccttcctaccagtattctgatacagtttgttgccttgtgacagatggcaacasagggacagtctgataaaatggtgtctgaggygtgtcactgaattcctccatgaggaaagaattccacccactgacatttatcagtcgttgctgaaatcttatgaagcccaaacagtggawgcaagcacagtgaggcgctgagcagagcatttcaccagcagtgacagtgatgtgagagacaagccatattcagcatggccatgtagattgttgtgagcacattatgcaggtccttgttcatggttggagaaaatctatagctaatggagatgactatggcaaaaaatagtgttctgcagctgagaattagaattactgtgttctttgtatctattgtagtttccatgtaaataaattggaggcatcacttttggagcaacctatgtcccaacacaacacagccataggtcttagtatttt

SEQ ID NO: 5027 - DNA, 600 bp, Chicken  19866894108359_5
gcatttcaccagcagtgacagtgatgtgagagacaagccatattcagcatggccatgtagattgttgtgagcacattatgcaggtccttgttcatggttggagaaaatctatagctaatggagatgactatggcaaaaaatagtgttctgcagctgagaattagaattactgtgttctttgtatctattgtagtttccatgtaaataaattggaggcatcacttttggagcaacctatgtcccaacacaacacagccataggtcttagtattttagcaccataagtcaaaaaaaaaaaawggggtgctcagtagaagagaaaggctaaattaaattgatgtgtgatattttttcaaataaactaactttttaaatcaaattaggcagaattttacaatgctgatttgcaccgctctttgtaattcattaaggattagaaatacaaattttgaagaggaatgacggtacaaaacatctctctgtcacactctctccccttggcaagaagaatattagaaaaagctgcagaatacatacacaggagaatgagcaatttttacttgatcttggtggtagaattccacatttagagaggcagga

SEQ ID NO: 5028 - DNA, 600 bp, Chicken  19866894108365_1
gctgttagtaaggaagtggctcagaacagtgtttgtaatgaaatgcaattatgatgctttcaaatagtaagaacctaaaagttcctctgcaagagtctcataaaattcacctcattcattatatgttaggatcttgaggatggtactgagcacagtggggcatctgctcctgttgtctcctgagtgctgctctaagacacgtactattagagacagaaaactgctttcatactgtgataaacttctgaaaagtttcagtgaattgaaaacagctgaagtttgcttatggatccagcttcyatttaagctgaaaacctccaggttgacacactctcctcataaagcaggctttttcatctggarataaatccggagggtggatgttgtttcagaaatgccactgtgtctatcatcgtattgcttatttctgttttcttctgttcattccatccagcaaacccttctacagcaccagcttcctcatcaggcccaccttctttgaggaaggactcaaccccagtcatagcaaatgtggtgtcccttgcgagcacccctgctgcccagcctacggttaactccaacaatgttttacagggtagg

SEQ ID NO: 5029 - DNA, 600 bp, Chicken  19866894108365_2
atagtaagaacctaaaagttcctctgcaagagtctcataaaattcacctcattcattatatgttaggatcttgaggatggtactgagcacagtggggcatctgctcctgttgtctcctgagtgctgctctaagacacgtactattagagacagaaaactgctttcatactgtgataaacttctgaaaagtttcagtgaattgaaaacagctgaagtttgcttatggatccagcttcyatttaagctgaaaacctccaggttgacacactctcctcataaagcaggctttttcatctggarataaatccggagggtggatgttgtttcagaaatgccactgtgtctatcatcgtattgcttatttctgttttcttctgttcattccatccagcaaacccttctacagcaccagcttcctcatcaggcccaccttctttgaggaaggactcaaccccagtcatagcaaatgtggtgtcccttgcgagcacccctgctgcccagcctacggttaactccaacaatgttttacagggtaggggactgttgaagatgatttctctatttttaaatctctattcctggacatttgtatttgttccg

SEQ ID NO: 5030 - DNA, 600 bp, Chicken  19866894108372_1
attacagaggtgcgaaaatggaaggctttcaatttggagaacaaacccgaggagctggaactttatcgagctgagaaacagggggtggaaacgggggagaggatgggggcacgagctcagaaatattcctcctattcacgtcagaaaccaaacgttgtgactacttcctttagaggggaaggtgaaggtcttgccataaagcagggctgccccaagacacaagagctcccctctccatccccatctctgccatctccaccagccacgcagccaaacctcacctgatccatctgcaacccrtcccyggagcagcacagaggacaacatcacaccacaaagctgtctgccacaccaacacggagagcaaagcgctcctcccagccacgtttgggctggctaagcatcctcttttggatccttcctcccaagccccggccctgcgggccaacacaagggatgagcagctcatcttggcctctcttaagagcctccatgagctcgcaggctcgtggctttgcagcagcacctcctggatccccggccaagccgcgaccgcagctccccccaacgactgcccataaatcctccgagtcggtaaac

SEQ ID NO: 5031 - DNA, 600 bp, Chicken  19866894108372_2
agaggtgcgaaaatggaaggctttcaatttggagaacaaacccgaggagctggaactttatcgagctgagaaacagggggtggaaacgggggagaggatgggggcacgagctcagaaatattcctcctattcacgtcagaaaccaaacgttgtgactacttcctttagaggggaaggtgaaggtcttgccataaagcagggctgccccaagacacaagagctcccctctccatccccatctctgccatctccaccagccacgcagccaaacctcacctgatccatctgcaacccrtcccyggagcagcacagaggacaacatcacaccacaaagctgtctgccacaccaacacggagagcaaagcgctcctcccagccacgtttgggctggctaagcatcctcttttggatccttcctcccaagccccggccctgcgggccaacacaagggatgagcagctcatcttggcctctcttaagagcctccatgagctcgcaggctcgtggctttgcagcagcacctcctggatccccggccaagccgcgaccgcagctccccccaacgactgcccataaatcctccgagtcggtaaacagccg

SEQ ID NO: 5032 - DNA, 600 bp, Chicken  19866894108372_3
tgcttgagaatttcctctctgctcgcctcctggtttcagctctgagatcaccactctcagacctacagagtcggatggagatgaggcatggaaggacaagggcatccagaacgtgctgccctcctgcctacaccaagagcagcaaagagtgcccatggactcacagagccgtgttcgttgcctgctagtcaccaaccagtgttcagcaacctgcagatatcacccctgggcatcacagctctgacagcccccaagtgcaagccttggtgctccagctccacctcagcacagcagagaaaytttggggttcgatgcactgatttcagtcttctgactgcgtctctcaaagggcgaatctgaaacccgctgtctcacaaggaaaaaacacatagaagcctccagttcagatttggaactacagcaaggacacatcttttaacacatctctccatgcatgccttaggcaagtcattctccctctttattccttggcttccctgtctgcacaaacagggaccatgaaatttctcttcttcgtgaagtgctttaagatctacaggaacaaccacgacgctcaagcaagacccgacaccacgtctc

SEQ ID NO: 5033 - DNA, 600 bp, Chicken  19866894108372_4
catagaagcctccagttcagatttggaactacagcaaggacacatcttttaacacatctctccatgcatgccttaggcaagtcattctccctctttattccttggcttccctgtctgcacaaacagggaccatgaaatttctcttcttcgtgaagtgctttaagatctacaggaacaaccacgacgctcaagcaagacccgacaccacgtctcagtaatgagtatttcaatccagcccctcaagctttccctcaccacctgatttggagagaatttttgctcttgttttttaattaaaakgctgtttcgagttgcgaacgtgacagccagcagaggacagaaggaaggcaaacacgggggatgccaccaaagagttctgcagcctggagagctcacggagatgaggtacagaaagccatgggcttaagggggaaaatatcggcttctgggaattcgtttgctgtaaaaatggagatattcctcatgcacatcacaagagtcattacatccacatcccgcgtgcactctgcggagcgcaggtactattatttatcactcagtggttatttcccacgtggcagagacacagagccacctcaa

SEQ ID NO: 5034 - DNA, 581 bp, Chicken  19866894108372_5
gggtcccatcactataccctatgccaccggcgccggtgaggacaaggagatgctaccccacacctggcaggctggaaggtgccacctggctgcagaagatggccaccttggccacattaagaagggacgaggcagatggatgggccgagacagacagaagaacgccacgggcagcagaatgacctgcttgacagatttccctaccgatcaaagctaactttgctcaggggttttgacatctgattaattacatcgcaccagctcgctccgaaggttccgtttcagcagccctcacctccygtgctcatggggctctgcagcacagcccggtgccagcagaggaaggacggtgggagggcagctctgccaaatgccctggtctgtgtccctgcatgccctgagataaggaggggacggctgggagcagagcccctttgtctgcagagcgtttgtcgcgggcagatagggcgcatccgcctcacgctgacattttggtgaccaaattaacatgcgccgccatggagactaaatgtcattagcctcattagaagcgatcgcgttaaaataaagacaaaaaaaaa

SEQ ID NO: 5035 - DNA, 600 bp, Chicken  19866894108387_1
ggttaccagcagccaagttaaaaacagtaaccatgtcagccactccaaaaacctggtaacatctgagaatgagttccatgagtttgtgctctgcatttaaacacaaagaacttcaccatctacttacagccaagcatatggccggtctacaagtagaagtgctcattaatttgacaaaaaagcaggagagtctagttatttatgctcagacttgaattttagtgaccgtgacaacctggtaacaggcaaattataaagcttcctgtatttcaaatagatacaacttgaaagcagcagttrctcacaataacccgtgagttccaacaaatccaaattatggtaaaatcaaagtccaaactcaactatgtaggatttaacacggacacaattgcactaacaatgaggaggagaggcaggccgctcaaggtttttgaaaactttccagtactcttccattatggcaaaagtagacatgcaaaattttaaacaatctcttctcttgttcccaaacaagagcacaagaacacaagttatgtttcaagtatctaaaaaatatacacttcttgtaactgctgctaccacctcaaatttgtcagctat

SEQ ID NO: 5036 - DNA, 600 bp, Chicken  19866894108389_1
ctttcattcaatcaacagtctcatcagggcacaaaaaaatcctaaattgtttttaacagtttaactcactagaagtgtaggttcaacaggtagtatggagataattattctgcgtgcttttcaagcatgtcaggtgctgaacaaagtagtggtcagtgatacaacgtgactgcacttcagggttcaagtcttatgtaacttctgatagaaaactcaaaaatgtgacaagggttccacaagaatctttccacactgtgtaaattgatcttcttatgacattttactagaatttaaaaagcmtttaatagactttaaaaaaactatyaaaaactgaatgaaaattaactaaatactggggaattaaaacaatgttgtcacgtgtcttggctttctgtgatttccagatctagttatgatcagtgtgtaagcttaaaagcagaagaattctctgaatactagagtgacatctgaatttctagattatactttttttccccttctgctttatcaaataccatttcagttttgagggcagaattcagttcttggtaagatgcatgcaatatttactcctgcattatgttttgaagaatatgaagt

SEQ ID NO: 5037 - DNA, 600 bp, Chicken  19866894108389_2
agggcacaaaaaaatcctaaattgtttttaacagtttaactcactagaagtgtaggttcaacaggtagtatggagataattattctgcgtgcttttcaagcatgtcaggtgctgaacaaagtagtggtcagtgatacaacgtgactgcacttcagggttcaagtcttatgtaacttctgatagaaaactcaaaaatgtgacaagggttccacaagaatctttccacactgtgtaaattgatcttcttatgacattttactagaatttaaaaagcmtttaatagactttaaaaaaactatyaaaaactgaatgaaaattaactaaatactggggaattaaaacaatgttgtcacgtgtcttggctttctgtgatttccagatctagttatgatcagtgtgtaagcttaaaagcagaagaattctctgaatactagagtgacatctgaatttctagattatactttttttccccttctgctttatcaaataccatttcagttttgagggcagaattcagttcttggtaagatgcatgcaatatttactcctgcattatgttttgaagaatatgaagtgctgctatttttatgcatactgaaa

SEQ ID NO: 5038 - DNA, 600 bp, Chicken  19866894108391_1
caggggggtggaactgggtgggctttaaggttccttccaacctatactgttcagtgattctatgattctatgatatactcaccagcttcagtcccaccaccccactgctgccctgtttgtaaaagttcatgtatttatattcaaagacaatgcctctgacctacagagcccttcagccaaacctctgcaggctggaagcactgccacaggcttgccctgtgtacttccctgacgttgactaatggcagccaccagaaactgtgaaccttgggctaacccagtgccattcatcttatgtgytatggtatttcaaaagctgaggaagtaatttatcttagattatctatcccagtacttacaaaaaaaaaaaaaaagaagtgaaatatatacagtcagcagccacacagtaaaggtctttaagaatgggatccatctttcctaacttgaggtttctgtagagctaaggggctgctagccagtaaagccaccrggatttacgatacatccacctaatcaaatgcttcagtgtgagatggctcagctgtactgagcaaccyccagggagcggggaggagagccaagatgcctagcttggatgca

SEQ ID NO: 5039 - DNA, 600 bp, Chicken  19866894108391_2
tatgattctatgatatactcaccagcttcagtcccaccaccccactgctgccctgtttgtaaaagttcatgtatttatattcaaagacaatgcctctgacctacagagcccttcagccaaacctctgcaggctggaagcactgccacaggcttgccctgtgtacttccctgacgttgactaatggcagccaccagaaactgtgaaccttgggctaacccagtgccattcatcttatgtgytatggtatttcaaaagctgaggaagtaatttatcttagattatctatcccagtacttacyaaaaaaaaaaaaaagaagtgaaatatatacagtcagcagccacacagtaaaggtctttaagaatgggatccatctttcctaacttgaggtttctgtagagctaaggggctgctagccagtaaagccaccrggatttacgatacatccacctaatcaaatgcttcagtgtgagatggctcagctgtactgagcaaccyccagggagcggggaggagagccaagatgcctagcttggatgcaggcatttacataggatggcaggtgagcaccgtgctccgaataaaaaatacagtagtccag

SEQ ID NO: 5040 - DNA, 600 bp, Chicken  19866894108391_3
gctggaagcactgccacaggcttgccctgtgtacttccctgacgttgactaatggcagccaccagaaactgtgaaccttgggctaacccagtgccattcatcttatgtgytatggtatttcaaaagctgaggaagtaatttatcttagattatctatcccagtacttacaaaaaaaaaaaaaaagaagtgaaatatatacagtcagcagccacacagtaaaggtctttaagaatgggatccatctttcctaacttgaggtttctgtagagctaaggggctgctagccagtaaagccaccrggatttacgatacatccacctaatcaaatgcttcagtgtgagatggctcagctgtactgagcaaccyccagggagcggggaggagagccaagatgcctagcttggatgcaggcatttacataggatggcaggtgagcaccgtgctccgaataaaaaatacagtagtccagaattcagtgaggacgaattccaacacaacagcaacagtgacagtcacaccaatatgtagctggggaacatggataaaaatagaacctgtgggaaaaagccacattctgagggactacaataaccatgggt

SEQ ID NO: 5041 - DNA, 600 bp, Chicken  19866894108391_4
actgtgaaccttgggctaacccagtgccattcatcttatgtgytatggtatttcaaaagctgaggaagtaatttatcttagattatctatcccagtacttacaaaaaaaaaaaaaaagaagtgaaatatatacagtcagcagccacacagtaaaggtctttaagaatgggatccatctttcctaacttgaggtttctgtagagctaaggggctgctagccagtaaagccaccrggatttacgatacatccacctaatcaaatgcttcagtgtgagatggctcagctgtactgagcaaccyccagggagcggggaggagagccaagatgcctagcttggatgcaggcatttacataggatggcaggtgagcaccgtgctccgaataaaaaatacagtagtccagaattcagtgaggacgaattccaacacaacagcaacagtgacagtcacaccaatatgtagctggggaacatggataaaaatagaacctgtgggaaaaagccacattctgagggactacaataaccatgggttaaacggcaccatttgaccagcatcccaaaaacatccaaaaatccctagcggggttcaaagccttgc

SEQ ID NO: 5042 - DNA, 600 bp, Chicken  19866894108393_1
tcagtgcagaaatttttcctaatacccacccaaaatctcctctgctgcaagttgaggccgtttcctcttgtccaatttcacagaaaaaaagatataaataaaaagaatgatagcctacatttacagtaatagaacatagggtttaatttttgtgtgtggtgctattgctgtaagtcaagcaacagaactatgcttccagttcagcatccagaagctgtattgatgataaaagtagaagatcctgattgctgggggctagggatgaacatgttaagttccacagcagaccacgggttccartaaggctggggaatgaagctattaactatttagtagataccagaactagttacccaaatataaattattttaaaggacctttaggtattgtatgccggtagttgggaccacaggattagatgtgaaactggaaatttaacaaatgagtttttgtgtgcgccagaatgccctttacttctcatgggatgggatgtgttgaacaaatggggagctcggatccaaatctttatgagaacaaggattagatacacatcccacaagataatcctcgcagacaccagtctgtttgttacaggaacg

SEQ ID NO: 5043 - DNA, 600 bp, Chicken  19866894108393_2
aggtattgtatgccggtagttgggaccacaggattagatgtgaaactggaaatttaacaaatgagtttttgtgtgcgccagaatgccctttacttctcatgggatgggatgtgttgaacaaatggggagctcggatccaaatctttatgagaacaaggattagatacacatcccacaagataatcctcgcagacaccagtctgtttgttacaggaacgcttgagagaagaaagcaaaggaaaacaagtaactgaaattccatctgaaattcatgcagtagttccttttgtaagggagacmgaaaagccaaggaaagacaaatctgctgagccagtaaaagtagaatttatggcaggagttaaactggtaagacaaaaagaatatcctaagaagctggaggcctgtaytgggctaaaacctgtaactgaggatttcctaaagtaaggactgttacaagaatgccagcctgtatgtaaccctgttaaaaagccaygttctcaatattatcaattagcgcaagatttgagagctgttaatgaagtagttgccaatgtgcatcctgcagtttggaaccccaacattttgttgacaactagagtt

SEQ ID NO: 5044 - DNA, 600 bp, Chicken  19866894108393_3
gatgtgttgaacaaatggggagctcggatccaaatctttatgagaacaaggattagatacacatcccacaagataatcctcgcagacaccagtctgtttgttacaggaacgcttgagagaagaaagcaaaggaaaacaagtaactgaaattccatctgaaattcatgcagtagttccttttgtaagggagacmgaaaagccaaggaaagacaaatctgctgagccagtaaaagtagaatttatggcaggagttaaactggtaagacaaaaagaatatcctaagaagctggaggcctgtaytgggctaaaacctgtaactgaggatttcctaaagtaaggactgttacaagaatgccagcctgtatgtaaccctgttaaaaagccaygttctcaatattatcaattagcgcaagatttgagagctgttaatgaagtagttgccaatgtgcatcctgcagtttggaaccccaacattttgttgacaactagagttgattctaatgtttacttgaccattctagatctgaaagatgctttcttttgcatttccttggargagcaaagccagaaattgtttgcttttgcatgggaaagcccaat

SEQ ID NO: 5045 - DNA, 600 bp, Chicken  19866894108393_4
caccagtctgtttgttacaggaacgcttgagagaagaaagcaaaggaaaacaagtaactgaaattccatctgaaattcatgcagtagttccttttgtaagggagacmgaaaagccaaggaaagacaaatctgctgagccagtaaaagtagaatttatggcaggagttaaactggtaagacaaaaagaatatcctaagaagctggaggcctgtaytgggctaaaacctgtaactgaggatttcctaaagtaaggactgttacaagaatgccagcctgtatgtaaccctgttaaaaagccaygttctcaatattatcaattagcgcaagatttgagagctgttaatgaagtagttgccaatgtgcatcctgcagtttggaaccccaacattttgttgacaactagagttgattctaatgtttacttgaccattctagatctgaaagatgctttcttttgcatttccttggargagcaaagccagaaattgtttgcttttgcatgggaaagcccaataacagagacaaagacccagcagtgttggatggtgtttccccaaggattcaagaacagccctacactgtttggtaatgtactggcta

SEQ ID NO: 5046 - DNA, 600 bp, Chicken  19866894108393_5
ctggtaagacaaaaagaatatcctaagaagctggaggcctgtaytgggctaaaacctgtaactgaggatttcctaaagtaaggactgttacaagaatgccagcctgtatgtaaccctgttaaaaagccaygttctcaatattatcaattagcgcaagatttgagagctgttaatgaagtagttgccaatgtgcatcctgcagtttggaaccccaacattttgttgacaactagagttgattctaatgtttacttgaccattctagatctgaaagatgctttcttttgcatttccttggargagcaaagccagaaattgtttgcttttgcatgggaaagcccaataacagagacaaagacccagcagtgttggatggtgtttccccaaggattcaagaacagccctacactgtttggtaatgtactggctaaagaatcggaacaatggcaaggtaagaaattgacaattactttactactagggcagagagttgccatttatgtaycacaggttgtcatagctcttttggaacaaaagggacatcactatctgcccccaagcagaatgatactgcttgagcaagatgacatgacattggaa

SEQ ID NO: 5047 - DNA, 600 bp, Chicken  19866894108393_6
ggaaccccaacattttgttgacaactagagttgattctaatgtttacttgaccattctagatctgaaagatgctttcttttgcatttccttggargagcaaagccagaaattgtttgcttttgcatgggaaagcccaataacagagacaaagacccagcagtgttggatggtgtttccccaaggattcaagaacagccctacactgtttggtaatgtactggctaaagaatcggaacaatggcaaggtaagaaattgacaattactttactactagggcagagagttgccatttatgtaycacaggttgtcatagctcttttggaacaaaagggacatcactatctgcccccaagcagaatgatactgcttgagcaagatgacatgacattggaaaataccaagtgtttgcatttgagatctaratggtagccctctggaaagtcctggctgggcgctattcagtgatggaatcagctttgttgttaaaggggagcagaaagctggatatgcaattataaccttggaaggagataacttaaatattaagactcctgtttatatgaaaagaaggtaagttaggagagctattaaattatac

SEQ ID NO: 5048 - DNA, 600 bp, Chicken  19866894108393_7
atgggaaagcccaataacagagacaaagacccagcagtgttggatggtgtttccccaaggattcaagaacagccctacactgtttggtaatgtactggctaaagaatcggaacaatggcaaggtaagaaattgacaattactttactactagggcagagagttgccatttatgtaycacaggttgtcatagctcttttggaacaaaagggacatcactatctgcccccaagcagaatgatactgcttgagcaagatgacatgacattggaaaataccaagtgtttgcatttgagatctaratggtagccctctggaaagtcctggctgggcgctattcagtgatggaatcagctttgttgttaaaggggagcagaaagctggatatgcaattataaccttggaaggagataacttaaatattaagactcctgtttatatgaaaagaaggtaagttaggagagctattaaattatactaatactactggaggattgcaggtaacacctgatgaacactgtgtatttacccctccaatagtgaaagaattaatggaaagaacatgcaagagcactcatctgcaagtgtgtatatactagata

SEQ ID NO: 5049 - DNA, 600 bp, Chicken  19866894108396_1
gagagagctggccccggtgcatggatttcctccccgtccctctgtgacgacacagttcaccataggaaggctatcccgcatcctcttgagccaagtgcccctctgtgcaccaaagcctggtgccagcagccagccccagggcctggctgtgctcccagtcacgttttccatgacctcatgcacttcattggagccatctctggcggtgtcacctccccgctcagagccgatgctgccctccccaacacagccacactccccagtgggagctgccaacaaagagagtcatttacagatttyagaactgattttccaatgccaatcggcttttgtttccctcgttctaagcagaattgggtaaatagggccatacccataccaatccagccacccctgtatgattagcagtgggcatggtggggatgggttgacggttggacttgatgatcttaggggtccaaccttcaccattctgtgattctgcagacaacacggcatcattttcctgcctcaaactgaaacaccaccactactttgggatgtaaaggtggggcaactttttccatcyccaggagaaaaggaggtcctgccgccctcaca

SEQ ID NO: 5050 - DNA, 600 bp, Chicken  19866894108396_2
gctgccaacaaagagagtcatttacagatttyagaactgattttccaatgccaatcggcttttgtttccctcgttctaagcagaattgggtaaatagggccatacccataccaatccagccacccctgtatgattagcagtgggcatggtggggatgggttgacggttggacttgatgatcttaggggtccaaccttcaccattctgtgattctgcagacaacacggcatcattttcctgcctcaaactgaaacaccaccactactttgggatgtaaaggtggggcaactttttccatcyccaggagaaaaggaggtcctgccgccctcacaagagtgaggaccctactctaagatcccacatccccctgtgcagtgctgacaaaccagatctagcctcagcacatccaaataaaacaagagtggtgatgtggttggcaaycctgcacatagcagggaggttgaaactagatggtcattgtggtccttttcaacccaggccgttttatgagtctatgattgattccatgtggcactgaggcacacggtggggatgggttggggtggttttgtttccatccccaacctcacagcctattct

SEQ ID NO: 5051 - DNA, 600 bp, Chicken  19866894108396_3
gggcatggtggggatgggttgacggttggacttgatgatcttaggggtccaaccttcaccattctgtgattctgcagacaacacggcatcattttcctgcctcaaactgaaacaccaccactactttgggatgtaaaggtggggcaactttttccatcyccaggagaaaaggaggtcctgccgccctcacaagagtgaggaccctactctaagatcccacatccccctgtgcagtgctgacaaaccagatctagcctcagcacatccaaataaaacaagagtggtgatgtggttggcaaycctgcacatagcagggaggttgaaactagatggtcattgtggtccttttcaacccaggccgttttatgagtctatgattgattccatgtggcactgaggcacacggtggggatgggttggggtggttttgtttccatccccaacctcacagcctattctctgtcactccctgaatcaccatacaggcttaatgcttctttgcacctctctgccagagatctcggtgcattttacagaggaaaatgtggggaagcactgctacacacatctgagagtgctttgcccaaggtgatgtggtga

SEQ ID NO: 5052 - DNA, 600 bp, Chicken  19866894108400_1
ctaccaattcctctggctcactcagaaaaacagactgttttagttcctttacataaccagagcagttcttaatgcacagattattgacttagtggggttttatcatgtcccagagtaccaggggattccttaatccaggccttctttgcatgatctattttcatggctctttttattgtcacggtctgtcattataatgatttgcaaatccagaaccagagcatgctcagctcaaagaagagagggggagaggacatgtgctccctcctacctgccctctcacacaagcactgaaccccwtcagatgcagtgtgacaaaaaatcctgcaaggctgagtgtcacataacacacaaggggaaatcctgtatgtcttgtagttgtgagatcaaagcaaaatcaactgaaaaggggatatgaaaagctgcttgcagaggtaaggtgtcctgtgtctctcccagtgggtctcagtaaagagaccagagcctgctctcctccctctcaatccctgctcctctccaatctatccagccccagttgtgtaggcgcatatggaaacagtctgatcccccatcaccctgcatgaagctccccatgagtct

SEQ ID NO: 5053 - DNA, 600 bp, Chicken  19866894108401_1
tagaaagatgggccacatgagtactgctcagaatacaagccaagtcacatactgttacttcggtaatttcaggaatgtagtagtttttcaaaacaggcaaaagacgttctacaaacacgtatccatttctgagtatgtctgtcctgtctgacaagtttgatttgcctggtcttcttctacagaccaagaagccacaaatttcagaccagtttcacctctagaaatggagctcctcctcatccttgatgcagtgctactggatctccagataaagggtcactcatcaattaggcagacagrytktatgtcttggatgctgctggaaaractacatggttgaaggaagtctatcaacactcttgcaaacatcttagcaaacttctcatttatggcagatatttttaaagagagtcagatctagattttgctgcaaagacattctaagcacgttagaagaataaagaggtagtaaaatctaaatgggaacaaattcaaaataataggagtgaatagataggatctactaattgaaaaaaagatacttcaagtgacagagggagtccaataaatcaaatcatttactgcttgaaagagaatttt

SEQ ID NO: 5054 - DNA, 600 bp, Chicken  19866894108401_2
agaaagatgggccacatgagtactgctcagaatacaagccaagtcacatactgttacttcggtaatttcaggaatgtagtagtttttcaaaacaggcaaaagacgttctacaaacacgtatccatttctgagtatgtctgtcctgtctgacaagtttgatttgcctggtcttcttctacagaccaagaagccacaaatttcagaccagtttcacctctagaaatggagctcctcctcatccttgatgcagtgctactggatctccagataaagggtcactcatcaattaggcagacagrytktatgtcttggatgctgctggaaaractacatggttgaaggaagtctatcaacactcttgcaaacatcttagcaaacttctcatttatggcagatatttttaaagagagtcagatctagattttgctgcaaagacattctaagcacgttagaagaataaagaggtagtaaaatctaaatgggaacaaattcaaaataataggagtgaatagataggatctactaattgaaaaaaagatacttcaagtgacagagggagtccaataaatcaaatcatttactgcttgaaagagaattttg

SEQ ID NO: 5055 - DNA, 600 bp, Chicken  19866894108401_3
aaagatgggccacatgagtactgctcagaatacaagccaagtcacatactgttacttcggtaatttcaggaatgtagtagtttttcaaaacaggcaaaagacgttctacaaacacgtatccatttctgagtatgtctgtcctgtctgacaagtttgatttgcctggtcttcttctacagaccaagaagccacaaatttcagaccagtttcacctctagaaatggagctcctcctcatccttgatgcagtgctactggatctccagataaagggtcactcatcaattaggcagacagrytktatgtcttggatgctgctggaaaractacatggttgaaggaagtctatcaacactcttgcaaacatcttagcaaacttctcatttatggcagatatttttaaagagagtcagatctagattttgctgcaaagacattctaagcacgttagaagaataaagaggtagtaaaatctaaatgggaacaaattcaaaataataggagtgaatagataggatctactaattgaaaaaaagatacttcaagtgacagagggagtccaataaatcaaatcatttactgcttgaaagagaattttgca

SEQ ID NO: 5056 - DNA, 600 bp, Chicken  19866894108401_4
tcagaatacaagccaagtcacatactgttacttcggtaatttcaggaatgtagtagtttttcaaaacaggcaaaagacgttctacaaacacgtatccatttctgagtatgtctgtcctgtctgacaagtttgatttgcctggtcttcttctacagaccaagaagccacaaatttcagaccagtttcacctctagaaatggagctcctcctcatccttgatgcagtgctactggatctccagataaagggtcactcatcaattaggcagacagrytktatgtcttggatgctgctggaaaractacatggttgaaggaagtctatcaacactcttgcaaacatcttagcaaacttctcatttatggcagatatttttaaagagagtcagatctagattttgctgcaaagacattctaagcacgttagaagaataaagaggtagtaaaatctaaatgggaacaaattcaaaataataggagtgaatagataggatctactaattgaaaaaaagatacttcaagtgacagagggagtccaataaatcaaatcatttactgcttgaaagagaattttgcagtcttattggtactaactctttca

SEQ ID NO: 5057 - DNA, 600 bp, Chicken  19866894108405_1
tgtgtccagtttcgccaacagtaaacctggctccgctaagaaattagtgatcaagaactttaaaggtaacagactataattcctcacaatctctgcggagctggcgctcaactttgtgttttgttttcaacatgaaaaccagttggctttcaaatagctccaggttttacaggaaatgcttttctgtggtaaatgttcttagacttatataaaggggggttatgttgatgatgcatccttgcccgatcacgtgcacatcctgagccagacttccctgcctgggcttattgttctgactgygttcactctgttgaggagaaggccctatctagtatgttgaaggaaatgttttactgcctaagtgtgtaaatcacctttgatcaaacttctaaggtttgaaaacacttttccagtaatcctgactcagggtatactgtatattttagccttgtttatggtaagtctttgcaaaatacacttaaaaaaagtagacttgaatctacgtgtcttgcccgtgtgtattttgtctgtttgtaggttaatctgcttgtgcttagttttaaacgttgaaactaaggtgattatccagctattaacgcg

SEQ ID NO: 5058 - DNA, 600 bp, Chicken  19866894108408_1
aatgttgtaacaggagtttaaacatgacagtccaagtctcagagcaggactccatgtcacagccacaagtatagtttgagccattaggctgaggcctcactagctggcagtgttcttcagaaaaacccagagcatcctctgtttccttgacatttctgttgcaaacacagcactcttgctgagcaacttcctagcacaaagagagaagggctgcattttcttctttgtttcctggtaaagcttggacctgaattaacatttgcattaaactacagtaagtagacacatccactgaggaarctgagtcttcattcttctacaagaggacaaagacatatctacacaccgttatttactaatgtgttggtccaagcaagttttcatcagtcattctgaagatcactataaaggaggtgagtgttatcagaagatagctgctgggtggatatttcagccagtgccaggaagttatctatatgcaattttggaagcagaaactcttgtttattaaggattcctcacatctaacattctgactaattgtatgcataattatccatcatacagaacacagagttgtaacagttctactggatggaa

SEQ ID NO: 5059 - DNA, 600 bp, Chicken  19866894108426_1
gcagtgattgagactcttaccagttatcttgtagcttaatttactgtaattcagttctgcattgcttttgatggcttaattactttctaattattttttggctgtgggaggaagacaggtgaaggcagacaaatgagctgctataaattatttgtaatctagtaaagttagaatttcagaccaaaattaagttcttctttcgcttggcattacatggagagcaatatccaatcagtcaagggagaagaggagggaaagttgatgattattagccttatttgtttcaggtggaatgcagakgtgattaaagatggatcaatttactgtttgtcaaaatctacatccctctcagagataatattccagtccactctactagcccccaacaggctcatcctctctgcacttttatttcattattaataacaggtcctcatttgctgttgagcctatttcattcatgagtaatgtgaacaacaaacagattgagaaatctgtacgctgctatatcacaaggtagcagccatgagcagaagtacaatactcttagcatgcagctgctttctaaaccatgcactaggttttgtttcttttccatca

SEQ ID NO: 5060 - DNA, 600 bp, Chicken  19866894108427_1
cttacattaatgaaggaaggataacacactgctgtttataagcagtaaaaggttggcatttcatgaataatgagacactcccaggaggcaggaaattctgtccttacatatttgagtcttttaagcccattctgccatcctcctttcaaacaccttgctctggtctcaggcctcatttgggagcgcacatctttgatcaagggtccatcctgcattcagagctcctgctggcaaacagcttcaaagtggctttgctcctccaagggaatagaggcaggatgttcatctcccatatctgarcatctgaatcatygactttggtcttagtgttgtcgtgatttcagtagatttacttacatgcctaaattyacttgacttacacatrccatgtatgtgtatttaagtatctgaacaacacacacagaatgatccacgcacttccaattctaacaaacctacttctatggaaacagagcaactgacacacagatgagagacgacgtacgaatgtmcatctgcgacctgctgtacttttgtatgtgaatgcttcccagtgcttaacgtatttttaatgaatttgagtgtcgggaaataagacag

SEQ ID NO: 5061 - DNA, 600 bp, Chicken  19866894108427_2
aggaaggataacacactgctgtttataagcagtaaaaggttggcatttcatgaataatgagacactcccaggaggcaggaaattctgtccttacatatttgagtcttttaagcccattctgccatcctcctttcaaacaccttgctctggtctcaggcctcatttgggagcgcacatctttgatcaagggtccatcctgcattcagagctcctgctggcaaacagcttcaaagtggctttgctcctccaagggaatagaggcaggatgttcatctcccatatctgarcatctgaatcatygactttggtcttagtgttgtcgtgatttcagtagatttacttacatgcctaaattyacttgacttacacatrccatgtatgtgtatttaagtatctgaacaacacacacagaatgatccacgcacttccaattctaacaaacctacttctatggaaacagagcaactgacacacagatgagagacgacgtacgaatgtmcatctgcgacctgctgtacttttgtatgtgaatgcttcccagtgcttaacgtatttttaatgaatttgagtgtcgggaaataagacagaaactttcaaaat

SEQ ID NO: 5062 - DNA, 600 bp, Chicken  19866894108427_3
atgagacactcccaggaggcaggaaattctgtccttacatatttgagtcttttaagcccattctgccatcctcctttcaaacaccttgctctggtctcaggcctcatttgggagcgcacatctttgatcaagggtccatcctgcattcagagctcctgctggcaaacagcttcaaagtggctttgctcctccaagggaatagaggcaggatgttcatctcccatatctgarcatctgaatcatygactttggtcttagtgttgtcgtgatttcagtagatttacttacatgcctaaattyacttgacttacacatrccatgtatgtgtatttaagtatctgaacaacacacacagaatgatccacgcacttccaattctaacaaacctacttctatggaaacagagcaactgacacacagatgagagacgacgtacgaatgtmcatctgcgacctgctgtacttttgtatgtgaatgcttcccagtgcttaacgtatttttaatgaatttgagtgtcgggaaataagacagaaactttcaaaatccatcagccagcacttctttccatgttcatctcagacgaactattcctgaatgtgg

SEQ ID NO: 5063 - DNA, 600 bp, Chicken  19866894108427_4
aggcaggaaattctgtccttacatatttgagtcttttaagcccattctgccatcctcctttcaaacaccttgctctggtctcaggcctcatttgggagcgcacatctttgatcaagggtccatcctgcattcagagctcctgctggcaaacagcttcaaagtggctttgctcctccaagggaatagaggcaggatgttcatctcccatatctgarcatctgaatcatygactttggtcttagtgttgtcgtgatttcagtagatttacttacatgcctaaattyacttgacttacacatrccatgtatgtgtatttaagtatctgaacaacacacacagaatgatccacgcacttccaattctaacaaacctacttctatggaaacagagcaactgacacacagatgagagacgacgtacgaatgtmcatctgcgacctgctgtacttttgtatgtgaatgcttcccagtgcttaacgtatttttaatgaatttgagtgtcgggaaataagacagaaactttcaaaatccatcagccagcacttctttccatgttcatctcagacgaactattcctgaatgtggtatttggtgatatgaa

SEQ ID NO: 5064 - DNA, 556 bp, Chicken  19866894108427_5
cattcagagctcctgctggcaaacagcttcaaagtggctttgctcctccaagggaatagaggcaggatgttcatctcccatatctgarcatctgaatcatygactttggtcttagtgttgtcgtgatttcagtagatttacttacatgcctaaattyacttgacttacacatrccatgtatgtgtatttaagtatctgaacaacacacacagaatgatccacgcacttccaattctaacaaacctacttctatggaaacagagcaactgacacacagatgagagacgacgtacgaatgtmcatctgcgacctgctgtacttttgtatgtgaatgcttcccagtgcttaacgtatttttaatgaatttgagtgtcgggaaataagacagaaactttcaaaatccatcagccagcacttctttccatgttcatctcagacgaactattcctgaatgtggtatttggtgatatgaaaaataagatcaatctagtctgttgtctccccttacatctgaacatagaagctatttgctgataaccagattatgccatggcag

SEQ ID NO: 5065 - DNA, 599 bp, Chicken  19866894108433_1
  misc_feature (1)..(161): n is any nucleotide
nnnnnnnnnnnnnnnnnnnnnnnnnnnnnnnnnnnnnnnnnnnnnnnnnnnnnnnnnnnnnnnnnnnnnnnnnnnnnnnnnnnnnnnnnnnnnnnnnnnnnnnnnnnnnnnnnnnnnnnnnnnnnnnnnnnnnnnnnnnnnnnnnnnnnnnnnnnnnnnnngtctttaggaacaggttagacaagtccctgtcaggaacacttaagtatcaccaaaccctcaaagcagaaggaaggactcatgacctcaggacctctgaaaagcactgtaattatacagttccacaagtaacaactgcarttatggtaccaagtttcacatcttattcatttttcttactagaccaaaagttcctctgtttatgagggaatttgtcctctcttcatttttaatatcatctctagcaagatttcaggagatggacgcaatgatccttgyggatcccttccaactcaggatacaatgagacaggttgcaaccatgctttcataaaaggtatttacctctccatgagtctatcactaccatctggtatgcttayttttatagagtgcatcaagcactaccatttaaccttttgcattaagaaatgtggttcg

SEQ ID NO: 5066 - DNA, 599 bp, Chicken  19866894108433_2
  misc_feature (1)..(23): n is any nucleotide
nnnnnnnnnnnnnnnnnnnnnnngtctttaggaacaggttagacaagtccctgtcaggaacacttaagtatcaccaaaccctcaaagcagaaggaaggactcatgacctcaggacctctgaaaagcactgtaattatacagttccacaagtaacaactgcarttatggtaccaagtttcacatcttattcatttttcttactagaccaaaagttcctctgtttatgagggaatttgtcctctcttcatttttaatatcatctctagcaagatttcaggagatggacgcaatgatccttgyggatcccttccaactcaggatacaatgagacaggttgcaaccatgctttcataaaaggtatttacctctccatgagtctatcactaccatctggtatgcttayttttatagagtgcatcaagcactaccatttaaccttttgcattaagaaatgtggttcgataactttgtgctgttcttttagcatgtactttaatattgggcattcatgatgcatgcaactcttggccaaagcagagcatcaaaatggcatacaaacactaacttgtatcttgttaaaaagaacagcagcaccaaaa

SEQ ID NO: 5067 - DNA, 600 bp, Chicken  19866894108433_3
tgacctcaggacctctgaaaagcactgtaattatacagttccacaagtaacaactgcarttatggtaccaagtttcacatcttattcatttttcttactagaccaaaagttcctctgtttatgagggaatttgtcctctcttcatttttaatatcatctctagcaagatttcaggagatggacgcaatgatccttgyggatcccttccaactcaggatacaatgagacaggttgcaaccatgctttcataaaaggtatttacctctccatgagtctatcactaccatctggtatgcttayttttatagagtgcatcaagcactaccatttaaccttttgcattaagaaatgtggttcgataactttgtgctgttcttttagcatgtactttaatattgggcattcatgatgcatgcaactcttggccaaagcagagcatcaaaatggcatacaaacactaacttgtatcttgttaaaaagaacagcagcaccaaaaagttatattggaacaatctactaatgtgtttacattatatgagtgatttgctgttccttcacgaggcatgtaggaagtcagcacttctcaaatgtgtaaagtat

SEQ ID NO: 5068 - DNA, 567 bp, Chicken  19866894108433_4
atcttgttaaaaagaacagcagcaccaaaaagttatattggaacaatctactaatgtgtttacattatatgagtgatttgctgttccttcacgaggcatgtaggaagtcagcacttctcaaatgtgtaaagtatttccatgtgcttaaagcacaatctttccaaaacaaacaatgattgagaaattttttattattctttattttcttgccagctgtttttttggactcccctctcagccaccttctttctttcagccagatctctccttattgctcacagtaacacctactcaagcaayagcttattcagagctataagactcagaaatgggaacatctcagtctgatttaagtggtattttcctcagatcagtttacaatgtgtctttgtgctactgttgcaagcattaggtctgggtggttgtcaggatggaacttgggcatcctacagtggaacctagaggccatttcttgctgccttctctcagtgctgctccaggcaaaggagcagagctgaccaaagcaccccagcagccttctccctgtgagcctattcctaagaaaca

SEQ ID NO: 5069 - DNA, 600 bp, Chicken  19866894108435_1
aaaaattactttgcatctgcagagcacactgtattgcgcaggtgagctgaaatgataaatgtgtgctagtttttgtttgaatattcaaattagatgcttttactttaagtcttgctaaaagctgaccagaaactgcccagcagtattcccctaaaggtgactaggagctatggtagactggccttgccttcatttaacttcctcggtgacagaaatagggtgagtagcacattattttgtgcggtaacaaaccatagtgttggccagtaggctacctctgcatgctgacacatgctaaaraaagctatctgtctatgctgtagctttaatataatgcgtaatgcagaggtcttctgccaccgttggtctgaataatcacactgagcaggaaatgtactggaggcaaaactatattacgctttatttttttggccaccgctctgaattcggttcctgtggctgtgagcaatgttggcaatgagttcactgctgctgcagtgtgatcatctaatttaactctccatactaagtggtcatttttccactgcacgagcatgagctattccagttcttcagtgaagraactgctataattcagtt

SEQ ID NO: 5070 - DNA, 600 bp, Chicken  19866894108435_2
tgctgacacatgctaaaraaagctatctgtctatgctgtagctttaatataatgcgtaatgcagaggtcttctgccaccgttggtctgaataatcacactgagcaggaaatgtactggaggcaaaactatattacgctttatttttttggccaccgctctgaattcggttcctgtggctgtgagcaatgttggcaatgagttcactgctgctgcagtgtgatcatctaatttaactctccatactaagtggtcatttttccactgcacgagcatgagctattccagttcttcagtgaagraactgctataattcagtttcataaccgatgtaatcccaaggggaggatttctcctcctcgcaccttttcttgcttaaaggatgaaaatatacagcctagcacaggctgagaggctgagtttgtgataatgtacagaaatgtgataatrttctcagtaccatccttttcattgctgtatgatgactaagcacagtaatacgtagagaaacaattagaaaattatatcaccggatttataccttcaaaaaagaaagcagcatacttgggctgatgtagcttatccgtatgtggaacaatcat

SEQ ID NO: 5071 - DNA, 600 bp, Chicken  19866894108435_3
ggccaccgctctgaattcggttcctgtggctgtgagcaatgttggcaatgagttcactgctgctgcagtgtgatcatctaatttaactctccatactaagtggtcatttttccactgcacgagcatgagctattccagttcttcagtgaagraactgctataattcagtttcataaccgatgtaatcccaaggggaggatttctcctcctcgcaccttttcttgcttaaaggatgaaaatatacagcctagcacaggctgagaggctgagtttgtgataatgtacagaaatgtgataatrttctcagtaccatccttttcattgctgtatgatgactaagcacagtaatacgtagagaaacaattagaaaattatatcaccggatttataccttcaaaaaagaaagcagcatacttgggctgatgtagcttatccgtatgtggaacaatcatgacaattatgggaaagttggtcttcttagatcagtctgcttaaaaagttcttggcttcatgaataaaatatttcttaataaacttattcagtaccttctttgttgaagatgggtatgctgagcatctttaataaatccatttatccag

SEQ ID NO: 5072 - DNA, 600 bp, Chicken  19866894108436_1
taactacaaaacttttattgagcagaccaaattgttgcaactgctgtccacagaaaacaaagagcctctgtggtagaaaaatgagctggaacatttgatttccctggtcaataacataggcactttgaaaagtttcttttcaaacaatgtggtcttgtctactatgggaataacgacttggctaataacttgcaaaagagagtctgattaagttattttgaagggactgatcttttgttaaatgcctagctagtttaaatagttgcaagaagccaggaaaaataacatttctctaacttyacagctctgatctaaaaactcagatctcctactgaaaccatttgaagtctcttggcaaaatttgccaagtacaaggaaaacagatattgaaataagaaaaccaacctcttttcataatccctcatctacttattcaaagacattctagaaatcaatacgtcagccttttctggatcatatttagtttgtattagtataacataagcattagttataagcattatattagctatatattatgttatcacatatttcagaatactgaaacatattaacttctctggtgtcatttttggtccc

SEQ ID NO: 5073 - DNA, 600 bp, Chicken  19866894108436_2
aacctcttttcataatccctcatctacttattcaaagacattctagaaatcaatacgtcagccttttctggatcatatttagtttgtattagtataacataagcattagttataagcattatattagctatatattatgttatcacatatttcagaatactgaaacatattaacttctctggtgtcatttttggtcccaagctgaaaggtagaataattgcacttgtaagccagatgattgttaggtcttgctagtgcccgtgttctttttaattaaactaactgcaaaaaataacctaygtaattcttacatatgtaattaagaatgtcattatacgtctaacaaatgaggctatctgcataactgagctaatgatttcatacttgaaagttataatttgattacataaaagcaagttttaaataatctactaaggatcaacaattcaaattacaagaaactagcccacatttttccagcccttccctcttccactcattaactttcctccttgtcagttctggtcttcacacagctgcaacgtgacccgaatcagggactaattcaactgaaaactaacccacacagttatgctgaaa

SEQ ID NO: 5074 - DNA, 600 bp, Chicken  19866894108439_1
tcttggagataaccatgctctttgtgatttcactctgcttttgctcacttgagctaacgccagtccttctgaggacatgcaggggctgagacagtgagccaaggagatctgcaaaaattcatacaggccagggtcagtgctagaacttctcagcaaagatccctcttggctctgtctccagccctgccaagtcctggcacacagacacttctcccttgaagtggcctacaggctgacacagctgccaggcaaagaaaggttccagacgaggatcagcttggtggtggcttctgccactawtaggcagagccagcagtcctgaccatgtgcgatctcatgttgtcagaacactgcggattaaaacaagcatctcatgctctctgtggagtccaatgacaagctcacaactgtctgaactgctgatggggcatgaaggcgtttgaggtgtctcctcacttcctcaggtgctgagctctgtttttgctcatctgtgtttgccttgttctttgcattagggctgctggaaggtggcagcatggctcggaagatgagcattgacaatctggaggaccagctgctctgccccatctgcttggaggt

SEQ ID NO: 5075 - DNA, 600 bp, Chicken  19866894108441_1
cttctgtttggtacaagggtgaactcctgcgtggtgtttggattcttagcggagtgctgacgcgtgaggccagcagtggctccgaaggcagacaccctgcaggcaccaagagatgggggtgctgtgcacagccttccccagatggcagcaggttcacacaccatgggtcactctgtcctacaaaaggagataagcagcaggatgccattatggttgcacagaagacaaaccggactcctgacctttagagagaaaaataactaaaattgtggcaggtgggtggggagttgggctgtgagmagtacacggccccagcacacccaatgccttcagaaagtaccacccctgggggctacaggcactgcccacrcagggcagggtcagcttacagctgggagcagccaggcagggcaccacagaactgcagctcttttatttatttcgcatggctgtctgaggctgaccacatttgttgtacctgaaatctgctctgctgacgttgcacaaacccacagcactttctgccattcggaacagaagaggctgccttcctctagctgcgcccaggggagatgtcttggatctgtgtcactgcctcta

SEQ ID NO: 5076 - DNA, 600 bp, Chicken  19866894108441_2
cagcagtggctccgaaggcagacaccctgcaggcaccaagagatgggggtgctgtgcacagccttccccagatggcagcaggttcacacaccatgggtcactctgtcctacaaaaggagataagcagcaggatgccattatggttgcacagaagacaaaccggactcctgacctttagagagaaaaataactaaaattgtggcaggtgggtggggagttgggctgtgagmagtacacggccccagcacacccaatgccttcagaaagtaccacccctgggggctacaggcactgcccacrcagggcagggtcagcttacagctgggagcagccaggcagggcaccacagaactgcagctcttttatttatttcgcatggctgtctgaggctgaccacatttgttgtacctgaaatctgctctgctgacgttgcacaaacccacagcactttctgccattcggaacagaagaggctgccttcctctagctgcgcccaggggagatgtcttggatctgtgtcactgcctctaaaagactgagctcatcctttcagtgtataaattaggggcaaacagctcaggcaacacatggtaaagaaaa

SEQ ID NO: 5077 - DNA, 599 bp, Chicken  19866894108443_1
  misc_feature (1)..(4): n is any nucleotide
nnnntggggaaggctgtgcacagcacccccatctcttggtgcctgcagggtgtctgccttcggagccctgctggcctcacgcgtcagcactccgctaagaatccaaacaccacgcaggagttcacccttgtaccaaacagaagttgggcttcctgcccaacagacgtctctctcctcagttgctttgcactggggctgtgagctgcctggttttccaaacagtttgggaattctgtgactgtctgttggaaaatccatgcaattgcagtctgacaagcactcaactacaaaaaaatctgragagaggaggtgttttttctttaatgcaaagtgctagacagcattgtctgcttactgacagagcagggctgtccagtaaggtcttttgcagaacttgatcaatgttgagagttcagcagcagaggtagcacacagacagcgagcgttcctggaaacagcagtttgattccaaaaaggtacctcaggttctgggtgttcctctgcacaattgcaggaaaagcacacagacgtttcagctgtggcatttagttaaaccttcccagtagttctccaacctcccagcagccgctccttgagtt

SEQ ID NO: 5078 - DNA, 599 bp, Chicken  19866894108451_1
  misc_feature (1)..(235): n is any nucleotide
nnnnnnnnnnnnnnnnnnnnnnnnnnnnnnnnnnnnnnnnnnnnnnnnnnnnnnnnnnnnnnnnnnnnnnnnnnnnnnnnnnnnnnnnnnnnnnnnnnnnnnnnnnnnnnnnnnnnnnnnnnnnnnnnnnnnnnnnnnnnnnnnnnnnnnnnnnnnnnnnnnnnnnnnnnnnnnnnnnnnnnnnnnnnnnnnnnnnnnnnnnnnnnnnnnnnnnnnnnnnnnnnnnnnnnnnnnntgcagcagggcagctagcactgcacaagatcagtgaagacgagtattttttggtacctggtcttkattaacaaactcagtggctgaaaatttcatgcagtacrtaagcatgcacatgcttgactctgaycttttaactcctgcttctcttctttttccatctttgctctgactacctggactaattatagtgctcacagtgaaaattatgacctagtttatcactyggcaaacttcttccttcagatgagttaagctctgttgttccaggaacttcctggctaaggaatgagaatttaccttgaaaaggtactaaaagctcgagaccttgcagggtctcccaaaataagtacgatagattttgc

SEQ ID NO: 5079 - DNA, 599 bp, Chicken  19866894108451_2
  misc_feature (1)..(197): n is any nucleotide
nnnnnnnnnnnnnnnnnnnnnnnnnnnnnnnnnnnnnnnnnnnnnnnnnnnnnnnnnnnnnnnnnnnnnnnnnnnnnnnnnnnnnnnnnnnnnnnnnnnnnnnnnnnnnnnnnnnnnnnnnnnnnnnnnnnnnnnnnnnnnnnnnnnnnnnnnnnnnnnnnnnnnnnnnnnnnnnnnnnnnnnnnnnnnnnnnnnnntgcagcagggcagctagcactgcacaagatcagtgaagacgagtattttttggtacctggtcttkattaacaaactcagtggctgaaaatttcatgcagtacrtaagcatgcacatgcttgactctgaycttttaactcctgcttctcttctttttccatctttgctctgactacctggactaattatagtgctcacagtgaaaattatgacctagtttatcactyggcaaacttcttccttcagatgagttaagctctgttgttccaggaacttcctggctaaggaatgagaatttaccttgaaaaggtactaaaagctcgagaccttgcagggtctcccaaaataagtacgatagattttgctcagttgttcaaaatccagataggcaagcattggtcaa

SEQ ID NO: 5080 - DNA, 599 bp, Chicken  19866894108451_3
  misc_feature (1)..(171): n is any nucleotide
nnnnnnnnnnnnnnnnnnnnnnnnnnnnnnnnnnnnnnnnnnnnnnnnnnnnnnnnnnnnnnnnnnnnnnnnnnnnnnnnnnnnnnnnnnnnnnnnnnnnnnnnnnnnnnnnnnnnnnnnnnnnnnnnnnnnnnnnnnnnnnnnnnnnnnnnnnnnnnnnnnnnnnnnnnntgcagcagggcagctagcactgcacaagatcagtgaagacgagtattttttggtacctggtcttkattaacaaactcagtggctgaaaatttcatgcagtacrtaagcatgcacatgcttgactctgaycttttaactcctgcttctcttctttttccatctttgctctgactacctggactaattatagtgctcacagtgaaaattatgacctagtttatcactyggcaaacttcttccttcagatgagttaagctctgttgttccaggaacttcctggctaaggaatgagaatttaccttgaaaaggtactaaaagctcgagaccttgcagggtctcccaaaataagtacgatagattttgctcagttgttcaaaatccagataggcaagcattggtcaatattgttacaggtggaaaatgcaaag

SEQ ID NO: 5081 - DNA, 599 bp, Chicken  19866894108451_4
  misc_feature (1)..(74): n is any nucleotide
nnnnnnnnnnnnnnnnnnnnnnnnnnnnnnnnnnnnnnnnnnnnnnnnnnnnnnnnnnnnnnnnnnnnnnnnnntgcagcagggcagctagcactgcacaagatcagtgaagacgagtattttttggtacctggtcttkattaacaaactcagtggctgaaaatttcatgcagtacrtaagcatgcacatgcttgactctgaycttttaactcctgcttctcttctttttccatctttgctctgactacctggactaattatagtgctcacagtgaaaattatgacctagtttatcactyggcaaacttcttccttcagatgagttaagctctgttgttccaggaacttcctggctaaggaatgagaatttaccttgaaaaggtactaaaagctcgagaccttgcagggtctcccaaaataagtacgatagattttgctcagttgttcaaaatccagataggcaagcattggtcaatattgttacaggtggaaaatgcaaagcattttttgaactgtttatccctattctacctgcagagcaaggggattgctgacacagtgcccagatatgaaaactgcaaatgaaagtcttcgggtt

SEQ ID NO: 5082 - DNA, 600 bp, Chicken  19866894108454_1
ccctctgaacttgacactcagattcatggaaacagggggtgctcactgcctgtgagagtaaatgtagaatggatatattaagtaattttttttgttttcttcttaaggattttgtgaaggtataaaattgtttatgaaagtcttagatttgttattaatgccagtagaaaaaaacacaaaaataattctgaatgaccacgtccccttctgaaggaaaaaataatgtgatgaagtaattaaaaatgtcgtcataagtccagatcttacaagaattactcagcaaatctatggaggtaattyttagtatttgacaggattaggtctgtaataaaaagtaggaagtgattgcctcaagtctgttgcttatttaataaggaatttataatgtcttacaagtgcactgtgggtggatagtcataagtaagacataagatggaacaattaagaaactgttaagttaaaacattttctaggtttggtgataactgatgtatagaatcatagaatcatagaatgccctgrgttgaaaaggaccacaatgatcattgagtttcaatccccctgctatgcgtagggtcgccaaccactagaccaggctgc

SEQ ID NO: 5083 - DNA, 600 bp, Chicken  19866894108454_2
atgtgatgaagtaattaaaaatgtcgtcataagtccagatcttacaagaattactcagcaaatctatggaggtaattyttagtatttgacaggattaggtctgtaataaaaagtaggaagtgattgcctcaagtctgttgcttatttaataaggaatttataatgtcttacaagtgcactgtgggtggatagtcataagtaagacataagatggaacaattaagaaactgttaagttaaaacattttctaggtttggtgataactgatgtatagaatcatagaatcatagaatgccctgrgttgaaaaggaccacaatgatcattgagtttcaatccccctgctatgcgtagggtcgccaaccactagaccaggctgcccagagccacatccagcctggccttgaatgcctccagggatggggcatccacaacctccttgggcaacctgttccagtgtgtcaccaccctctggatgaaaaacttcttcctactgtccaacctaaacctctcctgtctcagtttaaaaccattctctctctctctcgtcctgtcactatccaccctcataagcagccgttccccctcctgtttatatgctc

SEQ ID NO: 5084 - DNA, 600 bp, Chicken  19866894108456_1
aaaggctcttcctcaatctctctatcatcttccaattccggactgtgatttgctgttgtcaccaaggacattggacagtcttcatcctctgcaatcactggttcttccttgacgtggatagaatgtctgaaagacattttgacataaaacttattagtgaaatcattaacacaaagagttcttgaagctggaggttaaataataatttaaatgtaaactacaatataaacgattccttttctctccctgaaaatcactcctgagttgttcagagaacgttctttttcatagtagaatcgrgtttcaggaagatgtgagcatggattcccatgtgcatctttgtttagacataacatcctctcctaagcattcagtaaaaatgaaatgatttgttagtatttgtcataaatagcactgtatttagaggagacaccagtgagtcatagcaggaaaacagcataagagataaataaaaattacagcagaagagcattgtatctgttaattttccccagtgtgcaattactttatttctaaatgctttttcaaactccaaatgtgaaaaagaaattgctgtgctgaaataaattaagcaaatta

SEQ ID NO: 5085 - DNA, 600 bp, Chicken  19866894108456_2
catggattcccatgtgcatctttgtttagacataacatcctctcctaagcattcagtaaaaatgaaatgatttgttagtatttgtcataaatagcactgtatttagaggagacaccagtgagtcatagcaggaaaacagcataagagataaataaaaattacagcagaagagcattgtatctgttaattttccccagtgtgcaattactttatttctaaatgctttttcaaactccaaatgtgaaaaagaaattgctgtgctgaaataaattaagcaaattatttcatgaggagcccttstaatttcggatgccaacatttaaaagcacatgtatttgtatttgtgcatgtatgtacacacattgtgtaattaaattttccattgactatgacaaccatagcaatacaacgatagaaaattaatcaacttatatcctcaagtttatttttcccccgaaaaacatattagaaaggtcactgtgatctgagaaaaagctaggaaggttccctgatagcacctggtgaaaaaatattatatataaataatcaaatttttttcatccccctttacccctgaagcaagagaagacctgctttttt

SEQ ID NO: 5086 - DNA, 600 bp, Chicken  19866894108462_1
gcatttttaaaacatcaccagctcccccacgtccattacctgtggactctgactcaagaattcattattcatgtgaaggcaacaagttctgcccatgtatctatgaaggttagagctttgatttcttcttggagcaatcttgtattgacagtactccctaaatacattctgttctgattacccaaatggattgtctggatggtaaatgaagtattccctgtgtagttgtaatttctaccgtaacttggcactgagttttaaaatcagagttgctaaacaggtgggttttttattccaaargcttggaaagtactaagtggcaaatgtgtttacagaaccttgtgttgatgctaaacgctcacatgaggaaagggaggtgggaggcaaatggatgaggccaggctcttctcagtggtgtgcagtgayaggacaaagagtaatggcctataagtcgaagataggaagttccatacaaacatgcagaagaacttctttacggtaagggtgatggagcactggaacaggttgcccagagaggttgtgaggtctccttctctggagatattctagacctgactggacgcctacctgagcaaccta

SEQ ID NO: 5087 - DNA, 600 bp, Chicken  19866894108462_2
tcttggagcaatcttgtattgacagtactccctaaatacattctgttctgattacccaaatggattgtctggatggtaaatgaagtattccctgtgtagttgtaatttctaccgtaacttggcactgagttttaaaatcagagttgctaaacaggtgggttttttattccaaargcttggaaagtactaagtggcaaatgtgtttacagaaccttgtgttgatgctaaacgctcacatgaggaaagggaggtgggaggcaaatggatgaggccaggctcttctcagtggtgtgcagtgayaggacaaagagtaatggcctataagtcgaagataggaagttccatacaaacatgcagaagaacttctttacggtaagggtgatggagcactggaacaggttgcccagagaggttgtgaggtctccttctctggagatattctagacctgactggacgcctacctgagcaacctattgtagggtacctkctttagcaggggggttggactcgacgatttgttgaggtcccttccaacccctgcaattctgtgattctgtggaaagcatctgaatcagacttgaagaraagagcwattgatg

SEQ ID NO: 5088 - DNA, 600 bp, Chicken  19866894108462_3
aagtggcaaatgtgtttacagaaccttgtgttgatgctaaacgctcacatgaggaaagggaggtgggaggcaaatggatgaggccaggctcttctcagtggtgtgcagtgayaggacaaagagtaatggcctataagtcgaagataggaagttccatacaaacatgcagaagaacttctttacggtaagggtgatggagcactggaacaggttgcccagagaggttgtgaggtctccttctctggagatattctagacctgactggacgcctacctgagcaacctattgtagggtacctkctttagcaggggggttggactcgacgatttgttgaggtcccttccaacccctgcaattctgtgattctgtggaaagcatctgaatcagacttgaagaraagagcwattgatggagcactctgccacacaccaagatggaaaactgcttagcttacagacaaccaaaatcactgaaatagtttggacatacatgatggtaaacttgaaaagtaaatattttaaatacctttgagaactcatatacagtttttaacaggaacttctaaacatatcttatcaaaaataatggagacttaaagg

SEQ ID NO: 5089 - DNA, 600 bp, Chicken  19866894108462_4
tggtgtgcagtgayaggacaaagagtaatggcctataagtcgaagataggaagttccatacaaacatgcagaagaacttctttacggtaagggtgatggagcactggaacaggttgcccagagaggttgtgaggtctccttctctggagatattctagacctgactggacgcctacctgagcaacctattgtagggtacctkctttagcaggggggttggactcgacgatttgttgaggtcccttccaacccctgcaattctgtgattctgtggaaagcatctgaatcagacttgaagaraagagcwattgatggagcactctgccacacaccaagatggaaaactgcttagcttacagacaaccaaaatcactgaaatagtttggacatacatgatggtaaacttgaaaagtaaatattttaaatacctttgagaactcatatacagtttttaacaggaacttctaaacatatcttatcaaaaataatggagacttaaaggtatatagtatttattgtaatgtggccattgccaaaacatcaaagcctaactcatcattctcatgttggtctgatggaactttgtgagacagttcttat

SEQ ID NO: 5090 - DNA, 600 bp, Chicken  19866894108462_5
cagtgayaggacaaagagtaatggcctataagtcgaagataggaagttccatacaaacatgcagaagaacttctttacggtaagggtgatggagcactggaacaggttgcccagagaggttgtgaggtctccttctctggagatattctagacctgactggacgcctacctgagcaacctattgtagggtacctkctttagcaggggggttggactcgacgatttgttgaggtcccttccaacccctgcaattctgtgattctgtggaaagcatctgaatcagacttgaagaraagagcwattgatggagcactctgccacacaccaagatggaaaactgcttagcttacagacaaccaaaatcactgaaatagtttggacatacatgatggtaaacttgaaaagtaaatattttaaatacctttgagaactcatatacagtttttaacaggaacttctaaacatatcttatcaaaaataatggagacttaaaggtatatagtatttattgtaatgtggccattgccaaaacatcaaagcctaactcatcattctcatgttggtctgatggaactttgtgagacagttcttatgaactag

SEQ ID NO: 5091 - DNA, 600 bp, Chicken  19866894108463_1
ctgtgttgaaatctatacagcatagaacaggagcatattaactagaaatgggaagacctgcttctgctaatacttgaagtgcaaaatcaattatctgtaagggtaccttgactttataggacaaaagttttacgcccttttaacaaagctttttctcccccctccaaaaaaaaaaaaaaatacaactgagacctaaaaatcacgaataagagagacacaggtttttgggcattccacctggtgagaaatggctttcctaacaacagagagaagtatcacgtatgcatagcacactgtggkaggtttcaattkcttgcagaaggaagaaaacacatatcatgatctgaagcatgcccttcaataaatataaaagacctctactcacatgattgtcataaatcgtcaaagcagcctcatattccccctgtaaaagcaaacaaggaccgtgtgattaatattctggtagagtaagcgagagtgatgagtagcaaccaaggatataaatacaattaggagatgccataacactacttcactgtctcatgacttaagagagaaaagacgaaggtaaagcaggtcttactagctaaaataaccaat

SEQ ID NO: 5092 - DNA, 600 bp, Chicken  19866894108463_2
ctatacagcatagaacaggagcatattaactagaaatgggaagacctgcttctgctaatacttgaagtgcaaaatcaattatctgtaagggtaccttgactttataggacaaaagttttacgcccttttaacaaagctttttctcccccctccaaaaaaaaaaaaaaatacaactgagacctaaaaatcacgaataagagagacacaggtttttgggcattccacctggtgagaaatggctttcctaacaacagagagaagtatcacgtatgcatagcacactgtggkaggtttcaattkcttgcagaaggaagaaaacacatatcatgatctgaagcatgcccttcaataaatataaaagacctctactcacatgattgtcataaatcgtcaaagcagcctcatattccccctgtaaaagcaaacaaggaccgtgtgattaatattctggtagagtaagcgagagtgatgagtagcaaccaaggatataaatacaattaggagatgccataacactacttcactgtctcatgacttaagagagaaaagacgaaggtaaagcaggtcttactagctaaaataaccaatatatttaggtcc

SEQ ID NO: 5093 - DNA, 600 bp, Chicken  19866894108465_1
aactttttgaacaggagataaaagttatttcgtgagcgtccaacttgtattgcttcctttcatcctactgcgtgtgtttaaacataatttaaccactgaaacacagcacagctgctgtgtgcgttcacaaaggagcctgaaagtagatcattaatccattctgttggtcatcttcgtgactcaaagatttgcctaacctgaagtttagcaacaaggtgaataacaaagaatgccacgctttgcttgtgacctctcatgttgcgtctgtggtgagagcaaggtggctttccagccacagcrgtcctgattctgagctcatgttagatagtcctggggctaagggaagtatcacttagtataatgtaggttaagagatgaccattctgatgcatggctcagttctgagcctgaggggcctcggtgtgtgtgccaattttgctctttggatcctggcagccaaactcctttcagcaagtggcrgagctgcccagtgtgtggcagccagccagcgctgtgggatggggactgagtgctgcagctctgyctggtgggctcgtggccccacgtgtgggaagaaagatgctgcttggaatcacatgc

SEQ ID NO: 5094 - DNA, 600 bp, Chicken  19866894108465_2
tcaaagatttgcctaacctgaagtttagcaacaaggtgaataacaaagaatgccacgctttgcttgtgacctctcatgttgcgtctgtggtgagagcaaggtggctttccagccacagcrgtcctgattctgagctcatgttagatagtcctggggctaagggaagtatcacttagtataatgtaggttaagagatgaccattctgatgcatggctcagttctgagcctgaggggcctcggtgtgtgtgccaattttgctctttggatcctggcagccaaactcctttcagcaagtggcrgagctgcccagtgtgtggcagccagccagcgctgtgggatggggactgagtgctgcagctctgyctggtgggctcgtggccccacgtgtgggaagaaagatgctgcttggaatcacatgctgtgtaaacagtggtaaaccacaaacctgtctgtagttccctattagataggttttcttgtcatgcactgtttttcacaaaagcaattttttcacttaaataattgaatgtttcagtacattttgctttttatcttgaaggaaatgttttcagctatataattatccactcatccagagg

SEQ ID NO: 5095 - DNA, 600 bp, Chicken  19866894108465_3
tgtgacctctcatgttgcgtctgtggtgagagcaaggtggctttccagccacagcrgtcctgattctgagctcatgttagatagtcctggggctaagggaagtatcacttagtataatgtaggttaagagatgaccattctgatgcatggctcagttctgagcctgaggggcctcggtgtgtgtgccaattttgctctttggatcctggcagccaaactcctttcagcaagtggcrgagctgcccagtgtgtggcagccagccagcgctgtgggatggggactgagtgctgcagctctgyctggtgggctcgtggccccacgtgtgggaagaaagatgctgcttggaatcacatgctgtgtaaacagtggtaaaccacaaacctgtctgtagttccctattagataggttttcttgtcatgcactgtttttcacaaaagcaattttttcacttaaataattgaatgtttcagtacattttgctttttatcttgaaggaaatgttttcagctatataattatccactcatccagagggactctaaacagcatatttatactactctcagtatcgtgattcagaaaatgggctgtatcaaat

SEQ ID NO: 5096 - DNA, 600 bp, Chicken  19866894108467_1
gataggaaacataaaattgcttctaaatgtcaaagtctttaagtagaaaataaacaaaagagtgaaatctgaagctaatattgcaggggaaataaaaatagggatgaaagcataggtaaggactttgatacaattagtcaaaagttagtgaagccaaaattcaagttctgaggctttttgatgggaagcagttaaaatggtcttctgcttactggctacatgttgcgatggttaacagtgctagaattggttggattttttgtgtgaaaggctaaaattgtcaaactacaataagggagrcagctgggatgcgtgtggcagctctccatactgcctctacttgtccattctgggcagaaaaggaaccaaagtggagcaagtccactcccttaatttttgagtgtagattctccttactactgcttgcccaggcactggagactgaagtcaaaatcttgtgcattgtattgctgatgtgagtgcaaaagcagggcagatgggagaggcagggctgtgatggccatgccacttatcagcatttcagtcccatcctctcggctgcatcacaggctcctgtggcaggacaggagccagcctgac

SEQ ID NO: 5097 - DNA, 599 bp, Chicken  19866894108468_1
  misc_feature (1)..(83): n is any nucleotide
nnnnnnnnnnnnnnnnnnnnnnnnnnnnnnnnnnnnnnnnnnnnnnnnnnnnnnnnnnnnnnnnnnnnnnnnnnnnnnnnnnnaactgaaatccctctttgtttccctgctgtcaggtgggttcagaggaggaggagggatgctcagaagcaggccctgcaccacaccaaccagcgcttgctttccagcagccacaagcagccctgcaaaggtccagcacacccaaatgtccgtgtaagttaaagcagggcttggggtagccaccacggtccctgtgcagccttccccatgctgaaggarcccaggtgaggagcagaaggctgacagtgagggaaacctcagccaggagtgygcaacaaatgtgaagcccagatcttgggatgcagtcctttgggtagagaagcacaaggtcacgggaaaagggaaggagcagtatggtaagggagagacctgctttgggactgcctttctcacgacaccgcaaaacccttctgaaccaccagctccagcacacacacagcctgcccagccccagaagacttgtgcattgtaatttctactaactagaggctttggcaccgaaccatccaatcgatcta

SEQ ID NO: 5098 - DNA, 599 bp, Chicken  19866894108468_2
  misc_feature (1)..(31): n is any nucleotide
nnnnnnnnnnnnnnnnnnnnnnnnnnnnnnnaactgaaatccctctttgtttccctgctgtcaggtgggttcagaggaggaggagggatgctcagaagcaggccctgcaccacaccaaccagcgcttgctttccagcagccacaagcagccctgcaaaggtccagcacacccaaatgtccgtgtaagttaaagcagggcttggggtagccaccacggtccctgtgcagccttccccatgctgaaggarcccaggtgaggagcagaaggctgacagtgagggaaacctcagccaggagtgygcaacaaatgtgaagcccagatcttgggatgcagtcctttgggtagagaagcacaaggtcacgggaaaagggaaggagcagtatggtaagggagagacctgctttgggactgcctttctcacgacaccgcaaaacccttctgaaccaccagctccagcacacacacagcctgcccagccccagaagacttgtgcattgtaatttctactaactagaggctttggcaccgaaccatccaatcgatctatgggctgcacagaaggatgaaagaacagaatggcttcttccaactgcaataa

SEQ ID NO: 5099 - DNA, 600 bp, Chicken  19866894108477_1
ggcacattttcttgttttttttcacagtacatttgtagcccaatcaaacccttaaagtcatcactacacataaatcataatcgagatttaaaaaaatttacttgcaatacttaagatttcaagaattggaacaaaaagcttttttcaagtgatgcagctgcagagaaaatctattgggatcagctaaaaatgctgttatttttatgtatgtgtgcgaaacctcaacaaaacagccaagcaatattatactgggaagccagcatccactaagtgtgtgatttgtatgcattttgcccttayagtgattgaagaagtggggtattatggagygaaggatggcagattaacacgttttagttttgagttctggagtttaaaaaaagttacttttcttttaggtatgttttttaaatacacatacaaaatggtcaaatatatgccacagcctggttttgaactgggatgcaaaactgtcatacaaaatcctttttaacacatttcatgctgtgaaagcaccaaagaagacatctcagttttagttaaaagcaaagcaaaaatgacccttcccctctaaagcaattttagaaaggtcaaacaaag

SEQ ID NO: 5100 - DNA, 600 bp, Chicken  19866894108477_2
atttgtagcccaatcaaacccttaaagtcatcactacacataaatcataatcgagatttaaaaaaatttacttgcaatacttaagatttcaagaattggaacaaaaagcttttttcaagtgatgcagctgcagagaaaatctattgggatcagctaaaaatgctgttatttttatgtatgtgtgcgaaacctcaacaaaacagccaagcaatattatactgggaagccagcatccactaagtgtgtgatttgtatgcattttgcccttayagtgattgaagaagtggggtattatggagygaaggatggcagattaacacgttttagttttgagttctggagtttaaaaaaagttacttttcttttaggtatgttttttaaatacacatacaaaatggtcaaatatatgccacagcctggttttgaactgggatgcaaaactgtcatacaaaatcctttttaacacatttcatgctgtgaaagcaccaaagaagacatctcagttttagttaaaagcaaagcaaaaatgacccttcccctctaaagcaattttagaaaggtcaaacaaagtaacattaaaaatcatgcttcttcactgga

SEQ ID NO: 5101 - DNA, 600 bp, Chicken  19866894108477_3
ctgtgaaagcaccaaagaagacatctcagttttagttaaaagcaaagcaaaaatgacccttcccctctaaagcaattttagaaaggtcaaacaaagtaacattaaaaatcatgcttcttcactggaattcagcatggccaaatcctctgctggtctctccctgttacgacgctggcaaattattttctgttacaaagaacaaaatatttctgcctgttcctggcagccctatttctaccagagctccttcacaaaatctctttttcaacgaggcttcaactaagatctcatgtaaagggyaagaactctaggctgcaacaaaacacatcctgactgtattaattatattcaggaatataaaaacaccaactcctttcgtgtactgcagatttcttgttttgtgacatatgcatatataatttggtgcccaactatcaggagttggagacaattacaaacaaaagacaaatgaagctcacgtacgtaatttgcttctaccttaaagaggagaactgcaggggtttgactaccaaatggtaaggtctcccaatagctttcacctaacatgcttccacagctactttccatccactgctgaaa

SEQ ID NO: 5102 - DNA, 600 bp, Chicken  19866894108483_1
acgtgaaggggagtgcgtgaggctccctggtggcccgctcggtctgggccaccttcacggttgttttctgttttccaggctggcctccaaatctcagcctaaacaaaagcgcagggaggacgtagggtccaggaagaggtaaatggctccagtggagagcctgagtgccaggatcccagctcagcactgccaaagccgtgtgtgtccctgcactgctgggacgtggggaatggagcaggcaggggtgggatcccaggggcagggaccgtacagctgcaggcaggtgacacctctgctctsctggctgttgctcaggctctggtctctccttgcaggctgtttgcggagcggcagcagctcaactaccgcctgcactcagtgtcctgcacrgggacagaggtgcacatctccatgtgcacgttccagttctaccggggcaactcctcagcagcctgcagcactggcatgcccgctgttgtcagctgcctgcccgggcccctctttgctaccagcagcgcccagaagaagaagcagcgccagcagcagcagagccaggtgagccttggctgggtcctgcggtggtccacagctgctgccgcc

SEQ ID NO: 5103 - DNA, 600 bp, Chicken  19866894108483_2
atctcagcctaaacaaaagcgcagggaggacgtagggtccaggaagaggtaaatggctccagtggagagcctgagtgccaggatcccagctcagcactgccaaagccgtgtgtgtccctgcactgctgggacgtggggaatggagcaggcaggggtgggatcccaggggcagggaccgtacagctgcaggcaggtgacacctctgctctsctggctgttgctcaggctctggtctctccttgcaggctgtttgcggagcggcagcagctcaactaccgcctgcactcagtgtcctgcacrgggacagaggtgcacatctccatgtgcacgttccagttctaccggggcaactcctcagcagcctgcagcactggcatgcccgctgttgtcagctgcctgcccgggcccctctttgctaccagcagcgcccagaagaagaagcagcgccagcagcagcagagccaggtgagccttggctgggtcctgcggtggtccacagctgctgccgccctacgcagggctttgtcccccagtcccctcagttggctgagggtgagggtgcagggaacccatagggcaggaggtggggatggtgtcctg

SEQ ID NO: 5104 - DNA, 600 bp, Chicken  19866894108484_1
caaggatgacaatctcactttctgagaaatgctctacttgtgcagtgtttggtcttactggttatcaccctctcattcctcggaggaaaaaagtgcaggcaatagaaaaaggatcatctgtgggtgcagatggaagggaaggtgttgcttgtgggatacatctgccttccctcaaagcccagctaatcagcagtgggagtttttgtgcagtgttagttttttctccttgctctccattagcctggtgacagccttggctttccacagagtcactaacattgtaatttcccaagaaacacrtttgtgctggcagctaaaagagaagtaaatgattagtctgctctgtgctagtgtaacctgttgtgctcaatttctggaaagggtatgtagtgttgcctsttccttgccgtggctgcctggaaaggggacagyaaggtttttgactgtgaagacacccggctaaaaggcagggtgtgaactacagaacttaggggctgcagggtttccaagttctcatgcaacagctttaaacttttgtaaacaagtgatgggactcatacttgatctctgcagagaaggacctggaggtcctggtggaca

SEQ ID NO: 5105 - DNA, 600 bp, Chicken  19866894108484_2
caatagaaaaaggatcatctgtgggtgcagatggaagggaaggtgttgcttgtgggatacatctgccttccctcaaagcccagctaatcagcagtgggagtttttgtgcagtgttagttttttctccttgctctccattagcctggtgacagccttggctttccacagagtcactaacattgtaatttcccaagaaacacrtttgtgctggcagctaaaagagaagtaaatgattagtctgctctgtgctagtgtaacctgttgtgctcaatttctggaaagggtatgtagtgttgcctsttccttgccgtggctgcctggaaaggggacagyaaggtttttgactgtgaagacacccggctaaaaggcagggtgtgaactacagaacttaggggctgcagggtttccaagttctcatgcaacagctttaaacttttgtaaacaagtgatgggactcatacttgatctctgcagagaaggacctggaggtcctggtggacaacaggttggtcatgagccagcagtgtgtccccgtggcaaagaagaccaatggtatctgggggtgagcatggtcagcaggttgaggaaggtgatcctccc

SEQ ID NO: 5106 - DNA, 600 bp, Chicken  19866894108484_3
gaagggaaggtgttgcttgtgggatacatctgccttccctcaaagcccagctaatcagcagtgggagtttttgtgcagtgttagttttttctccttgctctccattagcctggtgacagccttggctttccacagagtcactaacattgtaatttcccaagaaacacrtttgtgctggcagctaaaagagaagtaaatgattagtctgctctgtgctagtgtaacctgttgtgctcaatttctggaaagggtatgtagtgttgcctsttccttgccgtggctgcctggaaaggggacagyaaggtttttgactgtgaagacacccggctaaaaggcagggtgtgaactacagaacttaggggctgcagggtttccaagttctcatgcaacagctttaaacttttgtaaacaagtgatgggactcatacttgatctctgcagagaaggacctggaggtcctggtggacaacaggttggtcatgagccagcagtgtgtccccgtggcaaagaagaccaatggtatctgggggtgagcatggtcagcaggttgaggaaggtgatcctcccctttgactctgctctggtgaggtcacatataga

SEQ ID NO: 5107 - DNA, 599 bp, Chicken  19866894108502_1
  misc_feature (1)..(172): n is any nucleotide
nnnnnnnnnnnnnnnnnnnnnnnnnnnnnnnnnnnnnnnnnnnnnnnnnnnnnnnnnnnnnnnnnnnnnnnnnnnnnnnnnnnnnnnnnnnnnnnnnnnnnnnnnnnnnnnnnnnnnnnnnnnnnnnnnnnnnnnnnnnnnnnnnnnnnnnnnnnnnnnnnnnnnnnnnnnnccgggagctaggcatggctttttgttttcaggtccgtgaggcaaggcgacaacacaggcgtggacctggtctgcacctacaggaaggagccctccagccctgacttggacagggtgggcctttaccaygaagtgagcaacaagaccagcgccatcacgcgcctgggcccctacagcctggacaggaccagcctctacgtcaacggtgaacaaggccactcctgctgcctccctctggcagcctcctcgggccctccgccttcccctcacgcagctccagctcatgactctctctcttcttccaggttacaacgaacagccagtgacgcagccagcracgcccagtgagtaccatacaggggcaggatgcacccaaaaggcaaccggtgccttcgcgggcctctcgtcccatgcagatgtggctctgg

SEQ ID NO: 5108 - DNA, 600 bp, Chicken  19866894108502_2
tgaggcaaggcgacaacacaggcgtggacctggtctgcacctacaggaaggagccctccagccctgacttggacagggtgggcctttaccaygaagtgagcaacaagaccagcgccatcacgcgcctgggcccctacagcctggacaggaccagcctctacgtcaacggtgaacaaggccactcctgctgcctccctctggcagcctcctcgggccctccgccttcccctcacgcagctccagctcatgactctctctcttcttccaggttacaacgaacagccagtgacgcagccagcracgcccagtgagtaccatacaggggcaggatgcacccaaaaggcaaccggtgccttcgcgggcctctcgtcccatgcagatgtggctctgggaccgagcttgtgatccctgggacaagggcagaacccgccagactttcccaacctaatgagggccggggaggaggaatagctggcccgccaccgctgcctttgcccacccactgccttcacagctgtcccccggcaccgcctcactccccatccgtgcttcttgcagctcccactcgtccaccaacgacacctgcaggccacgagcgtt

SEQ ID NO: 5109 - DNA, 600 bp, Chicken  19866894108504_1
ggacaggaccagcctctacgtcaacggtgaacaaggcctctcctgctgcctccctctggcagcctcctcgggccctccgccttcccctcacgcagctccagctcacgactctctctcttcttccaggttacaacgaacagccagtgacgcagccagcgacgcccagtgagtaccatacaggggcaggatgcacccaaaaggcaaccggtgcctcgcgggcctctcgtcccatgcagatgtggctctgggaccgagcttgtgatccctgggacaagggcagaacccgccagactttcccawcctaatgagggctggggaggaggaatagctggcccgccaccgctgcctttgcccacccactgccttcacagstgtccyccggcaccgcctcactccccatccgtgcttcttgcagctcccactcgtccaccaacgacacctgcaggccgcragcgtttcaycgtcaacttcaccatcaccaatctcccctacgattccgacctgcagattccccactcggcaaagctcaacgccacccagagggtcatgaccaccttggtaggtaacccgcaacgccgccaaggccaggacagcttgcca

SEQ ID NO: 5110 - DNA, 600 bp, Chicken  19866894108504_2
ccctccgccttcccctcacgcagctccagctcacgactctctctcttcttccaggttacaacgaacagccagtgacgcagccagcgacgcccagtgagtaccatacaggggcaggatgcacccaaaaggcaaccggtgcctcgcgggcctctcgtcccatgcagatgtggctctgggaccgagcttgtgatccctgggacaagggcagaacccgccagactttcccawcctaatgagggctggggaggaggaatagctggcccgccaccgctgcctttgcccacccactgccttcacagstgtccyccggcaccgcctcactccccatccgtgcttcttgcagctcccactcgtccaccaacgacacctgcaggccgcragcgtttcaycgtcaacttcaccatcaccaatctcccctacgattccgacctgcagattccccactcggcaaagctcaacgccacccagagggtcatgaccaccttggtaggtaacccgcaacgccgccaaggccaggacagcttgccactaggactggaaggtgtgcagggatgcaagcaggggtctcatcagaaacctttctcgttggcagctcaaccg

SEQ ID NO: 5111 - DNA, 600 bp, Chicken  19866894108504_3
gccttcccctcacgcagctccagctcacgactctctctcttcttccaggttacaacgaacagccagtgacgcagccagcgacgcccagtgagtaccatacaggggcaggatgcacccaaaaggcaaccggtgcctcgcgggcctctcgtcccatgcagatgtggctctgggaccgagcttgtgatccctgggacaagggcagaacccgccagactttcccawcctaatgagggctggggaggaggaatagctggcccgccaccgctgcctttgcccacccactgccttcacagstgtccyccggcaccgcctcactccccatccgtgcttcttgcagctcccactcgtccaccaacgacacctgcaggccgcragcgtttcaycgtcaacttcaccatcaccaatctcccctacgattccgacctgcagattccccactcggcaaagctcaacgccacccagagggtcatgaccaccttggtaggtaacccgcaacgccgccaaggccaggacagcttgccactaggactggaaggtgtgcagggatgcaagcaggggtctcatcagaaacctttctcgttggcagctcaaccgccttct

SEQ ID NO: 5112 - DNA, 600 bp, Chicken  19866894108504_4
gccagcgacgcccagtgagtaccatacaggggcaggatgcacccaaaaggcaaccggtgcctcgcgggcctctcgtcccatgcagatgtggctctgggaccgagcttgtgatccctgggacaagggcagaacccgccagactttcccawcctaatgagggctggggaggaggaatagctggcccgccaccgctgcctttgcccacccactgccttcacagstgtccyccggcaccgcctcactccccatccgtgcttcttgcagctcccactcgtccaccaacgacacctgcaggccgcragcgtttcaycgtcaacttcaccatcaccaatctcccctacgattccgacctgcagattccccactcggcaaagctcaacgccacccagagggtcatgaccaccttggtaggtaacccgcaacgccgccaaggccaggacagcttgccactaggactggaaggtgtgcagggatgcaagcaggggtctcatcagaaacctttctcgttggcagctcaaccgccttctgaaggacaccagcattggccccagtttccttggatgtgcaacgacagccttcaggtaggggagtcaaccgagt

SEQ ID NO: 5113 - DNA, 600 bp, Chicken  19866894108504_5
cccagtgagtaccatacaggggcaggatgcacccaaaaggcaaccggtgcctcgcgggcctctcgtcccatgcagatgtggctctgggaccgagcttgtgatccctgggacaagggcagaacccgccagactttcccawcctaatgagggctggggaggaggaatagctggcccgccaccgctgcctttgcccacccactgccttcacagstgtccyccggcaccgcctcactccccatccgtgcttcttgcagctcccactcgtccaccaacgacacctgcaggccgcragcgtttcaycgtcaacttcaccatcaccaatctcccctacgattccgacctgcagattccccactcggcaaagctcaacgccacccagagggtcatgaccaccttggtaggtaacccgcaacgccgccaaggccaggacagcttgccactaggactggaaggtgtgcagggatgcaagcaggggtctcatcagaaacctttctcgttggcagctcaaccgccttctgaaggacaccagcattggccccagtttccttggatgtgcaacgacagccttcaggtaggggagtcaaccgagtgccccctctc

SEQ ID NO: 5114 - DNA, 600 bp, Chicken  19866894108509_1
ctgcatgggacgagaggcccgcgaggcaccggttgccttttgggtgcatcctgcccctgtatggtactcactgggcgtcgctggctgcgtcactggctgttcgttgtaacctggaagaagagagagagtcatgagctggagctgcgtgaggggaagacggagggcccgaggaggctgccggagggaggcagcaggagtggccttgttcaccgttgacgtagaggctggtcctgtccaggctgtaggggcccaggtgcgtgatggcgctggtcttgttgctcacttcatggtaaaggcccwccctgtccaagtcagggctggaaggctccttcctgtaggtgcagaccaggtccacgcctgtgttgtcgccttgcctcacggacctggaaaacagaaagccatgcctgagctcctggcttctgcacctcgttgcccagcggtcgaccggctctgcggcttctgaatgtgtacgtctgcgtgaatgcatgctcggtattcccccgtcaggccaagctggggctccgttcccctcctgcctcccctgaaagtacggcttcttttcaggaagccgtgggcacgaggagcatttggagtcattct

SEQ ID NO: 5115 - DNA, 471 bp, Chicken  19866894108514_1
agagggggcactcggttgactcccctacctgaaggctgtcgttgcacatccaaggaaactggggccaatgctggtgtccttcagaaggcggttgagctgccaacgagaaaggtttctgatgagacccctgcttgcatccctgcacaccttccagtcctagtggcaagctgtcctggccttggcggcgttgcgggttacctaccaaggtggtcatgaccctctgggtggcgttgagctttgccgagtggggaatctgcaggtcggaatcgtaggggagattggtgatggtgaagttgacgrtgaaacgctcgcggcctgcaggtgtcgttggtggacgagtgggagctgcaagaagcacggatggggaagtgaggcggtgccgggggacagctgtgaaggcagtgggtgggcaaaggcagcggtggcgggccagctattcctcctccccagccctcattaggttgggaaagt

SEQ ID NO: 5116 - DNA, 600 bp, Chicken  19866894108521_1
actctgggcattagaaacagtttctttactatgagaatggtaactgtaacaggcttcctagagaggcagtttatgctccatgcctacatatgagaggtatttagagaatactgtcaataaaatgcttcaacttttagttatttaagtggtgaggtagttggaattggtggtctttctaggtattttaattccagttctacacccacaacaaagcatgctcaagctttaggccacagtaatagggacagacctttacaattaggctttaggctcctttaaagagctgtggctgtgaaaggyaatgctttttaattcttcagccttggcatcttcctcatccctgttccatttcaatcctttggcaaatgatgatggggagcaaaaaagacaggaacactaagcttctatcctttgaataaaaacaacttctattctttgagtcagtctataagactgctttttaaaaatgagtttattaaggcaaaatagttttgcattaataaccatctttctgtgcattctatcctactgcagttttctttatttaawaaackgtgatacaatatttttgtttgtttgttctgcccacataagaccagc

SEQ ID NO: 5117 - DNA, 600 bp, Chicken  19866894108521_2
cctttacaattaggctttaggctcctttaaagagctgtggctgtgaaaggyaatgctttttaattcttcagccttggcatcttcctcatccctgttccatttcaatcctttggcaaatgatgatggggagcaaaaaagacaggaacactaagcttctatcctttgaataaaaacaacttctattctttgagtcagtctataagactgctttttaaaaatgagtttattaaggcaaaatagttttgcattaataaccatctttctgtgcattctatcctactgcagttttctttatttaawaaackgtgatacaatatttttgtttgtttgttctgcccacataagaccagcaattccaaattattatagtatattgcagatatttagtattattgggttttacctgggaagcagatggaacctcaatactcaaattaagcctggattttacgctgataggagaatgcaagccattcaayttgacagyagaatcagtcttgctaacattggaattgagaccagctgtgagatgggtaccgcgagatggaagaacagtgcaagttcttgaatcagaagatatttcaaggtccatagcagcaa

SEQ ID NO: 5118 - DNA, 600 bp, Chicken  19866894108521_3
acaattaggctttaggctcctttaaagagctgtggctgtgaaaggyaatgctttttaattcttcagccttggcatcttcctcatccctgttccatttcaatcctttggcaaatgatgatggggagcaaaaaagacaggaacactaagcttctatcctttgaataaaaacaacttctattctttgagtcagtctataagactgctttttaaaaatgagtttattaaggcaaaatagttttgcattaataaccatctttctgtgcattctatcctactgcagttttctttatttaawaaackgtgatacaatatttttgtttgtttgttctgcccacataagaccagcaattccaaattattatagtatattgcagatatttagtattattgggttttacctgggaagcagatggaacctcaatactcaaattaagcctggattttacgctgataggagaatgcaagccattcaayttgacagyagaatcagtcttgctaacattggaattgagaccagctgtgagatgggtaccgcgagatggaagaacagtgcaagttcttgaatcagaagatatttcaaggtccatagcagcaacaaat

SEQ ID NO: 5119 - DNA, 600 bp, Chicken  19866894108521_4
ctattctttgagtcagtctataagactgctttttaaaaatgagtttattaaggcaaaatagttttgcattaataaccatctttctgtgcattctatcctactgcagttttctttatttaawaaackgtgatacaatatttttgtttgtttgttctgcccacataagaccagcaattccaaattattatagtatattgcagatatttagtattattgggttttacctgggaagcagatggaacctcaatactcaaattaagcctggattttacgctgataggagaatgcaagccattcaayttgacagyagaatcagtcttgctaacattggaattgagaccagctgtgagatgggtaccgcgagatggaagaacagtgcaagttcttgaatcagaagatatttcaaggtccatagcagcaacaaatactacacacatgaaaataagacacacatgaaaacagaacagatctaatagttaataactctgaagttccaacatacagtggagctaatttttctaagctttcattactcaagagtttacacagcgcatgtcataataataaaactttctatcatgaagtatcctctgttaatag

SEQ ID NO: 5120 - DNA, 600 bp, Chicken  19866894108521_5
tgagtcagtctataagactgctttttaaaaatgagtttattaaggcaaaatagttttgcattaataaccatctttctgtgcattctatcctactgcagttttctttatttaawaaackgtgatacaatatttttgtttgtttgttctgcccacataagaccagcaattccaaattattatagtatattgcagatatttagtattattgggttttacctgggaagcagatggaacctcaatactcaaattaagcctggattttacgctgataggagaatgcaagccattcaayttgacagyagaatcagtcttgctaacattggaattgagaccagctgtgagatgggtaccgcgagatggaagaacagtgcaagttcttgaatcagaagatatttcaaggtccatagcagcaacaaatactacacacatgaaaataagacacacatgaaaacagaacagatctaatagttaataactctgaagttccaacatacagtggagctaatttttctaagctttcattactcaagagtttacacagcgcatgtcataataataaaactttctatcatgaagtatcctctgttaatagctttttaa

SEQ ID NO: 5121 - DNA, 600 bp, Chicken  19866894108524_1
tgatatgaatacaatgccaacagcttctcctggtccttggaaagctcttaacttttttattcttacgtattctactttactgctatacagtattagtttctgtcatactgctttgccaggagtaccccatagcgattcacaattcaataaaagcttgtagatctgttgctgtgtgcctttgcttaatgttaatagtaagtaaacaggtaaatctaaaggaaggtaaaaattttcattgcaatagttgggaaattgaggaaggagatgaagagttaacatttgaaagcatatccctagggmtgccatgtgttcctatcaccttccagtgtgctggaagaattaaggaatacaagaatccccaggaggaatttggcagactggcttgattggcattcattttaccttctcctgtgccagtacttgtggtgcaggcagcaatgtcatctcattacaaatgctcccatggaatagtgctgtcctgctagtcagaggccagaagctggagagagtctcgagcctgaactctttgcttaatgattagctcgtgcatagtagagcatagggaagaacaaataataattaagtgcaggtatatctctg

SEQ ID NO: 5122 - DNA, 600 bp, Chicken  19866894108524_2
gttcctatcaccttccagtgtgctggaagaattaaggaatacaagaatccccaggaggaatttggcagactggcttgattggcattcattttaccttctcctgtgccagtacttgtggtgcaggcagcaatgtcatctcattacaaatgctcccatggaatagtgctgtcctgctagtcagaggccagaagctggagagagtctcgagcctgaactctttgcttaatgattagctcgtgcatagtagagcatagggaagaacaaataataattaagtgcaggtatatctctgtgctatcragctagaaattggctaaaggtgaaaagctcaaatatcacgctctttccaaagtgctaggattggattcctctccagtagcaaggagctgcttctcacttctgagggtagcattataggtagctctgtctcctgaatggatcacagtattactgcattattaggaacaattttggtgctcttctgattgcttttggaactgcttagaaaaagactttgtaacatgggatttttactgactatattttttcctgtgttgattaaagaaagtgcagaacactgtgaacatgtgtagtarcaag

SEQ ID NO: 5123 - DNA, 597 bp, Chicken  19866894108524_3
atcragctagaaattggctaaaggtgaaaagctcaaatatcacgctctttccaaagtgctaggattggattcctctccagtagcaaggagctgcttctcacttctgagggtagcattataggtagctctgtctcctgaatggatcacagtattactgcattattaggaacaattttggtgctcttctgattgcttttggaactgcttagaaaaagactttgtaacatgggatttttactgactatattttttcctgtgttgattaaagaaagtgcagaacactgtgaacatgtgtagtarcaagaccactcctaatcctaaatcctttactaaatctgaggtggcattagatagaattaaaccataattctttcctcacttagtagtggccccatgatttcatcaaggaatcatttagtaggaacccatggagctctaacactattctgcaataaaagcttctaaagtgaacattcagattagattaaaacatctggcaccaatacatagggatatattttccatacactatgagcttctgtcaaatgtaaggtcacaaggtctgcagtccttcctatttatttcctgaagagaatg

SEQ ID NO: 5124 - DNA, 599 bp, Chicken  19866894108529_1
  misc_feature (1)..(136): n is any nucleotide
nnnnnnnnnnnnnnnnnnnnnnnnnnnnnnnnnnnnnnnnnnnnnnnnnnnnnnnnnnnnnnnnnnnnnnnnnnnnnnnnnnnnnnnnnnnnnnnnnnnnnnnnnnnnnnnnnnnnnnnnnnnnnnnnnnnnnnnntctgaatcacctctgacatgaattaagtgtacagtaaccttaatccactgaactacatagcccagatggcgaaaccaacaatgaaactgaaatgacagaatcagaaacatctaaaaatagccactcaatgattttcctgctgtaagtacttgagattctgcacrtttgtttgaagttatgcattaattccgcagcttctatcttgataagtgctaaaactgtaagcaggttcttgaactccactttccccatgccaattttgagattcaagactcagtaaacaatttaccagcccatgctgaaatgttacaagaacaaatacatacacaactaataacagcataccagtgaacttcaagagcaatagaatcacagaatggtctgggttggaaaggaccataatgattattgagtttcaaccccctgctatgtgcagggtcgccaaccagcagaccaggctgcc

SEQ ID NO: 5125 - DNA, 600 bp, Chicken  19866894108545_1
aataagtgtcattaattgtacacatttaaataaggtttgagtgtgaatatttacatgcttaaatataagcaccgagtgctttgcaggcatgcacagtagtatttagtgcatatgcaagaggtggtttctcagaagtggaaacaagtggtcactctttgcaaaaaggaattagaaacagtcaggtgttgtccctaggtgccagcaggtgtgtttccttttcatctgcagaacatgtatacgtcagcatatgcattagagagggagcacttttgatcaacccttgagaattctatgctcagraagcaaatattgccaaagaagagactttgggtcactgtttgcaaacaaagcacaacaaagcacactgaagtggaaaatccttctgagctaatctttttaaagtaatccttttaagatctagaattatttatattttacttaatttcattttaaaatatactatgctatagttctgaaaaagctattttagaataaaacctgaatgacaacaggtatttctaggacttttactttgtaagctactccrtaaactcacagctccagctgctggcagatttaccaggattttcttagccatac

SEQ ID NO: 5126 - DNA, 486 bp, Chicken  19866894108545_2
atgcattagagagggagcacttttgatcaacccttgagaattctatgctcagraagcaaatattgccaaagaagagactttgggtcactgtttgcaaacaaagcacaacaaagcacactgaagtggaaaatccttctgagctaatctttttaaagtaatccttttaagatctagaattatttatattttacttaatttcattttaaaatatactatgctatagttctgaaaaagctattttagaataaaacctgaatgacaacaggtatttctaggacttttactttgtaagctactccrtaaactcacagctccagctgctggcagatttaccaggattttcttagccatacaagtaggagaaaacatgaagttgaaagaatccaaagaaaacatcgttttctgcttagaagagcatacaaacaaacaaacgcaccagaaaataaattcaataaacattcctaagttttcttatgctctcttaag

SEQ ID NO: 5127 - DNA, 600 bp, Chicken  19866894108554_1
tgatcattagtgtttatggatttcagtaaaaaaaaaaaagtgacttgttgatatacatgtgcgtgagtatatcaatatggatatcacttgtgtctttgtgtatgtataaaaatatgtggttataacatcacttacaagatgcacaaatttgataacttcaagaactcatagcaggagccaggggggaggaattaaagaatgtaaagatttcattagaagtttttcatgcccttaattgtgacaatggtatgtaacaatgctataatctctgtgatagaccttatagtggcacatctcttmaatgatattactgtgatgtgaaaaaacatgtattttaattttgagtaagaatattaatgtaatgggcatatattttaaagagtataagaagcataattggagctaatgatgcttttcctgtgtaacttaagatattgctcttaaagtattcrcagatctctttgtagctcaaagctgcgaaatgaagcatttgaattattttgtcctgactttgtgtgtagtggtatgtagccagttatgtagaattatcaaaaagctgctgttatttgtcttgaaaaaaatctctagagctgaacttga

SEQ ID NO: 5128 - DNA, 600 bp, Chicken  19866894108554_2
taacttcaagaactcatagcaggagccaggggggaggaattaaagaatgtaaagatttcattagaagtttttcatgcccttaattgtgacaatggtatgtaacaatgctataatctctgtgatagaccttatagtggcacatctcttmaatgatattactgtgatgtgaaaaaacatgtattttaattttgagtaagaatattaatgtaatgggcatatattttaaagagtataagaagcataattggagctaatgatgcttttcctgtgtaacttaagatattgctcttaaagtattcrcagatctctttgtagctcaaagctgcgaaatgaagcatttgaattattttgtcctgactttgtgtgtagtggtatgtagccagttatgtagaattatcaaaaagctgctgttatttgtcttgaaaaaaatctctagagctgaacttgagaaacaacaggccagagtttgcagaatggaaagaaaggggaggaaaagatgaatccttatgcccatttaatcattttgctcatggtagaaattacctaggtggcaattcagaatcttttttagcattttagaaattccattgaaatacattt

SEQ ID NO: 5129 - DNA, 600 bp, Chicken  19866894108554_3
ctgcgaaatgaagcatttgaattattttgtcctgactttgtgtgtagtggtatgtagccagttatgtagaattatcaaaaagctgctgttatttgtcttgaaaaaaatctctagagctgaacttgagaaacaacaggccagagtttgcagaatggaaagaaaggggaggaaaagatgaatccttatgcccatttaatcattttgctcatggtagaaattacctaggtggcaattcagaatcttttttagcattttagaaattccattgaaatacatttctattataaaactgtattttaygtttaaaggtattctaaggtaatcatgtttcacttctttaacatatgctagtgagattgtgttaagtctttgtttgtgaaaagtagcaagttaaaagatttgaagtatgactttatctgcaattgctgtgattgttgttcccctttacattagggtgtcagtgtggaggcagttgatcctgtatttcaagcaaaaatgttggatatgctgaaacagacaggaaggtaagtcaccctgagaagagctgggaataacaaacacactctgcatactgtttagaagaaacagttggctctctgc

SEQ ID NO: 5130 - DNA, 600 bp, Chicken  19866894108556_1
gcatggtaacgagcgtatttaatgctacctgttcctttagtctcaaataaaagtcttctgtccactccaccttgtatccccactctaccagaaggagataaaaagattgtgaagatatatagaggatacaaatataagttcatacgtcttatgcttagattgagatgccagcctgctgccctgagccaagacccttccattctgccctgcagcaatatttcaggttgtttccagtgtcttccatcagccaagtttagattgtgcccctctcagtaagtgggtttctgatctcttttaacrttgcttcctcccatgtcacaaactttagattttaggtgtcactgtaggaacaagtcatctccacgtcacacagatggggaggtgcatttctccttatttatgactgaaaacattgtatattccatcccctacaaggctctgtcaagggtcaagtcatactagaaacattctattgatgaatagaccctcattttccacagccttcaccaacttacagtttcaacaatctccttgcaaatttttgcactgcatgtacaaaaatctagacttccaagaagtcatgaatttctatgtgcttaa

SEQ ID NO: 5131 - DNA, 600 bp, Chicken  19866894108556_2
tctactgctcaatacaacatctctgccgatcttcaacgcaacagtagtggaagtaggtcaaagcaattggtgttgggaagcctacatctataataagtgtaattctgggttttacttcaaactactcagttccctggacctgacaccccatcacacaatttgaatctgcttgatgaaggaatcattgtgttggaccatattttcacattatagggtagggtgtatttgctgagtgctctaagaacagtttccaatgtcattttgtctaaacagaatctcattcatgcataccacaccctytctgtgaaccaaaccacaactgggggagaatcaagagatttgtctcagtattgcatttctgtcacaaaccaaaatggtaatatagataaagccttagtgttctgatttctattgctttgatttggcagttctgctgaacttacctatctctgggttttctgggtgctactctgtgattcaggcattcctccttcatctatgtctctgaggaaattaatttttttyctttttttaacaaaatgaaagaaatacaaaaagaggtcaacccagaagagctgctggctaaggaaacttcagagt

SEQ ID NO: 5132 - DNA, 600 bp, Chicken  19866894108556_3
ttgctgagtgctctaagaacagtttccaatgtcattttgtctaaacagaatctcattcatgcataccacaccctytctgtgaaccaaaccacaactgggggagaatcaagagatttgtctcagtattgcatttctgtcacaaaccaaaatggtaatatagataaagccttagtgttctgatttctattgctttgatttggcagttctgctgaacttacctatctctgggttttctgggtgctactctgtgattcaggcattcctccttcatctatgtctctgaggaaattaatttttttyctttttttaacaaaatgaaagaaatacaaaaagaggtcaacccagaagagctgctggctaaggaaacttcagagtaaaaattaactccttcagcaaaagaaagcactgtacccaggcatcaatcctctacaaactgatgaactcatcccactcaagtatcagtttcaccagcagctgtttttttttggtttgtttgtttgtttgttttggtttttttttgtttttttttaaaacaaaaacaaaaacaaagacatgccctagtgctccttatttctgagatgaatgctagtgaccagtcta

SEQ ID NO: 5133 - DNA, 600 bp, Chicken  19866894108559_1
ctgcacagaggtccccctctcgttatacaaatgaaataaaccaaaataaaaatgatgttcattaaaatggtcctgcgtcgattttattgtcctgccttaaaacaaaactacgagaactccaaaatgctgctttccaaaaaggagagcatttccgttaattctaacagacccaaattttctccaaccagagtgagcattactgaagggaaatcctggttagccgaatagttattccttcattaaaaacagttgtaacataacattatttaactactcctgaaatgcacgcatttgcaaacrtaacacattgccaccaggagccaaaacatcgatctggaaatccaacccaattatgcttaaaaactacgctggctttgtttcttaaaataaagtatccttccactttaaaatactaaaataaaagatattttagcgtcacggcaagatgatacagatactatcggcctgaatggattacagtgaaagaacgccatctgctaaagccaaaatgtttacttaacgagtgaacagtatcaatcagtaactgcacgggtgcgatcgccgctgccctctgcgtgcagtggtgttcctctttgaacc

SEQ ID NO: 5134 - DNA, 600 bp, Chicken  19866894108563_1
aaatcctgacgtgcccactgaagaccaggagagtaactcttgcatgatgttaggattattgcctttgtagaataatgtatgcgggttaactatgaccattttctgaagttgtgtattggtccagtgtttgaaactagcctgttgcaagacaagtcctgcaatgtttttactgtttttattataatacacatgctaaggataccatagtaaagctagatttgagagacacgtgtttatataaatgcaaaagaagtgcgaaatttcctacttgtggagcaccattatgatagaaataacctyaactacaacttgctatttagttttatacactgcagcttagtttttcctctataaaatagcatacatggttgagaattttggctatgccgctccacattcagttgtgacattgtaaacattcattttatatcttcctttttgcaaagctataagtgtgcatcaaaatatttccatctctacagtaatttaaaatattaaaaacaagggctagatttcaacgtggctgtaaaatgtctttcggatcttgacatacatttctatatgcgcctgttggtagtgcccctgcatgcatgctcgtgc

SEQ ID NO: 5135 - DNA, 599 bp, Chicken  19866894108564_1
  misc_feature (1)..(174): n is any nucleotide
nnnnnnnnnnnnnnnnnnnnnnnnnnnnnnnnnnnnnnnnnnnnnnnnnnnnnnnnnnnnnnnnnnnnnnnnnnnnnnnnnnnnnnnnnnnnnnnnnnnnnnnnnnnnnnnnnnnnnnnnnnnnnnnnnnnnnnnnnnnnnnnnnnnnnnnnnnnnnnnnnnnnnnnnnnnnnnccctggaagtatcataggaagtattgtataaattcgttgggatgtttacaattcagttgcaaaaaataaataagtaaatagctgtgtaatggaaaagttagaatagactcaaatacagtaagaccrtaacatttgtttctggattggtgaatgggactcaaacctactgtgttctgggctggtttgggagaggctggtcattcctttctcctttttattttgtcattacagctagagatgtgaaagatataaatcacagtctggtggaatgagaacagytttkgaaatctcagaggctttcttgtgcaccctattttcatatgggtttctttttttttttttttttccccagtagcttcactgccaacagagaattatttatattgagaattttcaatgatgaataaagagaagccttcacagga

SEQ ID NO: 5136 - DNA, 599 bp, Chicken  19866894108564_2
  misc_feature (1)..(21): n is any nucleotide
nnnnnnnnnnnnnnnnnnnnnccctggaagtatcataggaagtattgtataaattcgttgggatgtttacaattcagttgcaaaaaataaataagtaaatagctgtgtaatggaaaagttagaatagactcaaatacagtaagaccrtaacatttgtttctggattggtgaatgggactcaaacctactgtgttctgggctggtttgggagaggctggtcattcctttctcctttttattttgtcattacagctagagatgtgaaagatataaatcacagtctggtggaatgagaacagytttkgaaatctcagaggctttcttgtgcaccctattttcatatgggtttctttttttttttttttttccccagtagcttcactgccaacagagaattatttatattgagaattttcaatgatgaataaagagaagccttcacaggacagcacatagtgttccattctgagctcaggaacagatataagcttttatttttccttgaccactgttgtatatgtatggcaaatttgcattctttcataaacgatcttagaaatttaaatgtaaaatatttttcattttatagaatatgaata

SEQ ID NO: 5137 - DNA, 599 bp, Chicken  19866894108564_3
  misc_feature (1)..(17): n is any nucleotide
nnnnnnnnnnnnnnnnnccctggaagtatcataggaagtattgtataaattcgttgggatgtttacaattcagttgcaaaaaataaataagtaaatagctgtgtaatggaaaagttagaatagactcaaatacagtaagaccrtaacatttgtttctggattggtgaatgggactcaaacctactgtgttctgggctggtttgggagaggctggtcattcctttctcctttttattttgtcattacagctagagatgtgaaagatataaatcacagtctggtggaatgagaacagytttkgaaatctcagaggctttcttgtgcaccctattttcatatgggtttctttttttttttttttttccccagtagcttcactgccaacagagaattatttatattgagaattttcaatgatgaataaagagaagccttcacaggacagcacatagtgttccattctgagctcaggaacagatataagcttttatttttccttgaccactgttgtatatgtatggcaaatttgcattctttcataaacgatcttagaaatttaaatgtaaaatatttttcattttatagaatatgaatatgtt

SEQ ID NO: 5138 - DNA, 600 bp, Chicken  19866894108565_1
ttcagggagaaaagccagacaatatccaggagactgcctctaccctgatgtcagactgtggcttttagatggagggtgggtcaaagccttgttctcatccctaaaaggaaagcatcgccttggtgcaagcacactgcagtatggacagagacagtgtccacggtgcttgttttaagcatcccttccaaactttaggatgccaagttttacttgcacttagcggggctttttttttttgcctgatccggggagctgtgctgtggagtagttctctgccattagcagagaagtgagtcttaygggatttcagttccataagcagaggaaggaagatgtgaatgtaactgtagctgaaacctaaattactcacagctctggaagaataattaaagatcttatcaggaaaaaataatcatgttcattgtcctttaatgtaaaaaacagactcagtatttgtcagtaatgcaatgggaagcacgtgctgtgttaattaaaagtagctgcccatcactttggctgtaccacttacttcacaggcaggtgcagtgctcctcctggcacatgttaggctggttttgttttctgctcagcgttttctct

SEQ ID NO: 5139 - DNA, 600 bp, Chicken  19866894108565_2
aaaataatcatgttcattgtcctttaatgtaaaaaacagactcagtatttgtcagtaatgcaatgggaagcacgtgctgtgttaattaaaagtagctgcccatcactttggctgtaccacttacttcacaggcaggtgcagtgctcctcctggcacatgttaggctggttttgttttctgctcagcgttttctctgtgcacctccacgcccctctgttgcactcttctcatctcgcccttctgcatgctgccttctgcacttcctcacaagtctgcctccccctctgctctcttgtcctsctttgctttagcctctctcagctcttgctctccccygttctgccttctgttgtctcactgtgctcgtttctgtcactaggaccccaagagctcccctttgcttcctccggacctgttaaagagtctggctgccttggaggaggaggaagagctgattttctctaatcctcctgatctttacccagctctgctggggcctctcgcctctcttcctggacgaagcctctttgtatgtatttgacttaatactgctgcttctctaactggcatctctttcttctgtgaagttataagaaatgg

SEQ ID NO: 5140 - DNA, 600 bp, Chicken  19866894108565_3
cagactcagtatttgtcagtaatgcaatgggaagcacgtgctgtgttaattaaaagtagctgcccatcactttggctgtaccacttacttcacaggcaggtgcagtgctcctcctggcacatgttaggctggttttgttttctgctcagcgttttctctgtgcacctccacgcccctctgttgcactcttctcatctcgcccttctgcatgctgccttctgcacttcctcacaagtctgcctccccctctgctctcttgtcctsctttgctttagcctctctcagctcttgctctccccygttctgccttctgttgtctcactgtgctcgtttctgtcactaggaccccaagagctcccctttgcttcctccggacctgttaaagagtctggctgccttggaggaggaggaagagctgattttctctaatcctcctgatctttacccagctctgctggggcctctcgcctctcttcctggacgaagcctctttgtatgtatttgacttaatactgctgcttctctaactggcatctctttcttctgtgaagttataagaaatggaaagttactttctcctccccattcctcccctccacc

SEQ ID NO: 5141 - DNA, 600 bp, Chicken  19866894108569_1
ccgtgcccgggctgtccccgcacgctgccggctcggggatgcggggggagcgtcgggccggagcggagccccgggcggctcgctgctgccccctagcgggagagggacgcaattacagccccgggggctttggggggggctctccccatgagctcccgcggacgcccccttccaggaccttccaggaaagcctgcttcttttcttcaacctttcggcactttcttccttttcctgaggctctaagtaaggtctccgggagagggcactcggccgagtggtttcctggaggcgttttgcaraggaggtgcagcggagccgccgtggattgaaggatgctgagcacagagccgtccccagcccatagcacagccgctgggcttcaggctgtgtgtgcgccttcatgatttcactttggggctgaggaacgtgaagcctgcacccgattctcaggcctgagctgcagggacagctgtgggacaggasagggaatgcctgaaatcacacaaytgtagggattggaagggacctctaatgatcattgagtccaaccccccagatgttgagcagtgccatagccagccctgttccctgcaggcagc

SEQ ID NO: 5142 - DNA, 600 bp, Chicken  19866894108569_2
ggaaagcctgcttcttttcttcaacctttcggcactttcttccttttcctgaggctctaagtaaggtctccgggagagggcactcggccgagtggtttcctggaggcgttttgcaraggaggtgcagcggagccgccgtggattgaaggatgctgagcacagagccgtccccagcccatagcacagccgctgggcttcaggctgtgtgtgcgccttcatgatttcactttggggctgaggaacgtgaagcctgcacccgattctcaggcctgagctgcagggacagctgtgggacaggasagggaatgcctgaaatcacacaaytgtagggattggaagggacctctaatgatcattgagtccaaccccccagatgttgagcagtgccatagccagccctgttccctgcaggcagctgtcctgctttcagctgggatagaattcatgctcttcctggctgctgcaatggagctccttaggatttaggatgggaataatgctgataacacagacatgtttggtctatcgcagagcagtgcttacacaagccaaggatgtttcagcttctcacactgccctgccagcaccaggctgggagga

SEQ ID NO: 5143 - DNA, 600 bp, Chicken  19866894108569_3
cctttcggcactttcttccttttcctgaggctctaagtaaggtctccgggagagggcactcggccgagtggtttcctggaggcgttttgcaraggaggtgcagcggagccgccgtggattgaaggatgctgagcacagagccgtccccagcccatagcacagccgctgggcttcaggctgtgtgtgcgccttcatgatttcactttggggctgaggaacgtgaagcctgcacccgattctcaggcctgagctgcagggacagctgtgggacaggasagggaatgcctgaaatcacacaaytgtagggattggaagggacctctaatgatcattgagtccaaccccccagatgttgagcagtgccatagccagccctgttccctgcaggcagctgtcctgctttcagctgggatagaattcatgctcttcctggctgctgcaatggagctccttaggatttaggatgggaataatgctgataacacagacatgtttggtctatcgcagagcagtgcttacacaagccaaggatgtttcagcttctcacactgccctgccagcaccaggctgggaggaaagagccctcaccccagcagggag

SEQ ID NO: 5144 - DNA, 600 bp, Chicken  19866894108572_1
agttctcagagccccagttcctcatgaagtcacatcatttacacaaaaccttataacttactcagtaacataggattatgcttaagagcagttgaggatacatggcatggaaggtcattttgtaactgaggaacgtgtaaacagtggaggccaggagtcagtgtcatgaacagacgtggccaatgggctccttacaaatgtttaatatttagagggaaaaatgtaatttttgctgccaaattttaatttaattagggattgtttgggttttgttctttttaatgcggtttgtttgttatrttcactgagaagcatcattgccatggtaacggacagacacgtgcagggcagcgtgcacacttctacgtggcgtgccgggcgctgcgtgatccacagacatgcagcagtatgccaggggaggagatggggagatctctaacaagagcattgaaagccccagaacaaatcagaaaatgttatttgtctgtactaacaagaacacttcctcggtattccccagctttttctcaacactcctacttgggcattaaaagaacaggcaaaattaaatgaagctgtgggaagaatgcagagtttacc

SEQ ID NO: 5145 - DNA, 600 bp, Chicken  19866894108583_1
cagcaagaaagaagagagctcatttcttttgctccaactccgtgtctgatctagaatccagtcctgcaaatgctttccgatttcctaaagggatggcaagagctacagggtctgaactttgggtaggactcattcttaggtgcaaaaaacttcttcataagtcagcagattatgcgaaggctacagtatgggaaggaagagcaagaatattctggggtgtgctcagaggtatctagcctatgaaagatgattaaaatgaaaatccagtgagtggatgacccagaagttattactaacttrcattcatctggtgcttagatggtttggtgactgttccacgttggcttttgaaataaaatgactttagcatacaaccagattcctaaattctagttgggcacaagctgtgacacctttcgtctaagaagtaaagaacaaatgtggttacagctgtgcttcagataaagagcttgtttaagtgtttttctggaggagggccagcatactcagctcctcgtgcaccragctgggcagcaggctgcactgctcaggttttatttctgcaggctgcattgcacgcagtggttacctaccttccca

SEQ ID NO: 5146 - DNA, 600 bp, Chicken  19866894108583_2
agaggtatctagcctatgaaagatgattaaaatgaaaatccagtgagtggatgacccagaagttattactaacttrcattcatctggtgcttagatggtttggtgactgttccacgttggcttttgaaataaaatgactttagcatacaaccagattcctaaattctagttgggcacaagctgtgacacctttcgtctaagaagtaaagaacaaatgtggttacagctgtgcttcagataaagagcttgtttaagtgtttttctggaggagggccagcatactcagctcctcgtgcaccragctgggcagcaggctgcactgctcaggttttatttctgcaggctgcattgcacgcagtggttacctaccttcccattccagtggaactgtatctatttcaagctctccaaggttcttagaaaagtaaattattgctccccaagcaaatttatgtgctgaaatattatatccatcacgttgttcatacatgtgtaaacgtgtatgctggagacacaagagagcagggcttgcagctgagcaatatgagcacgttacagctaaggataccataaaaagagaagatcaagtatttatgtatt

SEQ ID NO: 5147 - DNA, 600 bp, Chicken  19866894108585_1
acattaaaaaagctgaaagtttatttagtttcacctctatctctagttactacatatttcagctctacaaaatgagatctgttcctggcttaaacagacctttattatcacctgctgttctgagcagcccggtggggttactgaggcagttccattctgcaattatagtgtagaacaaaatatattatttgaaactgcattatttgcaaggagtactgcctcattcatttgattgtagggtaaacttgcgactgcaatcttgactttttaaagaaactttaaactttgtgcctaaaactwtttgcattcataaacttcaaaggcatgataaaaggctgaatctcaaaccaggctttctgtatgtaatatgtcctctgcaaggtctaaagtattatygtattattacttcaaagaaaaagygggtatggttaatactgtcactcgaattgcagggaagaaattaatcttttatttttactttaattccctgaaatactcccctcygaactttcttttattattagtatgttttaaaaaggcaaagttaaagcagttctgctgcagtgtaataggctgtgagaatctcagaatgaaagcgtt

SEQ ID NO: 5148 - DNA, 600 bp, Chicken  19866894108585_2
gacctttattatcacctgctgttctgagcagcccggtggggttactgaggcagttccattctgcaattatagtgtagaacaaaatatattatttgaaactgcattatttgcaaggagtactgcctcattcatttgattgtagggtaaacttgcgactgcaatcttgactttttaaagaaactttaaactttgtgcctaaaactwtttgcattcataaacttcaaaggcatgataaaaggctgaatctcaaaccaggctttctgtatgtaatatgtcctctgcaaggtctaaagtattatygtattattacttcaaagaaaaagygggtatggttaatactgtcactcgaattgcagggaagaaattaatcttttatttttactttaattccctgaaatactcccctcygaactttcttttattattagtatgttttaaaaaggcaaagttaaagcagttctgctgcagtgtaataggctgtgagaatctcagaatgaaagcgttcaatgtggtcartgtaatggctcttcagcctaatgaagagtgcttgtgtttcagtgataatgggaagacagggagaaatccacaagagcagcacag

SEQ ID NO: 5149 - DNA, 600 bp, Chicken  19866894108585_3
tgagcagcccggtggggttactgaggcagttccattctgcaattatagtgtagaacaaaatatattatttgaaactgcattatttgcaaggagtactgcctcattcatttgattgtagggtaaacttgcgactgcaatcttgactttttaaagaaactttaaactttgtgcctaaaactwtttgcattcataaacttcaaaggcatgataaaaggctgaatctcaaaccaggctttctgtatgtaatatgtcctctgcaaggtctaaagtattatygtattattacttcaaagaaaaagygggtatggttaatactgtcactcgaattgcagggaagaaattaatcttttatttttactttaattccctgaaatactcccctcygaactttcttttattattagtatgttttaaaaaggcaaagttaaagcagttctgctgcagtgtaataggctgtgagaatctcagaatgaaagcgttcaatgtggtcartgtaatggctcttcagcctaatgaagagtgcttgtgtttcagtgataatgggaagacagggagaaatccacaagagcagcacaggagccccacraattagagcagcca

SEQ ID NO: 5150 - DNA, 600 bp, Chicken  19866894108585_4
tgcaaggagtactgcctcattcatttgattgtagggtaaacttgcgactgcaatcttgactttttaaagaaactttaaactttgtgcctaaaactwtttgcattcataaacttcaaaggcatgataaaaggctgaatctcaaaccaggctttctgtatgtaatatgtcctctgcaaggtctaaagtattatygtattattacttcaaagaaaaagygggtatggttaatactgtcactcgaattgcagggaagaaattaatcttttatttttactttaattccctgaaatactcccctcygaactttcttttattattagtatgttttaaaaaggcaaagttaaagcagttctgctgcagtgtaataggctgtgagaatctcagaatgaaagcgttcaatgtggtcartgtaatggctcttcagcctaatgaagagtgcttgtgtttcagtgataatgggaagacagggagaaatccacaagagcagcacaggagccccacraattagagcagccagcagtctgccccttctggtcgccacactgctcattccacttaatctgttcakgcagcaatacacgcttctgatrgcagccattt

SEQ ID NO: 5151 - DNA, 600 bp, Chicken  19866894108585_5
aacttcaaaggcatgataaaaggctgaatctcaaaccaggctttctgtatgtaatatgtcctctgcaaggtctaaagtattatygtattattacttcaaagaaaaagygggtatggttaatactgtcactcgaattgcagggaagaaattaatcttttatttttactttaattccctgaaatactcccctcygaactttcttttattattagtatgttttaaaaaggcaaagttaaagcagttctgctgcagtgtaataggctgtgagaatctcagaatgaaagcgttcaatgtggtcartgtaatggctcttcagcctaatgaagagtgcttgtgtttcagtgataatgggaagacagggagaaatccacaagagcagcacaggagccccacraattagagcagccagcagtctgccccttctggtcgccacactgctcattccacttaatctgttcakgcagcaatacacgcttctgatrgcagccatttctgacaccatactgaagcagaactccaaatgactacagcttgttaactctatgctagtgttggacataaccttggccactcttaatatgtttaattttgagagaacca

SEQ ID NO: 5152 - DNA, 600 bp, Chicken  19866894108585_6
ttcaaagaaaaagygggtatggttaatactgtcactcgaattgcagggaagaaattaatcttttatttttactttaattccctgaaatactcccctcygaactttcttttattattagtatgttttaaaaaggcaaagttaaagcagttctgctgcagtgtaataggctgtgagaatctcagaatgaaagcgttcaatgtggtcartgtaatggctcttcagcctaatgaagagtgcttgtgtttcagtgataatgggaagacagggagaaatccacaagagcagcacaggagccccacraattagagcagccagcagtctgccccttctggtcgccacactgctcattccacttaatctgttcakgcagcaatacacgcttctgatrgcagccatttctgacaccatactgaagcagaactccaaatgactacagcttgttaactctatgctagtgttggacataaccttggccactcttaatatgtttaattttgagagaaccagcatcatgtgtactgtgctgatattagacaccaatcatgtaagatatgcatgttattgtcaaggtatgattattttatggactatattatggca

SEQ ID NO: 5153 - DNA, 600 bp, Chicken  19866894108585_7
ttttactttaattccctgaaatactcccctcygaactttcttttattattagtatgttttaaaaaggcaaagttaaagcagttctgctgcagtgtaataggctgtgagaatctcagaatgaaagcgttcaatgtggtcartgtaatggctcttcagcctaatgaagagtgcttgtgtttcagtgataatgggaagacagggagaaatccacaagagcagcacaggagccccacraattagagcagccagcagtctgccccttctggtcgccacactgctcattccacttaatctgttcakgcagcaatacacgcttctgatrgcagccatttctgacaccatactgaagcagaactccaaatgactacagcttgttaactctatgctagtgttggacataaccttggccactcttaatatgtttaattttgagagaaccagcatcatgtgtactgtgctgatattagacaccaatcatgtaagatatgcatgttattgtcaaggtatgattattttatggactatattatggcagtgatgatgtgaatgtattgacactacataacccagcctatgtcctgaatatatgcatatagttct

SEQ ID NO: 5154 - DNA, 600 bp, Chicken  19866894108585_8
actcccctcygaactttcttttattattagtatgttttaaaaaggcaaagttaaagcagttctgctgcagtgtaataggctgtgagaatctcagaatgaaagcgttcaatgtggtcartgtaatggctcttcagcctaatgaagagtgcttgtgtttcagtgataatgggaagacagggagaaatccacaagagcagcacaggagccccacraattagagcagccagcagtctgccccttctggtcgccacactgctcattccacttaatctgttcakgcagcaatacacgcttctgatrgcagccatttctgacaccatactgaagcagaactccaaatgactacagcttgttaactctatgctagtgttggacataaccttggccactcttaatatgtttaattttgagagaaccagcatcatgtgtactgtgctgatattagacaccaatcatgtaagatatgcatgttattgtcaaggtatgattattttatggactatattatggcagtgatgatgtgaatgtattgacactacataacccagcctatgtcctgaatatatgcatatagttcttataaataagaacagcaaacaa

SEQ ID NO: 5155 - DNA, 600 bp, Chicken  19866894108587_1
ttttttaagcaggagtacacttcacttttgaactcagtatttcagcatgccacttaagagactgctctatttaagtgattgtcactcaaattagccccattgtttcgtgatatatagtcttctgtcgtgcctggattagccagctcagtgacagtgacaaacatgcagtggttgttgttagagagaggattctcacatgggagaacacgtacatcctgtcaggacacacaggtttctcaccagagagagggagaattttagcaaactggtatttattgcttgttcctgcatgcatatttwgtgtgtttgatgtcacagctcaacaacaaggaataaggtattgaatgaacgttccggcatgtaaagactttgctcacaaagaattaagagagcacctctgcagttaaagtatgaactacttatttacagctcggaattttctaacactgaaattagggttaagcctcaaaatagcaggtacaaaaggatctaaatctgcgcggcctgagttggcaacacaaagagggaactaaagccaacggaagctgtgtgagacacttggaaaaatcattttgttcccacaagtgcaaaagtatcagg

SEQ ID NO: 5156 - DNA, 600 bp, Chicken  19866894108587_2
cctcaaaatagcaggtacaaaaggatctaaatctgcgcggcctgagttggcaacacaaagagggaactaaagccaacggaagctgtgtgagacacttggaaaaatcattttgttcccacaagtgcaaaagtatcagggagaaaagggattcaatgcttttattcaatgatatatcaaatatgtaggaagaatatgtaacaaatgtaacatatgtaacaaagctggtgctcttatgagggaatattgtagtaacttccttaaatactttcaatcttaaataaataaataaatatttttttwwaaaaaaaagtttgccctgtgctatctttaatatttgcaatgacatcaaattgtcattccttctctgaagtaaattaattttataatatttatcaatctgctctatacagatagggaaaagaaaaagttaatttctcctcccttagaatagtaaatttatttgagaacaaaactacaaattcagaaaatgtgacaaaaatgaaatttctataggcagataattctggtagaatcatctctgcagatttctactgtcttcggttttggcaggatgcctactgaaacgaattctaargaata

SEQ ID NO: 5157 - DNA, 600 bp, Chicken  19866894108587_3
ctcaaaatagcaggtacaaaaggatctaaatctgcgcggcctgagttggcaacacaaagagggaactaaagccaacggaagctgtgtgagacacttggaaaaatcattttgttcccacaagtgcaaaagtatcagggagaaaagggattcaatgcttttattcaatgatatatcaaatatgtaggaagaatatgtaacaaatgtaacatatgtaacaaagctggtgctcttatgagggaatattgtagtaacttccttaaatactttcaatcttaaataaataaataaatatttttttwwaaaaaaaagtttgccctgtgctatctttaatatttgcaatgacatcaaattgtcattccttctctgaagtaaattaattttataatatttatcaatctgctctatacagatagggaaaagaaaaagttaatttctcctcccttagaatagtaaatttatttgagaacaaaactacaaattcagaaaatgtgacaaaaatgaaatttctataggcagataattctggtagaatcatctctgcagatttctactgtcttcggttttggcaggatgcctactgaaacgaattctaargaataa

SEQ ID NO: 5158 - DNA, 600 bp, Chicken  19866894108587_4
tcaaaatagcaggtacaaaaggatctaaatctgcgcggcctgagttggcaacacaaagagggaactaaagccaacggaagctgtgtgagacacttggaaaaatcattttgttcccacaagtgcaaaagtatcagggagaaaagggattcaatgcttttattcaatgatatatcaaatatgtaggaagaatatgtaacaaatgtaacatatgtaacaaagctggtgctcttatgagggaatattgtagtaacttccttaaatactttcaatcttaaataaataaataaatatttttttwwwaaaaaaagtttgccctgtgctatctttaatatttgcaatgacatcaaattgtcattccttctctgaagtaaattaattttataatatttatcaatctgctctatacagatagggaaaagaaaaagttaatttctcctcccttagaatagtaaatttatttgagaacaaaactacaaattcagaaaatgtgacaaaaatgaaatttctataggcagataattctggtagaatcatctctgcagatttctactgtcttcggttttggcaggatgcctactgaaacgaattctaargaataaa

SEQ ID NO: 5159 - DNA, 600 bp, Chicken  19866894108587_5
ttttwwaaaaaaaagtttgccctgtgctatctttaatatttgcaatgacatcaaattgtcattccttctctgaagtaaattaattttataatatttatcaatctgctctatacagatagggaaaagaaaaagttaatttctcctcccttagaatagtaaatttatttgagaacaaaactacaaattcagaaaatgtgacaaaaatgaaatttctataggcagataattctggtagaatcatctctgcagatttctactgtcttcggttttggcaggatgcctactgaaacgaattctaargaataaaacagttttcatggtcagaatggtcagaacaaggaggatttcactctgatgttgtaaaaggttaggaaaaaaaattgcattaatctattatttttctactaaaaatgraatcctaaaaaaacaatcggaccaaaacctaggtgagaagttcagataaatttttccccaacttctctcagtgcaatgtttaacacaattttttcattatttttcttctttttttataaactttttataagtagttccaaaacaactgcatttctgttcttcatattttcatacattacacagcaa

SEQ ID NO: 5160 - DNA, 600 bp, Chicken  19866894108587_6
gatagggaaaagaaaaagttaatttctcctcccttagaatagtaaatttatttgagaacaaaactacaaattcagaaaatgtgacaaaaatgaaatttctataggcagataattctggtagaatcatctctgcagatttctactgtcttcggttttggcaggatgcctactgaaacgaattctaargaataaaacagttttcatggtcagaatggtcagaacaaggaggatttcactctgatgttgtaaaaggttaggaaaaaaaattgcattaatctattatttttctactaaaaatgraatcctaaaaaaacaatcggaccaaaacctaggtgagaagttcagataaatttttccccaacttctctcagtgcaatgtttaacacaattttttcattatttttcttctttttttataaactttttataagtagttccaaaacaactgcatttctgttcttcatattttcatacattacacagcaaattttaatacatttccatgactgttaatataaagaacagatatcatatatgtcatttaaataagaaaagaaaatctaatgcagtattttccacttctttatttatctatttatt

SEQ ID NO: 5161 - DNA, 599 bp, Chicken  19866894108588_1
  misc_feature (1)..(15): n is any nucleotide
nnnnnnnnnnnnnnnaccatctgcagaatgcccggtgcttcttactgctgcagactagagtttgcaaaagctctgcaaactagaaaaagactgattattttatgtgcctctatcatggcttctcttactcttgccatccctaaattatgcatccgtgatctttctcctctctcctcacatggatgtctttccgtgcccttaatatttttgtttgccctcccctacacctttccttggtctgcaccttgaggcagagaggacagaatagaaaacattattccgagcaagggtgtcttgtgmggttctgtgattccattacaacattttcagtactgtttttgagcatagcctggcattttcttggctttctggacttcaagactgcaccgagcttttggcaaagacaactgggatattgcaccaacagcttccaagtcgttctcattttgtggtggcctaaggaaaatccctttcctgaaggaagttgtcatgcacaggggaagaatcctgtgtgccctgggaagttggccctgcctaacctttaaagttgcctttatctcacctccaggacaggagaggaaggaagaataaagcagtct

SEQ ID NO: 5162 - DNA, 600 bp, Chicken  19866894108594_1
gtttacaaatttgagagcagatttaattgttgttctgttttgtttttcacttgtcaatgcagttatcctgggcttctggtagtacctcagtctgttcaagacagcagtttgcagagagttgctcgctgttaccgtcacaatcgcctaccagttgtgtgctggagaaacacaaaaaacagttctcttctacttagatctgggggctttcatggcaaaggtgttgttggcctcttcaaatcccaaaacacacatactgcaggtgagctgatgcagccaggttttacttatatatgtatttckraactaaaaaacatttgtgtacatacatatatgtatatatatttatatttttagtttagagatactttctagaggaaatcagatggtttaaccaaaagtcccaggacatggatgtttatctgatattacaatagttcagtataatgtacgtcaagaatcagaccctgagtagtgtgaaggtagttcagaaatgtcagttgaaatctcaacagagattacatataaactagaaaatcttcagtaaaagctgccatctgccaactgcagtgtctcagagaatgaggtatcttattttctaat

SEQ ID NO: 5163 - DNA, 600 bp, Chicken  19866894108594_2
tttacaaatttgagagcagatttaattgttgttctgttttgtttttcacttgtcaatgcagttatcctgggcttctggtagtacctcagtctgttcaagacagcagtttgcagagagttgctcgctgttaccgtcacaatcgcctaccagttgtgtgctggagaaacacaaaaaacagttctcttctacttagatctgggggctttcatggcaaaggtgttgttggcctcttcaaatcccaaaacacacatactgcaggtgagctgatgcagccaggttttacttatatatgtatttckraactaaaaaacatttgtgtacatacatatatgtatatatatttatatttttagtttagagatactttctagaggaaatcagatggtttaaccaaaagtcccaggacatggatgtttatctgatattacaatagttcagtataatgtacgtcaagaatcagaccctgagtagtgtgaaggtagttcagaaatgtcagttgaaatctcaacagagattacatataaactagaaaatcttcagtaaaagctgccatctgccaactgcagtgtctcagagaatgaggtatcttattttctaata

SEQ ID NO: 5164 - DNA, 599 bp, Chicken  19866894108599_1
  misc_feature (1)..(50): n is any nucleotide
nnnnnnnnnnnnnnnnnnnnnnnnnnnnnnnnnnnnnnnnnnnnnnnnnnatgatcggtgaaagatcagctgaaagaagaaggggagaaagaatgactggctgcatccttgactctgcaggacctaatcatggacattcagcacatgaacagtgcctgctcccttgacatgccgccaaggcctaggcctaaatttcacaccagtcaccctgttcaagccctggctctgcgctcaggctgtgcttctttagcacaagaggcaaacggcacaaggtgtagtgcaacagccaacaaaagtccmagacacgtggaagaaagtctcttacatcccgacagatgtcctttccatacatctgcaggaaggtgatcatccacttgccagcagcacgcacacgcattcctttggccttccggaaggtgtccttgatggccatcatgaaatctayggtgtgttccagggagaagcttctgcacacaatctgcaaggaaatgagaagcaggagagatcccatcactgctctgcagcagctcttcaraacataaagcagtgttgagggcattcttagttcagcagcttgccagtcattcaggtggcaatca

SEQ ID NO: 5165 - DNA, 600 bp, Chicken  19866894108599_2
tgaacagtgcctgctcccttgacatgccgccaaggcctaggcctaaatttcacaccagtcaccctgttcaagccctggctctgcgctcaggctgtgcttctttagcacaagaggcaaacggcacaaggtgtagtgcaacagccaacaaaagtccmagacacgtggaagaaagtctcttacatcccgacagatgtcctttccatacatctgcaggaaggtgatcatccacttgccagcagcacgcacacgcattcctttggccttccggaaggtgtccttgatggccatcatgaaatctayggtgtgttccagggagaagcttctgcacacaatctgcaaggaaatgagaagcaggagagatcccatcactgctctgcagcagctcttcaraacataaagcagtgttgagggcattcttagttcagcagcttgccagtcattcaggtggcaatcacaatgctcctgctgtccttactgtgctatgtatacataaggtggttgagccttctctcagcttctccacccrtggtgtttgcttacatgcaaagcctacctcccagcagccacagccacacacacacagtcacacacacaygtcat

SEQ ID NO: 5166 - DNA, 600 bp, Chicken  19866894108599_3
gctgtgcttctttagcacaagaggcaaacggcacaaggtgtagtgcaacagccaacaaaagtccmagacacgtggaagaaagtctcttacatcccgacagatgtcctttccatacatctgcaggaaggtgatcatccacttgccagcagcacgcacacgcattcctttggccttccggaaggtgtccttgatggccatcatgaaatctayggtgtgttccagggagaagcttctgcacacaatctgcaaggaaatgagaagcaggagagatcccatcactgctctgcagcagctcttcaraacataaagcagtgttgagggcattcttagttcagcagcttgccagtcattcaggtggcaatcacaatgctcctgctgtccttactgtgctatgtatacataaggtggttgagccttctctcagcttctccacccrtggtgtttgcttacatgcaaagcctacctcccagcagccacagccacacacacacagtcacacacacaygtcatagaatcagctccttgctttgggtgccttagggccagacgtagctcagtgcctccggctccttgctcagaaaagtgatctcagggtgacag

SEQ ID NO: 5167 - DNA, 600 bp, Chicken  19866894108599_4
cacttgccagcagcacgcacacgcattcctttggccttccggaaggtgtccttgatggccatcatgaaatctayggtgtgttccagggagaagcttctgcacacaatctgcaaggaaatgagaagcaggagagatcccatcactgctctgcagcagctcttcaraacataaagcagtgttgagggcattcttagttcagcagcttgccagtcattcaggtggcaatcacaatgctcctgctgtccttactgtgctatgtatacataaggtggttgagccttctctcagcttctccacccrtggtgtttgcttacatgcaaagcctacctcccagcagccacagccacacacacacagtcacacacacaygtcatagaatcagctccttgctttgggtgccttagggccagacgtagctcagtgcctccggctccttgctcagaaaagtgatctcagggtgacagctcattctggaaatggtgtgagaggctggggggagcagaggcacgtgcaaaaacctaagcactgagatcgcaccactcctttttgggtccacttacccgcgcgattttggaagaggtctggagctgacagacggtg

SEQ ID NO: 5168 - DNA, 600 bp, Chicken  19866894108599_5
tctayggtgtgttccagggagaagcttctgcacacaatctgcaaggaaatgagaagcaggagagatcccatcactgctctgcagcagctcttcaraacataaagcagtgttgagggcattcttagttcagcagcttgccagtcattcaggtggcaatcacaatgctcctgctgtccttactgtgctatgtatacataaggtggttgagccttctctcagcttctccacccrtggtgtttgcttacatgcaaagcctacctcccagcagccacagccacacacacacagtcacacacacaygtcatagaatcagctccttgctttgggtgccttagggccagacgtagctcagtgcctccggctccttgctcagaaaagtgatctcagggtgacagctcattctggaaatggtgtgagaggctggggggagcagaggcacgtgcaaaaacctaagcactgagatcgcaccactcctttttgggtccacttacccgcgcgattttggaagaggtctggagctgacagacggtgctgcagtcattcagcccctcacacaggctcccgatgtctcctgtctggatgactctgttggtcgccttg

SEQ ID NO: 5169 - DNA, 600 bp, Chicken  19866894108607_1
atattttctatgtctaatcttcactgatgctttcactgagaagaaatattgtagttcataaagttccaaactagtctggaagttcagccaatacgttcttaaagaattcaaggaaaatcttacagttaatcagattcacttctgccaggaaaaacagaaatgttgaaaactatactactttcctgtgtgactgcttgatggtagattacatataaacaaataactcctttcatttcttaactccttgagggaaaagagataagatggtatgattacagtactgttgtcatttcagagctygtgaaaatatgatttacacagcgatcagtccttgaaaccaatgcagaccagactgaaaaaatggtatcaagccaaaagtaacattttagacatacataacactttctgtaggagagacttctgtacatatttggacctgtgtggtacaagggacaacagtactaggtccagtaattgtttcttttttctaaaactggtaattccatactctcatatttgacaattctcttgtgtttctacatccagaaagtccacatctttgtttctgaagacagagtagcttatatgtagggaaactat

SEQ ID NO: 5170 - DNA, 599 bp, Chicken  19866894108608_1
  misc_feature (1)..(56): n is any nucleotide
nnnnnnnnnnnnnnnnnnnnnnnnnnnnnnnnnnnnnnnnnnnnnnnnnnnnnnnnccttctgctacctattttacgctctgcatactcaccaagtccaacaagaccgatgttagaaaaaaagtttaaaaaattagatcttaaatacttcgataacttaacctaagagttgatctggatcatacagggagtctgtgatagagccatataattctgaagttaataaataacttatctccttctggttttttgtttctccagtttgtttctaattttaatgaccaagtctagtacctacctrttgaaatcctggctgccatcagaacgtctctgaaaaacagtccaaccacccccttcagacatgtcacagaaggccaggaattcattaggactctgggtaggtttcatcttataaaatccacttttcttgtggccatcattgtagatttctgcacagtctgttcacaaaacatccagtgaacacagttcttagttctatacttaatagcaaaaccagaaaagtcaataaaggaaatcaaatcataccaagtaagaggcacataggaaaaaagctaatggcaaatacctctacaaatacat

SEQ ID NO: 5171 - DNA, 600 bp, Chicken  19866894108615_1
aggacagtggctgaagaatcagtatggacagcctaagtgtggtgaaatgaagggcacaggtgattgcccttgagtgtcatacatctcaaactgtatgatgaaatagggtaccttcttccattgccatgctaaagctactgcatatttctgatgataaaatcctgaatacacataatacagactccttaaacgaaattgtttgattctcatacgtgatacagaggtgtgcagaccaaacttctggataaaaattatcccaattttacagttgcatagtaagatcatttcactttgcaacakgccagtgacatagccatcttcccaaaggccatgagcatctcacagatttagtcttgccagaagaataaaatcctgacaacgcaaaagcctaccttggttattgactatttcttggaacaactagaagacttggaagtattcctgcacagacagaaatagcaracacatgcagcaactggcagagcagattggtaggagctgaccatgagccctatttgatggtgcagccagcagccagaggactgcagcaaagcatctcacagctgtacagccaagtgctcagaaggccatttcagcact

SEQ ID NO: 5172 - DNA, 600 bp, Chicken  19866894108615_2
tgaatacacataatacagactccttaaacgaaattgtttgattctcatacgtgatacagaggtgtgcagaccaaacttctggataaaaattatcccaattttacagttgcatagtaagatcatttcactttgcaacakgccagtgacatagccatcttcccaaaggccatgagcatctcacagatttagtcttgccagaagaataaaatcctgacaacgcaaaagcctaccttggttattgactatttcttggaacaactagaagacttggaagtattcctgcacagacagaaatagcaracacatgcagcaactggcagagcagattggtaggagctgaccatgagccctatttgatggtgcagccagcagccagaggactgcagcaaagcatctcacagctgtacagccaagtgctcagaaggccatttcagcactgaggcagttgttattcacagrckcttgacaagataccaagtaattcccttaccatcaggtgtcctaggtcgtctcactctcaaatttctcccagatgcctttgtacgtgccttttattaattggctgcattcctttgtgattgttgatttaggtaaaaaatg

SEQ ID NO: 5173 - DNA, 600 bp, Chicken  19866894108615_3
ccaaaggccatgagcatctcacagatttagtcttgccagaagaataaaatcctgacaacgcaaaagcctaccttggttattgactatttcttggaacaactagaagacttggaagtattcctgcacagacagaaatagcaracacatgcagcaactggcagagcagattggtaggagctgaccatgagccctatttgatggtgcagccagcagccagaggactgcagcaaagcatctcacagctgtacagccaagtgctcagaaggccatttcagcactgaggcagttgttattcacagrckcttgacaagataccaagtaattcccttaccatcaggtgtcctaggtcgtctcactctcaaatttctcccagatgcctttgtacgtgccttttattaattggctgcattcctttgtgattgttgatttaggtaaaaaatgtactttgtatttgggggttgtgagaataggagaaatagaatggaaatggaactctagccactgaagtcagtggtaatttactcctgctgtgtgacacctattgtaacccaaactcctatggtgtagcatgggcgaggaataaagagcaatctctractg

SEQ ID NO: 5174 - DNA, 600 bp, Chicken  19866894108615_4
aaaggccatgagcatctcacagatttagtcttgccagaagaataaaatcctgacaacgcaaaagcctaccttggttattgactatttcttggaacaactagaagacttggaagtattcctgcacagacagaaatagcaracacatgcagcaactggcagagcagattggtaggagctgaccatgagccctatttgatggtgcagccagcagccagaggactgcagcaaagcatctcacagctgtacagccaagtgctcagaaggccatttcagcactgaggcagttgttattcacagrckcttgacaagataccaagtaattcccttaccatcaggtgtcctaggtcgtctcactctcaaatttctcccagatgcctttgtacgtgccttttattaattggctgcattcctttgtgattgttgatttaggtaaaaaatgtactttgtatttgggggttgtgagaataggagaaatagaatggaaatggaactctagccactgaagtcagtggtaatttactcctgctgtgtgacacctattgtaacccaaactcctatggtgtagcatgggcgaggaataaagagcaatctctractggc

SEQ ID NO: 5175 - DNA, 600 bp, Chicken  19866894108615_5
cagrckcttgacaagataccaagtaattcccttaccatcaggtgtcctaggtcgtctcactctcaaatttctcccagatgcctttgtacgtgccttttattaattggctgcattcctttgtgattgttgatttaggtaaaaaatgtactttgtatttgggggttgtgagaataggagaaatagaatggaaatggaactctagccactgaagtcagtggtaatttactcctgctgtgtgacacctattgtaacccaaactcctatggtgtagcatgggcgaggaataaagagcaatctctractggcgctcctgtgagtcagacccccattacagttagtttatacactttaaagaggcacaaggagaagcactgtgcacagtcaaagcagactacaaagagtctcttcctcccaataccagcagcatttttttcccttaatatcgtttattcaagatagattgagtatgtggagatttgattgtgttttcttttcagaagaagatgtagatgctcccttgcaaattgaagcctcatgttgcctgcctttcctgacgtgtcctgygctgggtgagaggcgcggggctgcagcctctctgct

SEQ ID NO: 5176 - DNA, 600 bp, Chicken  19866894108615_6
ggtgtagcatgggcgaggaataaagagcaatctctractggcgctcctgtgagtcagacccccattacagttagtttatacactttaaagaggcacaaggagaagcactgtgcacagtcaaagcagactacaaagagtctcttcctcccaataccagcagcatttttttcccttaatatcgtttattcaagatagattgagtatgtggagatttgattgtgttttcttttcagaagaagatgtagatgctcccttgcaaattgaagcctcatgttgcctgcctttcctgacgtgtcctgygctgggtgagaggcgcggggctgcagcctctctgctgctgctgcaagaagttttctggggaatgaggcaaagtcacagctcttaaaagggcaattgcagatcacagctcattttgttcagaggaaatgtgaacatttttactctctttttattttcctttcttgggtgaattctcccgcagctacgtacagtgcctgagaacaacacagcctctctcttgttccttagacacagatgctgatttaagggctggagcctgcaatccttactccccagagcagacctgctgcttttattgat

SEQ ID NO: 5177 - DNA, 599 bp, Chicken  19866894108616_1
  misc_feature (1)..(119): n is any nucleotide
nnnnnnnnnnnnnnnnnnnnnnnnnnnnnnnnnnnnnnnnnnnnnnnnnnnnnnnnnnnnnnnnnnnnnnnnnnnnnnnnnnnnnnnnnnnnnnnnnnnnnnnnnnnnnnnnnnnnnnnctcctcctttatctctctctggtcttgtgctgctcattctgcctgctccatcctccaattcccctttctgtcatccgctccgttcttcttttgtttgcttttcaccttcactgatatcttctacaagatattttaaagtgttaaaatctgcccagaggttgagcttcctatttgtgtgccrygcaggtggcagccttccagtggaaacagtgccaaaggaagaacagcagcccaaaggagatttcacactttacagcaatatttaaagcattctgaatctgattaggggatctggatgaaagtcacagagcttcctgatcctacacagcatttttcagaagctgtcagagcaaaaaggaaatgctgaacctgaagcccctaagcaagttccttcttcagttcagtattcaacgcagtatcactcagcacacagacacctttctggttgccctcagacgtgccattgagacacctttggat

SEQ ID NO: 5178 - DNA, 599 bp, Chicken  19866894108616_2
  misc_feature (1)..(118): n is any nucleotide
nnnnnnnnnnnnnnnnnnnnnnnnnnnnnnnnnnnnnnnnnnnnnnnnnnnnnnnnnnnnnnnnnnnnnnnnnnnnnnnnnnnnnnnnnnnnnnnnnnnnnnnnnnnnnnnnnnnnnnctcctcctttatctctctctggtcttgtgctgctcattctgcctgctccatcctccaattcccctttctgtcatccgctccgttcttcttttgtttgcttttcaccttcactgatatcttctacaagatattttaaagtgttaaaatctgcccagaggttgagcttcctatttgtgtgccrygcaggtggcagccttccagtggaaacagtgccaaaggaagaacagcagcccaaaggagatttcacactttacagcaatatttaaagcattctgaatctgattaggggatctggatgaaagtcacagagcttcctgatcctacacagcatttttcagaagctgtcagagcaaaaaggaaatgctgaacctgaagcccctaagcaagttccttcttcagttcagtattcaacgcagtatcactcagcacacagacacctttctggttgccctcagacgtgccattgagacacctttggatc

SEQ ID NO: 5179 - DNA, 600 bp, Chicken  19866894108616_3
ttaggggatctggatgaaagtcacagagcttcctgatcctacacagcatttttcagaagctgtcagagcaaaaaggaaatgctgaacctgaagcccctaagcaagttccttcttcagttcagtattcaacgcagtatcactcagcacacagacacctttctggttgccctcagacgtgccattgagacacctttggatcaaaagtgccctccaattctcctccctgtaaatctcccttataaattgctcccaatttactttgagatcaaaatttgacttacaggcatttgtctgacaaaygaagggaaaaaggtgaatgcgtagcactggggcaccacgagggaaaagaaagggatgttgcaaatgtactgcttttttatgtgtagttgaatgtgctgaatgagcaaaccaaccttctgtcaggaagaaaaaaacagaaaggtgatgacttcttaaaatgaatgccttctctgtgtgtgtaataaaaagtgcatttcactgctcgtagctgtatgtacacacagataacataacaagtattcaaaccaaccgaaaatttgtcttaaaacatattaaaagtcaggccattactttgtcatt

SEQ ID NO: 5180 - DNA, 600 bp, Chicken  19866894108616_4
gggaaaagaaagggatgttgcaaatgtactgcttttttatgtgtagttgaatgtgctgaatgagcaaaccaaccttctgtcaggaagaaaaaaacagaaaggtgatgacttcttaaaatgaatgccttctctgtgtgtgtaataaaaagtgcatttcactgctcgtagctgtatgtacacacagataacataacaagtattcaaaccaaccgaaaatttgtcttaaaacatattaaaagtcaggccattactttgtcattacagcatactctgtagaaagagatctctgtcatctccccmcatttcccaaatcccacactgttctagataagaaagagaaaaatgagaaagtgagtttaataaagttgtgctgcacagcrgtgatggcaagagatccagttggttggttggttttggttgtgttttggttggttggttgcttgttttggttttttgttttggttgtttgttttttgcttggaattactgacttggtctcattttggcaaaagattttatccttcttgacataatccatgtcggtatcctctacctccagccccagcgttacactttctgtttttccttttcaccttttta

SEQ ID NO: 5181 - DNA, 600 bp, Chicken  19866894108616_5
caggaagaaaaaaacagaaaggtgatgacttcttaaaatgaatgccttctctgtgtgtgtaataaaaagtgcatttcactgctcgtagctgtatgtacacacagataacataacaagtattcaaaccaaccgaaaatttgtcttaaaacatattaaaagtcaggccattactttgtcattacagcatactctgtagaaagagatctctgtcatctccccmcatttcccaaatcccacactgttctagataagaaagagaaaaatgagaaagtgagtttaataaagttgtgctgcacagcrgtgatggcaagagatccagttggttggttggttttggttgtgttttggttggttggttgcttgttttggttttttgttttggttgtttgttttttgcttggaattactgacttggtctcattttggcaaaagattttatccttcttgacataatccatgtcggtatcctctacctccagccccagcgttacactttctgtttttccttttcacctttttaattaaatcagtataaaatgtagaatctaaacaagaaaaaggaacaaaaaagagcagaggggttggatgcaattactagaa

SEQ ID NO: 5182 - DNA, 600 bp, Chicken  19866894108618_1
ttaagaaataaatacttgggtgaatacgctcaaatacatctggctgagaagttgcaaatatttccagtatgaatggttgctttgaggtcccatcaacggcatgtgcccaacgatagagccagaagtcttcaccaccttctacataaacaagtaataagaaaaaacacgtgttacttcgaagagtgaaaaatggtttgacaaattccagaagtcatattattagaaaaacctttctttcttgttcgttccacccttcctacaaaagtcacaaggccaataacatcgcaggaatgattgttygataagccatccaactctgacctgcaaaacaaaacagaagaaacaaatctggtattaaagaatgacaaaayataaaactttctcagaaaatttctcaaaacacatcctcaattaatgctcagwgtcattttatgaaatctaagatccagcttcacaaacaacaaacttccattttaccttgtaataaactggtatttaacttcaggcaatccccactctggcttaaccatttcctcagaaattatacttatcttggtaggtgggtttcgtacattaaggctgatttctgacagagaaaga

SEQ ID NO: 5183 - DNA, 600 bp, Chicken  19866894108618_2
aatggttgctttgaggtcccatcaacggcatgtgcccaacgatagagccagaagtcttcaccaccttctacataaacaagtaataagaaaaaacacgtgttacttcgaagagtgaaaaatggtttgacaaattccagaagtcatattattagaaaaacctttctttcttgttcgttccacccttcctacaaaagtcacaaggccaataacatcgcaggaatgattgttygataagccatccaactctgacctgcaaaacaaaacagaagaaacaaatctggtattaaagaatgacaaaayataaaactttctcagaaaatttctcaaaacacatcctcaattaatgctcagwgtcattttatgaaatctaagatccagcttcacaaacaacaaacttccattttaccttgtaataaactggtatttaacttcaggcaatccccactctggcttaaccatttcctcagaaattatacttatcttggtaggtgggtttcgtacattaaggctgatttctgacagagaaagaaaagacacragcatttaaggcactattgcaaatccaacaaacacttttcattttaactgaaaacaaaccca

SEQ ID NO: 5184 - DNA, 600 bp, Chicken  19866894108618_3
agtcttcaccaccttctacataaacaagtaataagaaaaaacacgtgttacttcgaagagtgaaaaatggtttgacaaattccagaagtcatattattagaaaaacctttctttcttgttcgttccacccttcctacaaaagtcacaaggccaataacatcgcaggaatgattgttygataagccatccaactctgacctgcaaaacaaaacagaagaaacaaatctggtattaaagaatgacaaaayataaaactttctcagaaaatttctcaaaacacatcctcaattaatgctcagwgtcattttatgaaatctaagatccagcttcacaaacaacaaacttccattttaccttgtaataaactggtatttaacttcaggcaatccccactctggcttaaccatttcctcagaaattatacttatcttggtaggtgggtttcgtacattaaggctgatttctgacagagaaagaaaagacacragcatttaaggcactattgcaaatccaacaaacacttttcattttaactgaaaacaaacccacaacaaaactgagtgaggtttcttaaatgatgtactctaaccatgtctcact

SEQ ID NO: 5185 - DNA, 600 bp, Chicken  19866894108618_4
tccaactctgacctgcaaaacaaaacagaagaaacaaatctggtattaaagaatgacaaaayataaaactttctcagaaaatttctcaaaacacatcctcaattaatgctcagwgtcattttatgaaatctaagatccagcttcacaaacaacaaacttccattttaccttgtaataaactggtatttaacttcaggcaatccccactctggcttaaccatttcctcagaaattatacttatcttggtaggtgggtttcgtacattaaggctgatttctgacagagaaagaaaagacacragcatttaaggcactattgcaaatccaacaaacacttttcattttaactgaaaacaaacccacaacaaaactgagtgaggtttcttaaatgatgtactctaaccatgtctcactgctagggaaaccacgaatgaagccctctgacttcacgtttccactgagataaagtaaggtacagcattcaacaatgcaactctttaatcagtgcaatgctaaccttttcagttccctacatgactcaattagtttgatcaggcagatattaaaataaaagccatcaaagaacttagataacactga

SEQ ID NO: 5186 - DNA, 600 bp, Chicken  19866894108620_1
cggacaggcagcccaaccaccccggataagactgtggtcgtgcagtgggatcaaggcaacagaaccaactatcggactggatttcaaggagcttatgaccttcttctgtatgataacgcacaaataggtaagtgtggcatggaaatggagcataaactctagcactgtaaagccatctttagcaggtataacacttgcctcacatgctagctggcgtgtgagttttttgccactgtttgtggactgatgctgagcagcagtgaagtacatagttttttccccttaaaatatgctactatwgttctaacagccttgtcagcctcatttctctgaagttcatgtggagttacattcctttatttttgttctgctaggcgtccgtcatcctaacatcatctgtgactgctgcaagaagcatggcatacgagggatgcggtggaagtgcaagatgtgctttgactatgacctgtgcacacagtgttacatgaacaacaagcacgatctgtcacatgcctttgagcgctatgagacagcgcattcacagccgtaagtgatgctcgtaggggaaggcctgttaactgggtgcttctgctgtcccag

SEQ ID NO: 5187 - DNA, 600 bp, Chicken  19866894108622_1
aggagaaagagaacgacagctgggtaggacattccccagctcctgatgctcttcaacacaaaatattttcccttctagcttaacactggaaaaagaaatcagcaatattgcctgagccaataccgaaggaatggagcagatgtcagtgtttgtttcatctaaaatcaaatcattttctgttaaatggggagacagccttacatgctttatgttttaatgcgaataactgataatttcaaagcaacacagcatctctttgaaaaaacgcattcctggaactgagattataatgatctctcyctcactaatcgccatttaaaaacctggatttcttgagacctgcatttcccagacattcctgaccagctcctttctgggttacagggatcagataacgctgtgggtaggagctcagcccaccgatgcgaggcgttggacgggtggcccatctccagcacacccagagcctgcaaccacctgactgccgctccacgccccgagggcaagatgagctctgcagatgctcatccttttgcccatcgctgtggtaggtcttctccaggctccaggtgaaccagataatatgcacagcaataaata

SEQ ID NO: 5188 - DNA, 600 bp, Chicken  19866894108622_2
actccatctcttcccatcacagcatcctttgaagcatgtagttgtacttacagatatagagtcagctaggcaattcccgtcaccatatggagccctacaggacaaaccagagtatccctccatgggagcagcaacaaggacaggaccaccctggctggtgactgcacccatctccctcctcctgctgcatcctcacttcctcaccacctccagctgcccatcagcactgcctccctgactgcaccatactaccagcacaaactgcagctccttcctgcactggaacaggtcagaacagcyttgctgggggacttggaaagggtggacaaagagctgggagaagtaayccctacagccacaacagctttagcctgaggacaaatccccagctttacaaatgccctctggtttgcgttagggacactttcttaaggtcagggacattatracagcatcatgtcagccagcaacaatgctgctctgctctgcacagggactggcagtgaccattccatcacagctccacttccaccttgtacaaaataaagctgcagtcatcccttcagaggaggaaggcattggcttcctaggactgtaacg

SEQ ID NO: 5189 - DNA, 600 bp, Chicken  19866894108622_3
ttacagatatagagtcagctaggcaattcccgtcaccatatggagccctacaggacaaaccagagtatccctccatgggagcagcaacaaggacaggaccaccctggctggtgactgcacccatctccctcctcctgctgcatcctcacttcctcaccacctccagctgcccatcagcactgcctccctgactgcaccatactaccagcacaaactgcagctccttcctgcactggaacaggtcagaacagcyttgctgggggacttggaaagggtggacaaagagctgggagaagtaayccctacagccacaacagctttagcctgaggacaaatccccagctttacaaatgccctctggtttgcgttagggacactttcttaaggtcagggacattatracagcatcatgtcagccagcaacaatgctgctctgctctgcacagggactggcagtgaccattccatcacagctccacttccaccttgtacaaaataaagctgcagtcatcccttcagaggaggaaggcattggcttcctaggactgtaacgatgatgaggagtttaaacgtaaccacaaatataaaactttaaaactc

SEQ ID NO: 5190 - DNA, 600 bp, Chicken  19866894108622_4
ccctggctggtgactgcacccatctccctcctcctgctgcatcctcacttcctcaccacctccagctgcccatcagcactgcctccctgactgcaccatactaccagcacaaactgcagctccttcctgcactggaacaggtcagaacagcyttgctgggggacttggaaagggtggacaaagagctgggagaagtaayccctacagccacaacagctttagcctgaggacaaatccccagctttacaaatgccctctggtttgcgttagggacactttcttaaggtcagggacattatracagcatcatgtcagccagcaacaatgctgctctgctctgcacagggactggcagtgaccattccatcacagctccacttccaccttgtacaaaataaagctgcagtcatcccttcagaggaggaaggcattggcttcctaggactgtaacgatgatgaggagtttaaacgtaaccacaaatataaaactttaaaactctcataaacagatctgaaagtgagccagaggaactggtgtgaatgtgagctactccagtacaaagcaataagaaagacacagccataaacctgggcaagagg

SEQ ID NO: 5191 - DNA, 600 bp, Chicken  19866894108623_1
cagcttttcacattgctccattgggctgggggtggtggggaagctccatcatggaccgatcctccaggagtggaccaaagaggagttgtgttcaccacccatgactcggagcagctctgctgagcatccctgctcagatcagagatctttgcacccaaacgtagctgaaaaatacctatctgaagtgcagtgctctctgctccatgtcctccagcagggtttaacctgccttaaaagaaggaagtttttccttactttggcagcaacagagagaggtcaacttagtggatagaacccatragtttgccaaggaaatgggactcttcttttctctcccctaagatacccagtctgtgatgtgcagaaaagctctccttcttgggtcggatgtgatgagagaatcctgggcacggggggctgcacgagaagcagttgctttctgcacaacaagtgttagtagctcttagaggtgatcagttttgtcagcagggctggcactcccgttcccaaacgggagatcttcagaaggccgttggggttgctatggttgagttggaagtggtacacgttctcctgtaaaaaggaagtacaaaaatagct

SEQ ID NO: 5192 - DNA, 600 bp, Chicken  19866894108626_1
ctggtcaaacccataatattcactgactgttggatgtgtgccagaatgttgtttctactttgtaggaactaatcgctgttgtgcatttaaatttgctgtttcctggtcagtgtgatgattctgttgtcttgtgcttatgggagaatggcaggggaggagttgtgtgaaccctgaagcaaattgctggttgtcctataaccgccctctgtagtgtcctggctactagttttagatggtacagtttaagagacactggatagcttttgacagagaggctgatagcattaaaataaaaaaaawatctgagacattgtctttcttaggataaacacacacattatatttaattattccttatgtttttacactgaagagttgctggtgtcatttttacagagtatgcagatctggaagggcaacaaatgctttttacaaggtaaaatgtcttcagcaaagtgcttattttgacagctgaattcggtgtgagtatccttttgtaatatatccatttgttttaagagttattcggtgcacaaggatgcagctgttttgataagctgtcaagaatgtgcactggactgcttattttatctatgaaaa

SEQ ID NO: 5193 - DNA, 599 bp, Chicken  19866894108634_1
  misc_feature (1)..(21): n is any nucleotide
nnnnnnnnnnnnnnnnnnnnntgattgttgtgttgtaattgggtcttgcaagaaattttcatcacataaagtgtagcctctgtttttttttagccatattttctaaatgtcgctgttatgtgtttcagtgaagtgtaccagtgtttattgcttggaaatatccgaacacacgaagaacagtaattgtgaaacagaggaatgcaatttaggagcaatactggaaataaactgaagaatagagatttagagagaagtgcataattcatcccatgttctttttgttcctgaaggagaatgccsttgttaacgttatagctataactatggttcttgtgtggctgtagatgtctgtgtgtgaataaactgcacrtcccaatcccttgctgtattcctgggactaatctggttgaagttgttgcatttaaaaggcgaacgctttttattctaacatttagagtaarcaagtggtgtaaaacatgtttattgagagagaggctgacaaggtacggtatraggatgtttctctgtagtctgagattgaataatgtaaccttaatcctgaagcatataaaaacaaattcagaacccagatccacaaa

SEQ ID NO: 5194 - DNA, 600 bp, Chicken  19866894108634_2
gtgtagcctctgtttttttttagccatattttctaaatgtcgctgttatgtgtttcagtgaagtgtaccagtgtttattgcttggaaatatccgaacacacgaagaacagtaattgtgaaacagaggaatgcaatttaggagcaatactggaaataaactgaagaatagagatttagagagaagtgcataattcatcccatgttctttttgttcctgaaggagaatgccsttgttaacgttatagctataactatggttcttgtgtggctgtagatgtctgtgtgtgaataaactgcacrtcccaatcccttgctgtattcctgggactaatctggttgaagttgttgcatttaaaaggcgaacgctttttattctaacatttagagtaarcaagtggtgtaaaacatgtttattgagagagaggctgacaaggtacggtatraggatgtttctctgtagtctgagattgaataatgtaaccttaatcctgaagcatataaaaacaaattcagaacccagatccacaaatctgaattccaaattcacattccacaaaactgtggctttatttttgtgtttgttcagtttatgttcctgtt

SEQ ID NO: 5195 - DNA, 600 bp, Chicken  19866894108634_3
ccgaacacacgaagaacagtaattgtgaaacagaggaatgcaatttaggagcaatactggaaataaactgaagaatagagatttagagagaagtgcataattcatcccatgttctttttgttcctgaaggagaatgccsttgttaacgttatagctataactatggttcttgtgtggctgtagatgtctgtgtgtgaataaactgcacrtcccaatcccttgctgtattcctgggactaatctggttgaagttgttgcatttaaaaggcgaacgctttttattctaacatttagagtaarcaagtggtgtaaaacatgtttattgagagagaggctgacaaggtacggtatraggatgtttctctgtagtctgagattgaataatgtaaccttaatcctgaagcatataaaaacaaattcagaacccagatccacaaatctgaattccaaattcacattccacaaaactgtggctttatttttgtgtttgttcagtttatgttcctgtttcatctccagygctgttcctatataaacctcctggctgcttgtcagatgactgctttttcttctcttatgcctaaaactgtcttttgctct

SEQ ID NO: 5196 - DNA, 600 bp, Chicken  19866894108634_4
aatactggaaataaactgaagaatagagatttagagagaagtgcataattcatcccatgttctttttgttcctgaaggagaatgccsttgttaacgttatagctataactatggttcttgtgtggctgtagatgtctgtgtgtgaataaactgcacrtcccaatcccttgctgtattcctgggactaatctggttgaagttgttgcatttaaaaggcgaacgctttttattctaacatttagagtaarcaagtggtgtaaaacatgtttattgagagagaggctgacaaggtacggtatraggatgtttctctgtagtctgagattgaataatgtaaccttaatcctgaagcatataaaaacaaattcagaacccagatccacaaatctgaattccaaattcacattccacaaaactgtggctttatttttgtgtttgttcagtttatgttcctgtttcatctccagygctgttcctatataaacctcctggctgcttgtcagatgactgctttttcttctcttatgcctaaaactgtcttttgctcttgaggctttcctcatgcattcagggttttgtttgtttcgctgctgactgaac

SEQ ID NO: 5197 - DNA, 600 bp, Chicken  19866894108634_5
tgctgtattcctgggactaatctggttgaagttgttgcatttaaaaggcgaacgctttttattctaacatttagagtaarcaagtggtgtaaaacatgtttattgagagagaggctgacaaggtacggtatraggatgtttctctgtagtctgagattgaataatgtaaccttaatcctgaagcatataaaaacaaattcagaacccagatccacaaatctgaattccaaattcacattccacaaaactgtggctttatttttgtgtttgttcagtttatgttcctgtttcatctccagygctgttcctatataaacctcctggctgcttgtcagatgactgctttttcttctcttatgcctaaaactgtcttttgctcttgaggctttcctcatgcattcagggttttgtttgtttcgctgctgactgaactcttcaatgaaaaartaattgaatatttgtgattcgtttagaaaagtggtggcttcttcacctatacctataaagatttgaatgagtgtattgcagttcagtggtgatgtttaatccatagagaaatgtgttataatcaacacatctggtatcacacatgcaaattga

SEQ ID NO: 5198 - DNA, 600 bp, Chicken  19866894108634_6
agtctgagattgaataatgtaaccttaatcctgaagcatataaaaacaaattcagaacccagatccacaaatctgaattccaaattcacattccacaaaactgtggctttatttttgtgtttgttcagtttatgttcctgtttcatctccagygctgttcctatataaacctcctggctgcttgtcagatgactgctttttcttctcttatgcctaaaactgtcttttgctcttgaggctttcctcatgcattcagggttttgtttgtttcgctgctgactgaactcttcaatgaaaaartaattgaatatttgtgattcgtttagaaaagtggtggcttcttcacctatacctataaagatttgaatgagtgtattgcagttcagtggtgatgtttaatccatagagaaatgtgttataatcaacacatctggtatcacacatgcaaattgataatagtttatttaaaaacagtgtggtgtaacgrgctgagctttgttcagacagtggtgttaattgtggtcacattgccaggtcttgtgaatgcagcaaactcaggaaaaagtacttgaaaagaataatgtaactctaagggaaaac

SEQ ID NO: 5199 - DNA, 600 bp, Chicken  19866894108634_7
gatgactgctttttcttctcttatgcctaaaactgtcttttgctcttgaggctttcctcatgcattcagggttttgtttgtttcgctgctgactgaactcttcaatgaaaaartaattgaatatttgtgattcgtttagaaaagtggtggcttcttcacctatacctataaagatttgaatgagtgtattgcagttcagtggtgatgtttaatccatagagaaatgtgttataatcaacacatctggtatcacacatgcaaattgataatagtttatttaaaaacagtgtggtgtaacgrgctgagctttgttcagacagtggtgttaattgtggtcacattgccaggtcttgtgaatgcagcaaactcaggaaaaagtacttgaaaagaataatgtaactctaagggaaaacagtgatattgttgaaggcaggcaagatattttcaaaccatttccagtaatctgggaaacttccaaaattgaaaaaaaggcacagtatccaaaggagcarcttgcttacaggaaagcaaaaggataatccagatcgtctctgtacagtgttacagtaattgggctctgtgttttttctttgccagtaa

SEQ ID NO: 5200 - DNA, 600 bp, Chicken  19866894108634_8
tccatagagaaatgtgttataatcaacacatctggtatcacacatgcaaattgataatagtttatttaaaaacagtgtggtgtaacgrgctgagctttgttcagacagtggtgttaattgtggtcacattgccaggtcttgtgaatgcagcaaactcaggaaaaagtacttgaaaagaataatgtaactctaagggaaaacagtgatattgttgaaggcaggcaagatattttcaaaccatttccagtaatctgggaaacttccaaaattgaaaaaaaggcacagtatccaaaggagcarcttgcttacaggaaagcaaaaggataatccagatcgtctctgtacagtgttacagtaattgggctctgtgttttttctttgccagtaattttgaggacaattcctcaaaggcagtttgtgtcagtcttcaggtctttgaggaaggaaggccctctggtatggggttctcctgtgtggatggaggctttcgtgcacgtgggttggatgttttttaagcacgctatcctgttttttttgttttttttggggggggggggagcttttggcatggacttggaacacggaactcctctatcattt

SEQ ID NO: 5201 - DNA, 600 bp, Chicken  19866894108635_1
cctgagctcctatcactgtccctgtcccagaggcttacaactgagacgtggtgagatgttttctgatatcccaaagccttgacatgcttcaaacagaccacagttaaaactaaaatactcatctgctgcttctctctctgcttctcaaagcacggattagaagccagaattcagtacggcccacactaaaggcaaaggctggtgatgtgcagctgagcactaatgacaggtctgattcctcctgggtgtgaccaagttactaatttgttcaaattcctgttcttagatttcccactgctygccattactgcaggaggcatccaagcctttattaccttcttgtaaaacaaacaaacaagaacagctcgcaggttagggtgactcaaacctcatcatctcaaacttcattatcaggctggcagcttctccttggtagggaactggttctggcagtgattcagtcagtaactgagagctgacttggaatcaagctatttatcagtgcttttgatgtcatctgtcacatgtgggctgggtacctgaccatggagaaactacaaggatgtgccaatgtaggctgtcacactaagactcaaaaag

SEQ ID NO: 5202 - DNA, 600 bp, Chicken  19866894108635_2
tgctgcattaagatggtgctgtagatcctggacaaggcgtcctgcccagggctggaaagggcgaagacgcagaagtgacgctgaggaagagaaaggaggaagtgcaaaggtcagggggctgtgcaaccacccctgtggcacaaggccctgggggactcttgtccatgtagaataaggacatcttccattttccaactccaacttcccagcagaggaaagttggcaagtgacttctttcagctgtctaaacgagattttcagctgcatttctccatatattagaagttcagcctacctgayggtctcaccaactgacagagtattgcccctccccatgcactgtgtttcaatgcttcagattcagcagaggtaagctaaacttgtgttgcagccccaaaaatctaacactaagagtggttctatttggcagcccatttggcttcactctctcgctcagagcctgcttccccaaatcctgacttctgtggcttcatctgctcttccagcagccyctggcctcttcccagcactcagactgcagtaacacttggctctcccatcccactgaaccttccctcccaaaacaggatggctacaccc

SEQ ID NO: 5203 - DNA, 600 bp, Chicken  19866894108635_3
aggaaagttggcaagtgacttctttcagctgtctaaacgagattttcagctgcatttctccatatattagaagttcagcctacctgayggtctcaccaactgacagagtattgcccctccccatgcactgtgtttcaatgcttcagattcagcagaggtaagctaaacttgtgttgcagccccaaaaatctaacactaagagtggttctatttggcagcccatttggcttcactctctcgctcagagcctgcttccccaaatcctgacttctgtggcttcatctgctcttccagcagccyctggcctcttcccagcactcagactgcagtaacacttggctctcccatcccactgaaccttccctcccaaaacaggatggctacacccatgccatctttgggaaggtgtcattccccagaagactgatgtgggacccatccctcaatgggaggtgctcatttccagccatggaacacttcattctaacacataacagctaaaatgagccatggctttggctgactctggtcatgagacttctccaagaagctgtgatgcagctgggaggggcagagctgatgactgttggcccaggtcaa

SEQ ID NO: 5204 - DNA, 600 bp, Chicken  19866894108637_1
caaaaacatcagcgacactgggcttcaggtaaaactttacctcttctcttgatgtttcctggaagcctctctattcttcaaattagccatgtccaaacagatcatattttactctgtgcaacatcattcattcttcattacactattctacacgttcatagaatcatagaatggcctgggttgaaaaggaccacaatgatcattgagtttcaacccccctgctatgtgcagggtcaccaaccaccagaccaggctgcccagagccacatccagcctggccttgaatgcctccaggaatgrggcatccacaacctccttgggcaacctgttccagtgtgtcaccaccctctgtgtgaagcaattttcttcttacagtccttttcattttacttttttctactttcatgaattttaatgaatttcaaattctgccttctgtattgactctgaatgatcgtaagagagctttaccttctactgccctgtactgtgcaaattacaatctaaattgctactattattctctttcccttgctctacaaatccttaactgatttctatttaatacatatttttcctactgctagtgtgggttttcag

SEQ ID NO: 5205 - DNA, 600 bp, Chicken  19866894108638_1
agaacttttcacagcattttttttcactgttgttgaaagaagaaaatagtaccttctgcaaccataaagtatcttaaaattgctgcctttgggatttgcttatcagtgagctcttatgacgacagccatgattacaactacaaattttaactacaagaagacaatactcgaaatggtggagacacactcataggtacattttacttcagaaaaaaagaaaaccaacaaagcatattaaggacaactgagaggtggcaacttcagtaaattcctacttcaggagtgcaaaaggatcagaakttgctttgtctttttcactgcttgtacattmagaccttgttctgaatttcagctctaaagctgaaggaaaattaaacgttgattttgtaaaatgtattttggtattcacagcagagtatctgtgttcttcatatcattgaacaaacttcactgaaaaacaaaagttatcacttcagtccatatggttaaaaaattatctacaattaggcagtgaactgcgctgcacagaggaaatatcatactgaaaaactaagcacatgtaaatagtgtctggaacccagatgtggactctgcaatgat

SEQ ID NO: 5206 - DNA, 600 bp, Chicken  19866894108638_2
gttgaaagaagaaaatagtaccttctgcaaccataaagtatcttaaaattgctgcctttgggatttgcttatcagtgagctcttatgacgacagccatgattacaactacaaattttaactacaagaagacaatactcgaaatggtggagacacactcataggtacattttacttcagaaaaaaagaaaaccaacaaagcatattaaggacaactgagaggtggcaacttcagtaaattcctacttcaggagtgcaaaaggatcagaakttgctttgtctttttcactgcttgtacattmagaccttgttctgaatttcagctctaaagctgaaggaaaattaaacgttgattttgtaaaatgtattttggtattcacagcagagtatctgtgttcttcatatcattgaacaaacttcactgaaaaacaaaagttatcacttcagtccatatggttaaaaaattatctacaattaggcagtgaactgcgctgcacagaggaaatatcatactgaaaaactaagcacatgtaaatagtgtctggaacccagatgtggactctgcaatgataatgctgggagagtgcgtctggagttcaaat

SEQ ID NO: 5207 - DNA, 600 bp, Chicken  19866894108649_1
tgaggacccgctgtaactactgtgggcaggaagtttgagtgggtgttccttattacatcatttttatatgattctgttatagaagccaaggtagattacaataaaatgctttctaataaaaccaaaaataatgtatgtcataggaaatatgacagaattaagtgtagagccacgtcataataaagctggccgttgcattatcagcatatattaaaggcatatccaggtttgtgggcttttccaaatgtcagtcaactgatcctcttatgtctgtttcagtattgatgctggaaaaattcygagtctgagtatcttgtacatcagtttttcccctggcaaacaatagaatacagtattagtactttgtcttttctctgtgaaaaaatgtgtatataaatgcatgacttcgttaaaaaatgagaaacattttgtcaggacttctttgattaaaacagtgccatattttttcctcgtgtaataggtgcagctacgtgtgtataatgtgtgcatagcaggaaatatgataatgagtaataataaaagatggccgatttaatgagttaatacaatttagtaaratccctttgaatcacaccttta

SEQ ID NO: 5208 - DNA, 600 bp, Chicken  19866894108649_2
gtattgatgctggaaaaattcygagtctgagtatcttgtacatcagtttttcccctggcaaacaatagaatacagtattagtactttgtcttttctctgtgaaaaaatgtgtatataaatgcatgacttcgttaaaaaatgagaaacattttgtcaggacttctttgattaaaacagtgccatattttttcctcgtgtaataggtgcagctacgtgtgtataatgtgtgcatagcaggaaatatgataatgagtaataataaaagatggccgatttaatgagttaatacaatttagtaaratccctttgaatcacacctttagttaatttgtgttaagtctcagttcattaagaacatcgtgatgttactgatctaggaattagactggcaaatacatttagcgtagaaggtcatacccataacctgggtatggatttatgagtatacaatctttgtttagattagacctgagaagagcaggtttaaaagctttttcagacctctggccacacacgtatgttagtgtatgcagtaatggaattaaaaacagggttctgtggacaaatcagtttcattttgatcttctttattggctgaat

SEQ ID NO: 5209 - DNA, 599 bp, Chicken  19866894108650_1
  misc_feature (1)..(58): n is any nucleotide
nnnnnnnnnnnnnnnnnnnnnnnnnnnnnnnnnnnnnnnnnnnnnnnnnnnnnnnnnnatttgcctatagccaaatatatttattattttttccccctccattttgtcaccaattcaagatgattccagtgaatatatttatttccatgccctcaagataagggtcccgttacagtgattaatttacaggtacagcatgaaatgaagagtatacaaaagtaagatgggaaatgttgtgaggaaaaaagaatggttatttccatttcatagatgaacacagccacagaggatataactacwaaagcatttgatagcttcattctcatttagtctgaagtccaaattacccggagccagctgtgtccgttttgcctctaggaatcaagttggactataggcttgcgtttattatgcatctgtgtttttcctctttggaaaaccagctggctcactccaagccagtcagagcacgagtcatctgaagacatatggggatcatggagtcatgcgtggagctacagccatgacagtatgggtgtaactggagaccagttaacttaaaaacatattcttcagctgaaaaactccaggatgctttg

SEQ ID NO: 5210 - DNA, 600 bp, Chicken  19866894108651_1
ccatgagcagcaagttactggaaatcacaatgaaatcctggctactattaactcagtggcaaaatgattgaggtaactgggaagaaaacttcggtgtcaactgaatggcctcaaatgagaatactgagtagtgtctggaaaatagttacaaaatacactatttagggggaaggagatggctgcctggtcactttgggtagcagctctttaatggacacttctgagaaaatgcggagaggaaatgacctagaacttaaggatcatgaattatgctggtcagacctatcttgactagaatgwcagattgctgcaagaagcttagttctcctaggacctccactgaaggacaatcaactggttggcaggacagggacagctgttttggtgtctgctgagtttagctgcctttccttcccatgataaatgcttttgttcaaagtaactaacaccttgttctaaggaacactgtctgcacatttgcctttgtcctttgaaaggcaccaagtgatgtctaatgaaggtaaatctggcctgtgacccaacattgtcctgtcagtgacaagaatgccatttgcaggaaatcccatttcacaaattctg

SEQ ID NO: 5211 - DNA, 600 bp, Chicken  19866894108651_2
attgctgcaagaagcttagttctcctaggacctccactgaaggacaatcaactggttggcaggacagggacagctgttttggtgtctgctgagtttagctgcctttccttcccatgataaatgcttttgttcaaagtaactaacaccttgttctaaggaacactgtctgcacatttgcctttgtcctttgaaaggcaccaagtgatgtctaatgaaggtaaatctggcctgtgacccaacattgtcctgtcagtgacaagaatgccatttgcaggaaatcccatttcacaaattctgccrggcctccagataatccagcaaaatcacacacatagtattgacagagatgtcctaaccagggactatggcaggactctgtgccagaacaggaccccaaaattgctccaaccaaggctcacygagtcagaaaacacacagttacaaaactcagttctgatctrcattcttttggccaggtagtatagacacagtataattatctacttttaacaaagtttttgtcttcactttgtagctcaacttttaatgagcatccacctggaaattttgtgatgcgtcatagttgaaacatcaggaaag

SEQ ID NO: 5212 - DNA, 600 bp, Chicken  19866894108651_3
atgcttttgttcaaagtaactaacaccttgttctaaggaacactgtctgcacatttgcctttgtcctttgaaaggcaccaagtgatgtctaatgaaggtaaatctggcctgtgacccaacattgtcctgtcagtgacaagaatgccatttgcaggaaatcccatttcacaaattctgccrggcctccagataatccagcaaaatcacacacatagtattgacagagatgtcctaaccagggactatggcaggactctgtgccagaacaggaccccaaaattgctccaaccaaggctcacygagtcagaaaacacacagttacaaaactcagttctgatctrcattcttttggccaggtagtatagacacagtataattatctacttttaacaaagtttttgtcttcactttgtagctcaacttttaatgagcatccacctggaaattttgtgatgcgtcatagttgaaacatcaggaaagaatgagtataagaaagtcctatggacagaaaagcaaaaaccaagccctctctctattaccctacttccgaaaatgtaattaaactggatagagtatcacatctagggagccggggtaagt

SEQ ID NO: 5213 - DNA, 600 bp, Chicken  19866894108651_4
actgtctgcacatttgcctttgtcctttgaaaggcaccaagtgatgtctaatgaaggtaaatctggcctgtgacccaacattgtcctgtcagtgacaagaatgccatttgcaggaaatcccatttcacaaattctgccrggcctccagataatccagcaaaatcacacacatagtattgacagagatgtcctaaccagggactatggcaggactctgtgccagaacaggaccccaaaattgctccaaccaaggctcacygagtcagaaaacacacagttacaaaactcagttctgatctrcattcttttggccaggtagtatagacacagtataattatctacttttaacaaagtttttgtcttcactttgtagctcaacttttaatgagcatccacctggaaattttgtgatgcgtcatagttgaaacatcaggaaagaatgagtataagaaagtcctatggacagaaaagcaaaaaccaagccctctctctattaccctacttccgaaaatgtaattaaactggatagagtatcacatctagggagccggggtaagtgccctgacagtcagaatcatttcatgccaatttaatcccat

SEQ ID NO: 5214 - DNA, 600 bp, Chicken  19866894108652_1
tattcttgccttttggcagttgcggtgcattaatatttacaagatgagatgtagttttctgtttatattagcagtcctctgtctgtgagatctggaccaaccagaatgcaggatatcctttctcatcgatccatcaggttcataatgtaagatacagtgataaatggctatgttgtcactctatggatgtacagtctgttgccgtgctgttctcttcgggtgtcatgttgttggaattacaaaaaaagtttgtaacctgtccaccctcctttgggactctgtgtgcgcgcatcgtgtatygtgccgtgtggtcagcgtatgttggctgtatgatgcgcatacaggacgtggaggtgccagcagcagtcttgctcggtgggagctttgatttctgtttctggtgttgttgtttgctcacttcttcaaagcgtgaaacagtgtaaacagcgcggtttgcacagtttcagccccacaatgtgttgtgctgccctttctgtcttaatctataggctttgcccagctgaggaacgtgctgtgtttgcaaaggcagtaaggcaattttggaaatcagaggtagcataggcagtgctctgaattttc

SEQ ID NO: 5215 - DNA, 600 bp, Chicken  19866894108657_1
agaaagagatttttgtttatattcctttgccataagaagtggttagggaacttctaatacttgtcgggtaatctacctttttgggttcggtttccatcctctcccatccctgcattctatgctgtctgaacagctgtctcttaccatcctggcacttggaaagtgaatgcatctgcctgataagtatccagaattgtaaatctcattgttttcagctttatcacaaagttcacgtagagctgaaaagagcaaaaaggaatatggcactgcagtaattctaatcattcataatgtgagcgygttaagaacttcaggctctctcatcctctcaaacttcatgtggtgttttcccctgtggttgtagatgaaagctaaagtgagctgtgcaggagagttaaatgttggttttgaacgtgggggaagtgtgacgaaggcaccacgtgcagagcattgggtgtcctccttagtgagctgtgctttgtgctcctgtactaagggctgccttgcactttgctctcctggtgatgatgactggttggcaatacagcctgctgtgtagcacagctctgagaagtgggtgtatatcatcactcagttgta

SEQ ID NO: 5216 - DNA, 599 bp, Chicken  19866894108659_1
  misc_feature (1)..(210): n is any nucleotide
nnnnnnnnnnnnnnnnnnnnnnnnnnnnnnnnnnnnnnnnnnnnnnnnnnnnnnnnnnnnnnnnnnnnnnnnnnnnnnnnnnnnnnnnnnnnnnnnnnnnnnnnnnnnnnnnnnnnnnnnnnnnnnnnnnnnnnnnnnnnnnnnnnnnnnnnnnnnnnnnnnnnnnnnnnnnnnnnnnnnnnnnnnnnnnnnnnnnnnnnnnnnnnnnnnccttgaggctgcgtttgatggtgctggacactgctgggcaatgtggtggccctggtggcacctcctgtctccacctgcatggaggggcaragcctggtggacacgagcgacctcagagtaagtcctccctgttttctcccctgggttttgcgtggtcctttscctattgcttgcrgcgtgacctgcatgtcagcacctcaccgacctcctcattgccatgtgcagggtatggggtggctcactgrgggggccatcatatctggtgacatgcaaacatgggcttcccaagctgccctggtgagctgcaggaaccaagcaaactgctttggctttgggaaaaattgtgattttttttgttttttaagcatttgtctaggattcaggagtta

SEQ ID NO: 5217 - DNA, 599 bp, Chicken  19866894108659_2
  misc_feature (1)..(138): n is any nucleotide
nnnnnnnnnnnnnnnnnnnnnnnnnnnnnnnnnnnnnnnnnnnnnnnnnnnnnnnnnnnnnnnnnnnnnnnnnnnnnnnnnnnnnnnnnnnnnnnnnnnnnnnnnnnnnnnnnnnnnnnnnnnnnnnnnnnnnnnnnnccttgaggctgcgtttgatggtgctggacactgctgggcaatgtggtggccctggtggcacctcctgtctccacctgcatggaggggcaragcctggtggacacgagcgacctcagagtaagtcctccctgttttctcccctgggttttgcgtggtcctttscctattgcttgcrgcgtgacctgcatgtcagcacctcaccgacctcctcattgccatgtgcagggtatggggtggctcactgrgggggccatcatatctggtgacatgcaaacatgggcttcccaagctgccctggtgagctgcaggaaccaagcaaactgctttggctttgggaaaaattgtgattttttttgttttttaagcatttgtctaggattcaggagttatggtctgtcacaggytagtcgtgttttgarcaagtcatcacaactgggattttctaatgcatgtggcagtgg

SEQ ID NO: 5218 - DNA, 599 bp, Chicken  19866894108659_3
  misc_feature (1)..(125): n is any nucleotide
nnnnnnnnnnnnnnnnnnnnnnnnnnnnnnnnnnnnnnnnnnnnnnnnnnnnnnnnnnnnnnnnnnnnnnnnnnnnnnnnnnnnnnnnnnnnnnnnnnnnnnnnnnnnnnnnnnnnnnnnnnnnnccttgaggctgcgtttgatggtgctggacactgctgggcaatgtggtggccctggtggcacctcctgtctccacctgcatggaggggcaragcctggtggacacgagcgacctcagagtaagtcctccctgttttctcccctgggttttgcgtggtcctttscctattgcttgcrgcgtgacctgcatgtcagcacctcaccgacctcctcattgccatgtgcagggtatggggtggctcactgrgggggccatcatatctggtgacatgcaaacatgggcttcccaagctgccctggtgagctgcaggaaccaagcaaactgctttggctttgggaaaaattgtgattttttttgttttttaagcatttgtctaggattcaggagttatggtctgtcacaggytagtcgtgttttgarcaagtcatcacaactgggattttctaatgcatgtggcagtggttcagctcttact

SEQ ID NO: 5219 - DNA, 599 bp, Chicken  19866894108659_4
  misc_feature (1)..(55): n is any nucleotide
nnnnnnnnnnnnnnnnnnnnnnnnnnnnnnnnnnnnnnnnnnnnnnnnnnnnnnnccttgaggctgcgtttgatggtgctggacactgctgggcaatgtggtggccctggtggcacctcctgtctccacctgcatggaggggcaragcctggtggacacgagcgacctcagagtaagtcctccctgttttctcccctgggttttgcgtggtcctttscctattgcttgcrgcgtgacctgcatgtcagcacctcaccgacctcctcattgccatgtgcagggtatggggtggctcactgrgggggccatcatatctggtgacatgcaaacatgggcttcccaagctgccctggtgagctgcaggaaccaagcaaactgctttggctttgggaaaaattgtgattttttttgttttttaagcatttgtctaggattcaggagttatggtctgtcacaggytagtcgtgttttgarcaagtcatcacaactgggattttctaatgcatgtggcagtggttcagctcttactggtgggaaaaaatgacagtaaaagtcccagataacagcacagggagggaagaagcgaaatgcaagttgag

SEQ ID NO: 5220 - DNA, 600 bp, Chicken  19866894108659_5
gagcgacctcagagtaagtcctccctgttttctcccctgggttttgcgtggtcctttscctattgcttgcrgcgtgacctgcatgtcagcacctcaccgacctcctcattgccatgtgcagggtatggggtggctcactgrgggggccatcatatctggtgacatgcaaacatgggcttcccaagctgccctggtgagctgcaggaaccaagcaaactgctttggctttgggaaaaattgtgattttttttgttttttaagcatttgtctaggattcaggagttatggtctgtcacaggytagtcgtgttttgarcaagtcatcacaactgggattttctaatgcatgtggcagtggttcagctcttactggtgggaaaaaatgacagtaaaagtcccagataacagcacagggagggaagaagcgaaatgcaagttgagttaacactgagtgcttcagatacacccacactttgtgttcctgtttgctgctttgtgcatttgggagtgatgtgtagcgagcccccaaacttagactgtctacagctgcagtgagattktaacactatggacttgaagaccttatttctgcaaaaagtca

SEQ ID NO: 5221 - DNA, 600 bp, Chicken  19866894108659_6
aagtcctccctgttttctcccctgggttttgcgtggtcctttscctattgcttgcrgcgtgacctgcatgtcagcacctcaccgacctcctcattgccatgtgcagggtatggggtggctcactgrgggggccatcatatctggtgacatgcaaacatgggcttcccaagctgccctggtgagctgcaggaaccaagcaaactgctttggctttgggaaaaattgtgattttttttgttttttaagcatttgtctaggattcaggagttatggtctgtcacaggytagtcgtgttttgarcaagtcatcacaactgggattttctaatgcatgtggcagtggttcagctcttactggtgggaaaaaatgacagtaaaagtcccagataacagcacagggagggaagaagcgaaatgcaagttgagttaacactgagtgcttcagatacacccacactttgtgttcctgtttgctgctttgtgcatttgggagtgatgtgtagcgagcccccaaacttagactgtctacagctgcagtgagattktaacactatggacttgaagaccttatttctgcaaaaagtcagtaagttttagcata

SEQ ID NO: 5222 - DNA, 600 bp, Chicken  19866894108659_7
agcatttgtctaggattcaggagttatggtctgtcacaggytagtcgtgttttgarcaagtcatcacaactgggattttctaatgcatgtggcagtggttcagctcttactggtgggaaaaaatgacagtaaaagtcccagataacagcacagggagggaagaagcgaaatgcaagttgagttaacactgagtgcttcagatacacccacactttgtgttcctgtttgctgctttgtgcatttgggagtgatgtgtagcgagcccccaaacttagactgtctacagctgcagtgagattktaacactatggacttgaagaccttatttctgcaaaaagtcagtaagttttagcatagaagaagtatgagttcatcattgcttaaacagtctgtgtgttttgcactgtggatgccagaatccccacatatcatttctgggagttaaaccttggtttgtgtgaggcaggggctgctcctgggctctggggctgggagttcacccagagctgcatgcccagagagagctgctcgtttaagtaggattcaggtggtgtttatttgctcatatcacttttggcagacagataaagcgaggaaagc

SEQ ID NO: 5223 - DNA, 600 bp, Chicken  19866894108662_1
tggctcgccctgttttgtctcctgcttcgcccagctgtcaaccggctgcctccagcttaggtcatgagctcttccagcagtgctagggcctctagagaaagaaagcagggagagtgggcacagtgtctatgctagggaaataccccccggactcccttccctctaagaattagagagctgtctccttccctggaaagggcccgctgacaaagaacaaagcttcttcgcagccctctgagtgaggtgttaggtctgtccagggagagcaccagccccatcagcatatgcgggaggaggctytgctcaaaaacggccatattcttgatcgctcagctgcttctggcattgataacctggctgctattattgcaaagcgcttggcacgtttcaggctgtcccctccttctggaggctgacaggctgcaaccttgccagggagcctggaaaaactctgggtccaaaaaggggcacattgattgcccaacgcaaacatttcctaccatgtactgcggctgcagcaggaaccaaacctacccccacgcctcccagccatgaaaggaggagaaagagcacagcaccttacaggaggggacgcaccta

SEQ ID NO: 5224 - DNA, 600 bp, Chicken  19866894108664_1
ctcattactgaaaactttctgaatgaggtgtcaccatgttttatgggagatggagcctgcctggaaagaaggtccctttaaagatgaagagcaaaagaaggatgactccgataatgagctatttttactttttgttgttgttgttttgctctttcagagatttttttaatatgcagtgattctttattagacagacattgaatattttgtacaattatttactaaaaatgacctgaggtagagggaaaaaaggatcatccctgcttagatttattacaagtctgggagtgagagctgctygaagattcagtgtggtgagtccagagccaagcactggaatggatatctaaaggaaatgcctgtccctaggattctaatgggttaaataattatctgtttggaaagatatatgcgtactcaaacctgtgatggacataatgaatagattaaatgatcactattgtgtccccataacacttttatacctgcccttcactagtgaccataagaggatgacaatctctccagcaccaggaaaagatgggctgctgtgtgtaaccaaagtatcagcatgctatagaagtggtagtgctcctgcaa

SEQ ID NO: 5225 - DNA, 599 bp, Chicken  19866894108674_1
  misc_feature (1)..(131): n is any nucleotide
nnnnnnnnnnnnnnnnnnnnnnnnnnnnnnnnnnnnnnnnnnnnnnnnnnnnnnnnnnnnnnnnnnnnnnnnnnnnnnnnnnnnnnnnnnnnnnnnnnnnnnnnnnnnnnnnnnnnnnnnnnnnnnnnnnncagtttcagatgagcactagtgtgtactcctgtggtgccacgaaagtagtgtttgatgtatgtctacacatattgcatgaagaggtcatcagggaccaatggggctccacactctgcttgagttgtatgtgctgcagtcctgcttctatctgcaggccagacgagataytgaaggcaaataagacagatttactcagcatttcactgattttctgatgaaacaattgccagataaaccaagagttaaatgcaacttgttgccaaggaatatagtttgccttctgctgaggtgagtagaatgtgagtcaaccaaagcatttggctatggctggcttccaggtttgaggctgaaacaaaatactagcttgtctacacctgctgtacatccatcatttctcaaagtgcagagccttgttgttacaccacctacaggtgaatgcaagcttgtaaagctactgcttggcctgg

SEQ ID NO: 5226 - DNA, 600 bp, Chicken  19866894108674_2
agtagaatgtgagtcaaccaaagcatttggctatggctggcttccaggtttgaggctgaaacaaaatactagcttgtctacacctgctgtacatccatcatttctcaaagtgcagagccttgttgttacaccacctacaggtgaatgcaagcttgtaaagctactgcttggcctgggacaggaataggaagaaaacccagatccaattgtacccatgccaagttcaattaatagagtaaaattgtgaaacattatgttcaaaggacgtgtttttttttccttgggtcctggaattgcacwagaagtactctggaaaaccaaagatggaaaaatggagcccgaactccaggctatgaattaaggactccagatctttactgagctctggtcaatagctggctgtgcacttgtacttcactggattaaacacgagtaaataaagtcaagacagatcccaaagttgttttttgtttcacaggaatttatttattaccatccttttttattttaaattaggtaaataattttcctataacaataatttcatatatatattatttaaaatttaaattagttgtctgaatacataattttcttgtg

SEQ ID NO: 5227 - DNA, 600 bp, Chicken  19866894108674_3
gctttcatcattacccattcacaggtgcattgaatttatttctagggaaatacagaagacttaaaggtaggttaataagccaaactatcgttttttcatacctgcctcctatcttctcttactgacagaattatgaagtaggtgtgattgtgagaacaagtaggtaattgcactttctaaagattcttttcctgatttctccttatttactaagatgatttgtgcatgcacttatgcaatgttactattttattcatagcattatatgtaagtattttagggtagatatacatttattayttactaactcaattgtgttatcatttaacttccayaatctaacattctgcagaaatccagaatgacatgcagaaatgcagacaaaaattgtttggtatttcaataaaacaacgtaactgtgccttgcagtggtttggaaaaaaagctctttgtctgtttgttttgcttactagcaggagtgaaacacttttgaaggttacagatgtctcraaaagaagagttgtgggacaggtttcactgttaactgaataaaatttccactgaccccatacaactgaagttctgactacagtagtattt

SEQ ID NO: 5228 - DNA, 600 bp, Chicken  19866894108674_4
ttatttctagggaaatacagaagacttaaaggtaggttaataagccaaactatcgttttttcatacctgcctcctatcttctcttactgacagaattatgaagtaggtgtgattgtgagaacaagtaggtaattgcactttctaaagattcttttcctgatttctccttatttactaagatgatttgtgcatgcacttatgcaatgttactattttattcatagcattatatgtaagtattttagggtagatatacatttattayttactaactcaattgtgttatcatttaacttccayaatctaacattctgcagaaatccagaatgacatgcagaaatgcagacaaaaattgtttggtatttcaataaaacaacgtaactgtgccttgcagtggtttggaaaaaaagctctttgtctgtttgttttgcttactagcaggagtgaaacacttttgaaggttacagatgtctcraaaagaagagttgtgggacaggtttcactgttaactgaataaaatttccactgaccccatacaactgaagttctgactacagtagtatttcttactctactggaaattatatttcagatttgaga

SEQ ID NO: 5229 - DNA, 600 bp, Chicken  19866894108674_5
taagatgatttgtgcatgcacttatgcaatgttactattttattcatagcattatatgtaagtattttagggtagatatacatttattayttactaactcaattgtgttatcatttaacttccayaatctaacattctgcagaaatccagaatgacatgcagaaatgcagacaaaaattgtttggtatttcaataaaacaacgtaactgtgccttgcagtggtttggaaaaaaagctctttgtctgtttgttttgcttactagcaggagtgaaacacttttgaaggttacagatgtctcraaaagaagagttgtgggacaggtttcactgttaactgaataaaatttccactgaccccatacaactgaagttctgactacagtagtatttcttactctactggaaattatatttcagatttgagacttggaaaaatttggaatttgtagctactgctaaagcaatttctaaattaagtcaaagtattcagttgcatttatctaaaaaaagtactttaatttgtgtttttccatttgcaagattaactgaaggaagaaacggtaactgttatctctcaggctctggctctagtcattaatg

SEQ ID NO: 5230 - DNA, 600 bp, Chicken  19866894108676_1
gcacaactagagtttgggtccgtgacctgttttgaatcctcacgtagtttatccagagccagtgaaattccagtaggaacactttggcccactgtgttaaagtatttaaccatctgcacaaaacccacaaaagaggcgctcaaaccaaaaccactcatttacataataaggatgtgaacctactgcagccatgtgaaactatcatttttcacatgtgcttgtgaatcttttcccaggcttttgcagagggaggggcaatctgagggctgggatctgtgagcgaagagaaatgtgtgggtrgggaaaaatgaaggttttaattttttcccttttattcttcaagaagcatgcagcaattacttctgtattttaaagaaacggtgaaaatacccagaggttacagattgatgtttttccttastgtttatacatatataaayacacagctaaaataaatacagaaataaaaggagtacacccacctctacaattacaaaatcactttcccgtggggaaatttctcgtatccccatctgttagaacttggattgtgccacgaaccattatggcttatatcccttaattatttcgtatcatgtg

SEQ ID NO: 5231 - DNA, 600 bp, Chicken  19866894108676_2
aacccacaaaagaggcgctcaaaccaaaaccactcatttacataataaggatgtgaacctactgcagccatgtgaaactatcatttttcacatgtgcttgtgaatcttttcccaggcttttgcagagggaggggcaatctgagggctgggatctgtgagcgaagagaaatgtgtgggtrgggaaaaatgaaggttttaattttttcccttttattcttcaagaagcatgcagcaattacttctgtattttaaagaaacggtgaaaatacccagaggttacagattgatgtttttccttastgtttatacatatataaayacacagctaaaataaatacagaaataaaaggagtacacccacctctacaattacaaaatcactttcccgtggggaaatttctcgtatccccatctgttagaacttggattgtgccacgaaccattatggcttatatcccttaattatttcgtatcatgtgaaatgtaattgtggatattctacatcttcctagcaaatccttcattttctttcttaaagctacctatattcttggccttagttctgtgtggtggagatgaattcccagggctaattaggtg

SEQ ID NO: 5232 - DNA, 600 bp, Chicken  19866894108676_3
caaaccaaaaccactcatttacataataaggatgtgaacctactgcagccatgtgaaactatcatttttcacatgtgcttgtgaatcttttcccaggcttttgcagagggaggggcaatctgagggctgggatctgtgagcgaagagaaatgtgtgggtrgggaaaaatgaaggttttaattttttcccttttattcttcaagaagcatgcagcaattacttctgtattttaaagaaacggtgaaaatacccagaggttacagattgatgtttttccttastgtttatacatatataaayacacagctaaaataaatacagaaataaaaggagtacacccacctctacaattacaaaatcactttcccgtggggaaatttctcgtatccccatctgttagaacttggattgtgccacgaaccattatggcttatatcccttaattatttcgtatcatgtgaaatgtaattgtggatattctacatcttcctagcaaatccttcattttctttcttaaagctacctatattcttggccttagttctgtgtggtggagatgaattcccagggctaattaggtgtaaygggaagccacggccc

SEQ ID NO: 5233 - DNA, 600 bp, Chicken  19866894108676_4
tatacatatataaayacacagctaaaataaatacagaaataaaaggagtacacccacctctacaattacaaaatcactttcccgtggggaaatttctcgtatccccatctgttagaacttggattgtgccacgaaccattatggcttatatcccttaattatttcgtatcatgtgaaatgtaattgtggatattctacatcttcctagcaaatccttcattttctttcttaaagctacctatattcttggccttagttctgtgtggtggagatgaattcccagggctaattaggtgtaaygggaagccacggccccagtcccacagactgttaaattctcacagagaagatggaacttcttccagaccgagaaaagagagggaaaaaacacacctaggtcagcctgacacacggctcagcctgggagcagaaggggagcccttggcacccctccatgcagcaccagaccagggcactgcccaacagggagcccccaaacctgcacttggctctcttcagtccattttatgaaactccacagatgttggtagtggaggggcttgcatggtgtcctgtctggctgctccagcttcgccagag

SEQ ID NO: 5234 - DNA, 600 bp, Chicken  19866894108678_1
attcttctgctctatgagtagatcattagatctgtgtagcatatataaaatgcagtatttgcatgcaaaacatagcttacaaatcttttgtcagaaattacctactacaacaagacaattctaacatcagtatatctagatatagtggtctgcatcaattcatggatatgtgttgaaaattttgatttaacatacttctgaagaaaggtgtgtattatgaacataatttctgtatctacagtatctttgttagcttccagaaggtgttttcattgtatgctagctgtacttctatccagrgtcacctatgcagtttaatgtttttgttatcagaaatgcacaaaccattcctgtgcatcatacacattgtttgattcrttgatgagttacaggcatgtgccgcactcttctgtgaaggctgagtgctgtttgccaagtctttgatttcttacagcagctttggtgtcttcatccttctctcctacctccatgagtgcatacagcctgagttccctgaacatggggaccttacctcgcagcctctactccaccagcccgcgtgggacaatgatgaggcggaggatgaaaaagaaggacttc

SEQ ID NO: 5235 - DNA, 600 bp, Chicken  19866894108678_2
acaaatcttttgtcagaaattacctactacaacaagacaattctaacatcagtatatctagatatagtggtctgcatcaattcatggatatgtgttgaaaattttgatttaacatacttctgaagaaaggtgtgtattatgaacataatttctgtatctacagtatctttgttagcttccagaaggtgttttcattgtatgctagctgtacttctatccagrgtcacctatgcagtttaatgtttttgttatcagaaatgcacaaaccattcctgtgcatcatacacattgtttgattcrttgatgagttacaggcatgtgccgcactcttctgtgaaggctgagtgctgtttgccaagtctttgatttcttacagcagctttggtgtcttcatccttctctcctacctccatgagtgcatacagcctgagttccctgaacatggggaccttacctcgcagcctctactccaccagcccgcgtgggacaatgatgaggcggaggatgaaaaagaaggacttcaaaagctcctgtaggtggtaacagcaactgctcaaaatgtgcaataatgggtggaggagggggaagatgcagaagaaa

SEQ ID NO: 5236 - DNA, 600 bp, Chicken  19866894108687_1
aagtcctgcaaaagggatgaagcaattgcatcaccagtggaacagaaaatatcatttggaagtcagtactcaatgactgaaaaggagtgcagcagttggatcccactggatcattttctagtgcctacacatctgacacagtatttaagccttcagggcagtgctgcacaagtaccattgctggacactgttgaagcaatgacagcgaaaactaacatggaatcataaggaatgaggggcttgaagatagggtgcaactgcaatctcacctaggaaacaaaacatagtagccgcatctgsaaagacagagtggtgctgtacttgcactgttggtggatacctggtgctgtggccatgaatctactggctgactttggcatgtgcatttcctctagttgtggctttctgggatggcttctccatccaaaattcagcatgggtggtgcctcatcttctttccttagagggaaatgcactgccatggcatgggcaggcacagcttctagcctttcatcccagcaccaggctgagaatgcagcaggggaaatgagtgcctaactggctgttggataaactgtacagcagtttcctagagcacat

SEQ ID NO: 5237 - DNA, 600 bp, Chicken  19866894108688_1
taggcccaaacataactttgtcttcattctcatttgttttccattcctatagagaacgtgtgtcttcatgtagcatcttcaccttcagctgttacactttacaccagtattctgctcctctgactactggagaaattgctaattcaaaatttgtgaacaaatttcacatcacaaggtacttacctattttaattacttttccacatactgagaatacctgaacattgattaatataatttggcttcatagaaaatggaattaataaaacataataacctcattaggctttctagatggaraatgtaaaatcttagtaagaaaaagaaagaaaagtttctgtttcagaggaagattactaaactgtataaaaacaatcacagttaaatttatatcagaatctacttgcatatgaacagacttacaaatcctaatagagagtgtagtcttaattacatataagttttttaatattaccacataaggaaaagaaaaaatgggaatataactcctctcattttgttctgcattactaaagtaagccttcaataattaattattaaagattaaaatgataaaagataaaaattaaatgcaggcaa

SEQ ID NO: 5238 - DNA, 600 bp, Chicken  19866894108690_1
ctgccataccacaaacatttgcctctgatactgtgggcaatataataaaataggaggcattactttcatagcatcccttgtgtatgaaagatatgtgtatctttcacatataaaaacttcgtagataggatcagaatgatggctgaaattctcaggattatttttacttcttagaagtaatattcacaagtaaacaagctaaaatattcagcatgatctcagactaatggtgaaatctttacttgaattttctttcacatcgcaactccactcttaaactccatagtgcccagggaaacrcaggcacagaattagcacttcctctcatagtctagcttcctttgtgctaatttatgaatttacactattttgttctcatggtaattagaagatacataaaattttctgtgcttcttgaataatgatgaagtgcctttctgtggcatctaccttcttactactgactatttttaagacaaagtattcttatgtattaaaacttaaaaaaaaaatgtatttttgtccagaaccatttggtccaccattatctgcagcagcagttacaaacctcactttggaggtaatttatttattattatt

SEQ ID NO: 5239 - DNA, 599 bp, Chicken  19866894108693_1
  misc_feature (1)..(28): n is any nucleotide
nnnnnnnnnnnnnnnnnnnnnnnnnnnntgcacgctctgtagcctttcggtgggtgagggatacactgctggagtgctggaagaagccactagaaatatttttgctattagtctgattgcaagagaaatgagtatttgcagcctcagacgcagccttaggagcgatggccggcagctctcctccagcagcccacacagcgctcacatctcctcccaggatgcgctgccactgctcagctcttcaggaaccaaataagcattcgaacaccagtccatgggaaatattcctaggaagtacgytgtactggatcatttccagcgtcaggaaagaagctgctgcagagggggtattaataaggaaaaatttgtttccttttggcagcgtatctgtagatacaggagccctttaatttcacggtcagtctcacgtacccaaataggtgactttgtttctgcctagtagttagtgagaacaatccaggctttctctgttttaacaggaatgctattcttttttcctccctgagcacgactgtctttgctggatggagctgggtttccctacagtggaaacaaataaaatcccagtagggctatac

SEQ ID NO: 5240 - DNA, 600 bp, Chicken  19866894108694_1
cttcaactcctcctgaagaaaacagtctccagcccagcaacaccaacaaaaacacgattcttatttctctcctggaattcaactccctgttagtttcaagtgcagaagatgtaaaatctcatactagcagctggatagggtttgctttaaaaaaaaataaataaataaaaatcacagaaacgttgaccaacttgcagcccaaattatcctgctttgtgtaaagctggtttgtttctgcattgaggacgcagaaaaggcactgagagaacatcatttccatccagctctttgcatctactygatgtgagggccaatgcctttgagaaaacatgcaccaagcctcagcctagctgagtgtggggtttaaagacaagcgacagattgggatggattttaaacctgaagaacttggcatgttaaggaacaggtggaacccaacccaccccagctccttcccttatccccagggctctgacaagacattttcaactccaatttgcatctttcctaaagccaagggcttgtttaaatctgcgataaaaatctcaggggttgtttaacctcacagctaacccaaggttgaatttgttccagtgcaac

SEQ ID NO: 5241 - DNA, 599 bp, Chicken  19866894108700_1
  misc_feature (1)..(68): n is any nucleotide
nnnnnnnnnnnnnnnnnnnnnnnnnnnnnnnnnnnnnnnnnnnnnnnnnnnnnnnnnnnnnnnnnnnnataaggaactgcagcacaaaaccctgctcttgctgttgcgctgaaagagagcagcaaagctcaactataggaatgtagttgtctttcttcctatacactggagagaaaaataagaataaacattaaaaaattcatttcaaagaatgagaaaccgtccagatcacattttaaaagtttgtgtgtattactttgtacatggatggcattaggaccagaggaataccctggaagrtctttgtaatgacattggattatacttctattcyagttcttctattctgttcttctattctaaaagcaccaaggacatttttaggggtatctgtgacaatcaattttatatatttgtgtttttatcactacatattttagtggawggtttaagtcaaagaagtccaaaaggtaacatgctgatgaccaaacgtggtcattaaaaaactttccaaaacggcacagaaaagattaaattctcaaatgtaaacattaaatatgaacattaaaataaataaataaataattcattccagcagg

SEQ ID NO: 5242 - DNA, 599 bp, Chicken  19866894108700_2
  misc_feature (1)..(34): n is any nucleotide
nnnnnnnnnnnnnnnnnnnnnnnnnnnnnnnnnnataaggaactgcagcacaaaaccctgctcttgctgttgcgctgaaagagagcagcaaagctcaactataggaatgtagttgtctttcttcctatacactggagagaaaaataagaataaacattaaaaaattcatttcaaagaatgagaaaccgtccagatcacattttaaaagtttgtgtgtattactttgtacatggatggcattaggaccagaggaataccctggaagrtctttgtaatgacattggattatacttctattcyagttcttctattctgttcttctattctaaaagcaccaaggacatttttaggggtatctgtgacaatcaattttatatatttgtgtttttatcactacatattttagtggawggtttaagtcaaagaagtccaaaaggtaacatgctgatgaccaaacgtggtcattaaaaaactttccaaaacggcacagaaaagattaaattctcaaatgtaaacattaaatatgaacattaaaataaataaataaataattcattccagcaggcaacattctctaatgatctccatgttgaaatcca

SEQ ID NO: 5243 - DNA, 600 bp, Chicken  19866894108700_3
gttgtctttcttcctatacactggagagaaaaataagaataaacattaaaaaattcatttcaaagaatgagaaaccgtccagatcacattttaaaagtttgtgtgtattactttgtacatggatggcattaggaccagaggaataccctggaagrtctttgtaatgacattggattatacttctattcyagttcttctattctgttcttctattctaaaagcaccaaggacatttttaggggtatctgtgacaatcaattttatatatttgtgtttttatcactacatattttagtggawggtttaagtcaaagaagtccaaaaggtaacatgctgatgaccaaacgtggtcattaaaaaactttccaaaacggcacagaaaagattaaattctcaaatgtaaacattaaatatgaacattaaaataaataaataaataattcattccagcaggcaacattctctaatgatctccatgttgaaatccaatttgtaaacgtgatatgagggatcacacatacctcatgtttctatgttaagtccctatgaagttgaagctagatgagggattttctctgtctatacatttgatctccccat

SEQ ID NO: 5244 - DNA, 600 bp, Chicken  19866894108700_4
tatgaagttgaagctagatgagggattttctctgtctatacatttgatctccccatgaaatgtgagttcatagaatacaaaaataattcaattcatacatattaatcctttactacatcaagaagctattacttttgtatgcttttatgcttctcacggtgtaggataatgatactgtatatattaaagcataaatattttataggtacaatcaaaaatacatttaaataaagttaaaggtctgactaaaatttaaaagcaaagcaatttaaaacctagagcagactctatgttatattyttctggattttcaaggcctcttttgagcactatggagggggctgctttacctaaaaagaaccaaacagaagctccattcataaagcttttttttcttttcaagataaaagtagaaatatacatttgaaattaccagatattagtacatatatgtaatgaggcaaaattacctattatcaaattaaaatatggctattgtattacatacattttgaggggggaaaccatatgcctatcagagaagccaatattcaaacctatatgaaaaaattaatgtttttattttattgattttttttt

SEQ ID NO: 5245 - DNA, 600 bp, Chicken  19866894108702_1
caattcaactatttaaaacattaatacataatatataatcctgtatgtacaaggatactcacgtagtaccactgtgtataatgactgagctgggtgcattttgccagaaccaagaaaggtaccactccattctgtggtctcaaagtgactggtctaagaatcatacaacagaatgatagaatcacagaatggttgggttggaagggaccccaaggatcatgaagctccaaaccccctgctgcaggaagggccaccaacctcaatatctaatactagacatggctgcccagggccccatcmaacctggccgtgaacacctccagggacagagcatccacagcctctctgagcagctgtgccagcacctcaccacttcctctgtaaagaacttccccctgatatccaacctaaaccttccctccttcaacttaaaaccattttcccttgtcctgccattacctaccttagtaaagaattgaatcatctctaaaggcaagggaaaggagccttgcatttgaaatttgatgagaggaccaagatattttcttgctgttgcaagggattctgcaatctcctggcatgaagaacctatccggaggt

SEQ ID NO: 5246 - DNA, 600 bp, Chicken  19866894108703_1
gatctttgcttgtctcagcagcattcctggtcatccacgtttaactaatatgctgccccagtctgcactactgagtgtatcagtgctcaccttggggtgggagcagggaaattagatggcagtggagcagggtcacccgacagcaccttccctccagggttacagtttaagctcaagttgaactaaagggcaaattgtttttcttcaccactggtcttctaagagcaaggaacaggaattctcattgatatgctgttgcatatttaaactgcagagcaaatccagcctccccatcagaawtgaggttacagtccattgctccgcaacccctggagctctcctcttcacacggcaattgctaagaactattagttgactgctgtatttctctaacccaaacacgttcccgtagcgggtcactacatgtagttaatgatcactgcacgtacaactgctgtgactctgccctaccacttggctctagaccctggacgtgcctggtggcagcgagatcacactgactgctcatgtatgaaaacagaagcttcacatccgtaccattttcttcagcaatctttcttctctgtttcagaaggctat

SEQ ID NO: 5247 - DNA, 600 bp, Chicken  19866894108703_2
gaagcttcacatccgtaccattttcttcagcaatctttcttctctgtttcagaaggctatctactagcagagagggaatattcttcagtggccaacagggcatggtcccataggctctcagcacagccagaggagctgggttgggagccaaatccatcggcagccctggatatggtcaggggatgagctgggacatcggcacaaccagagaacctgatttggagtagaaggggctggagacaggggaactaggccttcagtgggctcctggcccacgggcacaggagatatgggggacargtgaagctgtgcagggcagtgaagacacttcagtgtccctaatatactgcaactgaaatgaaacggcaggttttacctcaaacagtcatgtagtgctgccgagggagcttagggcaggattcagcgctggttagaaagctgtttttggaaaccctgtgcagacagtaaaggtgtgggtgagaaagtacacagtcacacactttcttccactgaagcaggagctgggctgagtggctgccaagagtgatttgtatgtgatgacagagcaagcaaagcgaggtctaacacccaacctgggga

SEQ ID NO: 5248 - DNA, 600 bp, Chicken  19866894108705_1
ttcaagaatcaacaacctggaaacaaaggagtgcaattaacgctaatgttcctcgtggtttaaaaaaagtaattgtgaatggctttgaaacctgacagttcaactgggaatggagttgatttaataacaagagagcaacaatcacatgaggacgctgcaatcatatgatttttttgcatagtcagacgcagctctaactttgatttatgcttctctcctttctgcgagataatgagggcttagtctcaacaagcctggcatccccaaggctattgccttcacccctttccctggcagackggaggctgctgaagcatggagcctacatatgcaggatgcactttgctgttcacacggcctgggatccttctcttggtgctgttgggaatgcaggaaaaaagaaggacatccagctctcctctccctgtatccagcttcmcacacataggccatgacttactgcttcctcaagccccccgaccatggtgagttagaggacagaggggtgcagagaagatgtgagaaaaaatgaaagatgccaagaacaaattaaagctaaaactaatcaataatcacagttataaaattccctctcgttga

SEQ ID NO: 5249 - DNA, 600 bp, Chicken  19866894108705_2
aatcacatgaggacgctgcaatcatatgatttttttgcatagtcagacgcagctctaactttgatttatgcttctctcctttctgcgagataatgagggcttagtctcaacaagcctggcatccccaaggctattgccttcacccctttccctggcagackggaggctgctgaagcatggagcctacatatgcaggatgcactttgctgttcacacggcctgggatccttctcttggtgctgttgggaatgcaggaaaaaagaaggacatccagctctcctctccctgtatccagcttcmcacacataggccatgacttactgcttcctcaagccccccgaccatggtgagttagaggacagaggggtgcagagaagatgtgagaaaaaatgaaagatgccaagaacaaattaaagctaaaactaatcaataatcacagttataaaattccctctcgttgagcaatctcttcattttgtttacagtaccttggcttacagacttccaccygccctacccagataaaaaatygtttactgttgcccaacttgttgatttctcgttaaccgctgtctcccctgacagtgctctactttggga

SEQ ID NO: 5250 - DNA, 600 bp, Chicken  19866894108705_3
tcacacggcctgggatccttctcttggtgctgttgggaatgcaggaaaaaagaaggacatccagctctcctctccctgtatccagcttcmcacacataggccatgacttactgcttcctcaagccccccgaccatggtgagttagaggacagaggggtgcagagaagatgtgagaaaaaatgaaagatgccaagaacaaattaaagctaaaactaatcaataatcacagttataaaattccctctcgttgagcaatctcttcattttgtttacagtaccttggcttacagacttccaccygccctacccagataaaaaatygtttactgttgcccaacttgttgatttctcgttaaccgctgtctcccctgacagtgctctactttgggatcactgagaccactcctgaggtccatacttgattctacgccatagctcaccaaagctkcttctttgctgaaaacaaaagcaaggaacttcatcaggctggcaggactgcgaaataatttagttattgcactgcctacagaagaccacctgtgtctggtgaaggmagctgaagctgaatgtgaaccagaaagtgcagtgtttgccagtgtt

SEQ ID NO: 5251 - DNA, 600 bp, Chicken  19866894108705_4
tcttggtgctgttgggaatgcaggaaaaaagaaggacatccagctctcctctccctgtatccagcttcmcacacataggccatgacttactgcttcctcaagccccccgaccatggtgagttagaggacagaggggtgcagagaagatgtgagaaaaaatgaaagatgccaagaacaaattaaagctaaaactaatcaataatcacagttataaaattccctctcgttgagcaatctcttcattttgtttacagtaccttggcttacagacttccaccygccctacccagataaaaaatygtttactgttgcccaacttgttgatttctcgttaaccgctgtctcccctgacagtgctctactttgggatcactgagaccactcctgaggtccatacttgattctacgccatagctcaccaaagctkcttctttgctgaaaacaaaagcaaggaacttcatcaggctggcaggactgcgaaataatttagttattgcactgcctacagaagaccacctgtgtctggtgaaggmagctgaagctgaatgtgaaccagaaagtgcagtgtttgccagtgttacccttttcttcaggtactga

SEQ ID NO: 5252 - DNA, 600 bp, Chicken  19866894108705_5
acagaggggtgcagagaagatgtgagaaaaaatgaaagatgccaagaacaaattaaagctaaaactaatcaataatcacagttataaaattccctctcgttgagcaatctcttcattttgtttacagtaccttggcttacagacttccaccygccctacccagataaaaaatygtttactgttgcccaacttgttgatttctcgttaaccgctgtctcccctgacagtgctctactttgggatcactgagaccactcctgaggtccatacttgattctacgccatagctcaccaaagctkcttctttgctgaaaacaaaagcaaggaacttcatcaggctggcaggactgcgaaataatttagttattgcactgcctacagaagaccacctgtgtctggtgaaggmagctgaagctgaatgtgaaccagaaagtgcagtgtttgccagtgttacccttttcttcaggtactgattacatttccttattaggttgggcagtaagatctatttttctttcatctctatatatcacacactacagtgaagtacttgttagtgtgtagatcaacttgtgacctagatattgactggctatcgca

SEQ ID NO: 5253 - DNA, 600 bp, Chicken  19866894108705_6
atctcttcattttgtttacagtaccttggcttacagacttccaccygccctacccagataaaaaatygtttactgttgcccaacttgttgatttctcgttaaccgctgtctcccctgacagtgctctactttgggatcactgagaccactcctgaggtccatacttgattctacgccatagctcaccaaagctkcttctttgctgaaaacaaaagcaaggaacttcatcaggctggcaggactgcgaaataatttagttattgcactgcctacagaagaccacctgtgtctggtgaaggmagctgaagctgaatgtgaaccagaaagtgcagtgtttgccagtgttacccttttcttcaggtactgattacatttccttattaggttgggcagtaagatctatttttctttcatctctatatatcacacactacagtgaagtacttgttagtgtgtagatcaacttgtgacctagatattgactggctatcgcagcatagtctgtgatcatacctctaagtgtcgtatcacacaactgtggtagtaaggtacgtgcatgtacccactaaacgaacatttaaataatgtctgccttcagga

SEQ ID NO: 5254 - DNA, 600 bp, Chicken  19866894108708_1
acctaaagtagctgacttggcttttatgtcatcagaaacaaggcagccagggtaactgagatgcaaaccagtcctgtggaatattgaaaggcatttaaataaaaagctgttaccagctatagtcagcatgggttcatgaaggcaaagtcctgccatagtaatttgatctcctgtgataatatcactcacttggaggacaaagggaaagcggtggatgtaatctttctggatttcagtaaggcctttagtaccatcccttatctcatctttctggagaagagatcaatttgtgagatgaamagctacttactatgctggatcatgaactggcttgatggtagttcaaagggacacctcaaagggtcctagtaaatgggactagcttacagcagtgtcccccactgctcgacgatacacttgtccttgatgataggaatgatcttcaatgaaggcacatatctgtttgcacagttaattcagggtgcatgaattgtccccacaggactgcaggctgccttaaagccacagctggtaacagcatataacatctttgttgaagaacatgtcacatctcctcagtgaacagaaccgatgaagttt

SEQ ID NO: 5255 - DNA, 600 bp, Chicken  19866894108709_1
aacaatttggcatcatgtagctgacaaacagttgaaatgatattatggactatacttgtcctctatacagatgatgcagaaacaccagtgctgaagatttagaaatccatatataagtctggtgattgatagttatacttttactcatttatttcattttcctggtaaatggtcacctcaacagaaaacaaaaaatatttgtactctactttctctctgatcccttccaaaaggggacaatcatcatcatcatcatcttcaagagcaggggataacttcagctaatatgttcccattttmttctagaacagcaatactgctcttcctgaaagaacacttccttgcctgacattaagaatgacagcttttataaaactgataactacaaacccactgctatataactagaatacacttctcaaaacaataaatgttcctgtttacattggcagacaaactgccagcaggttttttgtttgtttgtttgttttccaattaatactatcattttgccaaacactctcaaaatttggcagaaaatgttcattcactatccccctgtgaaatttgtccctggaaaacacaacacataataatagt

SEQ ID NO: 5256 - DNA, 600 bp, Chicken  19866894108711_1
agcttcgcacccacctcccttggtttgcacagggcaccctgcagtccttgggaaacccgcgcagcaccagctgtgcaaccacggtgttccaaatgcttgggtgggtggtgttggtgcaaccaacctggtggtttgcccgcccttgccgagacagtacagacaccgctgggctgtacaaccctggccactgcaggaaacgcaccccagcactggggcgcaggcagcagcagagccagaacacagctgggagatgctgctggggacagtgtcccaggcagggcgcaggcacggagccgctgwaccagtgtggtgcagcacagggggcagcggcacgtgcagcctcaccagctgagctccgtcccagcatggctgtcatggcacggcacgcctacrcgctcaccgcaaaggaaacccagcactgctgcacccttacagctcactgcaggaaggctgctgcaccctgggctcacccacagggctctcaccacggcccagacccccattcgcagcccagcattaccagccccctcccagcagcaccggagcggtttccccacccatgcgtgtgggtttcctctcacagacctccttcctctttcc

SEQ ID NO: 5257 - DNA, 600 bp, Chicken  19866894108711_2
tgcttgggtgggtggtgttggtgcaaccaacctggtggtttgcccgcccttgccgagacagtacagacaccgctgggctgtacaaccctggccactgcaggaaacgcaccccagcactggggcgcaggcagcagcagagccagaacacagctgggagatgctgctggggacagtgtcccaggcagggcgcaggcacggagccgctgwaccagtgtggtgcagcacagggggcagcggcacgtgcagcctcaccagctgagctccgtcccagcatggctgtcatggcacggcacgcctacrcgctcaccgcaaaggaaacccagcactgctgcacccttacagctcactgcaggaaggctgctgcaccctgggctcacccacagggctctcaccacggcccagacccccattcgcagcccagcattaccagccccctcccagcagcaccggagcggtttccccacccatgcgtgtgggtttcctctcacagacctccttcctctttccaacctccctgcccggcacagagctgcctgtgggcccagagctcagctcccagctcccacccgggacggggcagggctccgttccaccgtgctg

SEQ ID NO: 5258 - DNA, 600 bp, Chicken  19866894108714_1
ctccactgatctgtccctgttgctgcatgcatggtaacaaaactgcattctaacgcagagccagaatatgcaaagtgttccaaggaaatacctcgcacatcttgttatgagaagcaggcacgatctggcacgatctgcatgtacgccacatgttacagagaaaagggcacaggaaagaaggaagctgtacaaatgcaaaaactgttggtgggaattggatgtactctgtggtgggcatttgtgctgaggaatatggaacagtgttcatgtaggtcttccatcctaaaatgtatttgtaayggcatatgactttctgccatctattcctgatccacactagaaaactgaacattgtttataaaactcatccaraaagtggggcaaactcacttaaggttaacttcaaataacrttttgtagcggtataagtagatcaatctgaaatcagtttagctgcrcaggtgcactgttctgatgtgaaaaagccttagaagggcttttgctgagaaaacgtactctttcagaacacagttttggattaagtgaatggaaactgattccattagagcgaattaaatatcctaattagaatcaagtatt

SEQ ID NO: 5259 - DNA, 600 bp, Chicken  19866894108714_2
aagtgttccaaggaaatacctcgcacatcttgttatgagaagcaggcacgatctggcacgatctgcatgtacgccacatgttacagagaaaagggcacaggaaagaaggaagctgtacaaatgcaaaaactgttggtgggaattggatgtactctgtggtgggcatttgtgctgaggaatatggaacagtgttcatgtaggtcttccatcctaaaatgtatttgtaayggcatatgactttctgccatctattcctgatccacactagaaaactgaacattgtttataaaactcatccaraaagtggggcaaactcacttaaggttaacttcaaataacrttttgtagcggtataagtagatcaatctgaaatcagtttagctgcrcaggtgcactgttctgatgtgaaaaagccttagaagggcttttgctgagaaaacgtactctttcagaacacagttttggattaagtgaatggaaactgattccattagagcgaattaaatatcctaattagaatcaagtattttagatcaaggggcatgttccacaaagcaaattaattttaaactttgatatggaaatgtcactagctttaat

SEQ ID NO: 5260 - DNA, 600 bp, Chicken  19866894108714_3
agcaggcacgatctggcacgatctgcatgtacgccacatgttacagagaaaagggcacaggaaagaaggaagctgtacaaatgcaaaaactgttggtgggaattggatgtactctgtggtgggcatttgtgctgaggaatatggaacagtgttcatgtaggtcttccatcctaaaatgtatttgtaayggcatatgactttctgccatctattcctgatccacactagaaaactgaacattgtttataaaactcatccaraaagtggggcaaactcacttaaggttaacttcaaataacrttttgtagcggtataagtagatcaatctgaaatcagtttagctgcrcaggtgcactgttctgatgtgaaaaagccttagaagggcttttgctgagaaaacgtactctttcagaacacagttttggattaagtgaatggaaactgattccattagagcgaattaaatatcctaattagaatcaagtattttagatcaaggggcatgttccacaaagcaaattaattttaaactttgatatggaaatgtcactagctttaatttcagaaatgaaactggagggtggaagagtggctgtaaaa

SEQ ID NO: 5261 - DNA, 600 bp, Chicken  19866894108714_4
agaaaagggcacaggaaagaaggaagctgtacaaatgcaaaaactgttggtgggaattggatgtactctgtggtgggcatttgtgctgaggaatatggaacagtgttcatgtaggtcttccatcctaaaatgtatttgtaayggcatatgactttctgccatctattcctgatccacactagaaaactgaacattgtttataaaactcatccaraaagtggggcaaactcacttaaggttaacttcaaataacrttttgtagcggtataagtagatcaatctgaaatcagtttagctgcrcaggtgcactgttctgatgtgaaaaagccttagaagggcttttgctgagaaaacgtactctttcagaacacagttttggattaagtgaatggaaactgattccattagagcgaattaaatatcctaattagaatcaagtattttagatcaaggggcatgttccacaaagcaaattaattttaaactttgatatggaaatgtcactagctttaatttcagaaatgaaactggagggtggaagagtggctgtaaaataagatgcaaacaagcccatatttaaaaaaaaaacaacgaatagta

SEQ ID NO: 5262 - DNA, 600 bp, Chicken  19866894108716_1
catggtaaaaatagcctttgagtaagtcacacaatctcaacagaataatatgtctttgacaattttcaaggacaattcagaatgattcatcttagaggctgtcttttgttcttaatttcagtatgtagaggtatagacagacctgtgagatacagcttttatttcccttatattgtaaactgaaatcaccagtatactaaactgttagtaaactcatgcaaatacagtacgctataagtagaatcttgatgttcactgtccaacaccacagttcagaaagtctaactataattcactctktcaatagtarcatgctgtcatttcaatctttttctgtgataatagcaacttgactatctaartagcaaagcctttttcacgaaaacctacagcaaagctgtctgaataygttacatatattaatttaatgcaaggagtcacataaactgcatctgaaggttaaagcataggtgattttgctggattgacagacattttaagcagaaacagcacttcagatatcaaagactactctatctgggtatacaaagtagtagcagatgctttccagtacttcagagaaatattctagtttaggat

SEQ ID NO: 5263 - DNA, 600 bp, Chicken  19866894108716_2
atagcctttgagtaagtcacacaatctcaacagaataatatgtctttgacaattttcaaggacaattcagaatgattcatcttagaggctgtcttttgttcttaatttcagtatgtagaggtatagacagacctgtgagatacagcttttatttcccttatattgtaaactgaaatcaccagtatactaaactgttagtaaactcatgcaaatacagtacgctataagtagaatcttgatgttcactgtccaacaccacagttcagaaagtctaactataattcactctktcaatagtarcatgctgtcatttcaatctttttctgtgataatagcaacttgactatctaartagcaaagcctttttcacgaaaacctacagcaaagctgtctgaataygttacatatattaatttaatgcaaggagtcacataaactgcatctgaaggttaaagcataggtgattttgctggattgacagacattttaagcagaaacagcacttcagatatcaaagactactctatctgggtatacaaagtagtagcagatgctttccagtacttcagagaaatattctagtttaggatatttactgaa

SEQ ID NO: 5264 - DNA, 600 bp, Chicken  19866894108716_3
ttttcaaggacaattcagaatgattcatcttagaggctgtcttttgttcttaatttcagtatgtagaggtatagacagacctgtgagatacagcttttatttcccttatattgtaaactgaaatcaccagtatactaaactgttagtaaactcatgcaaatacagtacgctataagtagaatcttgatgttcactgtccaacaccacagttcagaaagtctaactataattcactctktcaatagtarcatgctgtcatttcaatctttttctgtgataatagcaacttgactatctaartagcaaagcctttttcacgaaaacctacagcaaagctgtctgaataygttacatatattaatttaatgcaaggagtcacataaactgcatctgaaggttaaagcataggtgattttgctggattgacagacattttaagcagaaacagcacttcagatatcaaagactactctatctgggtatacaaagtagtagcagatgctttccagtacttcagagaaatattctagtttaggatatttactgaaagttaggcaagctcacgtgctggaagttatgaaaaggctaccctatcttcct

SEQ ID NO: 5265 - DNA, 600 bp, Chicken  19866894108716_4
tcttaatttcagtatgtagaggtatagacagacctgtgagatacagcttttatttcccttatattgtaaactgaaatcaccagtatactaaactgttagtaaactcatgcaaatacagtacgctataagtagaatcttgatgttcactgtccaacaccacagttcagaaagtctaactataattcactctktcaatagtarcatgctgtcatttcaatctttttctgtgataatagcaacttgactatctaartagcaaagcctttttcacgaaaacctacagcaaagctgtctgaataygttacatatattaatttaatgcaaggagtcacataaactgcatctgaaggttaaagcataggtgattttgctggattgacagacattttaagcagaaacagcacttcagatatcaaagactactctatctgggtatacaaagtagtagcagatgctttccagtacttcagagaaatattctagtttaggatatttactgaaagttaggcaagctcacgtgctggaagttatgaaaaggctaccctatcttcctaaatcaggatattaataatgatgaaagtattcaaacgcacacaacat

SEQ ID NO: 5266 - DNA, 599 bp, Chicken  19866894108721_1
  misc_feature (1)..(105): n is any nucleotide
nnnnnnnnnnnnnnnnnnnnnnnnnnnnnnnnnnnnnnnnnnnnnnnnnnnnnnnnnnnnnnnnnnnnnnnnnnnnnnnnnnnnnnnnnnnnnnnnnnnnnnnnntgatgtgagcttgcaaggggtgaagcagatcactaattgccagcaagcgtagcaataaactgataagcacagaagctacaagtcttcagatgggtgctgtttgggaagctggagactgctagaacaggtactttctgtgtgagttcgcttctccctcagctcagcagtgatagcctgacttttgttctcggatcycagaaaggagcacrttgtgggttgtttgggccaaatcagagagacaggtatatacctgtacaccttgttgccacgccagctccaccctgcaaatcttgcggctctgtttatgcttcatttttccatggctccagacagccacaattttaattggactggctgactttttttaaccctttttatttaccttatttcactttatgataccaatcttggcaccacagtctcctgcaattcaaattacagtatcaaatgtgcatcagctaattaacaaatggccattcacctaaaattaggca

SEQ ID NO: 5267 - DNA, 599 bp, Chicken  19866894108721_2
  misc_feature (1)..(91): n is any nucleotide
nnnnnnnnnnnnnnnnnnnnnnnnnnnnnnnnnnnnnnnnnnnnnnnnnnnnnnnnnnnnnnnnnnnnnnnnnnnnnnnnnnnnnnnnnnntgatgtgagcttgcaaggggtgaagcagatcactaattgccagcaagcgtagcaataaactgataagcacagaagctacaagtcttcagatgggtgctgtttgggaagctggagactgctagaacaggtactttctgtgtgagttcgcttctccctcagctcagcagtgatagcctgacttttgttctcggatcycagaaaggagcacrttgtgggttgtttgggccaaatcagagagacaggtatatacctgtacaccttgttgccacgccagctccaccctgcaaatcttgcggctctgtttatgcttcatttttccatggctccagacagccacaattttaattggactggctgactttttttaaccctttttatttaccttatttcactttatgataccaatcttggcaccacagtctcctgcaattcaaattacagtatcaaatgtgcatcagctaattaacaaatggccattcacctaaaattaggcaacctaccctaaaca

SEQ ID NO: 5268 - DNA, 600 bp, Chicken  19866894108725_1
ctcctgctggttacactatttctcatacaagccaggatgccattggccttcttggccattcgggcgcactgctggctcatgttcagctttctgtcaactaacaccatcagatccttttcctccatgcagctttccagttactcttcctgatgcctgtagcaatgcaaggggatgttgtaaccaaaaagcaggactcaacacttggtctggttaaagctcatacaattggcttcagccctttgattgaacctattcagatccctctgtacggccttcctgccaccaggcagattgacactraactacaacttggtttcgtcagcagacttactgagggtgcactcaaacccttcatcaagatcatcaataaagatattgaacaggatcagccccagtaccaaaccctgaggaacggcatttctgactggacaccagctggactatattcaccaccactttctggacccagccctccagccagttttttacccagcaaagagtctcctgtccaagccacgggcttccagtttctccaagagagcacttcagaaacgggcaaaggtgttactaaagtctatgtctgctgtgctctcatgagcc

SEQ ID NO: 5269 - DNA, 599 bp, Chicken  19866894108732_1
  misc_feature (1)..(26): n is any nucleotide
nnnnnnnnnnnnnnnnnnnnnnnnnnatttcagaattaaaataatctattacagtccaaaagttaacttcagtgcaggaagaaatcaataactgatgggaaaaaataatctaataattaaaaagacaaacatttacttcctagaagctacttgtttcaactgatctaaactgctcaattctgtctcagtgtcactctatttctatggaaatttggtgctctacttttgattattattgttttcatccacacaaaaataaaagattttctaagttttttcggatgctctaaagaggtaatkaaaatgccagcccacaaacgataaatattaagctgcttcttccagtgttttttcagatcctgacgcctacctctgggttttagtaactatatcaagcaataaaagactgagatctacttgacaaccccgagagcaaatttttcatcctagatttaatgaaataagaacattagtattatttaatacagattagtgtcaaattttcaaagaaaaaaattaagcatataatataataataatatataaaaattatatatataaaaaaataatwtataaaaaaatttagcatctcaactgag

SEQ ID NO: 5270 - DNA, 600 bp, Chicken  19866894108732_2
gttttttcggatgctctaaagaggtaatkaaaatgccagcccacaaacgataaatattaagctgcttcttccagtgttttttcagatcctgacgcctacctctgggttttagtaactatatcaagcaataaaagactgagatctacttgacaaccccgagagcaaatttttcatcctagatttaatgaaataagaacattagtattatttaatacagattagtgtcaaattttcaaagaaaaaaattaagcatataatataataataatatataaaaattatatatataaaaaaataatwtataaaaaaatttagcatctcaactgagatgctaattcaaacaaaattttaaccaaagttatgtgcagtagctactggctaaacttttgtcaatctaatacttaggatttcttaaagaataccttgtacctcaaaagtaaaataactgaggaaaattacaaggtgaacataatattttttttttaatggcatatcctcagttaccaaagatatcaaaatattatcagcagtaaactatgctattaccgctttaatagctggctacaaagccgtggtagaggaacaaatgcagagacctga

SEQ ID NO: 5271 - DNA, 600 bp, Chicken  19866894108732_3
gagatgctaattcaaacaaaattttaaccaaagttatgtgcagtagctactggctaaacttttgtcaatctaatacttaggatttcttaaagaataccttgtacctcaaaagtaaaataactgaggaaaattacaaggtgaacataatattttttttttaatggcatatcctcagttaccaaagatatcaaaatattatcagcagtaaactatgctattaccgctttaatagctggctacaaagccgtggtagaggaacaaatgcagagacctgaaagttcaaaagatcaacagataagyagtatgttacatgatagttgaaatgagatcccctgagaaatgaatcttgtgccataataaacaagtaatcctatgtgatttgagacctaccttaatagaggattagactttagatatgcaaactgcaagacgctgataagcaataaataaaaggtaccatcctcagattatttggattttgattttagcaatatcttgtaaaaattcttccacagacctcctcccactgtgaagaggacaaaataaatgtaataagaaccaattcstgttgtgacacaggtagctgctgactctggatat

SEQ ID NO: 5272 - DNA, 555 bp, Chicken  19866894108732_4
gagacctgaaagttcaaaagatcaacagataagyagtatgttacatgatagttgaaatgagatcccctgagaaatgaatcttgtgccataataaacaagtaatcctatgtgatttgagacctaccttaatagaggattagactttagatatgcaaactgcaagacgctgataagcaataaataaaaggtaccatcctcagattatttggattttgattttagcaatatcttgtaaaaattcttccacagacctcctcccactgtgaagaggacaaaataaatgtaataagaaccaattcstgttgtgacacaggtagctgctgactctggatatctgttttaactctcttagctttcagtgaacagccaaaatatatttattttgaaaatcttttttatacaggtacrattacagatattgtatgcaggattctaattttatctattaaatcaatctcatacaagggattgaatgacaaaaacaaagtctgaacttaggtttttcagatgtcatcctatttttgtacatttggagtaataaatgtccctcagttt

SEQ ID NO: 5273 - DNA, 447 bp, Chicken  19866894108732_5
gtgatttgagacctaccttaatagaggattagactttagatatgcaaactgcaagacgctgataagcaataaataaaaggtaccatcctcagattatttggattttgattttagcaatatcttgtaaaaattcttccacagacctcctcccactgtgaagaggacaaaataaatgtaataagaaccaattcstgttgtgacacaggtagctgctgactctggatatctgttttaactctcttagctttcagtgaacagccaaaatatatttattttgaaaatcttttttatacaggtacrattacagatattgtatgcaggattctaattttatctattaaatcaatctcatacaagggattgaatgacaaaaacaaagtctgaacttaggtttttcagatgtcatcctatttttgtacatttggagtaataaatgtccctcagttt

SEQ ID NO: 5274 - DNA, 600 bp, Chicken  19866894108734_1
atggtaactattgaaaaatacagacggagctgcagctgagctgctgatctctgcagtaataaggtagtgataagttactgtgctggcactttccataaatctcataaattcagcggggaaagaaaggaaaggaaacctgaagcctcttcttcatgtttatgccagcttgctgcagtctgaactcgtgcctgccttcccagctgtccctcgtagatgacctgctccctgttccagctttcacagagaagttctttctaatgaattgacccgaaggccacagccatcttattttcctccagmagtcggggttgggacacttgacaattttgctcattcgtgccatggctgaaatacgacttgtgataatatctgcagtcacacagtggcctgtcccaagtctgaacacagacaagccaatcgcctctatcttcgagctggtaagaggtttagacacagctatggataagcttcgtttaatcagatggtaactgtgaaatgtctcttccactgctcttaccttctggcagacaagaatacgtgtagacactctttgtctcggtagaatagcatccctagccaagtcaatccttacagactgca

SEQ ID NO: 5275 - DNA, 600 bp, Chicken  19866894108735_1
aaactagaaggaattaatgccaggggtttggactgacctgataaatggtcacactagaactgagattcaacaagattcaacgtctctttcttcattcccctatttcaatccttctcaggcatccctctcacttttgtcccagtgctctgtctactcaaatactgaataacatgacatccaacttctttgaaagctaagttctgaagatttgcagattaccaagcactaacctcattaagtacaattactccttctgaatagtaaactaatttttattatgagagaaaatgaatttctgtwgtaaactagaataatttggaataaaaacttctcgagtacttctgtttaatagaatttctttgcctgcagcagtttatctcactacaatcttctcccaaatagaaacctgataaatgctgtttaagatgtctgagtttcattagtaatttctattagacctgacaaaaacaaacaaacaaaccctgtattcctgtaaaacaaggtttgacccctaaaggctttgataccaggtgaagtcctgcaggaaatgtttatcagcagcattgaaatacatcaagtgaatagagaggggacattttt

SEQ ID NO: 5276 - DNA, 600 bp, Chicken  19866894108735_2
taaatatataatatatacatatataaatatatacatattcactcagagccatcaactttgtgttaaaaatgaaagtgggaaaaaatcttgaaactttggacttcctagtctcctctctccctatgttattctttatttctgaaatttaaaacaatgtgaaaattacccagtgcatgaagatccaccaattggagggagcaaggatgaaattatttgtaaaggtatgatggataaggctaaaaagatggggctttctgctttaaagcccacatactgaaaagcaatgcatacctggaaaamagtgatacactgaggtgccagcaaatctccagttatcacatcaagaagactagctgagaccaatcttgacaaaatgcaaaactacaccttaaactgctgctgcaatggaacactggtttcacacctatctggtcatttttccttgcacacatcaggcacttctatcctaatgctacataactggctttgtgcagctttttcagggaaactgctgacacaactgttctgctcacagatcagctcaaactgccaaaatgcaaatgcagatgtatgtattccaaaatattccgactcaccaag

SEQ ID NO: 5277 - DNA, 600 bp, Chicken  19866894108737_1
gccactacagagccccggggagctatggcacctggtggggtggagctaaggaaaacagggataaacagaatgcacattggatgctatcacaggtgaggagacagaagggtactccttggccaaggagtacatataactgactgctcaggaacccacacttcacttaatcacagaatgattttgagttagaatggacaggaaaggccatcaagttctaccctctgctgtgggcagggttgtcactcactaaaccaggctgctcagggtcccatccgacctggccatgaacatcttcatggrtgggacatgcacagcttctctggacaacctcactatcttcatagacaagaatcttttccttatctaaacccatctatctttagtttaaaaccattacccctttgttctaggtctctacacttcctttaagcagaaggccacaacgagccttctccaggctgaagcacagctccttcaacctttcttcatcaagaggtgctcttctctggtgatcttcatgactctctggacccactccaacaaatccacatccttgtgctgcagccccaggcctgaacatgctactgacatggggcttca

SEQ ID NO: 5278 - DNA, 600 bp, Chicken  19866894108747_1
gtgctttgagcattaattatgtttttaaagcacttagtgcctatcatcatcctctttctatagcaacacaaagttaaacagtcacgcatctgtgacctcttaggaacagttcccagagctgcatctgatagctctgccaccagcatccaactcataaatttgcatggaccgtggagagcatgctgaggttctccttcctggagagctttacctggcaaagcatttaagcatgtactttacttatacagttgaatactttcatcagattcaccaacctaattttggaaagtacttaagcarggctctaccttccccactagcaatacagagacagaatagagcaattccagtttgctgtctgaggttgtgctcgtgttcaatgtggtaacacacrcrttacgtaaaacaccttggacccattaacagtgatattttggagaatgcagatgtgtacaagagcagaggcatcgcagtggagaatatttctctccgatgaccaaattaatgtctttatttctgtccttagatgttgcaagtcacagtgtctcacccctatgacccatttgcaaagcacaagcagatgggaagaaatttaagagc

SEQ ID NO: 5279 - DNA, 517 bp, Chicken  19866894108747_2
acctcttaggaacagttcccagagctgcatctgatagctctgccaccagcatccaactcataaatttgcatggaccgtggagagcatgctgaggttctccttcctggagagctttacctggcaaagcatttaagcatgtactttacttatacagttgaatactttcatcagattcaccaacctaattttggaaagtacttaagcarggctctaccttccccactagcaatacagagacagaatagagcaattccagtttgctgtctgaggttgtgctcgtgttcaatgtggtaacacacrcrttacgtaaaacaccttggacccattaacagtgatattttggagaatgcagatgtgtacaagagcagaggcatcgcagtggagaatatttctctccgatgaccaaattaatgtctttatttctgtccttagatgttgcaagtcacagtgtctcacccctatgacccatttgcaaagcacaagcagatgggaagaaatttaagagcagaagcactct

SEQ ID NO: 5280 - DNA, 515 bp, Chicken  19866894108747_3
ctcttaggaacagttcccagagctgcatctgatagctctgccaccagcatccaactcataaatttgcatggaccgtggagagcatgctgaggttctccttcctggagagctttacctggcaaagcatttaagcatgtactttacttatacagttgaatactttcatcagattcaccaacctaattttggaaagtacttaagcarggctctaccttccccactagcaatacagagacagaatagagcaattccagtttgctgtctgaggttgtgctcgtgttcaatgtggtaacacacrcrttacgtaaaacaccttggacccattaacagtgatattttggagaatgcagatgtgtacaagagcagaggcatcgcagtggagaatatttctctccgatgaccaaattaatgtctttatttctgtccttagatgttgcaagtcacagtgtctcacccctatgacccatttgcaaagcacaagcagatgggaagaaatttaagagcagaagcactct

SEQ ID NO: 5281 - DNA, 600 bp, Chicken  19866894108748_1
aagaaacagtacatcctccttgaacaatactgaggagtaggaagagattatttgttgggtgatacatgatgatcagctaggagcaaaaagctcctggatttaggagagagagaatctgagtcccctggtctccatcagtcagctggggaagagccaagctcctccaaagcaggggaaaggttttacatttttaagtcagctctttttccttttagtcccagggctgttaactgttgctgcttcaatggttacactccatctgttttcactttccttatcaatcctcattttcactcactyactttctcacatctcaacaagtattttcccagcaagcttgagccaaggtcagctggaggggctatgactctctcagatggccaaaccctaccacaggaacgtacagtgatgaatgagaagctaccaaatgagaagtactagtagacaagccaagaaagcaatggaacagagacatgaggttagatatgggaaaaatgggcagaagatcacactgtaaatggtttatgatgctaaacaaaattgtataaataggttctaatcaaggtataactttgaatttcatgtccctgtatgggggta

SEQ ID NO: 5282 - DNA, 600 bp, Chicken  19866894108754_1
tctacaaaacaaccttagctcatctcaggaaaaacttgttcatacagctgtacccttatgctactccaaagcttttccatacaggaaaatattcatcagttcctgggcagtatttttctttaggagtgcagattttagttggcagaaaccacacggattattaagctgctatttctggttatttttaatacagctgaatcccctcccccccacaaaggctgctatatgttaccttacaaactgccaaccttggaagttttctccttcactgcacacctcataaatggagaccaggaaggracaaggggtttttctgtttgatgtagcatctcagcctgtctcatctgtgaaagcagggagtactgtccggaggaaaaaaatgcaatacctgctcaaatactgacattatgaagataaggaagccccctgagctaacaatctcacattcaaagtgaatcaaggacaatacagctgtcttgtcttaaaccagaacagcacatgatgctcaaaaacccccaaatcacacgctttcataggtcctgctgacaagaagagccaagtcacaagatgcagccttctcatttatcagtctcactactg

SEQ ID NO: 5283 - DNA, 600 bp, Chicken  19866894108754_2
gggagtactgtccggaggaaaaaaatgcaatacctgctcaaatactgacattatgaagataaggaagccccctgagctaacaatctcacattcaaagtgaatcaaggacaatacagctgtcttgtcttaaaccagaacagcacatgatgctcaaaaacccccaaatcacacgctttcataggtcctgctgacaagaagagccaagtcacaagatgcagccttctcatttatcagtctcactactgagcttacaaaccacaaaaccctgctgtttcccaaataaataaatattaaaaaagraaaaaaaaaagagtggagctgattccaagcagagactaattgctgtctgggctactgtggtgagatcagtcccctcctccctgactgcagttttccttttggatataactttgcactcgctcagatgtggccttccaaaactcaaagcatatcacagcactgaggggcagagcttgggagtttcagcaaaaatgtgtcagataaaaaaggaaggcagggaatgcagaggatactaagaacttgctcaacatctcattaattgtggatcaaaactgagtgggtggctgctataggtgcctc

SEQ ID NO: 5284 - DNA, 600 bp, Chicken  19866894108759_1
actgaccgatgggctgcagcaggttgaggttgttactgcccacaaagttctgagctaggtttataatcgtcatcatcagtgatgcctgcaagaacgaaggttcacagttaaaaaagcataattcttcactgaaaggacaacattaaaggtaaaatttacactaagaacagaaccgatacagaagataagttcagctaataaaagatatcctcccagatccatcacaaataaagcaggtttttctcgttccgctttcttaatgaaacacgttcctgtgagctggaggtaagatgggcagartggccaatctcatgaaattgaaatatttcttctttttttttytttaaagcattttttacacagtgagaacgggctcctacctcaccgtgatggtacgaggacatctcagctacagaaccagccagctgagcaaccttcacctcccgtttgtcgtttcttttgaaacacgtgaacagaactttcctctggcctggcttcaaacctgcacagaaaaaaaagacctcatgtttagaacatacatgtttcactgtgcttctgctctttagagaccaatagtaacttagagacctaaagattctg

SEQ ID NO: 5285 - DNA, 600 bp, Chicken  19866894108759_2
tactgcccacaaagttctgagctaggtttataatcgtcatcatcagtgatgcctgcaagaacgaaggttcacagttaaaaaagcataattcttcactgaaaggacaacattaaaggtaaaatttacactaagaacagaaccgatacagaagataagttcagctaataaaagatatcctcccagatccatcacaaataaagcaggtttttctcgttccgctttcttaatgaaacacgttcctgtgagctggaggtaagatgggcagartggccaatctcatgaaattgaaatatttcttcrttttttttytttaaagcattttttacacagtgagaacgggctcctacctcaccgtgatggtacgaggacatctcagctacagaaccagccagctgagcaaccttcacctcccgtttgtcgtttcttttgaaacacgtgaacagaactttcctctggcctggcttcaaacctgcacagaaaaaaaagacctcatgtttagaacatacatgtttcactgtgcttctgctctttagagaccaatagtaacttagagacctaaagattctgccccaccagaattaaacacagagcagaaaagac

SEQ ID NO: 5286 - DNA, 600 bp, Chicken  19866894108759_3
actgcccacaaagttctgagctaggtttataatcgtcatcatcagtgatgcctgcaagaacgaaggttcacagttaaaaaagcataattcttcactgaaaggacaacattaaaggtaaaatttacactaagaacagaaccgatacagaagataagttcagctaataaaagatatcctcccagatccatcacaaataaagcaggtttttctcgttccgctttcttaatgaaacacgttcctgtgagctggaggtaagatgggcagartggccaatctcatgaaattgaaatatttcttctrtttttttytttaaagcattttttacacagtgagaacgggctcctacctcaccgtgatggtacgaggacatctcagctacagaaccagccagctgagcaaccttcacctcccgtttgtcgtttcttttgaaacacgtgaacagaactttcctctggcctggcttcaaacctgcacagaaaaaaaagacctcatgtttagaacatacatgtttcactgtgcttctgctctttagagaccaatagtaacttagagacctaaagattctgccccaccagaattaaacacagagcagaaaagaca

SEQ ID NO: 5287 - DNA, 600 bp, Chicken  19866894108759_4
caaagttctgagctaggtttataatcgtcatcatcagtgatgcctgcaagaacgaaggttcacagttaaaaaagcataattcttcactgaaaggacaacattaaaggtaaaatttacactaagaacagaaccgatacagaagataagttcagctaataaaagatatcctcccagatccatcacaaataaagcaggtttttctcgttccgctttcttaatgaaacacgttcctgtgagctggaggtaagatgggcagartggccaatctcatgaaattgaaatatttcttctttttttttytttaaagcattttttacacagtgagaacgggctcctacctcaccgtgatggtacgaggacatctcagctacagaaccagccagctgagcaaccttcacctcccgtttgtcgtttcttttgaaacacgtgaacagaactttcctctggcctggcttcaaacctgcacagaaaaaaaagacctcatgtttagaacatacatgtttcactgtgcttctgctctttagagaccaatagtaacttagagacctaaagattctgccccaccagaattaaacacagagcagaaaagacatttaatcc

SEQ ID NO: 5288 - DNA, 600 bp, Chicken  19866894108759_5
cagtgagaacgggctcctacctcaccgtgatggtacgaggacatctcagctacagaaccagccagctgagcaaccttcacctcccgtttgtcgtttcttttgaaacacgtgaacagaactttcctctggcctggcttcaaacctgcacagaaaaaaaagacctcatgtttagaacatacatgtttcactgtgcttctgctctttagagaccaatagtaacttagagacctaaagattctgccccaccagaattaaacacagagcagaaaagacatttaatccaaaggttaaaaaacttcraaggtagaaagtgaagttcagaacattaaccctgaaaactcaccagattcccacttctggtaggaygtaccaaatcatcccctcggtacgttctgggaaagccctacatggaatcactgtcttgaaataacttaccatcaaccagagatgggatcgatctttcattgtctgagtttgagaacaggaccaactccttgttgatgaagtcgttgtatgtcaggtaattagtatctttcccatacaggtagtcctaagaaaaacaaatgcaagagcattttaattttaacaaggcttaacctg

SEQ ID NO: 5289 - DNA, 600 bp, Chicken  19866894108759_6
tgagcaaccttcacctcccgtttgtcgtttcttttgaaacacgtgaacagaactttcctctggcctggcttcaaacctgcacagaaaaaaaagacctcatgtttagaacatacatgtttcactgtgcttctgctctttagagaccaatagtaacttagagacctaaagattctgccccaccagaattaaacacagagcagaaaagacatttaatccaaaggttaaaaaacttcraaggtagaaagtgaagttcagaacattaaccctgaaaactcaccagattcccacttctggtaggaygtaccaaatcatcccctcggtacgttctgggaaagccctacatggaatcactgtcttgaaataacttaccatcaaccagagatgggatcgatctttcattgtctgagtttgagaacaggaccaactccttgttgatgaagtcgttgtatgtcaggtaattagtatctttcccatacaggtagtcctaagaaaaacaaatgcaagagcattttaattttaacaaggcttaacctgtttcttagctcacacttggctagtttcactaaaatggaagctcctggtaagactgtaggtaaacac

SEQ ID NO: 5290 - DNA, 600 bp, Chicken  19866894108761_1
taaatatgttctcagtcatgaacacgttttgctaaagaattcctgaccatttctgatagtattgctttcttcaaatgcttttgaacagacataatttatatatttctctctctctctctcttttttaaccaaggctagatctaacgtcacaatctgattataatacttttgtaaattaggagcaattctgaatatatcattaatgggaacctgttctagtaagtctcaaactctgtgattttaaaattgctacaaatcatgatctcagactgagtttcagagtgtgacatgccattatgkggaagacaaagagacctatcagaatctcagagtaccattgtatagtacaattctcactcaaaactgcaggctgtaacatcattccaagtaatgtgtagtgacatcctcatgtactgatgaaaatctattgtttcagtaaaggaaagtctattgctaagaaaatttggaaggcttatttctaacactttatcaaagataaatggcattaggaagaagaaacttaaaggacatggtgataattagaaattaaaaaatgacttattaatgcaaactgaaaatatgctaactacagtttgtagt

SEQ ID NO: 5291 - DNA, 600 bp, Chicken  19866894108761_2
caattttcttttcttttgctgccaaagtggaggtgaggacaggcaattcaggctggaagatccaaatgaaaatctgtttgggattctcacctaagccccctcaacatattgcattttcttcggcacagagcactacattcaagttgaaactgaatgttttacttgctctaagaaatgcaggggaaatgaaagatacacttgtaaagctgctagaaactgctgctgcttttcccagttccctcacatttagttcttgagcactaaagagatccagcagcagggatgcaggtaacatcagartgygggtatatagggaaagggccaggctgaattttggtaattgctgataggattaaagacctgacaaagtaggatagaaggagttcttcaaaattctgtcaagctgatgagtgtataaatcatctgaggaggcacactcactaataaattgtctgattctgggaagggagctgaaatcaattgactggtatgatacccaggcagtagcatcttctacttgaaagtggcatactccagctctcagaaagagaaaaaatatctttatcttaatgataaaaccacttgtcaggcaagcagata

SEQ ID NO: 5292 - DNA, 600 bp, Chicken  19866894108761_3
ttttcttttcttttgctgccaaagtggaggtgaggacaggcaattcaggctggaagatccaaatgaaaatctgtttgggattctcacctaagccccctcaacatattgcattttcttcggcacagagcactacattcaagttgaaactgaatgttttacttgctctaagaaatgcaggggaaatgaaagatacacttgtaaagctgctagaaactgctgctgcttttcccagttccctcacatttagttcttgagcactaaagagatccagcagcagggatgcaggtaacatcagartgygggtatatagggaaagggccaggctgaattttggtaattgctgataggattaaagacctgacaaagtaggatagaaggagttcttcaaaattctgtcaagctgatgagtgtataaatcatctgaggaggcacactcactaataaattgtctgattctgggaagggagctgaaatcaattgactggtatgatacccaggcagtagcatcttctacttgaaagtggcatactccagctctcagaaagagaaaaaatatctttatcttaatgataaaaccacttgtcaggcaagcagataatc

SEQ ID NO: 5293 - DNA, 600 bp, Chicken  19866894108767_1
ttaatttatatttgctctcttgcccactgagatctccttgggccaagtgacaaacagatcagcctgtctttaggactgctgtatctgtaaattaaatctcatttgtcactgaaaaaactcaaaagcttgtgttaatattctgattatttgctaaactgagtctgatttttttacagttcttttgcacttgtagctcacttctgtgctaccactaaaatattttactaatgatctcaaacattagaacaggcttatagctgttaaaattgttctttctcatatttactttgttagaacatkatcaaggacaggacttctgcaaacatcatstttttatgataaatcaacagggcagyagatacatgcattatgaagttaatggtctgtcaagatattaacagtgttgattcctgaagagaagtctagaatttaaaagacaaaactgggtttatcagataggacagattgctgcttgtctgactgacttagtttgtgtgacagagctatgagctgcctttgggttcacaagtccttcaaaaccaaagattcatgataatagaaagcttttcagcataaagcacccaacaatcagagttaaag

SEQ ID NO: 5294 - DNA, 600 bp, Chicken  19866894108767_2
gatctccttgggccaagtgacaaacagatcagcctgtctttaggactgctgtatctgtaaattaaatctcatttgtcactgaaaaaactcaaaagcttgtgttaatattctgattatttgctaaactgagtctgatttttttacagttcttttgcacttgtagctcacttctgtgctaccactaaaatattttactaatgatctcaaacattagaacaggcttatagctgttaaaattgttctttctcatatttactttgttagaacatkatcaaggacaggacttctgcaaacatcatstttttatgataaatcaacagggcagyagatacatgcattatgaagttaatggtctgtcaagatattaacagtgttgattcctgaagagaagtctagaatttaaaagacaaaactgggtttatcagataggacagattgctgcttgtctgactgacttagtttgtgtgacagagctatgagctgcctttgggttcacaagtccttcaaaaccaaagattcatgataatagaaagcttttcagcataaagcacccaacaatcagagttaaagttttatttattggctctgaccatctacttc

SEQ ID NO: 5295 - DNA, 600 bp, Chicken  19866894108767_3
gatcagcctgtctttaggactgctgtatctgtaaattaaatctcatttgtcactgaaaaaactcaaaagcttgtgttaatattctgattatttgctaaactgagtctgatttttttacagttcttttgcacttgtagctcacttctgtgctaccactaaaatattttactaatgatctcaaacattagaacaggcttatagctgttaaaattgttctttctcatatttactttgttagaacatkatcaaggacaggacttctgcaaacatcatstttttatgataaatcaacagggcagyagatacatgcattatgaagttaatggtctgtcaagatattaacagtgttgattcctgaagagaagtctagaatttaaaagacaaaactgggtttatcagataggacagattgctgcttgtctgactgacttagtttgtgtgacagagctatgagctgcctttgggttcacaagtccttcaaaaccaaagattcatgataatagaaagcttttcagcataaagcacccaacaatcagagttaaagttttatttattggctctgaccatctacttctgttatcaaccataagggcccataca

SEQ ID NO: 5296 - DNA, 599 bp, Chicken  19866894108769_1
  misc_feature (1)..(21): n is any nucleotide
nnnnnnnnnnnnnnnnnnnnngagggaagctctcctctgctataaacattcccctgtgctgctcatccagcatgggcggattcctcgctccctggcagaggagcagctctgctggcacggtgctccatcagcctcccgttccccctttccctctcgcaggtgggaatcgcccgggtgaggagcgtttggggatggatgtggggtgtgagcatccagccggggctgcagggtgactccagggtaaccctcctcctgcagaaagtccccttccctaaggcaggctggtgaatctctgctttrcccctcgcaatgcgaggagggagtgggagaactgcattttgaaatgcaaagctgcatctctgcctgctcagccgagctaagagggattgaggttttgctgcctgtgtgaatgccaaatgaactgcagtgcaagccccgtccacgcaggcagaaatgcctcgtccgagttgcactctgctggggcctcagataaatctgagtgtaatggactgcaaagcatggaaaatcaaactgtgctgaccagtgcttctgcgtggctttaagcacgctggcgctcagtggttggtttgaaagctaag

SEQ ID NO: 5297 - DNA, 600 bp, Chicken  19866894108770_1
atttttatgctacttcttccacctttaacatctaattttgtaccataattgcagaccttattttcaggataagataaaagattctctttttaagaatcccttatctattgaggaaataagataaatgatgtgcacctcttccggaaatatagtcttaaataaaaactagtagtttttatagttgtagtgcttaagacactgaaaaaaattgagtccctgtgcctttacaacagcatgatgaattgacagagagctggttacctcaggagctgagccctgtgcctgtttgaataccctgcstttctcagctggctttgaatgggyactgtggatggctgtgcatctgtcccasggactctctctgatgcagcagcctatacagacaccttgggaatgtggaatgtcactagttatctccagtgagacagctgaaacatgtttatgaggtgacagaaccttcacattctattgctattatcgttattttatatcgttatttcctttcactgctgtggtgcaggccatagtcctaacagtgagccatttatacataaagaccaygcatcccatacagaaagcaaaagcatgccrttccatcag

SEQ ID NO: 5298 - DNA, 600 bp, Chicken  19866894108770_2
ttaacatctaattttgtaccataattgcagaccttattttcaggataagataaaagattctctttttaagaatcccttatctattgaggaaataagataaatgatgtgcacctcttccggaaatatagtcttaaataaaaactagtagtttttatagttgtagtgcttaagacactgaaaaaaattgagtccctgtgcctttacaacagcatgatgaattgacagagagctggttacctcaggagctgagccctgtgcctgtttgaataccctgcstttctcagctggctttgaatgggyactgtggatggctgtgcatctgtcccasggactctctctgatgcagcagcctatacagacaccttgggaatgtggaatgtcactagttatctccagtgagacagctgaaacatgtttatgaggtgacagaaccttcacattctattgctattatcgttattttatatcgttatttcctttcactgctgtggtgcaggccatagtcctaacagtgagccatttatacataaagaccaygcatcccatacagaaagcaaaagcatgccrttccatcagtcagcagcacctttatcagccaca

SEQ ID NO: 5299 - DNA, 600 bp, Chicken  19866894108770_3
agaccttattttcaggataagataaaagattctctttttaagaatcccttatctattgaggaaataagataaatgatgtgcacctcttccggaaatatagtcttaaataaaaactagtagtttttatagttgtagtgcttaagacactgaaaaaaattgagtccctgtgcctttacaacagcatgatgaattgacagagagctggttacctcaggagctgagccctgtgcctgtttgaataccctgcstttctcagctggctttgaatgggyactgtggatggctgtgcatctgtcccasggactctctctgatgcagcagcctatacagacaccttgggaatgtggaatgtcactagttatctccagtgagacagctgaaacatgtttatgaggtgacagaaccttcacattctattgctattatcgttattttatatcgttatttcctttcactgctgtggtgcaggccatagtcctaacagtgagccatttatacataaagaccaygcatcccatacagaaagcaaaagcatgccrttccatcagtcagcagcacctttatcagccacaccctcccrgttacattagcctcctccac

SEQ ID NO: 5300 - DNA, 600 bp, Chicken  19866894108770_4
ctcaggagctgagccctgtgcctgtttgaataccctgcstttctcagctggctttgaatgggyactgtggatggctgtgcatctgtcccasggactctctctgatgcagcagcctatacagacaccttgggaatgtggaatgtcactagttatctccagtgagacagctgaaacatgtttatgaggtgacagaaccttcacattctattgctattatcgttattttatatcgttatttcctttcactgctgtggtgcaggccatagtcctaacagtgagccatttatacataaagaccaygcatcccatacagaaagcaaaagcatgccrttccatcagtcagcagcacctttatcagccacaccctcccrgttacattagcctcctccaccctgaaacaggtaggttgggtgacagcattcccaggccccggcaggaagcagtatcagggtgtggtgtggcggctggatgaaggcagcctgtaggctgggactgacagggcagagcagccctgcactggcacagggtcccagtggtactactgatcttgcaggccggtcggcaaaacagaaaatgtagcattcagctggatcagccagc

SEQ ID NO: 5301 - DNA, 582 bp, Chicken  19866894108770_5
taccctgcstttctcagctggctttgaatgggyactgtggatggctgtgcatctgtcccasggactctctctgatgcagcagcctatacagacaccttgggaatgtggaatgtcactagttatctccagtgagacagctgaaacatgtttatgaggtgacagaaccttcacattctattgctattatcgttattttatatcgttatttcctttcactgctgtggtgcaggccatagtcctaacagtgagccatttatacataaagaccaygcatcccatacagaaagcaaaagcatgccrttccatcagtcagcagcacctttatcagccacaccctcccrgttacattagcctcctccaccctgaaacaggtaggttgggtgacagcattcccaggccccggcaggaagcagtatcagggtgtggtgtggcggctggatgaaggcagcctgtaggctgggactgacagggcagagcagccctgcactggcacagggtcccagtggtactactgatcttgcaggccggtcggcaaaacagaaaatgtagcattcagctggatcagccagctcatcttgctga

SEQ ID NO: 5302 - DNA, 541 bp, Chicken  19866894108770_6
tggctgtgcatctgtcccasggactctctctgatgcagcagcctatacagacaccttgggaatgtggaatgtcactagttatctccagtgagacagctgaaacatgtttatgaggtgacagaaccttcacattctattgctattatcgttattttatatcgttatttcctttcactgctgtggtgcaggccatagtcctaacagtgagccatttatacataaagaccaygcatcccatacagaaagcaaaagcatgccrttccatcagtcagcagcacctttatcagccacaccctcccrgttacattagcctcctccaccctgaaacaggtaggttgggtgacagcattcccaggccccggcaggaagcagtatcagggtgtggtgtggcggctggatgaaggcagcctgtaggctgggactgacagggcagagcagccctgcactggcacagggtcccagtggtactactgatcttgcaggccggtcggcaaaacagaaaatgtagcattcagctggatcagccagctcatcttgctga

SEQ ID NO: 5303 - DNA, 600 bp, Chicken  19866894108772_1
ggcttcttcagagagtaacagagaatggttatccatttataataaatggttatgcatttataccagggctgaaattagttgattatgttctctgtcagaagataataatgtgattgcgttcaaacagatgtatgacttagcacttgctcactgatgccagagagcgaagccagaaacaatttctgtgagctgatgtcacacaccatgtaatcctagctaaaaattatgctgaaccttatcctaccagtcccacagcagtaaagaggggctctgaaaatcagcatacagtaccatgtgctkctttcacagtttttcctgttaaaacgtggagacataatgaaatgttattaattagaggaaagagtcctcaagaggtcagtttttgtttttcttcccaaagaaaaacacgtctatgtatagatgttgatatatattttccataatgtcttttcttacctcaagcagaagagattcagtaatgttttgggcaatgatttccaggacttctcttttgggatttttttccctaatatgtatgctaaacatgttctgttgtaaagatactgaattctcattatctttccctgggtggacatcaaa

SEQ ID NO: 5304 - DNA, 599 bp, Chicken  19866894108785_1
  misc_feature (1)..(19): n is any nucleotide
nnnnnnnnnnnnnnnnnnntctccattggatgccgcttctgcagcactctcagggctctgtttggaccattctcctctcagcatcgctctcctgatgccacaaagcaccagggctgcttccaccccacctcccccatccccacctccaggaactgccgtccacaccaccacccagaagtgcccaattcccatttcaatcagtccctgcatggggagagctctgttccttaccaccctcctcatcctcactgcagtgctttggtgtggctgaatcctgcagctcgttagcacaaagctaaygagggagggaggaaggaaaccccgggacaaagcagtgcctgaagtgttttgtgctgacatctcacccacgggtgcatgcacctctgggagctgcagaggtgaaggtctgggaataggactgctccatccgtgctcccatcccctcccagccaacacggatgggggctcactgaggaaaatccaaccccccctctgtagcctatttagcaaagggctcactgagggaaaaccaaccttcagcaaactgaggctgcctgcagcccccaccccaatgccttccccacgggttcccatgaggc

SEQ ID NO: 5305 - DNA, 583 bp, Chicken  19866894108785_2
ccgtgctcccatcccctcccagccaacacggatgggggctcactgaggaaaatccaaccccccctctgtagcctatttagcaaagggctcactgagggaaaaccaaccttcagcaaactgaggctgcctgcagcccccaccccaatgccttccccacgggttcccatgaggctgatcccacatggaacgaattctccccattctgtgtcctttggggtccaccctcagctctcttaggacctcacccacagctgccaaccccaaccccaaccccaacccaaccctacacaccttatacckacaccctaaccccgatccagaccctgactcaaaggcttgcagcaatccaaactgccatttccctgccagccccaaagtggggctgcggatggatgtgaggaaagcgtgtccttcccaagggctgcaggaaggatttgaacccacaaaaaaccccccacaaaacccaacagcgccgtaaaggaaagggaaaaaaaaaaaaaaacgagcagaaagtcagcagcctccagctctgctctcctcctgattaaatgcagatcacagggctttttatgggaggcagaga

SEQ ID NO: 5306 - DNA, 600 bp, Chicken  19866894108788_1
tggttgccagcacagcccagatggcatccagccatacctggctttctacatgtatacaggaggactgccaaacaagtgagccttgattgtttggaagttgtgcaaggacaaggtcaattatggctaggagtactggtgctgcactgaatgagggcaaaccattgccaactacttacagatagaatcacagaatcattaagatgggaaaagacattaagatccccaagtccaaccccaaaccatcccaccatgcccactgaccacgtcccacagtgccacatctccgcaggtcttgagcayatycaggaatggtgactccaccacctccctgggcagctgtgacactgcatcaccactcttttggtggctcccagggcagcgtgggagtgctattggggcacactcatcctggtgtgctgctgtcctggcgaggagctggctgagacatgccttgtcagaaagggctgggaactacastggaaaaggaagaattaggataagacatagctgagcagtgcttatgagtttcatagtttaagcattcctccctctggtataaccagttcatttcattttcttgagaaacacagcttctggcat

SEQ ID NO: 5307 - DNA, 600 bp, Chicken  19866894108788_2
ttgccagcacagcccagatggcatccagccatacctggctttctacatgtatacaggaggactgccaaacaagtgagccttgattgtttggaagttgtgcaaggacaaggtcaattatggctaggagtactggtgctgcactgaatgagggcaaaccattgccaactacttacagatagaatcacagaatcattaagatgggaaaagacattaagatccccaagtccaaccccaaaccatcccaccatgcccactgaccacgtcccacagtgccacatctccgcaggtcttgagcayatycaggaatggtgactccaccacctccctgggcagctgtgacactgcatcaccactcttttggtggctcccagggcagcgtgggagtgctattggggcacactcatcctggtgtgctgctgtcctggcgaggagctggctgagacatgccttgtcagaaagggctgggaactacastggaaaaggaagaattaggataagacatagctgagcagtgcttatgagtttcatagtttaagcattcctccctctggtataaccagttcatttcattttcttgagaaacacagcttctggcatttg

SEQ ID NO: 5308 - DNA, 600 bp, Chicken  19866894108788_3
gatagaatcacagaatcattaagatgggaaaagacattaagatccccaagtccaaccccaaaccatcccaccatgcccactgaccacgtcccacagtgccacatctccgcaggtcttgagcayatycaggaatggtgactccaccacctccctgggcagctgtgacactgcatcaccactcttttggtggctcccagggcagcgtgggagtgctattggggcacactcatcctggtgtgctgctgtcctggcgaggagctggctgagacatgccttgtcagaaagggctgggaactacastggaaaaggaagaattaggataagacatagctgagcagtgcttatgagtttcatagtttaagcattcctccctctggtataaccagttcatttcattttcttgagaaacacagcttctggcatttggagactgaattaggtgatgtgattactcctttaaactgaaatcagatgctaatccttcaggcaccctgatctttctggcttctcttccattcatttctccaagtacaaattaaaaaggtgaactactattacctaaatagttctaaaaactctgcttcttttcctgacccccat

SEQ ID NO: 5309 - DNA, 555 bp, Chicken  19866894108789_1
caggtctgtgttcagcttaaataacctcgccattcctaggcaactcaggtaaaccaggctaatgactgctgcttgtacagctgacttatcccttccccaatcttacttaggaaattgcagtgggattgattatttgggatgggatttcaacccctcatgctccctgctgggtcacatgttgtgtgtatttatatctccctcagtcgtcctaaggacaagtggaaatttatcagtcaccaacatgaggcattcggagaaagtaagagcagaagcaaatgtagatgacatctgcaggtttcyttctgtcctggccctgaatctggctggtttggcacagttattggctaaagcaatcttgwcacctacaccagtactcagagtatgaacagaaagttgtgattgataccagcagcattcctaattagctcagaagtacgcaattactaaagaaggatccagcgggtaaaataacgagtaaaagcaaagcagttactcataagtagcaaatatgcataaataaaggagataacaaatgggggaggaaagaggaagaga

SEQ ID NO: 5310 - DNA, 496 bp, Chicken  19866894108789_2
taatgactgctgcttgtacagctgacttatcccttccccaatcttacttaggaaattgcagtgggattgattatttgggatgggatttcaacccctcatgctccctgctgggtcacatgttgtgtgtatttatatctccctcagtcgtcctaaggacaagtggaaatttatcagtcaccaacatgaggcattcggagaaagtaagagcagaagcaaatgtagatgacatctgcaggtttcyttctgtcctggccctgaatctggctggtttggcacagttattggctaaagcaatcttgwcacctacaccagtactcagagtatgaacagaaagttgtgattgataccagcagcattcctaattagctcagaagtacgcaattactaaagaaggatccagcgggtaaaataacgagtaaaagcaaagcagttactcataagtagcaaatatgcataaataaaggagataacaaatgggggaggaaagaggaagaga

SEQ ID NO: 5311 - DNA, 600 bp, Chicken  19866894108793_1
gggcagaagcaggtcagtccacacagccatcacatcacatccacaagctgcttctgaaactgctatatttacctagtttgcaatgattcccttctcccttcccttgtccaatgtaaggtaattctataaatccatcctatgaaacctatgtatacaaatagcaacatactttaacattttaagcaagaaggactatattaatgaaggaagtttactgtcacaggattacaaaggacattcaggatacactcctgatgtttaaaatccatatcttctatttatatgtgttaacatgtataraatatgcagaatcccaaactaaatataygcgtatacttctatgtatctctatttctattcccattttgttctaatcaagaagattatttcaaaatgtaggttttatgttgttggggtttgtttttgtttgttttgtagtttaaacatacattgatttggttctcacagcaaaaatttgccatatgtattcattgaactgctatatggaaggaggaaaaggtacatctaaaattactaatacaaaaaattgaacatgtaatacatcacaacccctcacacagctttaagccttcatatgat

SEQ ID NO: 5312 - DNA, 600 bp, Chicken  19866894108793_2
atcacatcacatccacaagctgcttctgaaactgctatatttacctagtttgcaatgattcccttctcccttcccttgtccaatgtaaggtaattctataaatccatcctatgaaacctatgtatacaaatagcaacatactttaacattttaagcaagaaggactatattaatgaaggaagtttactgtcacaggattacaaaggacattcaggatacactcctgatgtttaaaatccatatcttctatttatatgtgttaacatgtataraatatgcagaatcccaaactaaatataygcgtatacttctatgtatctctatttctattcccattttgttctaatcaagaagattatttcaaaatgtaggttttatgttgttggggtttgtttttgtttgttttgtagtttaaacatacattgatttggttctcacagcaaaaatttgccatatgtattcattgaactgctatatggaaggaggaaaaggtacatctaaaattactaatacaaaaaattgaacatgtaatacatcacaacccctcacacagctttaagccttcatatgatttggtgaattcctatatatttacattta

SEQ ID NO: 5313 - DNA, 600 bp, Chicken  19866894108793_3
tacatttatagaaaatgactgcagaaacgcacacaaaatacattcagtattctacagatggtaagattacaccaacagtttaaatcctccaagtgccttgcacaggtatgacagaatttaaatttttaataaaatattttaaagctcagattaatagtttttactggtgtaaacaaaaatctaaatgtatccactattttgttgctaaagggttcataacaattttatagtaaaacacttgtaccctgttgaaaaattaccactagaaaggacacatgacatgtaactacttctttaggyaaaaaaaaaagaaaaaagaaaaaaaaaaaaaagaaggatatgctaccaaataaacaaacatacaaagtattttagcttcttactcaaaggtgatattatattgctaaaattagcttaatgaaaagcagctttcacttgccagtgtcaaatgaattcctaagaaatacatttcccagaatttcctgggaaatttgcttggaattccagtaaatgtttcaatgatttgttattgtatgcattgtgataagagtacacatatatatgtcaacagaacatgtatgtagtgtatatttccagagc

SEQ ID NO: 5314 - DNA, 600 bp, Chicken  19866894108793_4
taaagcagaagaactctgcttatccaaatcctcattcctctagactgacaaaaaaacaagtacattctttctcttggctgcccctaatgacaagcaggaatgttgcttactcaaagactgaacttccaaagttggtggtaacaatgaaaaaatagatatcagtgtcaccattagcttatctgtagcttactaggaggaaattaagatagtttccttttcctacaactttaaattgacatttaattactacttgattccctttcttggaacaaaagaagctcagaaggtgtctcagcaccrtgaatgtcagagtttcagtgctgtattgaaaaaaagtttagcccaaattttcaaattagttgtagaaattagagctggcttttgaattgcttggtacaatatgccttgagtgcatacctctcctcagcacagctcatcccctccacaaaatcttctaatacaaaccgacatttctactctccattggatacctctcccattgatcattcagaccaatggaagaccttaacctcctatgttggaagggctgagtcttcagctttctactgacttgtaggttagtggaatggatcttcatca

SEQ ID NO: 5315 - DNA, 600 bp, Chicken  19866894108794_1
cttcagagatgctgagctgcctgctctggggttcagagggactctgttgttaaaacgtgacagctgagcagacagcctgtgtttaaccacttgttcatcctgcagacctttcattcttactccatggtgagtccagactttgtcactactttgctcattattttaatttcttttcacctcagggagatgaaggacccttaggaccaccaggagtccctggttcagaggtaggtttcagtggtttattcaattactatcaactccattcaccttgcaatgaaattgtagttaaaataacawaaagcttcagaccgtctggtttgggaagtcatctgcccttctagaagatactgtattgtccatagcttggtccagtttcttgatccagggtggctgaaagtcaaggaaaagtctttcacaaggtgttgagtgagactgattctataacttgtttaaggtctcagaccttgaaaaaccctctactgttcattctctagataaagcacttcaactgggatccatttctctaagcagccctgattggttctttgatttatggtatttttcagtgagagtaaaagaaaaaggaaggaaaaagac

SEQ ID NO: 5316 - DNA, 599 bp, Chicken  19866894108797_1
  misc_feature (1)..(98): n is any nucleotide
nnnnnnnnnnnnnnnnnnnnnnnnnnnnnnnnnnnnnnnnnnnnnnnnnnnnnnnnnnnnnnnnnnnnnnnnnnnnnnnnnnnnnnnnnnnnnnnnnnatcagttttgatcctaggataggaaaaatctaccttctttccaaagcatgttggcctgttcagtaagaactaaaggatcacattcttcatgtttcaggtatattggctattcatcccattttcataaatgaatcactaagggaaataaagatcggtgctcctcactcactgtcacagcatgagtatccctagcatcatcctyttcctttgccaaggaaacctggcaggttgagagtgcagggcagagctgggggcacatccttactgcctttgctttttgtgtgacttatacagcagtaaacatctggtgtctctttgggaagttttgataaggatttggcatgtaagtgtttgctatattcagcacttatccattggcagaagacagatgtttggaggcttttcttcagtggtatggatgtcctgctggtctccttgggaaatgggcatgtgctctgctactagctttcrgctgtcctcattcactagtgttgtggtcat

SEQ ID NO: 5317 - DNA, 600 bp, Chicken  19866894108797_2
tcacagcatgagtatccctagcatcatcctyttcctttgccaaggaaacctggcaggttgagagtgcagggcagagctgggggcacatccttactgcctttgctttttgtgtgacttatacagcagtaaacatctggtgtctctttgggaagttttgataaggatttggcatgtaagtgtttgctatattcagcacttatccattggcagaagacagatgtttggaggcttttcttcagtggtatggatgtcctgctggtctccttgggaaatgggcatgtgctctgctactagctttcrgctgtcctcattcactagtgttgtggtcatgttgtcatcaaattttctaaccttcagcagaaataacctggcacggtgcatttacatgtggaattatggcatgctgaggttaggtttcttgctcacacatggcagctttgcaggcaaagtttctgcagcagccaaacatgcaaacctgtctggtaatcctttctaggtaatacaggattaaaaaaaagtggttaactttgtgctttatgatggcttgtactggatcccaaattgcttaatttcttgctctgagtatcaactgatgtcata

SEQ ID NO: 5318 - DNA, 600 bp, Chicken  19866894108798_1
gtaaaagtcttcttccttctatccatcaatactgacatctttggttgtctgctacaatccaaccatcccctatttactctgcaggttcacatgtctttttgaaggcgatcatcattcatgatgcttacctgacttagcagaagttgtagggctgcacttcccagcaaagctgagctgtcaccccctcagccattaaggctcaaggccaggttgggtgggtccctggcagatggatctggtgggtggcaacctgaccacgggctggagctggatgatccttaaggtcctttccaactcagwctgctctatgaatctgtgacctgcaccagcaccgccatcccctgcctgcgtacctctgagctgcagggctactgaagttgtggggctgagtkgggttgcttagcagcagctgttgacctaggggtttcwtagctagaagggccctgccatgagagcataaagcactgctctccccrtgccctgccctcagcttctgcaggcatcggctcattccctgtgagcggctgtcagtggcacgggggcattgtggagttcagcgtgcaggcagggctccatccatccccgcatcgagaagctgga

SEQ ID NO: 5319 - DNA, 600 bp, Chicken  19866894108798_2
gtctttttgaaggcgatcatcattcatgatgcttacctgacttagcagaagttgtagggctgcacttcccagcaaagctgagctgtcaccccctcagccattaaggctcaaggccaggttgggtgggtccctggcagatggatctggtgggtggcaacctgaccacgggctggagctggatgatccttaaggtcctttccaactcagwctgctctatgaatctgtgacctgcaccagcaccgccatcccctgcctgcgtacctctgagctgcagggctactgaagttgtggggctgagtkgggttgcttagcagcagctgttgacctaggggtttcwtagctagaagggccctgccatgagagcataaagcactgctctccccrtgccctgccctcagcttctgcaggcatcggctcattccctgtgagcggctgtcagtggcacgggggcattgtggagttcagcgtgcaggcagggctccatccatccccgcatcgagaagctggaaagcacatgaaaccaaattactcagattttcccatctgtgcacatgtgcttagctggtgttaaattatcagtgtaaaggcctagtagcttcg

SEQ ID NO: 5320 - DNA, 600 bp, Chicken  19866894108798_3
tgacttagcagaagttgtagggctgcacttcccagcaaagctgagctgtcaccccctcagccattaaggctcaaggccaggttgggtgggtccctggcagatggatctggtgggtggcaacctgaccacgggctggagctggatgatccttaaggtcctttccaactcagwctgctctatgaatctgtgacctgcaccagcaccgccatcccctgcctgcgtacctctgagctgcagggctactgaagttgtggggctgagtkgggttgcttagcagcagctgttgacctaggggtttcwtagctagaagggccctgccatgagagcataaagcactgctctccccrtgccctgccctcagcttctgcaggcatcggctcattccctgtgagcggctgtcagtggcacgggggcattgtggagttcagcgtgcaggcagggctccatccatccccgcatcgagaagctggaaagcacatgaaaccaaattactcagattttcccatctgtgcacatgtgcttagctggtgttaaattatcagtgtaaaggcctagtagcttcgtaatgtacacacacggaaagattcccacagatttttc

SEQ ID NO: 5321 - DNA, 600 bp, Chicken  19866894108798_4
gtcaccccctcagccattaaggctcaaggccaggttgggtgggtccctggcagatggatctggtgggtggcaacctgaccacgggctggagctggatgatccttaaggtcctttccaactcagwctgctctatgaatctgtgacctgcaccagcaccgccatcccctgcctgcgtacctctgagctgcagggctactgaagttgtggggctgagtkgggttgcttagcagcagctgttgacctaggggtttcwtagctagaagggccctgccatgagagcataaagcactgctctccccrtgccctgccctcagcttctgcaggcatcggctcattccctgtgagcggctgtcagtggcacgggggcattgtggagttcagcgtgcaggcagggctccatccatccccgcatcgagaagctggaaagcacatgaaaccaaattactcagattttcccatctgtgcacatgtgcttagctggtgttaaattatcagtgtaaaggcctagtagcttcgtaatgtacacacacggaaagattcccacagatttttcctttttttttttttttttttttcttttattgaagccagctgagtaaa

SEQ ID NO: 5322 - DNA, 600 bp, Chicken  19866894108799_1
ttaccaccaataatactaatggttattgattgctgtgagaagcaaaagcagactgaaatccaaagataatatgatgcatttttctctggtgccttacaaaattgctatggcagcattaagattgtctgactcgaaagtgttccactccggcactttacaaggaggagaaaaaaaaagaaaaaggactttatgaaattgtctttcaagctgaaatactgtattgcttgaagtgagatttaggaaacaaacagcaaaagacattctataagcaatatattagcacaaagtctggcaggatcrcatctgtttgtttggggctgcttttgtcttttgcagttatgtttaagcagccaaaaaattacacttttcagacctgcagcactcactgtttttctatcccacgttataattacaaaatcatgtgtactaatttcactgtccagagagaacatctttatcatcacattgagccagagaatctctatagcctgagaaagagattatctccatgaacaatgtctccttctttcctgtaagttgatttcaggtaattggattcctgcagtctgcttctgcaatccctcaggtgaaaggtgatca

SEQ ID NO: 5323 - DNA, 600 bp, Chicken  19866894108799_2
acattgagccagagaatctctatagcctgagaaagagattatctccatgaacaatgtctccttctttcctgtaagttgatttcaggtaattggattcctgcagtctgcttctgcaatccctcaggtgaaaggtgatcactttgagtgaaaaaaggttaattttatgtaacagactgctgggaaaaaaaaaaaaaagattttgttccatacttccaagctttagataaatatgaaaataaatctgtataaagtaaattttcctatgggaaagccataggatagctgaaatcaagacgttaraagagattcatatgggaatgcttttgctttctgtttgagaaacacatcaggtctgccttttgccaaagaacaaaaagacaatttagagctcasagattaaaccctttgtggagctgtcagtagggaacccacagtctagacccctgaaatgtgatttaggaacgatgagaacaaccagctatccatgccaaacagccacctggcatcaccatttacacaatactgctttggctggagcaaccacaactcccttgctggaaataccagaatgccttgtgatgttgctgcatgtcctccagt

SEQ ID NO: 5324 - DNA, 600 bp, Chicken  19866894108799_3
attcctgcagtctgcttctgcaatccctcaggtgaaaggtgatcactttgagtgaaaaaaggttaattttatgtaacagactgctgggaaaaaaaaaaaaaagattttgttccatacttccaagctttagataaatatgaaaataaatctgtataaagtaaattttcctatgggaaagccataggatagctgaaatcaagacgttaraagagattcatatgggaatgcttttgctttctgtttgagaaacacatcaggtctgccttttgccaaagaacaaaaagacaatttagagctcasagattaaaccctttgtggagctgtcagtagggaacccacagtctagacccctgaaatgtgatttaggaacgatgagaacaaccagctatccatgccaaacagccacctggcatcaccatttacacaatactgctttggctggagcaaccacaactcccttgctggaaataccagaatgccttgtgatgttgctgcatgtcctccagtgattccttggcctcaactgcaacaatttaacccagcaagtctgtaatggttctgccaacaggcacctttatcttgcaattacctcttcaaaga

SEQ ID NO: 5325 - DNA, 600 bp, Chicken  19866894108806_1
tgcgtggctggaaggcagtttgttctcccggtctccttcaggtctgtggagctcttccacctggcaccggctgagcagtgattacgttcctcttcctcgagtgaatgtcaggagctcgttagaggccgcagcacagtgtcacttctcagcacaggcagattgttgggttcagaatcggagacaaacgtgctgattttaattgtcaccaaacccagccttgatgcgctgatgaaatttctcctaggtcttcttctgccccttccaacccaacccattctgccgttccgtgatgctctgtgygccccgacttctcatccaggggcatttctgaggctgtgtcgctgtgccagcagccccgttgggcaggacgttgtctggctcctatagcagcgctgccagttttactctgttttttttattgcagttgagcaaagttttaaacaatcattgggacgtttgcataaaacgtatttttaactcacgcagcggtggcctttggagcacccgcggggagcgacagtcagagctgtccgacgtctgcatgtaccttcatttcataaggcttggttattgcaggctgacttctcgaagcttactttt

SEQ ID NO: 5326 - DNA, 599 bp, Chicken  19866894108808_1
  misc_feature (1)..(147): n is any nucleotide
nnnnnnnnnnnnnnnnnnnnnnnnnnnnnnnnnnnnnnnnnnnnnnnnnnnnnnnnnnnnnnnnnnnnnnnnnnnnnnnnnnnnnnnnnnnnnnnnnnnnnnnnnnnnnnnnnnnnnnnnnnnnnnnnnnnnnnnnnnnnnnnnnnnccaggatcacaagtcagcacatttgctgtcattccatacagccacaaccatttctaatttaaacaccacaagcatgacccagtgcaagtgctgtttgtaggcttgactgtggctctcacagaaagagcaaaacaaaactaaagcatacccagkgctgaaattctgctgataaaaatttatcagatgttcctagtgcctttaggaaaacaaagcaaaaaaaaccccgaatcaatcatagcaaaaaatctcctagagcaatcttctctcagaaggacatccacaaacagctccccagctccccaaacctcatctgaaccatctaaaatccttatttccttttcaaaactgtcctgagggtagttttagaaggtcttggtcattgagagctcaggtataaatgatagccagggattttagcttgtcagttatttgcctgcaatgtagatagatgt

SEQ ID NO: 5327 - DNA, 600 bp, Chicken  19866894108814_1
atacactgatctttgctactatctgtgtgtagaattttgaaattcctgaaaaaaaatgtcctagcactttttaattagcaaaattaaagctatcaatttttgataattatggaataatcattttatattctctaactgttatgacaaattaacacatctggcattttttcttggagtttttttttttttttttcttccagctagagtagatctgacttccgatggcagagaactttgagattttgcatcttgaggcagatggtactattctgtgacttagtgtctttttctccttttccraaagcttttttaatttcagaagcacatcccattgtcagagcacaaatgtgacacgagaagctaagccttgttcttaaaaacatctggaggattcagaagctgctaaaagacagcaggtcttatttacttcactagcttaggtaaatttgcaatgctcatgtgctaaatacggcatgttcaacaagggttttcttctgtgtcaaattgtaattgcctgctgcttctaagatgtcattataattataccttttcactctgcattttaacctccaaggtggattgagataccccagtttcagt

SEQ ID NO: 5328 - DNA, 600 bp, Chicken  19866894108816_1
gttgtggatgccccatccctggaggcattaaaggcaaggctggatgtggatctgggcagcctggtctagcggttgacaaccctgcacatagcagggggttcaaaagtagatgatcattatggttcttttcaacccaggccattctatgattctatgattctatgactagggtcacactgccagccaggtgagggaaggggttgtccctctgtgctctgtgctgtgcggcctcatcttgagaactatgtgcaggttagcgcactgcagtaagaacataaaactatgagagaacatccaaaygagggatacagagatggtgaagggtctggagggcaaagtgtatgaggagcagccttgttttgttcagcccagagcagaggagctgaggggaggcctcatggaggctgcagcagggagcggaggggcagcgctgagctctgctctctgtgacagcgacaggacctgaggggacggcacggagctgtgtcaggggagggtcgggttagacagtaggaaattgttcctgatggaattctagaagtgtctccaaaatatcgtttgatttctggttagtcctgtgtggagccaggagttagactc

SEQ ID NO: 5329 - DNA, 440 bp, Chicken  19866894108816_2
cctcatggaggctgcagcagggagcggaggggcagcgctgagctctgctctctgtgacagcgacaggacctgaggggacggcacggagctgtgtcaggggagggtcgggttagacagtaggaaattgttcctgatggaattctagaagtgtctccaaaatatcgtttgatttctggttagtcctgtgtggagccaggagttagactcaatgatccttgaaggtcccttccaacttgagatattctatgattctatgattattatctaacagtacttagtattctggataaactgggaatrgcgaagaaaactgttttcatatacatacagaaaaagtacagaatgcgtaaattttgttgtattttgctaaagcaagcaacaacaacaaaaagaacaaacaaaaccacaaacaaaaccccactttattcactttttaagaa

SEQ ID NO: 5330 - DNA, 600 bp, Chicken  19866894108819_1
tttcattaaagagctggagctataattgtctacatcagtacatagcggcagactggataaattgtctacataaattgcttaatacaacttcatgccctgttccagagcactgctaactcctacagctatagcagccggtccagctgaggttacgccaccatttgaaacctggtaatgcttccaaaggaaagagaatgacccccaaacccataaagcaacccggcgctgagctgcacaaacagcactgcattaaacatcaaacctgctcgccttatcctacggtggacacaattacgcgtycataatgctggagatttatgtgacaattatgtatatgaagtgatatgcaggctattatcattcttaataaatcaataaagtcaactgaaaaattaaactgaacatatatggaacatttgacagcagatatatttcagtctcttaagcgctgtcattttcattgcaatttactgcctaccctccaagagggttaaatcagaaaagtgaataaagaaagagaagaggtctcaggaaaagaactacagtgcactgaattgcaatttaacagtaaatcagtgtggcagaaggaaatttttgtca

SEQ ID NO: 5331 - DNA, 600 bp, Chicken  19866894108822_1
ttagctctggcttaagtcattgcctgtgtaggctgtgactgcatggctgtgtcctcccactagtgtttggctgtgactcccaaataggctgcgaataagagtcagccgctttgtcacttagcacagcctcctcctggacagatgggaaagggcataactagtctccagggagctagaaacaaagaaggcgagaattgtccttcccatttgcactgatgagcctcacccactctctttctaaatgtcaccccaacaaacaccacggccatacagaccaggactcggactcagacagcgacytgtctctggatgaggaacgcagcctctccatcccrtcgtcagaaagcgaggagaatgtgcgcctgcggggccgcttcccgcgccarttcaagcgtgcagcacacagtgagcgcctcctcaccaacccaacaaacactgctcccaaaggcaagttccgtgggctttggcaggggtctgctgtaccttagggtggcgtgggggaaaggctgtgccttgccgtggcttcgttacccctcacagaagaattctctccctctcctccggcggtgtgtccttcaccagatgtggatggcaacgacc

SEQ ID NO: 5332 - DNA, 600 bp, Chicken  19866894108822_2
tgactgcatggctgtgtcctcccactagtgtttggctgtgactcccaaataggctgcgaataagagtcagccgctttgtcacttagcacagcctcctcctggacagatgggaaagggcataactagtctccagggagctagaaacaaagaaggcgagaattgtccttcccatttgcactgatgagcctcacccactctctttctaaatgtcaccccaacaaacaccacggccatacagaccaggactcggactcagacagcgacytgtctctggatgaggaacgcagcctctccatcccrtcgtcagaaagcgaggagaatgtgcgcctgcggggccgcttcccgcgccarttcaagcgtgcagcacacagtgagcgcctcctcaccaacccaacaaacactgctcccaaaggcaagttccgtgggctttggcaggggtctgctgtaccttagggtggcgtgggggaaaggctgtgccttgccgtggcttcgttacccctcacagaagaattctctccctctcctccggcggtgtgtccttcaccagatgtggatggcaacgacctcatgtcgtactggccggctttgggcgagtgtgag

SEQ ID NO: 5333 - DNA, 600 bp, Chicken  19866894108822_3
ggctgcgaataagagtcagccgctttgtcacttagcacagcctcctcctggacagatgggaaagggcataactagtctccagggagctagaaacaaagaaggcgagaattgtccttcccatttgcactgatgagcctcacccactctctttctaaatgtcaccccaacaaacaccacggccatacagaccaggactcggactcagacagcgacytgtctctggatgaggaacgcagcctctccatcccrtcgtcagaaagcgaggagaatgtgcgcctgcggggccgcttcccgcgccarttcaagcgtgcagcacacagtgagcgcctcctcaccaacccaacaaacactgctcccaaaggcaagttccgtgggctttggcaggggtctgctgtaccttagggtggcgtgggggaaaggctgtgccttgccgtggcttcgttacccctcacagaagaattctctccctctcctccggcggtgtgtccttcaccagatgtggatggcaacgacctcatgtcgtactggccggctttgggcgagtgtgaggttcatccctgctccctgcagaagtggggctctgagcggaaactggggttt

SEQ ID NO: 5334 - DNA, 600 bp, Chicken  19866894108826_1
cttcagtggggtctaggagtgcagtcaccttccagtcacacacgtgaattgccttcacctgtgctcccagggctgactcggtgcttgcatcaggtggtcaatcagaggttcaggctgtgattcaacagttcccatacagctgtgcatggctgagctgagcagtgtgctgctgtgctgtgcttgcacaggcacctgtctgccacacagctgtgctcatggctgcaggcacagcccttggcacaccatgctcagagagaaattcacagctctctctaaagagggttattagttgctaatggyattttgtgcaggaaacaaaataaggcattttgttcagttcttctgcttttgcgtactgttttgctgtctggaataatatttctgtgttgtggtgcagccatctctatctccacagcaacaactcacaaacagaggcctatgacttcagctgaggagcatgcagcaggcattgatgagctgccaagcaacgaagatttggtttcagggtggatgcagaagccagatagtgacatttttcttgggtttttgtctgccctccttccggtgaattcccactgaagataatttgggctccgagag

SEQ ID NO: 5335 - DNA, 600 bp, Chicken  19866894108826_2
cgatgctctgcggtgcctcagctccagccctgcgctgtgctccctgcccagcactgcagggctttccagtcctcctacacgagagagcaatgctttctctgaagcgtccttaggcagcctacctgcctggtgaaggatgactattcctaaatggctttgcagtcttttgaaaaaccagtcatgaaataattgagtcaagctttcgtgaaatagatcttaattttattctatggatgtcatagatctgaaattctcaaatgctgatgaacttccgtacgaacgctttatgatactggaagwtcccagtgcttgcagtgcagtcctgcagcggtgtggtgttggcataagaacaaatgggaggagagcgttaagagaatgtaaaataaagataactctgaagtaaacccaaacrgtagccaaccaattaccttatcattcccactttgcagctcmggcagaatttattagtgatcagcagctgaatttggtgcacaagatttgccacattctrggtctgcctttaattctgagtgscccacctggggagggctgcttacatccaaagggagagcagtacttcttgctggagaaggtaactct

SEQ ID NO: 5336 - DNA, 600 bp, Chicken  19866894108826_3
ggcagcctacctgcctggtgaaggatgactattcctaaatggctttgcagtcttttgaaaaaccagtcatgaaataattgagtcaagctttcgtgaaatagatcttaattttattctatggatgtcatagatctgaaattctcaaatgctgatgaacttccgtacgaacgctttatgatactggaagwtcccagtgcttgcagtgcagtcctgcagcggtgtggtgttggcataagaacaaatgggaggagagcgttaagagaatgtaaaataaagataactctgaagtaaacccaaacrgtagccaaccaattaccttatcattcccactttgcagctcmggcagaatttattagtgatcagcagctgaatttggtgcacaagatttgccacattctrggtctgcctttaattctgagtgscccacctggggagggctgcttacatccaaagggagagcagtacttcttgctggagaaggtaactctgtttttcctagtagctgcatggcaggagccacgtagtgcagcacagctccccacccaggctgcagctgccccccatcagcccaggagcacagccctggtgggaatgcaggct

SEQ ID NO: 5337 - DNA, 600 bp, Chicken  19866894108826_4
gctttgcagtcttttgaaaaaccagtcatgaaataattgagtcaagctttcgtgaaatagatcttaattttattctatggatgtcatagatctgaaattctcaaatgctgatgaacttccgtacgaacgctttatgatactggaagwtcccagtgcttgcagtgcagtcctgcagcggtgtggtgttggcataagaacaaatgggaggagagcgttaagagaatgtaaaataaagataactctgaagtaaacccaaacrgtagccaaccaattaccttatcattcccactttgcagctcmggcagaatttattagtgatcagcagctgaatttggtgcacaagatttgccacattctrggtctgcctttaattctgagtgscccacctggggagggctgcttacatccaaagggagagcagtacttcttgctggagaaggtaactctgtttttcctagtagctgcatggcaggagccacgtagtgcagcacagctccccacccaggctgcagctgccccccatcagcccaggagcacagccctggtgggaatgcaggctggcacagacagcacagcctgcagccgctcacccatcacact

SEQ ID NO: 5338 - DNA, 600 bp, Chicken  19866894108826_5
agatcttaattttattctatggatgtcatagatctgaaattctcaaatgctgatgaacttccgtacgaacgctttatgatactggaagwtcccagtgcttgcagtgcagtcctgcagcggtgtggtgttggcataagaacaaatgggaggagagcgttaagagaatgtaaaataaagataactctgaagtaaacccaaacrgtagccaaccaattaccttatcattcccactttgcagctcmggcagaatttattagtgatcagcagctgaatttggtgcacaagatttgccacattctrggtctgcctttaattctgagtgscccacctggggagggctgcttacatccaaagggagagcagtacttcttgctggagaaggtaactctgtttttcctagtagctgcatggcaggagccacgtagtgcagcacagctccccacccaggctgcagctgccccccatcagcccaggagcacagccctggtgggaatgcaggctggcacagacagcacagcctgcagccgctcacccatcacactccaaaagggcctcacacagcgcagtgggagccgcacagcacttcctcctccccatgca

SEQ ID NO: 5339 - DNA, 600 bp, Chicken  19866894108826_6
tgtcatagatctgaaattctcaaatgctgatgaacttccgtacgaacgctttatgatactggaagwtcccagtgcttgcagtgcagtcctgcagcggtgtggtgttggcataagaacaaatgggaggagagcgttaagagaatgtaaaataaagataactctgaagtaaacccaaacrgtagccaaccaattaccttatcattcccactttgcagctcmggcagaatttattagtgatcagcagctgaatttggtgcacaagatttgccacattctrggtctgcctttaattctgagtgscccacctggggagggctgcttacatccaaagggagagcagtacttcttgctggagaaggtaactctgtttttcctagtagctgcatggcaggagccacgtagtgcagcacagctccccacccaggctgcagctgccccccatcagcccaggagcacagccctggtgggaatgcaggctggcacagacagcacagcctgcagccgctcacccatcacactccaaaagggcctcacacagcgcagtgggagccgcacagcacttcctcctccccatgcacttcctggtgcccagcctggtga

SEQ ID NO: 5340 - DNA, 600 bp, Chicken  19866894108831_1
tcacagaacgtgagggatggagagctctgagatccccacggtgccatggaggagcgtttgccccatctgctgttcaaacagcatttcagctctggggatgccgttccaagaagagaacgtttttacgagagcaccgcttctgaaagctgcacaggcaaagacgaaggggctctgactgcgattcctgaaacattcctgaaaaataatgatgtcttattttagaagtccgcagaattccatcacactgacctcatggaggaatcgtaacggaggtttattgggtttatattttaagccagyggtgcagactctaaattgctgtcttgaatagacattgtttttaatagcaatattacataaattaactccaaggcctccgtgcctcccttttttttttaatattatttttatttttttaaatgctgcctttcatcgcttcccccctttttattgttcacaaagccacgctccgaccaccgcggctttactgcgacattccacaggtactgagttacaaagaaagcactcaggccaatccggcgcctcacccatggcatcttctgcacccggagacagagccaggttagataattctgctga

SEQ ID NO: 5341 - DNA, 600 bp, Chicken  19866894108831_2
atcttctgcacccggagacagagccaggttagataattctgctgatttctactgatggaggggaaaagagcagcgggaatgttaattgtgaaggatgttaatccgtccagatggaaaagccagggggtgacggctgcaccacgagagcgaatggttggggattcggttcagccgttgggtgacagccaacagcatccccggggttttctcttggatgtggtttgggatggaagagggacaggggctgtttcagccacaggaagcctgagtgggatcccatcagcgaccccgcatctcccygarcacccggggtctcaggagagccctcagcaggagggtatccctgtactgacaatcccataggccatctcccaaacaaagaagtttggattcaaaacaaattcctttacaatcagaacttcacccgcacrctgcaggcccctttgaagatacagcatcctggatccccctccagattacccwgaggaggttgagctgtgatggatctcggtgtaggactttacccagggggcacggacgtggctgagcacgtagctrctgggggtgaagagtgagaacaggaccctgcagttatagaca

SEQ ID NO: 5342 - DNA, 600 bp, Chicken  19866894108831_3
ttctgcacccggagacagagccaggttagataattctgctgatttctactgatggaggggaaaagagcagcgggaatgttaattgtgaaggatgttaatccgtccagatggaaaagccagggggtgacggctgcaccacgagagcgaatggttggggattcggttcagccgttgggtgacagccaacagcatccccggggttttctcttggatgtggtttgggatggaagagggacaggggctgtttcagccacaggaagcctgagtgggatcccatcagcgaccccgcatctcccygarcacccggggtctcaggagagccctcagcaggagggtatccctgtactgacaatcccataggccatctcccaaacaaagaagtttggattcaaaacaaattcctttacaatcagaacttcacccgcacrctgcaggcccctttgaagatacagcatcctggatccccctccagattacccwgaggaggttgagctgtgatggatctcggtgtaggactttacccagggggcacggacgtggctgagcacgtagctrctgggggtgaagagtgagaacaggaccctgcagttatagacagaa

SEQ ID NO: 5343 - DNA, 600 bp, Chicken  19866894108831_4
ggctgcaccacgagagcgaatggttggggattcggttcagccgttgggtgacagccaacagcatccccggggttttctcttggatgtggtttgggatggaagagggacaggggctgtttcagccacaggaagcctgagtgggatcccatcagcgaccccgcatctcccygarcacccggggtctcaggagagccctcagcaggagggtatccctgtactgacaatcccataggccatctcccaaacaaagaagtttggattcaaaacaaattcctttacaatcagaacttcacccgcacrctgcaggcccctttgaagatacagcatcctggatccccctccagattacccwgaggaggttgagctgtgatggatctcggtgtaggactttacccagggggcacggacgtggctgagcacgtagctrctgggggtgaagagtgagaacaggaccctgcagttatagacagaagggcctcacagcaagaaaagggaaagtagcttcacaaagtagaaatacgaggcaaatagagatagtttatgtagagagtgttagaaaacaagggattccaagcaaggtttggaataacaaggaggatg

SEQ ID NO: 5344 - DNA, 600 bp, Chicken  19866894108831_5
agccaacagcatccccggggttttctcttggatgtggtttgggatggaagagggacaggggctgtttcagccacaggaagcctgagtgggatcccatcagcgaccccgcatctcccygarcacccggggtctcaggagagccctcagcaggagggtatccctgtactgacaatcccataggccatctcccaaacaaagaagtttggattcaaaacaaattcctttacaatcagaacttcacccgcacrctgcaggcccctttgaagatacagcatcctggatccccctccagattacccwgaggaggttgagctgtgatggatctcggtgtaggactttacccagggggcacggacgtggctgagcacgtagctrctgggggtgaagagtgagaacaggaccctgcagttatagacagaagggcctcacagcaagaaaagggaaagtagcttcacaaagtagaaatacgaggcaaatagagatagtttatgtagagagtgttagaaaacaagggattccaagcaaggtttggaataacaaggaggatgaaggccgtaaagataaggactggagagcagctcgaaaatatttggcagggag

SEQ ID NO: 5345 - DNA, 600 bp, Chicken  19866894108831_6
ggaagcctgagtgggatcccatcagcgaccccgcatctcccygarcacccggggtctcaggagagccctcagcaggagggtatccctgtactgacaatcccataggccatctcccaaacaaagaagtttggattcaaaacaaattcctttacaatcagaacttcacccgcacrctgcaggcccctttgaagatacagcatcctggatccccctccagattacccwgaggaggttgagctgtgatggatctcggtgtaggactttacccagggggcacggacgtggctgagcacgtagctrctgggggtgaagagtgagaacaggaccctgcagttatagacagaagggcctcacagcaagaaaagggaaagtagcttcacaaagtagaaatacgaggcaaatagagatagtttatgtagagagtgttagaaaacaagggattccaagcaaggtttggaataacaaggaggatgaaggccgtaaagataaggactggagagcagctcgaaaatatttggcagggaggtgattggatgcctacagggcaagctgaagccggtttgggggatgccccccctttggggtcagaagtttgcagtg

SEQ ID NO: 5346 - DNA, 600 bp, Chicken  19866894108837_1
aacactggtaagttgtgtcacctcgttggagcgatgtgttactaattccacggtgggcagtggggatgcagcttcatgcccatgtggaatacaaaacctgacttcagtagttccattcttgggaccaaaaccaactgttgtaagcactgtgaacaacacagcctgaattgcctcgggtgcgcctgtagcttccttagctggaacagtgatacaggcgttcattgccactgtagacttcacagtattgtttatgaagctctttcttttctttttaaaccctgtatgttttagaagcagcakcgagagcctgtgagctgatagcttgctagcgttagagctgtcttaataatagtcttaataacaatggaaggaaatgacatctcttttcttaattgataggacctttgtgacttctcaaatgagtgttgttcagtgagtgtcagatagtagctgtgagttcttctgagtagaataaatctgtttttttaataagacttttcaagctgcaaatagctaattgagcaacacttggtaacctgtgaggaaaaacaccaagcctgtgtggtgtgctgcagaattaaaaaaaaaaaaaagtgcatt

SEQ ID NO: 5347 - DNA, 599 bp, Chicken  19866894108838_1
  misc_feature (1)..(226): n is any nucleotide
nnnnnnnnnnnnnnnnnnnnnnnnnnnnnnnnnnnnnnnnnnnnnnnnnnnnnnnnnnnnnnnnnnnnnnnnnnnnnnnnnnnnnnnnnnnnnnnnnnnnnnnnnnnnnnnnnnnnnnnnnnnnnnnnnnnnnnnnnnnnnnnnnnnnnnnnnnnnnnnnnnnnnnnnnnnnnnnnnnnnnnnnnnnnnnnnnnnnnnnnnnnnnnnnnnnnnnnnnnnnnnnnnnagtgggcccagcatgaagaagacaggtagggatcaggcccccacatgcatcttttggtttgctgtgtgctgccyggctctactgttaacaccagtcccatcgtggttgaagatcaggcatttgtttttgtgtgagctctgtatcacagcctgttataggaagatgtagaggaattgacctgttcttcttattcatctgatctggatctyggttagctgctgagttctcaccagataactggtagccaggatattttcttgctgtgtttgctgygggtttctcacttcttttgttgttttttttttctcccattccttacagaagaaaagcgcagtgacatggcaaaccaccccaccttccggaagatttactg

SEQ ID NO: 5348 - DNA, 599 bp, Chicken  19866894108838_2
  misc_feature (1)..(91): n is any nucleotide
nnnnnnnnnnnnnnnnnnnnnnnnnnnnnnnnnnnnnnnnnnnnnnnnnnnnnnnnnnnnnnnnnnnnnnnnnnnnnnnnnnnnnnnnnnnagtgggcccagcatgaagaagacaggtagggatcaggcccccacatgcatcttttggtttgctgtgtgctgccyggctctactgttaacaccagtcccatcgtggttgaagatcaggcatttgtttttgtgtgagctctgtatcacagcctgttataggaagatgtagaggaattgacctgttcttcttattcatctgatctggatctyggttagctgctgagttctcaccagataactggtagccaggatattttcttgctgtgtttgctgygggtttctcacttcttttgttgttttttttttctcccattccttacagaagaaaagcgcagtgacatggcaaaccaccccaccttccggaagatttactgtgatgctgttccctatttgtttaagaaggtaggacaggtcttgctttctgccatggctacaacacaggaagcggtgataccacttccttgagtgtatgttgctgtgtgggcagttaagggtgattcatttgttcc

SEQ ID NO: 5349 - DNA, 599 bp, Chicken  19866894108838_3
  misc_feature (1)..(27): n is any nucleotide
nnnnnnnnnnnnnnnnnnnnnnnnnnnagtgggcccagcatgaagaagacaggtagggatcaggcccccacatgcatcttttggtttgctgtgtgctgccyggctctactgttaacaccagtcccatcgtggttgaagatcaggcatttgtttttgtgtgagctctgtatcacagcctgttataggaagatgtagaggaattgacctgttcttcttattcatctgatctggatctyggttagctgctgagttctcaccagataactggtagccaggatattttcttgctgtgtttgctgygggtttctcacttcttttgttgttttttttttctcccattccttacagaagaaaagcgcagtgacatggcaaaccaccccaccttccggaagatttactgtgatgctgttccctatttgtttaagaaggtaggacaggtcttgctttctgccatggctacaacacaggaagcggtgataccacttccttgagtgtatgttgctgtgtgggcagttaagggtgattcatttgttccccttacagctatgggacagtaaagtatttggggtgtcaagacgggaaagtcagcataaaaagac

SEQ ID NO: 5350 - DNA, 455 bp, Chicken  19866894108843_1
ctctcttgtcttgctatggcagggcaagacttctgtgttccagatttcatgatatatctacctcctgttctcagatattatgtcatgttttttgcattttgtatggctttggtgttttgttttgtctttttcataatgtcatgcaatgacttacgaacacgaatgactttaatgatattacccacacatgtcagaccatgtcttttcctcaagaactctacattctgcaaaggggatcccgttctgtgtattggtaccccacaagatcaggagatgcagcaaagggtgggcatacgtggytggagaggaggggagacaaattctttgattaatactatggagacaacagaggaaaggtcataggagttatacctgcaccagtcccacctacctggggattttgtttataaggcagaagctgaagtctccaattaacagattttcaaaactcagat

SEQ ID NO: 5351 - DNA, 600 bp, Chicken  19866894108845_1
gcatgtggggaaggaaggaaggatggaaagtgtggtccataacattgtcgagtattgctcaggtaaatatctcactcttcaatttgaaactattttcctttactgattcattgaaaatatgctggaaaatcttctatttggtaaactgatatgagtgtggctatggtgcagtttctaaagttgtaaacttgtgagtgaaggcatcagtctccaaaaaaaaaccaaaatctaccactttcttgatgatttgtttcagtgaccaaacagtcttactaactcctctctcatttacaacttcarttctttgcggttatctcttccaggtggagattccaaggaaaatagaaaccagtaattggatttaccagaaattggtaattgttcttacagtgttttaaaactgctaaaattttcagaagttaacatatttgtggatggcaaatgacaatacgtcaggaagtctagaaaatgttgcaaaacacatttcccatggggacagaggaaatgttatgagtttaagacttgccaagagttttgtacacatgcattagctcaacagagggaggtcatgtaagagacaggtgcttagtataaattata

SEQ ID NO: 5352 - DNA, 600 bp, Chicken  19866894108848_1
ttaactgtctccacaattagctggcaatgcaataggaaagcgcagaaccagcagacattacataatttcagtttgagaatgcaagcaatacacaaaagcgtgtaatgcgtaaaatagaaataggttggtttcacttcattcacttgttacagcactttttttccttaaatgagagaaagtgtctcaaataggtataagttcaaatatatctacatatttgtttcaatatatttactgcaatttttatattaaaaaatgtttttacttatgtgtgcttccaatttctccttgctgccaaarttaaatgaaaaaaaatctaaaaataagctaattgaattagaagatctttggaaattgggaggaatctaaaggtactgtcagtgaactaaaacactgtactgtcatttaagatgagtgaggaataaataaaagctgaagggtatctatatgataataaataatctttgttattttactgcttctttttcagatgagtggagacttggataatttggatgcaattttaggggatctgactagttcagacttctataataatgctatgtctacaagtggaaataactttggaatgaagcaagc

SEQ ID NO: 5353 - DNA, 600 bp, Chicken  19866894108854_1
ttgaactagagattaatttaacaccgaggattcaaagcttcttttgatttaccaatatgtattcaaaaggcttggagtgagaactaatccttaagagcttcatatgaagccttctctgtttatcaatgaactaacccagtaacgattcaatttggtatccaaatcagccaacttttaaagcaatttggagttaaagtagttgaattcactgaattccagatcttacgcattgcaactgtttcattattagaacacagcagcaacgctgaatgaaaaaaattaaaacttttggacagattmagaagataattccctccaaacaaattcagatcrctgtataatctcactatttgctgcttcagatacaaacatttaagaaatagcaccatctgtatctgccactgttaagatcactgtttgttccgcgatttaatttattaggagcagaacaccacacacatttgctcgacatactttgctactacaccagctggaaacagctgaaagtcaagagaaacaaatgaagtcgaaaatttactccaacccattaagtcacttgtacaagtgagtaatagacttatcagaactggacgttccttg

SEQ ID NO: 5354 - DNA, 600 bp, Chicken  19866894108854_2
aaagcttcttttgatttaccaatatgtattcaaaaggcttggagtgagaactaatccttaagagcttcatatgaagccttctctgtttatcaatgaactaacccagtaacgattcaatttggtatccaaatcagccaacttttaaagcaatttggagttaaagtagttgaattcactgaattccagatcttacgcattgcaactgtttcattattagaacacagcagcaacgctgaatgaaaaaaattaaaacttttggacagattmagaagataattccctccaaacaaattcagatcrctgtataatctcactatttgctgcttcagatacaaacatttaagaaatagcaccatctgtatctgccactgttaagatcactgtttgttccgcgatttaatttattaggagcagaacaccacacacatttgctcgacatactttgctactacaccagctggaaacagctgaaagtcaagagaaacaaatgaagtcgaaaatttactccaacccattaagtcacttgtacaagtgagtaatagacttatcagaactggacgttccttgccatttaaggacttcagtgctttctatttcaga

SEQ ID NO: 5355 - DNA, 600 bp, Chicken  19866894108858_1
tgaaaggtttttggccagactgcagtgattgtcatttaggtttggctgtacagccaaaggggactccacacgaggtcaaaactttgacctcagcaccacagcctgaaagaagtaataataaaaatgctatctgctgatcacttcagcccctttccatcgcagtttctaattatctgtagtgcttgttgtcttcatcttgtttgtgcatgcagctaacatgctcaacattggaatatactctcccggaaatagaatctatttagtactgccctcctcgacaccagcccggagcagcaactygcagaatataaccaagggaaagcagagacccagttcactgcccagaaacacagcagaaaatctgtgaaagatgcccaacaacaaccatttcattttgcctgaaacacatgacacagcttccaccatcccctgtgctacagctcaaactcaagcacaaagctaagcagtgctttgctatttcccagcatgaatttgcctcactgctgctttgctccaggggctctgttctcctgggcattcacaaccatcacaaaattcaccaaaaagtcatgaaattctgcaagctggaaagcaggatgg

SEQ ID NO: 5356 - DNA, 600 bp, Chicken  19866894108861_1
tctctatcctcaacccacttcaaataacaggctttgaatttttgaatacggaagtcagaaggtaatgtagcttaggatttgaagttttgcaagtgaaagtgcaagtgaaaaggatagaatacagtgttttccagtgcacctctgttttaaacacaacagaggactttgtaggcaccaagtttaaattgtgacaatgtaagcagataccacaagttttaattgtggaaggaaaaaatccacaaatgcttaaacatgtgtctttttgtagcagataattaatgtttgcatgaatcactgatytaaagaaccattaaactcccactttcatctaatagttccactgaggaagactccaaagaagtaatgtgactgtgatgaaactcattattttccagaattaatccatacccattttttttaacatcaagaatgcttttcttttgaaatttcaggaactccaatttcaaagacttaccagagaactggaagtggaaaggcaaattgtggctaatcagctagaaagatgtaggcttggagcagaatcaccaagtatcgccagcacaaggtacaagtcccaatgacttcactttcatatatccc

SEQ ID NO: 5357 - DNA, 600 bp, Chicken  19866894108861_2
aatcaccaagtatcgccagcacaaggtacaagtcccaatgacttcactttcatatatcccataagctaaagggcctcttatgtcctctatccgtgtatttccactaacagctgttcacctttcatcaatatcttaagtacaaaaatacagatttgctattaagagttatgagacagttcaaaaagacctaatcattgattacataaatgtgaagctttaatttctctttaagtatgttgaaattggtttttaagattcagccaaagagaaatgcagtagacttgaaaatatttgtgctaractaacagtgtttccttctggggtcataacaaatatttcaacaaatcaaacgaaagtattcctacaaaaacttaagaaagtgagcatgattatttgcaataaataagtaatcccttgcaccacctaacacaactgttttactttatcatagaacttggcttacgtttcatttgacagtattgttcctggcatgaaagtttctgtctgagaaacttgaaaatactcaaaaatattctttgggcaggactcctgctttgtacccttcttgcttgtccatcttccctctagttagtgttcaga

SEQ ID NO: 5358 - DNA, 600 bp, Chicken  19866894108862_1
cagggagaaagcagtcacttacattctattaacacgttttaatttttcagccagcaatgtgatagatggccccaatataattcaatctctttacatttttcataagttagataaatcatattgagtccttcaaccttcatattttacttaacatacagacctacgttaaatggatgcagaggaagccccacaacccaatcaagtagctttaaggcatttgaacccaggtaaacacagatcctaggaattagcacatttatggacacaggcagtccactcagaacagcatcccaaccctakgagcattattatttcagagggaaacacaggaaaccttttgctgagcacagcctgccaggtaggagacttcctatttgctgatgaagctcaggcatcgagataagagcgctggtatcccttccataacccttgacttccttttcaacrcagaccatttatctcaaccttccctcccccagcccagatattcacagcatccacagaaatgcactgagtatctgaatgacatcagcatcctggcttcagcacagcttggcaggagcagcaaactcctcgaagggcattctcccagaactgcct

SEQ ID NO: 5359 - DNA, 600 bp, Chicken  19866894108862_2
ttaacatacagacctacgttaaatggatgcagaggaagccccacaacccaatcaagtagctttaaggcatttgaacccaggtaaacacagatcctaggaattagcacatttatggacacaggcagtccactcagaacagcatcccaaccctakgagcattattatttcagagggaaacacaggaaaccttttgctgagcacagcctgccaggtaggagacttcctatttgctgatgaagctcaggcatcgagataagagcgctggtatcccttccataacccttgacttccttttcaacrcagaccatttatctcaaccttccctcccccagcccagatattcacagcatccacagaaatgcactgagtatctgaatgacatcagcatcctggcttcagcacagcttggcaggagcagcaaactcctcgaagggcattctcccagaactgccttctgaaggattaaaaagggctcagatttattgtgcatccagactcccaagctcactgctgcccaggaatcccgtgtgtcgctcctcgacttcagcagcacgctgcagcactgcaggcttaatgaatgcaaacattgtaaagcactgt

SEQ ID NO: 5360 - DNA, 600 bp, Chicken  19866894108870_1
aagaaacagcagagcacaatacagagagaacaagaacccatagcatttcatcttaatagatgactaataaaataatagaaccatagaatggcttagattggaggggaacttaaagatcatccagttccaagcctcctgccatgggctggttgccatctacagtatcatgttgtccagagccctatccatggccttgaatgcctctgccgatagggcatcacagcctctctgggcaacccattccagcacctctcaccccctgagtaaaaatgttttacctaatatctaacctaaatctcycctcttttagtttaaaaccattcccttttgtcttatcaccatcagaccgtgtaaaaagttggtcttcctcctcctgcttataagctcccttcaggtactggaaggccactggaaggtctccttggagccttctcttctccaagctaaacaagcccaactccctcaactcttcctcataggaaaggtgctccagccctgtgatcatcttcgtggccctgaaatttgaatgggaaaaaaaaacaaaaacagtaagagatgatggtttctattatattattaaacatgctgtttacagaatgt

SEQ ID NO: 5361 - DNA, 600 bp, Chicken  19866894108876_1
tcatttttaaggtcttactgccatctagcgacttctgggggaagagcagagtttctttgaacgagctcgcaaggtgatggtgaacagatacatattcttttccctctgccatccttgtgcattatatctgcccctcccctgctttaacataacccatctatccgtgcaaaaggtggcaccccagaggaaagctgcaacaaacagcatttgtcatcaggttaattccagtatcacaatgtgggcagattttttccaagaaccacagaagaccaaattgtaccatgctgttctcttcttaakcctcttacttctttctccatgcagaatacaaaccgagctatgcccggaatcgctctacccgctctgtatctgttgagctgaacggggccgtgtttaacttgggtttggaggatggataccaacctgtcttaccgagaaacatcaccaagcggcacaagatgcagagggctgttcttcgtgaggaggaagataaagacatggctgaatacagtggcactggaggcattgcagagtatgcagccccaaatctaataaaagtgacacataggtgagtgcatgtgctgtattcctatatgcttt

SEQ ID NO: 5362 - DNA, 600 bp, Chicken  19866894108880_1
tctcaagaccctcaggagatggagctgaatacatttggtgtgagccatgtgtctggaaatgtcaaggacaaatatttttaaagtaaggagtgttcatatccatgtgtaatcttaagtactacagaagtgatccaaaacacagccctttcctccttgttatgattgttcagctgtagccagcatataactgcagcttcccaggaattagctaggcatctctgcacttaggaacttgcatatttataccgagcaacactttaaggctctcctaaaggctctgcccgtgacaggatgtttagytttctatttgcagaaaggaaaagttttattgtaaaagttccctgtctgtctccaagaactgtctgtccctgcaytctgaatgccccagcagttcctcaccscagccctctgtgttgctcctcatcaggctctattcctgcgctctgcaaaaaggcaccacgtttatgacaagcagaccgggaggaacaacaggcacttccagcagcagcaacctgccttgccggcctgcagcatcagcaggacacctctttcatgtaccattggtccccgctgcaatcaaggaatggtrtctaactaacg

SEQ ID NO: 5363 - DNA, 600 bp, Chicken  19866894108880_2
tttttaaagtaaggagtgttcatatccatgtgtaatcttaagtactacagaagtgatccaaaacacagccctttcctccttgttatgattgttcagctgtagccagcatataactgcagcttcccaggaattagctaggcatctctgcacttaggaacttgcatatttataccgagcaacactttaaggctctcctaaaggctctgcccgtgacaggatgtttagytttctatttgcagaaaggaaaagttttattgtaaaagttccctgtctgtctccaagaactgtctgtccctgcaytctgaatgccccagcagttcctcaccscagccctctgtgttgctcctcatcaggctctattcctgcgctctgcaaaaaggcaccacgtttatgacaagcagaccgggaggaacaacaggcacttccagcagcagcaacctgccttgccggcctgcagcatcagcaggacacctctttcatgtaccattggtccccgctgcaatcaaggaatggtrtctaactaacgaagtactgccagcggtcactcatctgccctttgtgcgccgtcactcattttctttctgtgagcctacattcaag

SEQ ID NO: 5364 - DNA, 600 bp, Chicken  19866894108880_3
atgtgtaatcttaagtactacagaagtgatccaaaacacagccctttcctccttgttatgattgttcagctgtagccagcatataactgcagcttcccaggaattagctaggcatctctgcacttaggaacttgcatatttataccgagcaacactttaaggctctcctaaaggctctgcccgtgacaggatgtttagytttctatttgcagaaaggaaaagttttattgtaaaagttccctgtctgtctccaagaactgtctgtccctgcaytctgaatgccccagcagttcctcaccscagccctctgtgttgctcctcatcaggctctattcctgcgctctgcaaaaaggcaccacgtttatgacaagcagaccgggaggaacaacaggcacttccagcagcagcaacctgccttgccggcctgcagcatcagcaggacacctctttcatgtaccattggtccccgctgcaatcaaggaatggtrtctaactaacgaagtactgccagcggtcactcatctgccctttgtgcgccgtcactcattttctttctgtgagcctacattcaagttcaagactaaagggtgtacaaatcgt

SEQ ID NO: 5365 - DNA, 600 bp, Chicken  19866894108880_4
ggatgtttagytttctatttgcagaaaggaaaagttttattgtaaaagttccctgtctgtctccaagaactgtctgtccctgcaytctgaatgccccagcagttcctcaccscagccctctgtgttgctcctcatcaggctctattcctgcgctctgcaaaaaggcaccacgtttatgacaagcagaccgggaggaacaacaggcacttccagcagcagcaacctgccttgccggcctgcagcatcagcaggacacctctttcatgtaccattggtccccgctgcaatcaaggaatggtrtctaactaacgaagtactgccagcggtcactcatctgccctttgtgcgccgtcactcattttctttctgtgagcctacattcaagttcaagactaaagggtgtacaaatcgtcagtcttcctactgatgtgcaccaggtgtgctcatttctgcgttaccgctcagaaaagtgmgaaagaaaaatttctgaagaaccagtggtggtggggaacccttctgaattcttttcctagatagctctactgcttgaaatacagatccgagcctgcttttggctgctaactgccacataacatatta

SEQ ID NO: 5366 - DNA, 600 bp, Chicken  19866894108880_5
ttatgacaagcagaccgggaggaacaacaggcacttccagcagcagcaacctgccttgccggcctgcagcatcagcaggacacctctttcatgtaccattggtccccgctgcaatcaaggaatggtrtctaactaacgaagtactgccagcggtcactcatctgccctttgtgcgccgtcactcattttctttctgtgagcctacattcaagttcaagactaaagggtgtacaaatcgtcagtcttcctactgatgtgcaccaggtgtgctcatttctgcgttaccgctcagaaaagtgmgaaagaaaaatttctgaagaaccagtggtggtggggaacccttctgaattcttttcctagatagctctactgcttgaaatacagatccgagcctgcttttggctgctaactgccacataacatattatcctacttactgcatacagttctgaacatcttgtatctggaagcaacaagggagaaggctcctttatcaagtcaatctcaaatctcattatgttcccctacaacagtttccgtaaacattcagcaattttcagtgtctgagttgcacagctgaagaggtgcataaacaggctc

SEQ ID NO: 5367 - DNA, 600 bp, Chicken  19866894108881_1
agtactgtgttcagttttgggctcctcagtacaagaaggacattgaggtgctggagcaggtccagagaagggcaacgaggctagtgaagggcttggaaaatcagccctatgaggagaagctgaggcagctgaggctgtttagtctggggaagaggaggctgaggggagaccttattacgctcttccagtacctgaaaggtgcttagagtgagagtggggtaggtctcttctcactggtgacaggtgacaagacgaggggaaatggcctcaagttgcaccaaagtaagtttaggttggacrttaggaaatgtttctttacagaaagtgtggttaaacactggaataggctccccagggaggtggttgagtcgccatccctggatgtgtttaagagccgtttggatgtgtgtaagagattattattttatatcattgactcaaagtttgctgaggaacaagtccaggcaagtcctgggcaaaggtagagaaatcgtctgtctttaaggattacagatggacaaggccagggacaacaagagagggataagctgctaataatggccaggaaattgtctttgtgtggacttatctcgaggaaga

SEQ ID NO: 5368 - DNA, 600 bp, Chicken  19866894108889_1
tggggttcttacagaagcacatggatgctaacgtgcttgggaagaataagaatatattccagcactttaaaataaatagttaagctataagctactgcgagaaaagaaaactaaactccatcaaagatatgaagttatgttttgtgcaaatgaacttccacagtgtcagagaataaactgtgctttttccttatgcttctcccacaaattatctactgggactttatgctattaatgtcaattttcacttttatcatcatgttttccttatgagaggaactctttgctctgtaagcagtratacttgctggtacagactccattcagaagtctcagcagtaggtgygctgctgcttttttgttagactttgatacctacaaactcagccacgaatggctggatgctgaccagagctgagcaacacttggaactctattccataaacttcaggctctgtgagaagtgccagctgcaycacggccctacgattcctgtgatacaccacgtcagtcagagccaagactaatgcatcccaaaatgtgtggtgtagccaaggattacagaagataatggtgagatcgtgtcctttgatgggacaa

SEQ ID NO: 5369 - DNA, 600 bp, Chicken  19866894108889_2
taagaatatattccagcactttaaaataaatagttaagctataagctactgcgagaaaagaaaactaaactccatcaaagatatgaagttatgttttgtgcaaatgaacttccacagtgtcagagaataaactgtgctttttccttatgcttctcccacaaattatctactgggactttatgctattaatgtcaattttcacttttatcatcatgttttccttatgagaggaactctttgctctgtaagcagtratacttgctggtacagactccattcagaagtctcagcagtaggtgygctgctgcttttttgttagactttgatacctacaaactcagccacgaatggctggatgctgaccagagctgagcaacacttggaactctattccataaacttcaggctctgtgagaagtgccagctgcaycacggccctacgattcctgtgatacaccacgtcagtcagagccaagactaatgcatcccaaaatgtgtggtgtagccaaggattacagaagataatggtgagatcgtgtcctttgatgggacaacagagcagctataaaaggtttgggtttaatgttgatccaacacaga

SEQ ID NO: 5370 - DNA, 600 bp, Chicken  19866894108889_3
actgtgctttttccttatgcttctcccacaaattatctactgggactttatgctattaatgtcaattttcacttttatcatcatgttttccttatgagaggaactctttgctctgtaagcagtratacttgctggtacagactccattcagaagtctcagcagtaggtgygctgctgcttttttgttagactttgatacctacaaactcagccacgaatggctggatgctgaccagagctgagcaacacttggaactctattccataaacttcaggctctgtgagaagtgccagctgcaycacggccctacgattcctgtgatacaccacgtcagtcagagccaagactaatgcatcccaaaatgtgtggtgtagccaaggattacagaagataatggtgagatcgtgtcctttgatgggacaacagagcagctataaaaggtttgggtttaatgttgatccaacacagactcagatgaacggaaaacactaaaatatttcatttagatttttttaatcaaaaacagaaaaatgtcaatggggctgaaacactcccaccacggtttttatatggattagagccatggaagcgttggccat

SEQ ID NO: 5371 - DNA, 600 bp, Chicken  19866894108891_1
gccaaagttaacaccacaaggaaaatgtggacatatatagaaagagaagaatgaagcagtgagatctgctgtgttacactaaggacaagttttgctggataaaagccattgtgtgagagttttaccatgggtgaaaggctcatgcatacagatgaagaaagccttgaagaagacagctagaaaaaagaatttataataaatataaattgccacacatttgtgtaatactgaagtctttctttcttttggaatcttccagaagaaatctaaatggcatgacatgacaattcagtttaaatyacttgcattaatttctttttaccataataaagcagtgttgtcaccatttcatctttttaaaagcgttaacattaaaaacaactctcattacgagagaacattaaatgcattcgttctcactaaagaccacatgctctgctcatagcagctttcagtgaattcacagtatttgcatgtttgcacatcagacatttgaattcacgatctgtggattcaaggctgaaactgctacatttgcagcagcataggagattaaaaaaaaacatagacagatttttcttcttctaaaaacattctgcc

SEQ ID NO: 5372 - DNA, 591 bp, Chicken  19866894108891_2
gtcaccatttcatctttttaaaagcgttaacattaaaaacaactctcattacgagagaacattaaatgcattcgttctcactaaagaccacatgctctgctcatagcagctttcagtgaattcacagtatttgcatgtttgcacatcagacatttgaattcacgatctgtggattcaaggctgaaactgctacatttgcagcagcataggagattaaaaaaaaacatagacagatttttcttcttctaaaaacattctgccatgctttcatgtaaaacatcccagcagctgacagtaccyagattaccatgtctgtgtgggctgctggaaataatctcccattagttttcaagtaacttctggatgttgccagtggcatgaagtccaatgagattttttcttttctttacttttctttttttttgacaaatgaaactcattcagagttcatctgcttacaaaascaacccaagatcatgcgcagagcccccgcacagtgarcgcaggcatgttagtggaactctgctaaggcacagcactcagctgcttgcaaaagggccttactgcttccctaagcatcttccataagga

SEQ ID NO: 5373 - DNA, 427 bp, Chicken  19866894108891_3
atctgtggattcaaggctgaaactgctacatttgcagcagcataggagattaaaaaaaaacatagacagatttttcttcttctaaaaacattctgccatgctttcatgtaaaacatcccagcagctgacagtaccyagattaccatgtctgtgtgggctgctggaaataatctcccattagttttcaagtaacttctggatgttgccagtggcatgaagtccaatgagattttttcttttctttacttttctttttttttgacaaatgaaactcattcagagttcatctgcttacaaaascaacccaagatcatgcgcagagcccccgcacagtgarcgcaggcatgttagtggaactctgctaaggcacagcactcagctgcttgcaaaagggccttactgcttccctaagcatcttccataagga

SEQ ID NO: 5374 - DNA, 390 bp, Chicken  19866894108891_4
cagcataggagattaaaaaaaaacatagacagatttttcttcttctaaaaacattctgccatgctttcatgtaaaacatcccagcagctgacagtaccyagattaccatgtctgtgtgggctgctggaaataatctcccattagttttcaagtaacttctggatgttgccagtggcatgaagtccaatgagattttttcttttctttacttttctttttttttgacaaatgaaactcattcagagttcatctgcttacaaaascaacccaagatcatgcgcagagcccccgcacagtgarcgcaggcatgttagtggaactctgctaaggcacagcactcagctgcttgcaaaagggccttactgcttccctaagcatcttccataagga

SEQ ID NO: 5375 - DNA, 599 bp, Chicken  19866894108893_1
  misc_feature (1)..(191): n is any nucleotide
nnnnnnnnnnnnnnnnnnnnnnnnnnnnnnnnnnnnnnnnnnnnnnnnnnnnnnnnnnnnnnnnnnnnnnnnnnnnnnnnnnnnnnnnnnnnnnnnnnnnnnnnnnnnnnnnnnnnnnnnnnnnnnnnnnnnnnnnnnnnnnnnnnnnnnnnnnnnnnnnnnnnnnnnnnnnnnnnnnnnnnnnnnnnnnnctcctccaacatggtgctgctctacagtacgtcctcacgctgcccttgcgctgctcagacccccaggctttcctcagaggggatctgtcctgcaggagggggtcatggracagcacctccaggccgggtccccctcccctggctccctggggctgccctcaccctgctctttccgcaggccgcaccaaggaggttgcaccccagcgccttgagaggttcatgcagttctcccaggagcagggcctgaaggacgaggagatcctcatcctaccccagacgggtaagggtgggcagctcacagtggctcctggccatgctcagcccatagggatggagggaggaggtggcggcccttggagrgttgtaccagatcctagggcagtagtgcctctacccatggtgaagctg

SEQ ID NO: 5376 - DNA, 528 bp, Chicken  19866894108893_2
ctcctccaacatggtgctgctctacagtacgtcctcacgctgcccttgcgctgctcagacccccaggctttcctcagaggggatctgtcctgcaggagggggtcatggracagcacctccaggccgggtccccctcccctggctccctggggctgccctcaccctgctctttccgcaggccgcaccaaggaggttgcaccccagcgccttgagaggttcatgcagttctcccaggagcagggcctgaaggacgaggagatcctcatcctaccccagacgggtaagggtgggcagctcacrgttgtaccagatcctagggcagtagtgcctctacccatggtgaagctgatctctgcttttcttctttctgcagacaagtgtatggcagatgctgcctaggtgagtcctgccctcgctgggggctgggggggttcccagcactgcctccgtcctgcagagccctggtgcmatcagcccrtggagctgctcagctctcactggggcatcacccgtctccctttggggtgg

SEQ ID NO: 5377 - DNA, 359 bp, Chicken  19866894108893_3
ctcctccaacatggtgctgctctacagtacgtcctcacgctgcccttgcgctgctcagacccccaggctttcctcagaggggatctgtcctgcaggagggggtcatggracagcacctccaggccgggtccccctcccctggctccctggggctgccctcaccctgctctttccgcaggccgcaccaaggaggttgcaccccagcgccttgagaggttcatgcagttctcccaggagcagggcctgaaggacgaggagatcctcatcctaccccagacgggtaagggtgggcagctcacmatcagcccrtggagctgctcagctctcactggggcatcacccgtctccctttggggtgg

SEQ ID NO: 5378 - DNA, 350 bp, Chicken  19866894108893_4
ctcctccaacatggtgctgctctacagtacgtcctcacgctgcccttgcgctgctcagacccccaggctttcctcagaggggatctgtcctgcaggagggggtcatggracagcacctccaggccgggtccccctcccctggctccctggggctgccctcaccctgctctttccgcaggccgcaccaaggaggttgcaccccagcgccttgagaggttcatgcagttctcccaggagcagggcctgaaggacgaggagatcctcatcctaccccagacgggtaagggtgggcagctcacrtggagctgctcagctctcactggggcatcacccgtctccctttggggtgg

SEQ ID NO: 5379 - DNA, 600 bp, Chicken  19866894108894_1
atggcctaatatatcgtaagagaaactttattactgttaaaactgtagcataagttgtacaactcatttaaaggcatctatttagttaaaatatcaactcaaggaactaaaatccaaaccttaacattacccaaacaagtttgagttcagacagttattttttgttaatgattaaattattagactttattaaagaagctaactacacagttggagagaaactgaggtatctgtacaaacaggtatttcagcattttctgaaggtgctgtttctacgttctgtaaacacatttccaaaaktaaaatgccagtgatttttgttaactgctctgtgccagtccccttgctgtcagtaggcacagtcacactggtgggaagatgatacaggaatcccatctccttgaataatatgatttgtttcaaaaacatataacctctcaacaccttatactctgcaatcaagtactacctcaacctccacttaatatacatactcattgacttatttactgtaaaaagaaatcagcatggaatcaaactaaagatgaaggacttgattccaaaggatttaaagcagaagctttaagctttttaagcttc

SEQ ID NO: 5380 - DNA, 600 bp, Chicken  19866894108897_1
gcaggcctggctccgtcgtgcagccgtgggtggctgtggcagcgggaggtattcccaccactgatgggttcagttggagaaggctgaagaaaatcacacagtcagagatggcacagggagcagttttcagtttctgtttttcagctggttgggacaacatgtttatgctgtttcttattagctcctggctgtgtttgtgaaggagaaggcggtccttggaagtagttggaatgggagcagctgtgggactggggcagtggagaaggatttctcgttggctgattgtgtgctggaaacctmtgctgtgagaaagaggcttctatggtttttattaatatcgcgtttctcacttatttttttctcagccaaaaataggagggtactgttccagctagccattaactcttagctccacgtgtgtggctgtggcccgttggaagctgctgcgtgtttggtctctggtgaggcctcaggaaagagaaacgagcgcggaggaaagaggtttcctgtgggtgtgagcagggcgtgctgtcaacccatggcaggatgggtgtctgcatctgtgtgtgcagcacaaacccttccaaaacaaacacgtgc

SEQ ID NO: 5381 - DNA, 600 bp, Chicken  19866894108906_1
cagccataatacaagttctgggaaccctttggctgaagagcaggcagctcaggaggggactggaagtcaggaaaagcctcattcagcaccaaaacacgaacaaaacatttctaacgtgctgcagatttttccaacttggtgacaccaactgtgtcttttccaatatttctgtccacccttctgtttattcctcacatcagatgtttatttgctgcagtttgcatagcaaccaaatggacaaacaacctgtcaacgtctaaatgcgttcaggtttgaatcgagccttttctgattttcttraarcccagcagaagcagctggctcagtactgcactgtgcacacgagttccactaaatgctgcatcacgtcgcacgcgcttgctagaagagaacaacktggaatgcacgttgtcttctgctgacacaggacatttctactgcatttcgggtttcaaacaagcgaacaaaacacaaaaatacacctctgaataaagcagcaaacagcagcgcatgcatgtaattgaaaacwaagtaagggcagtgtgacccagcacctccagctcccagcttgtctccctgmtcccttctctcctatgcgca

SEQ ID NO: 5382 - DNA, 600 bp, Chicken  19866894108906_2
ccataatacaagttctgggaaccctttggctgaagagcaggcagctcaggaggggactggaagtcaggaaaagcctcattcagcaccaaaacacgaacaaaacatttctaacgtgctgcagatttttccaacttggtgacaccaactgtgtcttttccaatatttctgtccacccttctgtttattcctcacatcagatgtttatttgctgcagtttgcatagcaaccaaatggacaaacaacctgtcaacgtctaaatgcgttcaggtttgaatcgagccttttctgattttcttraarcccagcagaagcagctggctcagtactgcactgtgcacacgagttccactaaatgctgcatcacgtcgcacgcgcttgctagaagagaacaacktggaatgcacgttgtcttctgctgacacaggacatttctactgcatttcgggtttcaaacaagcgaacaaaacacaaaaatacacctctgaataaagcagcaaacagcagcgcatgcatgtaattgaaaacwaagtaagggcagtgtgacccagcacctccagctcccagcttgtctccctgmtcccttctctcctatgcgcacac

SEQ ID NO: 5383 - DNA, 600 bp, Chicken  19866894108906_3
gaacaaaacatttctaacgtgctgcagatttttccaacttggtgacaccaactgtgtcttttccaatatttctgtccacccttctgtttattcctcacatcagatgtttatttgctgcagtttgcatagcaaccaaatggacaaacaacctgtcaacgtctaaatgcgttcaggtttgaatcgagccttttctgattttcttraarcccagcagaagcagctggctcagtactgcactgtgcacacgagttccactaaatgctgcatcacgtcgcacgcgcttgctagaagagaacaacktggaatgcacgttgtcttctgctgacacaggacatttctactgcatttcgggtttcaaacaagcgaacaaaacacaaaaatacacctctgaataaagcagcaaacagcagcgcatgcatgtaattgaaaacwaagtaagggcagtgtgacccagcacctccagctcccagcttgtctccctgmtcccttctctcctatgcgcacacttcacrtacacccaacatttccaaagggcagggaagtgagaaagagagggaaaagcaaggaggaggaagggaaaacaaatcccagcacatggtt

SEQ ID NO: 5384 - DNA, 600 bp, Chicken  19866894108906_4
ccaaatggacaaacaacctgtcaacgtctaaatgcgttcaggtttgaatcgagccttttctgattttcttraarcccagcagaagcagctggctcagtactgcactgtgcacacgagttccactaaatgctgcatcacgtcgcacgcgcttgctagaagagaacaacktggaatgcacgttgtcttctgctgacacaggacatttctactgcatttcgggtttcaaacaagcgaacaaaacacaaaaatacacctctgaataaagcagcaaacagcagcgcatgcatgtaattgaaaacwaagtaagggcagtgtgacccagcacctccagctcccagcttgtctccctgmtcccttctctcctatgcgcacacttcacrtacacccaacatttccaaagggcagggaagtgagaaagagagggaaaagcaaggaggaggaagggaaaacaaatcccagcacatggttttcgccactactctgctgaatcaacagggagcagagccccagatggcgcgcgctggtaagcactgcacgagtcaatggagctatgtcaaacgataccactcagctgcattatctgctgagctccgtgtaaac

SEQ ID NO: 5385 - DNA, 600 bp, Chicken  19866894108906_5
agccttttctgattttcttraarcccagcagaagcagctggctcagtactgcactgtgcacacgagttccactaaatgctgcatcacgtcgcacgcgcttgctagaagagaacaacktggaatgcacgttgtcttctgctgacacaggacatttctactgcatttcgggtttcaaacaagcgaacaaaacacaaaaatacacctctgaataaagcagcaaacagcagcgcatgcatgtaattgaaaacwaagtaagggcagtgtgacccagcacctccagctcccagcttgtctccctgmtcccttctctcctatgcgcacacttcacrtacacccaacatttccaaagggcagggaagtgagaaagagagggaaaagcaaggaggaggaagggaaaacaaatcccagcacatggttttcgccactactctgctgaatcaacagggagcagagccccagatggcgcgcgctggtaagcactgcacgagtcaatggagctatgtcaaacgataccactcagctgcattatctgctgagctccgtgtaaacaaacaggagcagattccgaatatttgtgagaacacatcatgttactgtctc

SEQ ID NO: 5386 - DNA, 600 bp, Chicken  19866894108906_6
agaagcagctggctcagtactgcactgtgcacacgagttccactaaatgctgcatcacgtcgcacgcgcttgctagaagagaacaacktggaatgcacgttgtcttctgctgacacaggacatttctactgcatttcgggtttcaaacaagcgaacaaaacacaaaaatacacctctgaataaagcagcaaacagcagcgcatgcatgtaattgaaaacwaagtaagggcagtgtgacccagcacctccagctcccagcttgtctccctgmtcccttctctcctatgcgcacacttcacrtacacccaacatttccaaagggcagggaagtgagaaagagagggaaaagcaaggaggaggaagggaaaacaaatcccagcacatggttttcgccactactctgctgaatcaacagggagcagagccccagatggcgcgcgctggtaagcactgcacgagtcaatggagctatgtcaaacgataccactcagctgcattatctgctgagctccgtgtaaacaaacaggagcagattccgaatatttgtgagaacacatcatgttactgtctccatatgtttaaacatttcagtggaagata

SEQ ID NO: 5387 - DNA, 600 bp, Chicken  19866894108907_1
acagcagtaaacttaccctagtgaatttagaacacatctcttctgcatccttcaccatatttgctcgcagcatgtatttagcacatttagaattgataaacctgtcagcagtatccaaagactgtgcttcatccatccatttggcagcttccttcaggttacctacatgctgttgggaagaaagtacttatggagaaattaaatagctacatttcaagacaaactttatattgaccagctcttgaaatctatagtaactggtatttctctttcagaagtaacaaaaagacaatattcctrtttgcccccctcactctcacaccatatttataaatatttaagaatatcaacaatttgctttaagctgtgactcatttcagaaaaatctaaacagaatagacagatagttttcattttgttactgacagaacagtgcataagaaacctgcacggaagtcaatacttacagtgctatccacacattcacaccagtataatggggcttttttgttgtttcttttttaaaaactatatactccacacatccaaattcactttttaccttgtaaatttttgcttttaagtagaatagttctatta

SEQ ID NO: 5388 - DNA, 600 bp, Chicken  19866894108911_1
agagagatccatgaagcatgcattgatgtagcgtttggaatgagtatttcataatgcttcattgcaaatgtccttaagactagtttcttatcgcattatccattaaaattgtttaaaaataagcaagcagctgcagtgttccacagtgatagtagatagcaataaataattcagtttttctgttcatacagattactctcaatttgtgttacaagctggcgtatcagttttcaagtgaaatgattgaagttcagtcaagatcagctaaaagagagggttgtgatcattacagaagttacygagtatgagtgaagtacacatataaaggggcaaattgtctgctactgttcctactacataggataaagccacaaatctccatcactgctgaatgggataagtctttattaattttgagagtggtattatgttggaatgatcttttaagcaaggctttaaagcaaccaaacattttctgtggcttgttccatgcctgctataggtactggaatataaaacagctgcactttaggaaatgcagtcagttctcaacctgagcagactgccagggttccaggtcaatgagataaaggatacttg

SEQ ID NO: 5389 - DNA, 600 bp, Chicken  19866894108916_1
tctcaatttaaatgtgaaaacatttcttcctctgaatagttctagaagtgtttccagctggccaggtaagagcaaaagatgtcagacaagaagatcacataatttcctcagtacatgttcttgcattgcaagtcaggtcacagtaagggtcatcttaggtataaaagatattcatcctgtagagactaaataaatggaaagccacaaatgcctcacaggcaaagtgattagaaactcatggacaatgcatttagagaaacatgtgtccagcaatagggagaaatcaaaaggctgtcaacmcagatgtgtagtcagaattttatggcaatatgcagtctactgttttctttattcactgactggctgtcacttccatggtttggatcccatactcataacacttcttcaggaaccagcaaaatacaatgacaactcattgaagagtcagagaaatctttgagaaacttgttactgctgttgaatgttatttattatgccgcttttgtagattccctctgcatcttttatgttgattcatgttttataaagtaatttaaaaactgtcccatgaaasctcagaaaaccttaataattaattac

SEQ ID NO: 5390 - DNA, 600 bp, Chicken  19866894108916_2
agggagaaatcaaaaggctgtcaacmcagatgtgtagtcagaattttatggcaatatgcagtctactgttttctttattcactgactggctgtcacttccatggtttggatcccatactcataacacttcttcaggaaccagcaaaatacaatgacaactcattgaagagtcagagaaatctttgagaaacttgttactgctgttgaatgttatttattatgccgcttttgtagattccctctgcatcttttatgttgattcatgttttataaagtaatttaaaaactgtcccatgaaasctcagaaaaccttaataattaattacagttatcctttaactgtatagtggtaatattttaagaaatagtcctggaccagtgagaaagtgaatccaacagagacaggattctaacaacaagcttataaaaatataaccagtgtaaaatgattatattcatacctaatgctttgtgtagctgtatttcagatagtgtggggaaatttgtgcacactatttcaattcaagagcagatttcatgacctcacatgtacttatgttgggggccggtatgtttgtttgcttgaatttgagcagtcaa

SEQ ID NO: 5391 - DNA, 600 bp, Chicken  19866894108923_1
aaacgatagagggctttaacattaagtctcactacgtgacattttaaaaataggctaacactggatagaacattctgaaagaatttcacttaacccaccccaaccagccacaagacagtgtgcaaaatacactacgtagaagctaaatggcaaataacgaagatccaacaccttacagcttttccaaagtgagctccacgtggctgaagccctaaaactgaataccagagttgccaaaacaatgacttccattagctttccattagctgaacttcctgaacacttgcacaggatgctcayttctccataacaccgaggggagcattaatcccaatctaatcctaaaactacaccaacagtaacaattgaagacgcatttactatgtgtccagaagcacacatttgtatccgcacccatcagggatgcatttgcagttctgccatgtctacgctggaagctccagagatgcagaaatattgtgaasctaacatgggaaaattttggttttaggagcgcaagaaagtttgtcagctgaaagaaaaggataatataaacaggaacaaggccgaaatctggagaagatgagtaaacaaagatat

SEQ ID NO: 5392 - DNA, 590 bp, Chicken  19866894108923_2
aaagtgagctccacgtggctgaagccctaaaactgaataccagagttgccaaaacaatgacttccattagctttccattagctgaacttcctgaacacttgcacaggatgctcayttctccataacaccgaggggagcattaatcccaatctaatcctaaaactacaccaacagtaacaattgaagacgcatttactatgtgtccagaagcacacatttgtatccgcacccatcagggatgcatttgcagttctgccatgtctacgctggaagctccagagatgcagaaatattgtgaasctaacatgggaaaattttggttttaggagcgcaagaaagtttgtcagctgaaagaaaaggataatataaacaggaacaaggccgaaatctggagaagatgagtaaacaaagatatacgcgtggaacgagccacctagcttgcattactattaagtacaacttcttgatttccagagctatcagcacatctcttacccgagtgtaggcaaaatgcccccaactgaagatccaaaccattcagcccctgtacttggcaaccctgccttttgcttggatgagggagaaacaga

SEQ ID NO: 5393 - DNA, 599 bp, Chicken  19866894108925_1
  misc_feature (1)..(63): n is any nucleotide
nnnnnnnnnnnnnnnnnnnnnnnnnnnnnnnnnnnnnnnnnnnnnnnnnnnnnnnnnnnnnnnttcataatcatttttcttgataaaacagaaactggtttcagaggaatttttcccccttccactacttcctttacatctatgtctgtgtcttattttgtcagtctgttgctattcctctccaaaatattccctaagatcctacagacagtaagcaagataaatgttactttgttggtcaaatcttgacaaagcaaatgataaggagtatggtaggtgtcagccatggtgtataactgkyttttcttctaataagacgacactgagggaaattcagtggcttgaggaaaattgtgtttaaggtgtttggacccaaattaacagatgtatatcctggaactgcaagaattcttagtttcattttcaaatcagaagtagratcccgttgttctagacttatttttcagatactccttgttagcttttattgtataacattaaaaatattattgctaactacttaagggactgaaaataatcagtgttagaatgaatgaatagccagtgcaaatggatacttcagtaagtatctgatgtgt

SEQ ID NO: 5394 - DNA, 599 bp, Chicken  19866894108925_2
  misc_feature (1)..(62): n is any nucleotide
nnnnnnnnnnnnnnnnnnnnnnnnnnnnnnnnnnnnnnnnnnnnnnnnnnnnnnnnnnnnnnttcataatcatttttcttgataaaacagaaactggtttcagaggaatttttcccccttccactacttcctttacatctatgtctgtgtcttattttgtcagtctgttgctattcctctccaaaatattccctaagatcctacagacagtaagcaagataaatgttactttgttggtcaaatcttgacaaagcaaatgataaggagtatggtaggtgtcagccatggtgtataactgkyttttcttctaataagacgacactgagggaaattcagtggcttgaggaaaattgtgtttaaggtgtttggacccaaattaacagatgtatatcctggaactgcaagaattcttagtttcattttcaaatcagaagtagratcccgttgttctagacttatttttcagatactccttgttagcttttattgtataacattaaaaatattattgctaactacttaagggactgaaaataatcagtgttagaatgaatgaatagccagtgcaaatggatacttcagtaagtatctgatgtgta

SEQ ID NO: 5395 - DNA, 600 bp, Chicken  19866894108925_3
ctatgtctgtgtcttattttgtcagtctgttgctattcctctccaaaatattccctaagatcctacagacagtaagcaagataaatgttactttgttggtcaaatcttgacaaagcaaatgataaggagtatggtaggtgtcagccatggtgtataactgkyttttcttctaataagacgacactgagggaaattcagtggcttgaggaaaattgtgtttaaggtgtttggacccaaattaacagatgtatatcctggaactgcaagaattcttagtttcattttcaaatcagaagtagratcccgttgttctagacttatttttcagatactccttgttagcttttattgtataacattaaaaatattattgctaactacttaagggactgaaaataatcagtgttagaatgaatgaatagccagtgcaaatggatacttcagtaagtatctgatgtgtaggttgtgtttgagctttctatatgggttacgtgcttggtggcaggttgacttctagctgagctgttcttctcaaagtaattttggatcaaagtagatgttttccaagaattactagaaagttttatgtttgtgcattgt

SEQ ID NO: 5396 - DNA, 599 bp, Chicken  19866894108926_1
  misc_feature (1)..(102): n is any nucleotide
nnnnnnnnnnnnnnnnnnnnnnnnnnnnnnnnnnnnnnnnnnnnnnnnnnnnnnnnnnnnnnnnnnnnnnnnnnnnnnnnnnnnnnnnnnnnnnnnnnnnnnggggaggcatggagcgagctcaaaggatctcaggaaatcttgtttcgaagcagtaaggcagcacccgcactccattaccagtgtccgcggggggttgtgatagtgagcgagcacaggctggcttagcaaaggggaaataaatatataaaaggagggagaggggtgggaggggaggaggggaaaaggagacctttctgygagtttggggccgtctttgttagtctctgctggtgyggggatgctgaagggcgttcggggagaaatggctgaagttgtgctgggtgtttcttggtgtctggtgtgtgttcttggtgtatattcttgccgtcagcatggctcagcctacccagaaatgaacgaagaggtgcccgttaaaaaacactggggatcaccagcccaacccatttccaaagctgaacctaacctgagtccctctcaaggcttggaaatgtttaggaatccctgtttgccatggctgtgcctttctgttctctcag

SEQ ID NO: 5397 - DNA, 599 bp, Chicken  19866894108926_2
  misc_feature (1)..(66): n is any nucleotide
nnnnnnnnnnnnnnnnnnnnnnnnnnnnnnnnnnnnnnnnnnnnnnnnnnnnnnnnnnnnnnnnnnggggaggcatggagcgagctcaaaggatctcaggaaatcttgtttcgaagcagtaaggcagcacccgcactccattaccagtgtccgcggggggttgtgatagtgagcgagcacaggctggcttagcaaaggggaaataaatatataaaaggagggagaggggtgggaggggaggaggggaaaaggagacctttctgygagtttggggccgtctttgttagtctctgctggtgyggggatgctgaagggcgttcggggagaaatggctgaagttgtgctgggtgtttcttggtgtctggtgtgtgttcttggtgtatattcttgccgtcagcatggctcagcctacccagaaatgaacgaagaggtgcccgttaaaaaacactggggatcaccagcccaacccatttccaaagctgaacctaacctgagtccctctcaaggcttggaaatgtttaggaatccctgtttgccatggctgtgcctttctgttctctcagcttcgatgacttcgggagttctaaaatgccacaagc

SEQ ID NO: 5398 - DNA, 600 bp, Chicken  19866894108926_3
tacccagaaatgaacgaagaggtgcccgttaaaaaacactggggatcaccagcccaacccatttccaaagctgaacctaacctgagtccctctcaaggcttggaaatgtttaggaatccctgtttgccatggctgtgcctttctgttctctcagcttcgatgacttcgggagttctaaaatgccacaagcaagattcgtcttcctgcaattaatggccagagatactccatatcccaacaaagcaatttccccatggaggctttagtccccagtgtgttcacttggccttcacatattargggggtaaaacagcatcaggataaggtctgcataggtagcatcaggtgaatagagatgtcaatggttggtaaagaacaaagcccattttcagggggaaatgctcagcaatgcacaaaaatcagccctttcaacagttccaacatggtgaggcatggctggcttgagtctcacccaattatgggacgggttagtcttgattttgctcattaatgaggctgatgtccgtagaattgggattcccctacacctcaaacagctctcaccagcacagtaggtctgtttgtttcctctggttatcc

SEQ ID NO: 5399 - DNA, 599 bp, Chicken  19866894108935_1
  misc_feature (1)..(54): n is any nucleotide
nnnnnnnnnnnnnnnnnnnnnnnnnnnnnnnnnnnnnnnnnnnnnnnnnnnnnnatagtgataggacaagggggaatggttttaaactgagacaggggaggtttaggttggatatgaggaggaagtttttcccccagagggtggtgacgcactgaacaggttgcccaaggaggctgtggatgccccatccctgcaggcattcaaggccaggctggatgtggctctgggcagcctgggctgctggttggcgaccctgcacatagcagggggttggaactggatgagcactgtgctcctttkcaacccaggccattctaggattctagaattctaggactctgcagttactggtaggcacaaggctgcttattccacttgtgctgacatcagtgcacccaacctgcagagccaacrctgtggtctactggggtgtgcagcagtttgccctgatagcaaagatgaatccgcagaaaggtgaaaactaatcagtttcataatattcacctgggaatgttaactaattttaggatgagtatttcgcagaatgaaatgaatagctaatgactttactattttaattactttaggaaaggttactc

SEQ ID NO: 5400 - DNA, 600 bp, Chicken  19866894108935_2
tgaggaggaagtttttcccccagagggtggtgacgcactgaacaggttgcccaaggaggctgtggatgccccatccctgcaggcattcaaggccaggctggatgtggctctgggcagcctgggctgctggttggcgaccctgcacatagcagggggttggaactggatgagcactgtgctcctttkcaacccaggccattctaggattctagaattctaggactctgcagttactggtaggcacaaggctgcttattccacttgtgctgacatcagtgcacccaacctgcagagccaacrctgtggtctactggggtgtgcagcagtttgccctgatagcaaagatgaatccgcagaaaggtgaaaactaatcagtttcataatattcacctgggaatgttaactaattttaggatgagtatttcgcagaatgaaatgaatagctaatgactttactattttaattactttaggaaaggttactctgtaggttacctaaaggagtgcgcctggttggatgaatattacagctgagattggagaaatgttattgttgccatctatcacaaaacgcatgtgaggtgacacgatggtctcacc

SEQ ID NO: 5401 - DNA, 600 bp, Chicken  19866894108937_1
gattctgtgattctatgagttcacagaccccgtgtggagcacagttattagctttcttccaaaagatcctattaattttaaattttgaaattacagagctatttcttagtaaaaatatgcagcagtagtgtgcagaaacctgaaatacctctgaaggaagcttggctatagctgaggtgtcataaattccatgcagccttactgctctcacagcgcagtcgaaaccactgttacatcaaggtggatgtttctcgtacgagaagactggatggggctgtgagcaacctggtctattgggtycttgcctacagcagggggttggaacgaggtgatacaaaggtcccttccaacccaaaccattctatggttctatggttcattctgtgattctatgaagtttttgaacaacagcacagacaacccaatttatatattttaggcttggcaaaccaattatttttattaaataaaaactattcatagtgctatgttatttttaaacattcatttcttaaaagggttcagaatttgtatttcttaaccccatttgggyttaaactaatttgaaaatagagcagtcttctgcttctctcatgagga

SEQ ID NO: 5402 - DNA, 600 bp, Chicken  19866894108937_2
gtacgagaagactggatggggctgtgagcaacctggtctattgggtycttgcctacagcagggggttggaacgaggtgatacaaaggtcccttccaacccaaaccattctatggttctatggttcattctgtgattctatgaagtttttgaacaacagcacagacaacccaatttatatattttaggcttggcaaaccaattatttttattaaataaaaactattcatagtgctatgttatttttaaacattcatttcttaaaagggttcagaatttgtatttcttaaccccatttgggyttaaactaatttgaaaatagagcagtcttctgcttctctcatgaggatttgcattagattttaaatattctttttaatattaatagtatgtcagctccttcggtgctgtttcgcagtgaatttatagccaacaaaattcattttcattatgaataatattctaggagtagaataatgtaagaataaaggacttaaatattttaattagtacatgtgtgatagtcattaataacattaatatgtaggttgctccaaaagtagtgcctccaatttatttccatagatactaaaacagatcca

SEQ ID NO: 5403 - DNA, 599 bp, Chicken  19866894108950_1
  misc_feature (1)..(37): n is any nucleotide
nnnnnnnnnnnnnnnnnnnnnnnnnnnnnnnnnnnnnataggacaagggggaatggttttaaatgagacaggggaggtttaggttggatatgaggaggaagtttttcccccagagggtggtgacgcactgaacaggttgcccaaggaggtgtggatgccccatccctgcaggcattcaaggccaggctggatgtggctctgggcagcctgggctgctggttggcgaccctgcacatagcagggggttggaactggatgagcactgtggtccttttcaacccaggccgttctaggattctrtgatatgaatgcagccagacggcccggctcttcrctgctgttttggggctttgacataagcctttaatgcaggtggaaggatgggtgtcatgcgcggacgctccccagcactaatgcacagcgcacgtcacgttggaatctgcccatccccatccccgtgtgctgcacaacagaatcaatacagggcttttcagctcccccacacaccggaggcaatgtttgtgccatccaaagagtaaatcctggtgtggccacgcttccttgtgtctgttctggagmaggaagggtaaagctgagag

SEQ ID NO: 5404 - DNA, 599 bp, Chicken  19866894108950_2
  misc_feature (1)..(3): n is any nucleotide
nnnataggacaagggggaatggttttaaatgagacaggggaggtttaggttggatatgaggaggaagtttttcccccagagggtggtgacgcactgaacaggttgcccaaggaggtgtggatgccccatccctgcaggcattcaaggccaggctggatgtggctctgggcagcctgggctgctggttggcgaccctgcacatagcagggggttggaactggatgagcactgtggtccttttcaacccaggccgttctaggattctrtgatatgaatgcagccagacggcccggctcttcrctgctgttttggggctttgacataagcctttaatgcaggtggaaggatgggtgtcatgcgcggacgctccccagcactaatgcacagcgcacgtcacgttggaatctgcccatccccatccccgtgtgctgcacaacagaatcaatacagggcttttcagctcccccacacaccggaggcaatgtttgtgccatccaaagagtaaatcctggtgtggccacgcttccttgtgtctgttctggagmaggaagggtaaagctgagaggaggcaatgtgggatggaggggtgctgatgctcg

SEQ ID NO: 5405 - DNA, 600 bp, Chicken  19866894108950_3
ccaggccgttctaggattctrtgatatgaatgcagccagacggcccggctcttcrctgctgttttggggctttgacataagcctttaatgcaggtggaaggatgggtgtcatgcgcggacgctccccagcactaatgcacagcgcacgtcacgttggaatctgcccatccccatccccgtgtgctgcacaacagaatcaatacagggcttttcagctcccccacacaccggaggcaatgtttgtgccatccaaagagtaaatcctggtgtggccacgcttccttgtgtctgttctggagmaggaagggtaaagctgagaggaggcaatgtgggatggaggggtgctgatgctcgtgagtgatgccaaacttgggctgcatctctgccgggctatccttgaagcactcccattcatttatttctttgcagytctactaatgactaacggggtctgctgagtggccctaaatcctatttgtcttttctctggtcacaggctgcatcctcccatctgatatggggggagaaaggtgtttgtgccccagatggattggattattttttcctcccgctcctctctcataattagaggtggaacct

SEQ ID NO: 5406 - DNA, 600 bp, Chicken  19866894108950_4
actaatgcacagcgcacgtcacgttggaatctgcccatccccatccccgtgtgctgcacaacagaatcaatacagggcttttcagctcccccacacaccggaggcaatgtttgtgccatccaaagagtaaatcctggtgtggccacgcttccttgtgtctgttctggagmaggaagggtaaagctgagaggaggcaatgtgggatggaggggtgctgatgctcgtgagtgatgccaaacttgggctgcatctctgccgggctatccttgaagcactcccattcatttatttctttgcagytctactaatgactaacggggtctgctgagtggccctaaatcctatttgtcttttctctggtcacaggctgcatcctcccatctgatatggggggagaaaggtgtttgtgccccagatggattggattattttttcctcccgctcctctctcataattagaggtggaaccttatatgccaacaatccattaaagcatttccagcacgtgggggtcacatctctcccagctcctgctctcatggctttccaggaccgggaccacctgggatgctcaggctctcagaaagcagctcttcattt

SEQ ID NO: 5407 - DNA, 600 bp, Chicken  19866894108951_1
attcctgcaagaagaataaaggtttctggagaagatagcgccaagaccatctatctcagctgtcttgaattcaatacaggttaagtcagatagtctaggctcagtcaattacaaacagtgactcactgggcgtgattcagctgtcatgtacgttttgtacaggaattatttaactgcatgaatatggaagatacttttctttaggctgagggcataaaacttcaaatgagaatgttagaaactgagaaaaagctgagtttaaaattctggcttgcggactgtaatccacgccaccagttygtgtaagtaagttgtattgaattttatgcacatatatttggtgaaaaaagctgtgaggtttttgtacctgtcaatatcaatcttggctaagacatagaattggcttggatggggtttccagtaaaggtggcatgcaagataacatttgtgagcatttctaagctctgatttgtcagcgagtcaccattatgtgagaattttgctgagcacaaactataaggatttcaagatgagagacctgctcagtagagctggrcaaaaggtarcaagtgccttttgtgaggaaaaaaacaaggtggt

SEQ ID NO: 5408 - DNA, 600 bp, Chicken  19866894108951_2
gtttaaaattctggcttgcggactgtaatccacgccaccagttygtgtaagtaagttgtattgaattttatgcacatatatttggtgaaaaaagctgtgaggtttttgtacctgtcaatatcaatcttggctaagacatagaattggcttggatggggtttccagtaaaggtggcatgcaagataacatttgtgagcatttctaagctctgatttgtcagcgagtcaccattatgtgagaattttgctgagcacaaactataaggatttcaagatgagagacctgctcagtagagctggrcaaaaggtarcaagtgccttttgtgaggaaaaaaacaaggtggttcacaactttgcttccctttagacatctgcaaacttgaaaaagtagcaagaaaaagcctttgcaaaaactttcctgcctatgggaacatcrtgatattgcatcagcttagagccatccaatgggtattctgttttcccttgggtttgggtcttctagacctcactgttatccwgaaaggcacttggttattgggtggtagataatgaggggaacacctttggagtagcagcgcctgtccagatcagcacagcgctc

SEQ ID NO: 5409 - DNA, 600 bp, Chicken  19866894108951_3
ctggcttgcggactgtaatccacgccaccagttygtgtaagtaagttgtattgaattttatgcacatatatttggtgaaaaaagctgtgaggtttttgtacctgtcaatatcaatcttggctaagacatagaattggcttggatggggtttccagtaaaggtggcatgcaagataacatttgtgagcatttctaagctctgatttgtcagcgagtcaccattatgtgagaattttgctgagcacaaactataaggatttcaagatgagagacctgctcagtagagctggrcaaaaggtarcaagtgccttttgtgaggaaaaaaacaaggtggttcacaactttgcttccctttagacatctgcaaacttgaaaaagtagcaagaaaaagcctttgcaaaaactttcctgcctatgggaacatcrtgatattgcatcagcttagagccatccaatgggtattctgttttcccttgggtttgggtcttctagacctcactgttatccwgaaaggcacttggttattgggtggtagataatgaggggaacacctttggagtagcagcgcctgtccagatcagcacagcgctcactccatgag

SEQ ID NO: 5410 - DNA, 600 bp, Chicken  19866894108951_4
acatagaattggcttggatggggtttccagtaaaggtggcatgcaagataacatttgtgagcatttctaagctctgatttgtcagcgagtcaccattatgtgagaattttgctgagcacaaactataaggatttcaagatgagagacctgctcagtagagctggrcaaaaggtarcaagtgccttttgtgaggaaaaaaacaaggtggttcacaactttgcttccctttagacatctgcaaacttgaaaaagtagcaagaaaaagcctttgcaaaaactttcctgcctatgggaacatcrtgatattgcatcagcttagagccatccaatgggtattctgttttcccttgggtttgggtcttctagacctcactgttatccwgaaaggcacttggttattgggtggtagataatgaggggaacacctttggagtagcagcgcctgtccagatcagcacagcgctcactccatgagatgggtgtaggagggctcagtgctcccctcgcctgttggggtgcatgtgtgttactggaggtctgcactgaaggtgagaaatttgtctgccttgtgctgttatgagaggctgtcagtagaaacat

SEQ ID NO: 5411 - DNA, 569 bp, Chicken  19866894108951_5
cagcgagtcaccattatgtgagaattttgctgagcacaaactataaggatttcaagatgagagacctgctcagtagagctggrcaaaaggtarcaagtgccttttgtgaggaaaaaaacaaggtggttcacaactttgcttccctttagacatctgcaaacttgaaaaagtagcaagaaaaagcctttgcaaaaactttcctgcctatgggaacatcrtgatattgcatcagcttagagccatccaatgggtattctgttttcccttgggtttgggtcttctagacctcactgttatccwgaaaggcacttggttattgggtggtagataatgaggggaacacctttggagtagcagcgcctgtccagatcagcacagcgctcactccatgagatgggtgtaggagggctcagtgctcccctcgcctgttggggtgcatgtgtgttactggaggtctgcactgaaggtgagaaatttgtctgccttgtgctgttatgagaggctgtcagtagaaacattatcatctcatgccttcccaatggtgatagaaacatactgtaaatgaatga

SEQ ID NO: 5412 - DNA, 599 bp, Chicken  19866894108963_1
  misc_feature (1)..(11): n is any nucleotide
nnnnnnnnnnncaataagtaatgagatgtatatttacatcaggcgtaaccactaccaaagacctttagctggtcatgagtctgttgcaacgtccctgaacttttgagacaagtctgcactgtcctgccagggtggccatactgtgtttctcagtgtgcttccctgtgcccgatccaacaacacacccatggtatgtgggggaatgtcatggactccttccatgagatatgtgcagccctaaccagtgacatcccagtgttttctactacactgatcactgaaagagaaatacagtcaccraggcataactagaaaagatcttgtaaggaatttattcctactttggtttgctttctctgagaaggttgttattagacagaacacagttaaaagagtgaagagacgtaagaattttcggctaaggtkatacatgactcaaggctgtacttatctaattttagccaagctaaaaaattccccaagtttgttttgtttggttggttggttcgtttttttgtctcacagcaactaaggcagctgtggtccaggtttgggagatgggaagtattgtccattttgtactgattgagaaagaaaat

SEQ ID NO: 5413 - DNA, 600 bp, Chicken  19866894108963_2
ccagggtggccatactgtgtttctcagtgtgcttccctgtgcccgatccaacaacacacccatggtatgtgggggaatgtcatggactccttccatgagatatgtgcagccctaaccagtgacatcccagtgttttctactacactgatcactgaaagagaaatacagtcaccraggcataactagaaaagatcttgtaaggaatttattcctactttggtttgctttctctgagaaggttgttattagacagaacacagttaaaagagtgaagagacgtaagaattttcggctaaggtkatacatgactcaaggctgtacttatctaattttagccaagctaaaaaattccccaagtttgttttgtttggttggttggttcgtttttttgtctcacagcaactaaggcagctgtggtccaggtttgggagatgggaagtattgtccattttgtactgattgagaaagaaaatgacagtgacctggcatttgctgaattccttacatcccagatcaaatacaaaaataccactcataaatgttattytactaaaggcaagactgttgagcaaaaagtatcccactacctgattcccttac

SEQ ID NO: 5414 - DNA, 600 bp, Chicken  19866894108963_3
agacagaacacagttaaaagagtgaagagacgtaagaattttcggctaaggtkatacatgactcaaggctgtacttatctaattttagccaagctaaaaaattccccaagtttgttttgtttggttggttggttcgtttttttgtctcacagcaactaaggcagctgtggtccaggtttgggagatgggaagtattgtccattttgtactgattgagaaagaaaatgacagtgacctggcatttgctgaattccttacatcccagatcaaatacaaaaataccactcataaatgttattytactaaaggcaagactgttgagcaaaaagtatcccactacctgattcccttactatctgtttaattaatgtaatggtagacaacaggacagtatcagactaaataaacatgctgctaattttaatgggactgtgtcttggaagtgtaatgaccttctgatctactgatgactttcattattctaagaatagtgacagcatattcaaaaatagtcatctgcatgcaagtttgctttgcttgttttataaaaatgtaccttacaggtccatctaagttattacttatgaatttatatggtac

SEQ ID NO: 5415 - DNA, 599 bp, Chicken  19866894108964_1
  misc_feature (1)..(102): n is any nucleotide
nnnnnnnnnnnnnnnnnnnnnnnnnnnnnnnnnnnnnnnnnnnnnnnnnnnnnnnnnnnnnnnnnnnnnnnnnnnnnnnnnnnnnnnnnnnnnnnnnnnnnnaataaaagtttctttttctcatcctactcagcttccccactctgattgtcttacaggtactgatcttgctagacaaattagcacaggtatgtgatgacatgaataactgcttttgaaccctttttccgaggtatcctcttcaacagactataacagtttcctttggagatgtcagctgtcatccttaaacaactgggmtgatgtgaatgagcaatatgcagtttcaaattccttggcaaggggatgtgaacttaaagtgtctgaattttaaactctccaaatctccatatcaacaccaacactgtgctggtagttcctggtctgtactagtcagatattctacccaacaaagtattartaatattagctgcagttaataacactagtaaagatatttttgggctaaaaccaaagtgcagcttcattgaaaacaaaatgaawgaagggcatcaatgtatcttttggcttcttctctgtgtgtaacttacaattgggag

SEQ ID NO: 5416 - DNA, 600 bp, Chicken  19866894108964_2
actgatcttgctagacaaattagcacaggtatgtgatgacatgaataactgcttttgaaccctttttccgaggtatcctcttcaacagactataacagtttcctttggagatgtcagctgtcatccttaaacaactgggmtgatgtgaatgagcaatatgcagtttcaaattccttggcaaggggatgtgaacttaaagtgtctgaattttaaactctccaaatctccatatcaacaccaacactgtgctggtagttcctggtctgtactagtcagatattctacccaacaaagtattartaatattagctgcagttaataacactagtaaagatatttttgggctaaaaccaaagtgcagcttcattgaaaacaaaatgaawgaagggcatcaatgtatcttttggcttcttctctgtgtgtaacttacaattgggagattatgcagaaccaggtggaaaaatccctcttggaaaagcaccctctggaaggtcacagaggacagttgtttgctaaattcctccaacgtggcaagttgcagaactacttggcaaatctatccacaagctccatggtcattcattgcctgccctcatgcaa

SEQ ID NO: 5417 - DNA, 600 bp, Chicken  19866894108964_3
aacagactataacagtttcctttggagatgtcagctgtcatccttaaacaactgggmtgatgtgaatgagcaatatgcagtttcaaattccttggcaaggggatgtgaacttaaagtgtctgaattttaaactctccaaatctccatatcaacaccaacactgtgctggtagttcctggtctgtactagtcagatattctacccaacaaagtattartaatattagctgcagttaataacactagtaaagatatttttgggctaaaaccaaagtgcagcttcattgaaaacaaaatgaawgaagggcatcaatgtatcttttggcttcttctctgtgtgtaacttacaattgggagattatgcagaaccaggtggaaaaatccctcttggaaaagcaccctctggaaggtcacagaggacagttgtttgctaaattcctccaacgtggcaagttgcagaactacttggcaaatctatccacaagctccatggtcattcattgcctgccctcatgcaaagactacaactctgatgctggttcttgtctcagactggaagatccctttttgacagtccagtaggtagagagctctttattca

SEQ ID NO: 5418 - DNA, 599 bp, Chicken  19866894108973_1
  misc_feature (1)..(194): n is any nucleotide
nnnnnnnnnnnnnnnnnnnnnnnnnnnnnnnnnnnnnnnnnnnnnnnnnnnnnnnnnnnnnnnnnnnnnnnnnnnnnnnnnnnnnnnnnnnnnnnnnnnnnnnnnnnnnnnnnnnnnnnnnnnnnnnnnnnnnnnnnnnnnnnnnnnnnnnnnnnnnnnnnnnnnnnnnnnnnnnnnnnnnnnnnnnnnnnnnnctcccacatacactttgccctattcagcttccttcccgacatctaccaatagtgatgtgaattttccagctcttcattcttttatgaagctgcagattctgtggcmgaagagctgggagcacttagagatgtgactagtggggttgaaatggtaatgtatttatgtgattatgtttctggaatgargaaagataatacatatgaaaaggcgtatgcaggtctgctcttggagtgtgctagagcatggattccgctggttgcatggaacctggaaacagcatgaaattacttctcatgatagctataggcagaaaattggacataagggcaagaagaattctagaycaaatccttcccctttttcagggtctattatctgtttataaatcaatagagatatggtca

SEQ ID NO: 5419 - DNA, 599 bp, Chicken  19866894108973_2
  misc_feature (1)..(114): n is any nucleotide
nnnnnnnnnnnnnnnnnnnnnnnnnnnnnnnnnnnnnnnnnnnnnnnnnnnnnnnnnnnnnnnnnnnnnnnnnnnnnnnnnnnnnnnnnnnnnnnnnnnnnnnnnnnnnnnnnnctcccacatacactttgccctattcagcttccttcccgacatctaccaatagtgatgtgaattttccagctcttcattcttttatgaagctgcagattctgtggcmgaagagctgggagcacttagagatgtgactagtggggttgaaatggtaatgtatttatgtgattatgtttctggaatgargaaagataatacatatgaaaaggcgtatgcaggtctgctcttggagtgtgctagagcatggattccgctggttgcatggaacctggaaacagcatgaaattacttctcatgatagctataggcagaaaattggacataagggcaagaagaattctagaycaaatccttcccctttttcagggtctattatctgtttataaatcaatagagatatggtcattaatattttaaaacaagacttcagaatttcaaagtcttctctttttttctacttgtagcttgctaaccatacttttcaa

SEQ ID NO: 5420 - DNA, 600 bp, Chicken  19866894108973_3
ccaatagtgatgtgaattttccagctcttcattcttttatgaagctgcagattctgtggcmgaagagctgggagcacttagagatgtgactagtggggttgaaatggtaatgtatttatgtgattatgtttctggaatgargaaagataatacatatgaaaaggcgtatgcaggtctgctcttggagtgtgctagagcatggattccgctggttgcatggaacctggaaacagcatgaaattacttctcatgatagctataggcagaaaattggacataagggcaagaagaattctagaycaaatccttcccctttttcagggtctattatctgtttataaatcaatagagatatggtcattaatattttaaaacaagacttcagaatttcaaagtcttctctttttttctacttgtagcttgctaaccatacttttcaacctttttagccatttgaaagaaaaacattaaccttttttaaatggaaaggaattttccagcatgttaagcacttgtttaattgtctctctgtgtatttcttatgaagtattttgagggttagttcacctggacatgcaccagaactgtgctctgagctga

SEQ ID NO: 5421 - DNA, 599 bp, Chicken  19866894108975_1
  misc_feature (1)..(74): n is any nucleotide
nnnnnnnnnnnnnnnnnnnnnnnnnnnnnnnnnnnnnnnnnnnnnnnnnnnnnnnnnnnnnnnnnnnnnnnnnnggtttaaatgagcacttagcctttatgcaattggagtgattagttctattcaagtgaatagtactgtgcagagcatgtaagatttagcacatctcaaacccctgattgtgcaaagcctcaacatgtgacctgagaagtgtttgcttttgttttttaaagctgttttctaagaaatggtgtttatgcagtcacacacgtctgtcatccactccttccccatcaccgrgggaaggggaatggtagccaaygtgttggctactttcaggtagttatcccaggagaatgggaatttgaaaaacaattttgttcgcacatatttggtgaaaataggtgactctgtgttagagatattttacttgcataatgaaagcagatgcaggggctgaagtattrggaatcacaaaacctacattcagatgaaaagtagaacatagtacctacttaacccyatcaaaagagttcagccagcacttacrattgagccaaaggtgagccactagcagctgaggtttgtttggtgttcag

SEQ ID NO: 5422 - DNA, 599 bp, Chicken  19866894108975_2
  misc_feature (1)..(52): n is any nucleotide
nnnnnnnnnnnnnnnnnnnnnnnnnnnnnnnnnnnnnnnnnnnnnnnnnnnnggtttaaatgagcacttagcctttatgcaattggagtgattagttctattcaagtgaatagtactgtgcagagcatgtaagatttagcacatctcaaacccctgattgtgcaaagcctcaacatgtgacctgagaagtgtttgcttttgttttttaaagctgttttctaagaaatggtgtttatgcagtcacacacgtctgtcatccactccttccccatcaccgrgggaaggggaatggtagccaaygtgttggctactttcaggtagttatcccaggagaatgggaatttgaaaaacaattttgttcgcacatatttggtgaaaataggtgactctgtgttagagatattttacttgcataatgaaagcagatgcaggggctgaagtattrggaatcacaaaacctacattcagatgaaaagtagaacatagtacctacttaacccyatcaaaagagttcagccagcacttacrattgagccaaaggtgagccactagcagctgaggtttgtttggtgttcaggatgctttgaaaggaagagaga

SEQ ID NO: 5423 - DNA, 600 bp, Chicken  19866894108975_3
tcaaacccctgattgtgcaaagcctcaacatgtgacctgagaagtgtttgcttttgttttttaaagctgttttctaagaaatggtgtttatgcagtcacacacgtctgtcatccactccttccccatcaccgrgggaaggggaatggtagccaaygtgttggctactttcaggtagttatcccaggagaatgggaatttgaaaaacaattttgttcgcacatatttggtgaaaataggtgactctgtgttagagatattttacttgcataatgaaagcagatgcaggggctgaagtattrggaatcacaaaacctacattcagatgaaaagtagaacatagtacctacttaacccyatcaaaagagttcagccagcacttacrattgagccaaaggtgagccactagcagctgaggtttgtttggtgttcaggatgctttgaaaggaagagagaacaaatctaaatctgttccttttgttggtgttatcygaggtctgctaatgaggaactgtgtattaacaccaaatgcactgttagtcaaatggctgcttgtgtgaagcttattttttgtaagcgttctttcttggctcttgcataat

SEQ ID NO: 5424 - DNA, 600 bp, Chicken  19866894108975_4
ttttttaaagctgttttctaagaaatggtgtttatgcagtcacacacgtctgtcatccactccttccccatcaccgrgggaaggggaatggtagccaaygtgttggctactttcaggtagttatcccaggagaatgggaatttgaaaaacaattttgttcgcacatatttggtgaaaataggtgactctgtgttagagatattttacttgcataatgaaagcagatgcaggggctgaagtattrggaatcacaaaacctacattcagatgaaaagtagaacatagtacctacttaacccyatcaaaagagttcagccagcacttacrattgagccaaaggtgagccactagcagctgaggtttgtttggtgttcaggatgctttgaaaggaagagagaacaaatctaaatctgttccttttgttggtgttatcygaggtctgctaatgaggaactgtgtattaacaccaaatgcactgttagtcaaatggctgcttgtgtgaagcttattttttgtaagcgttctttcttggctcttgcataatttatcatcattgggatattagtctgctgtacattctacttagaactaaaaaacact

SEQ ID NO: 5425 - DNA, 600 bp, Chicken  19866894108975_5
gtgtttatgcagtcacacacgtctgtcatccactccttccccatcaccgrgggaaggggaatggtagccaaygtgttggctactttcaggtagttatcccaggagaatgggaatttgaaaaacaattttgttcgcacatatttggtgaaaataggtgactctgtgttagagatattttacttgcataatgaaagcagatgcaggggctgaagtattrggaatcacaaaacctacattcagatgaaaagtagaacatagtacctacttaacccyatcaaaagagttcagccagcacttacrattgagccaaaggtgagccactagcagctgaggtttgtttggtgttcaggatgctttgaaaggaagagagaacaaatctaaatctgttccttttgttggtgttatcygaggtctgctaatgaggaactgtgtattaacaccaaatgcactgttagtcaaatggctgcttgtgtgaagcttattttttgtaagcgttctttcttggctcttgcataatttatcatcattgggatattagtctgctgtacattctacttagaactaaaaaacactcaccctaaaagaacctgtttgtaaagc

SEQ ID NO: 5426 - DNA, 600 bp, Chicken  19866894108975_6
tgggaatttgaaaaacaattttgttcgcacatatttggtgaaaataggtgactctgtgttagagatattttacttgcataatgaaagcagatgcaggggctgaagtattrggaatcacaaaacctacattcagatgaaaagtagaacatagtacctacttaacccyatcaaaagagttcagccagcacttacrattgagccaaaggtgagccactagcagctgaggtttgtttggtgttcaggatgctttgaaaggaagagagaacaaatctaaatctgttccttttgttggtgttatcygaggtctgctaatgaggaactgtgtattaacaccaaatgcactgttagtcaaatggctgcttgtgtgaagcttattttttgtaagcgttctttcttggctcttgcataatttatcatcattgggatattagtctgctgtacattctacttagaactaaaaaacactcaccctaaaagaacctgtttgtaaagcttgtaatatgcttacggatatatagctttctgttcgaaaaataagaaattaatcagcatatattgatagcacagtctagggaaaaaagaagaaaagataaaggttaa

SEQ ID NO: 5427 - DNA, 600 bp, Chicken  19866894108980_1
gagaaaatcctgtcactgcgcctaaatcaatccagttaatatacacatcacagccccagacacagaatctttcattacagcatatcctgtaagacaatccactgtcatataaaatgccataggggagtaggtgtgttcctaaactccaaggaaaatgaaacagatagtgaacctccatctcgtttttccatctttaagaataaaaaggaaaggaagaaaaaagaagcttttctttcacaggccaccgtctggttttctcttgtgtggtctgtaggagagcgatagtgccttcatggttcygagcatcttacaaaactggatcttcaggtcatgtctgcactcgattttaagtggaaaagaaagatgtaggcacaacaatagacttgaggcgatgtactgggagcagcagaaagtcaactcaattattcaaatacagtcactgaaaaccaagcagaygagtattatggggagccatctgataattaatacgcttactttaaattctgtcacagcagcaggaagaaaacaacaactaatcatgcaaaaaagtagcacctcaagtctaacacctgcaaatttctcatccagaggaaggtaagg

SEQ ID NO: 5428 - DNA, 460 bp, Chicken  19866894108980_2
gaaacagatagtgaacctccatctcgtttttccatctttaagaataaaaaggaaaggaagaaaaaagaagcttttctttcacaggccaccgtctggttttctcttgtgtggtctgtaggagagcgatagtgccttcatggttcygagcatcttacaaaactggatcttcaggtcatgtctgcactcgattttaagtggaaaagaaagatgtaggcacaacaatagacttgaggcgatgtactgggagcagcagaaagtcaactcaattattcaaatacagtcactgaaaaccaagcagaygagtattatggggagccatctgataattaatacgcttactttaaattctgtcacagcagcaggaagaaaacaacaactaatcatgcaaaaaagtagcacctcaagtctaacacctgcaaatttctcatccagaggaaggtaaggaaacaaattcaaattg

SEQ ID NO: 5429 - DNA, 600 bp, Chicken  19866894108982_1
acaagctatttgggtacaagcaagttgatagtcctgaagaaacactgaggcagatggtttcagccgccagcagaattgctcttttcagtgttttgaatgtctgaaggtgatctgtaggagcagagtaagaatctggagctacggaaagcttctgtctgtgtctttgctcagggtctgatgtgcaaaggtcttgtgtcctataagcaagcctaaaggcttgaggatctggggcactgctgtgtttttgcatacattcagaaaatttaacatagaaacacagagtggtttgagttgaaaggkacccttaaaggccatctggtccaaatctctgcaatgaacccacaattccatcaggtgctcagagcctcatcctgcctgaccttaagtatctccagggatggagcatccgctggatgctggatgcaggaacaagaaggatctgtcttgcagggaagctgggtctcatctcagagcaaatgcaatgtctctatttgggggcatatctgttgcacaaggtacacaagtgacttctgctcaaagaccagaaggccttggggacccactgggagttccccattggacacccagattctttgcctt

SEQ ID NO: 5430 - DNA, 600 bp, Chicken  19866894108982_2
tggatgcaggaacaagaaggatctgtcttgcagggaagctgggtctcatctcagagcaaatgcaatgtctctatttgggggcatatctgttgcacaaggtacacaagtgacttctgctcaaagaccagaaggccttggggacccactgggagttccccattggacacccagattctttgcctttagacaacactgctgatggaagtcctcaagtaaagcgaagtatgcatggcacggttctttattcatcaaataaacatctcatcagagggaggtggcatgtgtgaaaaaaatctgtgwtgatgggagaagaggacataataattatctgggatgacaccattcttggcagggattgtccatgaaaacagctcttttctaagaaggggtgaaaagtccacttagggttagctccctggaacaagaagtcagtatgcaaaattagcacatctaagagttaattaagagtcaaggacatgttaaggcaggcaccctagatcccacagctattacttttgagcagtgaatgatgagcaggggcggcagaaaagcttatttatctgttgaaaaggcgagagagaggcaggtgggtatctcatg

SEQ ID NO: 5431 - DNA, 600 bp, Chicken  19866894108982_3
tcagtatgcaaaattagcacatctaagagttaattaagagtcaaggacatgttaaggcaggcaccctagatcccacagctattacttttgagcagtgaatgatgagcaggggcggcagaaaagcttatttatctgttgaaaaggcgagagagaggcaggtgggtatctcatgggatgtacacaaattgccatggaaattgaatgcaaatttccatcttttcccctcagaatcagagattaaaaaagaagtagagatagggcagagatagagtgggaacatgtcagtgaagaatgagcctyatcactgaaatgaggctctttgagacactcatctcctctcagcaaagatcccattgccctgtgcaggcattcaaaccaggcagtgtggcaaggtccttgcattctctcccctccctccccaaaaaagtcttcttaagtcttcctgtggctatataccttgaacaaaagaaccatgatggtggttggactgctgctataatccttgccagcatctcagtgttcaacccaggcttggctctgctgttaggtcaactacataaccattttttggtgtgtttcgtcattccatcttctgttcag

SEQ ID NO: 5432 - DNA, 600 bp, Chicken  19866894108984_1
aaaggccatctgtcccacgccctgcactgagcagggacacccacagctccatcagtgctcagagcccatccagcctgaccttggctgtctgcagggatgatgtgctctggaaggtgccagaaatagcagtgatgggtgatggtccctggcccagaaacagccacgcacctcccataaatcctgccttgggacagaggctgaatcatttctcctttctgattctgatttctgattgtggccttccagtactggaagggagcatataaacaggagggggaacggctgtttatgagggtggayagygataggacaagggggaatggttttaaactgagacaggggaggtttaggttggatatgaggaggaagtttttcccccagagggtggtgacgcactgaacaggttgcccaaggaggctgtggatgccccatccctgcaggcattcaaggccaggctggatgtggctctgggcagcctggtctgctggttggcaaccctgcacatagcagggagttgaaaccagatgagcattgtggtccttttcaacccaggccattctatgattctagtacatccttcacactgctaaaaattgccca

SEQ ID NO: 5433 - DNA, 600 bp, Chicken  19866894108984_2
ggccatctgtcccacgccctgcactgagcagggacacccacagctccatcagtgctcagagcccatccagcctgaccttggctgtctgcagggatgatgtgctctggaaggtgccagaaatagcagtgatgggtgatggtccctggcccagaaacagccacgcacctcccataaatcctgccttgggacagaggctgaatcatttctcctttctgattctgatttctgattgtggccttccagtactggaagggagcatataaacaggagggggaacggctgtttatgagggtggayagygataggacaagggggaatggttttaaactgagacaggggaggtttaggttggatatgaggaggaagtttttcccccagagggtggtgacgcactgaacaggttgcccaaggaggctgtggatgccccatccctgcaggcattcaaggccaggctggatgtggctctgggcagcctggtctgctggttggcaaccctgcacatagcagggagttgaaaccagatgagcattgtggtccttttcaacccaggccattctatgattctagtacatccttcacactgctaaaaattgcccagat

SEQ ID NO: 5434 - DNA, 600 bp, Chicken  19866894108985_1
ggattagggagtgatttggggtcttgagatggggctttgcagaatgccatggaaagcaaagcctgaccgtgagcacagcacaggaggcggctgctgggaagcagcggtttgcccagcactgtgctgcccgtgtggggcagagacctggagctcagttactcggctcgggtctgtcctgcactgctccgtgtgtgtaatgcttttcctcaaagacccaacggtgagatgagtgggaaacattctccggtctcaggatctggcagaaatcctagtaagtctgctgaagtacgtttttgtcastgctgcttattctgcraggggagctttgtataaaccattccagtcggaaaccttttcctagaatggagttctgagagctcagaacactgtgaggacagccccggaatgggctctgcttgcactgcaggggctgaatggggcagtgagaacgctcacacacaaagcactgcctgccctttgctgtgctcggatgagaaaataaaacacctgcgcatggtaatgtggaaacaaaacaggttttccccctaccaggatgtgtcaccgtccatcccagcagccgaatggccccttgcagcagca

SEQ ID NO: 5435 - DNA, 600 bp, Chicken  19866894108985_2
tggggtcttgagatggggctttgcagaatgccatggaaagcaaagcctgaccgtgagcacagcacaggaggcggctgctgggaagcagcggtttgcccagcactgtgctgcccgtgtggggcagagacctggagctcagttactcggctcgggtctgtcctgcactgctccgtgtgtgtaatgcttttcctcaaagacccaacggtgagatgagtgggaaacattctccggtctcaggatctggcagaaatcctagtaagtctgctgaagtacgtttttgtcastgctgcttattctgcraggggagctttgtataaaccattccagtcggaaaccttttcctagaatggagttctgagagctcagaacactgtgaggacagccccggaatgggctctgcttgcactgcaggggctgaatggggcagtgagaacgctcacacacaaagcactgcctgccctttgctgtgctcggatgagaaaataaaacacctgcgcatggtaatgtggaaacaaaacaggttttccccctaccaggatgtgtcaccgtccatcccagcagccgaatggccccttgcagcagcagagctgcgcttttggg

SEQ ID NO: 5436 - DNA, 600 bp, Chicken  19866894108986_1
tctgttcagtcaactttgagaatggagatatcaggtttttatgcttttccccccaacttaatttgtaattaatgctgtgagggcagcaaccaatgacatgagataaatatttttattgtcaagttgagcccatgtgagtagaagaaaattgttccctgcccacatcagagtgtgatggggaacttttcaagtgtgacaatgatcccttgaactctgcttatacaggtggtatctttatgtcctattatatgacatcatgtaattagaatctgctcagcttcactgtattttgtgatgatsctcttctgctcatcagccagtaatttttttttcctgttgggtcatgattactgactgtggacatttgtcactgatcttgagcaaaatttctgctctgctcagaatagggtatgaggggtacatctgcagtcttgctggagaacgatgtggagtgaaaatgaacctattatgtaacatattccgagactaggctgaaattatttataagactgtcctactttcttccaagtccatttgttctctgcaaggggtgttcttgctgccccagtcatagatcatactggcagttttctagacacc

SEQ ID NO: 5437 - DNA, 600 bp, Chicken  19866894108989_1
gcatgatgtgagctgcacaggagatgagtgtctttttagcttgtaaatagttactgaagcctttctgctttatttacaagctgtgtgaagagaacatagctttgtgagcaaagatgggtgcctcctttttttgctttcagaaataataattatttggttactgtaattattgttgttctggcacttttaagagtctgtctgactgtattctaaattgttggaaggtgtcgtaaaggagtagaggtccaaaccacccttgtattagccagcaggtagctgtgcgtgttttgctaattactktrgtctaaaattcctatgagaccccactcctttcraggcagttcagtgagaggctgatggttcagcattgcagctgctgtgagctgcaagctttgatgctggttctgttagaagtcctgggagcaagatgctattgggaatgtgtttacacaggtttgattgctgtatcatgatgcttttaaaaaaacaaggagagaaaaagaagtgargctcttgtgctatgcagatatagcacagctgtgctgaggcggattgaatgtagcgatgaggagcagatacaaatcccagctaatgtttgct

SEQ ID NO: 5438 - DNA, 600 bp, Chicken  19866894108989_2
atgatgtgagctgcacaggagatgagtgtctttttagcttgtaaatagttactgaagcctttctgctttatttacaagctgtgtgaagagaacatagctttgtgagcaaagatgggtgcctcctttttttgctttcagaaataataattatttggttactgtaattattgttgttctggcacttttaagagtctgtctgactgtattctaaattgttggaaggtgtcgtaaaggagtagaggtccaaaccacccttgtattagccagcaggtagctgtgcgtgttttgctaattactktrgtctaaaattcctatgagaccccactcctttcraggcagttcagtgagaggctgatggttcagcattgcagctgctgtgagctgcaagctttgatgctggttctgttagaagtcctgggagcaagatgctattgggaatgtgtttacacaggtttgattgctgtatcatgatgcttttaaaaaaacaaggagagaaaaagaagtgargctcttgtgctatgcagatatagcacagctgtgctgaggcggattgaatgtagcgatgaggagcagatacaaatcccagctaatgtttgctca

SEQ ID NO: 5439 - DNA, 600 bp, Chicken  19866894108989_3
ttagcttgtaaatagttactgaagcctttctgctttatttacaagctgtgtgaagagaacatagctttgtgagcaaagatgggtgcctcctttttttgctttcagaaataataattatttggttactgtaattattgttgttctggcacttttaagagtctgtctgactgtattctaaattgttggaaggtgtcgtaaaggagtagaggtccaaaccacccttgtattagccagcaggtagctgtgcgtgttttgctaattactktrgtctaaaattcctatgagaccccactcctttcraggcagttcagtgagaggctgatggttcagcattgcagctgctgtgagctgcaagctttgatgctggttctgttagaagtcctgggagcaagatgctattgggaatgtgtttacacaggtttgattgctgtatcatgatgcttttaaaaaaacaaggagagaaaaagaagtgargctcttgtgctatgcagatatagcacagctgtgctgaggcggattgaatgtagcgatgaggagcagatacaaatcccagctaatgtttgctcagcatacctgtttgaagtaagaatgcaattgcag

SEQ ID NO: 5440 - DNA, 600 bp, Chicken  19866894108989_4
ctaaattgttggaaggtgtcgtaaaggagtagaggtccaaaccacccttgtattagccagcaggtagctgtgcgtgttttgctaattactktrgtctaaaattcctatgagaccccactcctttcraggcagttcagtgagaggctgatggttcagcattgcagctgctgtgagctgcaagctttgatgctggttctgttagaagtcctgggagcaagatgctattgggaatgtgtttacacaggtttgattgctgtatcatgatgcttttaaaaaaacaaggagagaaaaagaagtgargctcttgtgctatgcagatatagcacagctgtgctgaggcggattgaatgtagcgatgaggagcagatacaaatcccagctaatgtttgctcagcatacctgtttgaagtaagaatgcaattgcagtgagattaacaaataaacagttctcttaataccgtgatatcatgttttttaggaatccatatgtattatctgaggaggaagaagagggggaggatgctgatttagagaaagaagaaacagaagagcccaagggcaaaaagaaaaaaaataaaagcaaacagttgaagaaacctc

SEQ ID NO: 5441 - DNA, 600 bp, Chicken  19866894108992_1
acttttaaatgcttcttgtttgtacttctcagtgctctatggtttgaacagcaacttcttctattctaaaatgtctccaaggctcatttttatccttctgagtaaaagcaagtgacaaacacctccttcacttccccttccccacttctgacactgcagaaatataatagtagtactcctatttagaaggcacctcagaaataaaactctgccaaggttcttccaacttgctctcacaaagtttgaaaatgaagactgtcctttgtaaatttcaggttagatctaatctagacttaagayccaaggcgatggttatctctgtattacctygcctatatagataggcgtctataaatgtgtattagtagatgtatatattgttttataaatggcaacgttgtgcaacatcaagaataacacctggacagtgaggccagtaacacctcagatgaccctggctttattaaaatattagtaacygaattccttaattcacagttcagactatctgacttttccaaatctcggctgcctatttcaaaamgaatgcacttgatttcattttagatgcaggtttttgacttctctttctaaaagcat

SEQ ID NO: 5442 - DNA, 600 bp, Chicken  19866894108992_2
agtgctctatggtttgaacagcaacttcttctattctaaaatgtctccaaggctcatttttatccttctgagtaaaagcaagtgacaaacacctccttcacttccccttccccacttctgacactgcagaaatataatagtagtactcctatttagaaggcacctcagaaataaaactctgccaaggttcttccaacttgctctcacaaagtttgaaaatgaagactgtcctttgtaaatttcaggttagatctaatctagacttaagayccaaggcgatggttatctctgtattacctygcctatatagataggcgtctataaatgtgtattagtagatgtatatattgttttataaatggcaacgttgtgcaacatcaagaataacacctggacagtgaggccagtaacacctcagatgaccctggctttattaaaatattagtaacygaattccttaattcacagttcagactatctgacttttccaaatctcggctgcctatttcaaaamgaatgcacttgatttcattttagatgcaggtttttgacttctctttctaaaagcatcgaggggagtttaatttgaaagcagttagc

SEQ ID NO: 5443 - DNA, 600 bp, Chicken  19866894108992_3
atttagaaggcacctcagaaataaaactctgccaaggttcttccaacttgctctcacaaagtttgaaaatgaagactgtcctttgtaaatttcaggttagatctaatctagacttaagayccaaggcgatggttatctctgtattacctygcctatatagataggcgtctataaatgtgtattagtagatgtatatattgttttataaatggcaacgttgtgcaacatcaagaataacacctggacagtgaggccagtaacacctcagatgaccctggctttattaaaatattagtaacygaattccttaattcacagttcagactatctgacttttccaaatctcggctgcctatttcaaaamgaatgcacttgatttcattttagatgcaggtttttgacttctctttctaaaagcatcgaggggagtttaatttgaaagcagttagcatcagttatggttcctgccctaatagaaatgtgtgcatgtgttagattcctttctagaaattatgttgtcatatatttcaaggctgaattttgtttcttattttcttctgagtgctgaatttcttttgagcacttgactttttgctcata

SEQ ID NO: 5444 - DNA, 600 bp, Chicken  19866894108992_4
gaaaatgaagactgtcctttgtaaatttcaggttagatctaatctagacttaagayccaaggcgatggttatctctgtattacctygcctatatagataggcgtctataaatgtgtattagtagatgtatatattgttttataaatggcaacgttgtgcaacatcaagaataacacctggacagtgaggccagtaacacctcagatgaccctggctttattaaaatattagtaacygaattccttaattcacagttcagactatctgacttttccaaatctcggctgcctatttcaaaamgaatgcacttgatttcattttagatgcaggtttttgacttctctttctaaaagcatcgaggggagtttaatttgaaagcagttagcatcagttatggttcctgccctaatagaaatgtgtgcatgtgttagattcctttctagaaattatgttgtcatatatttcaaggctgaattttgtttcttattttcttctgagtgctgaatttcttttgagcacttgactttttgctcatatttacagttctgtacaatttattacttttaccaaaatctttcaacagttaggtttctgtccata

SEQ ID NO: 5445 - DNA, 600 bp, Chicken  19866894108992_5
cacttgactttttgctcatatttacagttctgtacaatttattacttttaccaaaatctttcaacagttaggtttctgtccatatccacatttctatcaaaaactaataaagaacttgaagggcaacagtgtattttccattgtggtatacgtatcccagacatttaggtatctctgaaataatttctgtggatctggacctttgtgttctggacaaaacctgtgtaattaatatgcttttctcccagtaatttggttgttggcagagcctactttgtgtgaggctgctgaggattcagratcacttctcatgtgttccatccttcattcagaatttgtgtgaataattaatgtgctgtagactagaggtcagaaaatggttagcaacacaaaatycaggcaggaaactcggacttttttgtttccttaatctctgcaaagggatggccatttactcacctagatattcattgtttctcgtgccccttctgttggtttggtgtggatactagtggcataacatgtctagaggacatactaggcaaattatggatgtaatactagtacataatatagtttctttactgattgtgacacaat

SEQ ID NO: 5446 - DNA, 600 bp, Chicken  19866894108992_6
tcaaaaactaataaagaacttgaagggcaacagtgtattttccattgtggtatacgtatcccagacatttaggtatctctgaaataatttctgtggatctggacctttgtgttctggacaaaacctgtgtaattaatatgcttttctcccagtaatttggttgttggcagagcctactttgtgtgaggctgctgaggattcagratcacttctcatgtgttccatccttcattcagaatttgtgtgaataattaatgtgctgtagactagaggtcagaaaatggttagcaacacaaaatycaggcaggaaactcggacttttttgtttccttaatctctgcaaagggatggccatttactcacctagatattcattgtttctcgtgccccttctgttggtttggtgtggatactagtggcataacatgtctagaggacatactaggcaaattatggatgtaatactagtacataatatagtttctttactgattgtgacacaatgacagaatcattgactgcaatcaacagctgattttagtagcttactgaaagtagttttgatcatttacttgtaatttgtgacacttgaataatata

SEQ ID NO: 5447 - DNA, 599 bp, Chicken  19866894108993_1
  misc_feature (1)..(65): n is any nucleotide
nnnnnnnnnnnnnnnnnnnnnnnnnnnnnnnnnnnnnnnnnnnnnnnnnnnnnnnnnnnnnnnnntcctgggagaagcaaagtgcccataggcccttccaagcccagtgccactggtcatggcacactgctctgcccagcccaggcagctcacatcatggaatcatgcggtcgtgaaatggggtgggttggaggggaccttacagatcatccaactccaacctgctgctatggacggagttgccacacaccatggccctggatgcctccatggatatggcacccgcagctctctgggcakcagtgccagggcctctgagtcaaacatttcttcctagcatctatccgaaagctcctctcttttagtttaaagccattcccctttgtcctgtcactatcagaccactcctccttctctggaaagctctgtccccagcacttatgagcacctgaaagcacccgttcagcaggaacctgtgctctgtgctgacaaggaaagggccaggccggtccgggaggtttaatttcactggctggctctaatgtcagtcttatcaatgatatcttttctttcccagtagcatgttctaataagaagct

SEQ ID NO: 5448 - DNA, 600 bp, Chicken  19866894109000_1
aaatggttccagacttcagaggcaacttagtgtaagatttcagtattaacagctcctgaagaatttaacttgaagttctaatttgtccacctactctgaatgaattgcagtatgcgtgattaaagaagaaagaaaaataataataaaaaaaaaaataggaaaaggaaagtgaatccttccagttagtgcagctcagaaaaggaaaaacaaatattactcaaaagatcattttaacagtgattagctgttatgtggaaaaatagatttcacttcagtcaatagaacactatattttgttgrgaatcatagtttacaaaataaatttcaatattttttactacagcaggtgatgaatgttctcccacagagggttatatcagaaaatcaatatttgtaaaattgaaacagtataggtttgtattgatccatgtggctaaatcaaaatgaaaggctttgtaacagctttcttagacagcctgctacccagtaatggcaaactatcaattttagctttccactgataaatcagcttgaaaattggatgtcattttttttttcttttttttctttttttttttactgaggtagtgattttttatg

SEQ ID NO: 5449 - DNA, 567 bp, Chicken  19866894109000_2
tagacagcctgctacccagtaatggcaaactatcaattttagctttccactgataaatcagcttgaaaattggatgtcattttttttttcttttttttctttttttttttactgaggtagtgattttttatgccttctaacctttcctgacgtgttagattggtttataagactaagctctgcctttttgaaagcagtcatcaaagctgacatttagatatattttgaaacaaaacataaactcttgaaaccttgttttatctgctggatgacttgctggtaaccatatgagtgcgtctstgtgtgaacgagtatgaatatacccttactgctgaaagtgacattaaagtaatatttcaggtcgttatatttctctgttttctgatctctggagctcacaaaggtcaggtcctcaaatgcagcttttagaaattaatgctccagacacttttagcttgcagtaactaggaagattgatttttctttaattgactgattttttttttattattattcagttctgcagtgagactttataaatgataccaagcacatggtttcagcaca

SEQ ID NO: 5450 - DNA, 600 bp, Chicken  19866894109002_1
atgggacctctgcctgggtctccacagtttttgtgacatcaaccttccgttgaggtgcacccatggcaaccagcaggctcagtaacactcgttaaaacagcctacgtggatctcacaccccaactcctcctctccatctctgatgggcagcgacacatcactggcttctcgaaggctttttctaggcaggtgggtgtggatacagagctgttgctgtggcaacgtcacaccatgtcagccactcttgcgagagctgcccagtcgagagctgcggctgctctgttgtcttggggaaccctygtgtgagggaagtgattggaacccccctgtaccttgctaatggttgcagcggctctgcctgagacaactccgagcagtgaacctcagccatcaagccaagtagaacaagtgacatcagtttcttcaccttatctttcagttatcagtttcttgtgagcacttggactaaaaccccagaagatgttcatgaaaggttgaaaatagcgggatactccatttctgcaatatctttcaaataacatattcaatttctgcagtagctaagaatgtttttcaagtggaagaacgttgttggtacct

SEQ ID NO: 5451 - DNA, 600 bp, Chicken  19866894109004_1
tgaatcccataagaaaaaaaaaacaaaaaaacattaaatctgcattaactgaatttatctgttaaagaacttagcaggaacgatttgaaaaagagttcacaacacatttgctacctgtctgccctactgtgccctgaccatgagatttctttgacctccatggggctgattcccacacaacttcctgcctgctccctgaaagctggagtcatctctgagtgttgggagaaaactgatttggattgcattctctcacctaaaacctaaaagtcttctactgtgagtctgtcacgttatacwttattattactattatcattagtatatgtcactgcatgaataataactacataagatgaccctcactggcaccagcatatgatttmatttacgtaactctgagttgtggcagtccattatttagctctccaaatgtctctacttgtcagcaaaatgctgatattcatttggaaatgcccactgacttcaactgggcatactcacagattttcaggctcagagttgaagggatcagcatggatcaacaagcggctgatracagagctcccaggcaaagacccagacatgccagcacgkata

SEQ ID NO: 5452 - DNA, 600 bp, Chicken  19866894109004_2
gaaaaagagttcacaacacatttgctacctgtctgccctactgtgccctgaccatgagatttctttgacctccatggggctgattcccacacaacttcctgcctgctccctgaaagctggagtcatctctgagtgttgggagaaaactgatttggattgcattctctcacctaaaacctaaaagtcttctactgtgagtctgtcacgttatacwttattattactattatcattagtatatgtcactgcatgaataataactacataagatgaccctcactggcaccagcatatgatttmatttacgtaactctgagttgtggcagtccattatttagctctccaaatgtctctacttgtcagcaaaatgctgatattcatttggaaatgcccactgacttcaactgggcatactcacagattttcaggctcagagttgaagggatcagcatggatcaacaagcggctgatracagagctcccaggcaaagacccagacatgccagcacgkatatctgtaggaaaattggcaatgggaagatcatgatgtaataaactgaaaacatgtcatttcagtctcagactacattaactccagtc

SEQ ID NO: 5453 - DNA, 600 bp, Chicken  19866894109004_3
aaaacctaaaagtcttctactgtgagtctgtcacgttatacwttattattactattatcattagtatatgtcactgcatgaataataactacataagatgaccctcactggcaccagcatatgatttmatttacgtaactctgagttgtggcagtccattatttagctctccaaatgtctctacttgtcagcaaaatgctgatattcatttggaaatgcccactgacttcaactgggcatactcacagattttcaggctcagagttgaagggatcagcatggatcaacaagcggctgatracagagctcccaggcaaagacccagacatgccagcacgkatatctgtaggaaaattggcaatgggaagatcatgatgtaataaactgaaaacatgtcatttcagtctcagactacattaactccagtcactcactgtggaaagcaactagcwttgtgctttcttccactccagaagactcagcactctcaacaagaagagtttctgggattgcctgctgggtgacacaatatcacctgaggccaacagcacaattgtacagacacatgagaatggacaatggcagcatattcactacagc

SEQ ID NO: 5454 - DNA, 600 bp, Chicken  19866894109004_4
acwttattattactattatcattagtatatgtcactgcatgaataataactacataagatgaccctcactggcaccagcatatgatttmatttacgtaactctgagttgtggcagtccattatttagctctccaaatgtctctacttgtcagcaaaatgctgatattcatttggaaatgcccactgacttcaactgggcatactcacagattttcaggctcagagttgaagggatcagcatggatcaacaagcggctgatracagagctcccaggcaaagacccagacatgccagcacgkatatctgtaggaaaattggcaatgggaagatcatgatgtaataaactgaaaacatgtcatttcagtctcagactacattaactccagtcactcactgtggaaagcaactagcwttgtgctttcttccactccagaagactcagcactctcaacaagaagagtttctgggattgcctgctgggtgacacaatatcacctgaggccaacagcacaattgtacagacacatgagaatggacaatggcagcatattcactacagcaggtattctgcttcacggtgagacatgcaacaccctgct

SEQ ID NO: 5455 - DNA, 600 bp, Chicken  19866894109004_5
agtccattatttagctctccaaatgtctctacttgtcagcaaaatgctgatattcatttggaaatgcccactgacttcaactgggcatactcacagattttcaggctcagagttgaagggatcagcatggatcaacaagcggctgatracagagctcccaggcaaagacccagacatgccagcacgkatatctgtaggaaaattggcaatgggaagatcatgatgtaataaactgaaaacatgtcatttcagtctcagactacattaactccagtcactcactgtggaaagcaactagcwttgtgctttcttccactccagaagactcagcactctcaacaagaagagtttctgggattgcctgctgggtgacacaatatcacctgaggccaacagcacaattgtacagacacatgagaatggacaatggcagcatattcactacagcaggtattctgcttcacggtgagacatgcaacaccctgcttcatggagcaagagaggagaaggactgaaattactccccttgtcacccaagaattactgtctccagcttctaaaattattagatggcaacacacgaacattatctttttcaaa

SEQ ID NO: 5456 - DNA, 600 bp, Chicken  19866894109006_1
tatattttttctctctttggtggtgtacaggcttgtgcaatgcatgccaagtagttctatattctattctattttctaatgcttcaaagatctagtggctggagtgagtatgtgtgaagaaaacagtggatcaccattaagtacgtaccttatgatttcacctggatgctgaaaatcacacaaaagggctatagcacagaagtgctacaagaaaacagggtttaacataaatttacagggtaaagctaaaattagaccattttgagaagaactgagtgccagtgtagatgccagtgacastgcaagaatcaatagaccaagtaggcacaaagtctgtatctttctcatcatctcatcagtagcctcaaaagaagtcagagctgaacacagatttcagaactggaaagtttctacgaattctcactgcatctggtaaatgctagcagagattcaaggggatgttctgaaggaggtagcaattccaagccttaacaatattccaggtaattccacatatgaaagcatgagctgctatgtggtgagcttagaagccaactctttcagcggagacactcatcttcttctatggacatgatttag

SEQ ID NO: 5457 - DNA, 600 bp, Chicken  19866894109027_1
ttttgaatacaacagtagtagaggacatcagcaaaaaaactgaggagagcctgctgatacagtttggctgatccctgagaaagcttttggctgaatcttgcataagaaagaggcccaattaccatagcttaaattccacccaagtacatgtgctatcacctgaccatggagagggaggactactaagtataggatttaggtcagtctatggtgtcatgaatataaatccccaaatacacaatctctattttgtttctaattgttaccagcatttagctttcttacgttatcggtatatgwtatttcagctttgtatttgacacttaagtaatacttcatgctaaaacaggctgttacacgatcaaaactgagttacaggaaattgtgtcttgctaggatacccaaatagctttaacttgtaattgaagccatgaagagagagtataaaaagcgtttggaaatgtgaatagtaaaatggctcaatcacttagagtggtgctaaaaaacatgaatgtatctctaatgagaaatcaaaagcaggatgttctagtaggactggtggtcctatctgcaggagtaattctgacattctcctctcta

SEQ ID NO: 5458 - DNA, 600 bp, Chicken  19866894109029_1
agtaatttctaattgaattgtttcagacagttcttgggatcctaaaaagcagcaaggtacttcagtttctggaactgctgcacaataatattttgaagagaccagctggtgcagaggggtagagtttgcagtttttgttctgactttttttcctccgatcacatgattcaaattcatttttcattaatcaacaatttctaaaaatcaacgcttatgcaaaaaatttcagagcaatttctgcagaaatgaatagctagctattcaaaacagttctaagatgatagggtatgaattcgtttytatgcagtatgtacagttaatgacagtatactttatatagacagtagattagctatatacgcagtcattcatgtctgaattcaaaagcctagttttgtaaaattgttgttaaaacagtctttatattgaacattgattatgagctgtggttgggaggggaaaaaaaaaaccaaagcccaccagatttcataactttaagaaatttatttttactctatgaattacgaagtactgaaaaggtgagggttctctgcttttttttttttctttgaaaattgagctagtttttattggtaactt

SEQ ID NO: 5459 - DNA, 600 bp, Chicken  19866894109034_1
tgtaaatcctttccctaaaaccaaattatatagaagttcaaaataattgttaaatcattaatgcagttgatatgtattccataagataagcccaatggctaaagatgatttgtgctgaacaatcaataaaaatcagataccaaactggatgtagattatttacttacagactcattaatactcttaacagactttacagttaatgacatgagcctcaaaaatattaaatctcaatagaatatttactattaacaccataattagatgagaacctgatttgaactgggtgaaaatgagaamgacaaactatcatacttgaagctgtttgggaaaaaattaacttcttaaatagaagaaaattttaaaaatatttgatttcttgtgctttcattctcataaccaatatatatatattttaagtctcatgctctgatgaagtagtattttgagggactctatctgaatgcctagaactggcaatgcttctgtttttccagcatttttgtatgcataaactggtttagacaaaaagcaatacctatattttttcattatttttattactcttatgaggttgttaccctcacaagaatagaaaag

SEQ ID NO: 5460 - DNA, 600 bp, Chicken  19866894109036_1
agaagtgccagtttgcaagttaagtaagtatgaactgcaagaatttccaatagaataagaatacatatagatatttgcttcctggggacatgcttttatattcagaagtcatttattgcaaacttctatctttattttggcataagaaagatagatttgggtaaacatccttttaagaattggcatacttaagttaactaaaagttgccatgcaaaactgacgtgctgcaaggctcatcttgacaagtgtttgattcatttgaaacaccctcacgagtacttgtatagtatgtttgaatwagaascatgcattcctcataatactcatttactctgtttttaggtgcttatattattgccatcatctgtagtaagtatcatgtcattcctgaataatgtatgatgtgtttggttttttttgtgtgtggagttgatmttgtggtcatcacctgggactaataggaactgtgtctggagttctggttacttgaaaaatgcttggctgctcttaaaatcaagctttctacaccacttctttataaattcattctaaaaactaatgacaatgttacgagagctgtggtaatattcctgagctgg

SEQ ID NO: 5461 - DNA, 600 bp, Chicken  19866894109036_2
tgccagtttgcaagttaagtaagtatgaactgcaagaatttccaatagaataagaatacatatagatatttgcttcctggggacatgcttttatattcagaagtcatttattgcaaacttctatctttattttggcataagaaagatagatttgggtaaacatccttttaagaattggcatacttaagttaactaaaagttgccatgcaaaactgacgtgctgcaaggctcatcttgacaagtgtttgattcatttgaaacaccctcacgagtacttgtatagtatgtttgaatwagaascatgcattcctcataatactcatttactctgtttttaggtgcttatattattgccatcatctgtagtaagtatcatgtcattcctgaataatgtatgatgtgtttggttttttttgtgtgtggagttgatmttgtggtcatcacctgggactaataggaactgtgtctggagttctggttacttgaaaaatgcttggctgctcttaaaatcaagctttctacaccacttctttataaattcattctaaaaactaatgacaatgttacgagagctgtggtaatattcctgagctggtgggg

SEQ ID NO: 5462 - DNA, 600 bp, Chicken  19866894109036_3
ttggcataagaaagatagatttgggtaaacatccttttaagaattggcatacttaagttaactaaaagttgccatgcaaaactgacgtgctgcaaggctcatcttgacaagtgtttgattcatttgaaacaccctcacgagtacttgtatagtatgtttgaatwagaascatgcattcctcataatactcatttactctgtttttaggtgcttatattattgccatcatctgtagtaagtatcatgtcattcctgaataatgtatgatgtgtttggttttttttgtgtgtggagttgatmttgtggtcatcacctgggactaataggaactgtgtctggagttctggttacttgaaaaatgcttggctgctcttaaaatcaagctttctacaccacttctttataaattcattctaaaaactaatgacaatgttacgagagctgtggtaatattcctgagctggtggggttttgtcatcttggtgattactgttcttgagctgaactctgctgagcggtctcgagcaaagtaccaaatatgtaattgggaattaagcaatgtgaatttctggaagaggaggatgctgtataggattttgg

SEQ ID NO: 5463 - DNA, 600 bp, Chicken  19866894109053_1
atatacttgtgaatatctcattcaggagaatttaaagaaattaaactgtatttctattaaaaatgaactgaaattaggcccagccacttaaagcctctcttgcctttctccttgtcagatgggtttaaagataaataatgggcaaagtactgtttaaaatgagtctgtgctgcaacatttaccaagagcattgttaatgaagagcatataatgtaagatagctatatagtctgtactcaaatgttaaggtagtgaagatgctgaaagcatctaggcaaattcagtttaaaggtgaaattsctgcccaagagtaaatcttttttcaaraaattaagctgatactggggtctccataagtgcaaratgagtgatctttttctcatattgcagagctrtccatttgtatattcagatattctcatttgttctgctccttcttgcacttgttttgttgtgcactctctttttctaccacagygtgaaactgtgtttgtactggaggcaaaggtagacaaaaaaggttactttttctacaggattattagagaccctccaatatgagaaaaactaactattgccaatactgacaactcatttggg

SEQ ID NO: 5464 - DNA, 600 bp, Chicken  19866894109053_10
ttaccaggatcagtagtttcagaagaattataataagcaagcctagaaagagtamatttgtgcattgcaatagctaagtcatcagtatggagaggacctagtgtgacaataggaaagaacatttcttaaactgaaaacatggaataaatataatttgagtcatggagagaagaacaattcatcttatgtaggagcactgagtatttctaaattaatacatttatcatttggtgcatttttttggcatttagattcaaataattgcttgaattaataatgctttggagaggtatggtttyrtccaaattccagggcatattttcttcttatgcagctacacacacagagacctcacaacaggattgaggactgagtaacattctaaacaaagactgttttaaaagatccaagayagatacaggtaaatcgattcacatcaatagactcaaaatgaggtgctcaataaaaacctaagcctgtctgaaaatatgaaatacagctgttgttcaggaaatattttatcacatgtctaaaaacagaaagatcctgtggyacaagtagaaacaagatatactttcgtttccaaggaacaacagaaaa

SEQ ID NO: 5465 - DNA, 600 bp, Chicken  19866894109053_11
aaagaacatttcttaaactgaaaacatggaataaatataatttgagtcatggagagaagaacaattcatcttatgtaggagcactgagtatttctaaattaatacatttatcatttggtgcatttttttggcatttagattcaaataattgcttgaattaataatgctttggagaggtatggtttyrtccaaattccagggcatattttcttcttatgcagctacacacacagagacctcacaacaggattgaggactgagtaacattctaaacaaagactgttttaaaagatccaagayagatacaggtaaatcgattcacatcaatagactcaaaatgaggtgctcaataaaaacctaagcctgtctgaaaatatgaaatacagctgttgttcaggaaatattttatcacatgtctaaaaacagaaagatcctgtggyacaagtagaaacaagatatactttcgtttccaaggaacaacagaaaagatctggagatctagataagcttttcagagattggaataactcctcagggcatatgagctgctgagctccatcatttattctaggaagtttattttctacattttcaaaagtt

SEQ ID NO: 5466 - DNA, 477 bp, Chicken  19866894109053_12
tcaaataattgcttgaattaataatgctttggagaggtatggtttyrtccaaattccagggcatattttcttcttatgcagctacacacacagagacctcacaacaggattgaggactgagtaacattctaaacaaagactgttttaaaagatccaagayagatacaggtaaatcgattcacatcaatagactcaaaatgaggtgctcaataaaaacctaagcctgtctgaaaatatgaaatacagctgttgttcaggaaatattttatcacatgtctaaaaacagaaagatcctgtggyacaagtagaaacaagatatactttcgtttccaaggaacaacagaaaagatctggagatctagataagcttttcagagattggaataactcctcagggcatatgagctgctgagctccatcatttattctaggaagtttattttctacattttcaaaagttctatacaccagaaattt

SEQ ID NO: 5467 - DNA, 600 bp, Chicken  19866894109053_2
gaatttaaagaaattaaactgtatttctattaaaaatgaactgaaattaggcccagccacttaaagcctctcttgcctttctccttgtcagatgggtttaaagataaataatgggcaaagtactgtttaaaatgagtctgtgctgcaacatttaccaagagcattgttaatgaagagcatataatgtaagatagctatatagtctgtactcaaatgttaaggtagtgaagatgctgaaagcatctaggcaaattcagtttaaaggtgaaattsctgcccaagagtaaatcttttttcaaraaattaagctgatactggggtctccataagtgcaaratgagtgatctttttctcatattgcagagctrtccatttgtatattcagatattctcatttgttctgctccttcttgcacttgttttgttgtgcactctctttttctaccacagygtgaaactgtgtttgtactggaggcaaaggtagacaaaaaaggttactttttctacaggattattagagaccctccaatatgagaaaaactaactattgccaatactgacaactcatttgggaattgctaatgactatgggtttgtttg

SEQ ID NO: 5468 - DNA, 600 bp, Chicken  19866894109053_3
tgaactgaaattaggcccagccacttaaagcctctcttgcctttctccttgtcagatgggtttaaagataaataatgggcaaagtactgtttaaaatgagtctgtgctgcaacatttaccaagagcattgttaatgaagagcatataatgtaagatagctatatagtctgtactcaaatgttaaggtagtgaagatgctgaaagcatctaggcaaattcagtttaaaggtgaaattsctgcccaagagtaaatcttttttcaaraaattaagctgatactggggtctccataagtgcaaratgagtgatctttttctcatattgcagagctrtccatttgtatattcagatattctcatttgttctgctccttcttgcacttgttttgttgtgcactctctttttctaccacagygtgaaactgtgtttgtactggaggcaaaggtagacaaaaaaggttactttttctacaggattattagagaccctccaatatgagaaaaactaactattgccaatactgacaactcatttgggaattgctaatgactatgggtttgtttgtttktttgttttgttttgtttttttgaactctactt

SEQ ID NO: 5469 - DNA, 600 bp, Chicken  19866894109053_4
tctcttgcctttctccttgtcagatgggtttaaagataaataatgggcaaagtactgtttaaaatgagtctgtgctgcaacatttaccaagagcattgttaatgaagagcatataatgtaagatagctatatagtctgtactcaaatgttaaggtagtgaagatgctgaaagcatctaggcaaattcagtttaaaggtgaaattsctgcccaagagtaaatcttttttcaaraaattaagctgatactggggtctccataagtgcaaratgagtgatctttttctcatattgcagagctrtccatttgtatattcagatattctcatttgttctgctccttcttgcacttgttttgttgtgcactctctttttctaccacagygtgaaactgtgtttgtactggaggcaaaggtagacaaaaaaggttactttttctacaggattattagagaccctccaatatgagaaaaactaactattgccaatactgacaactcatttgggaattgctaatgactatgggtttgtttgtttktttgttttgttttgtttttttgaactctacttgtataactctacttgtatctttcttactataa

SEQ ID NO: 5470 - DNA, 600 bp, Chicken  19866894109053_5
ttaccaagagcattgttaatgaagagcatataatgtaagatagctatatagtctgtactcaaatgttaaggtagtgaagatgctgaaagcatctaggcaaattcagtttaaaggtgaaattsctgcccaagagtaaatcttttttcaaraaattaagctgatactggggtctccataagtgcaaratgagtgatctttttctcatattgcagagctrtccatttgtatattcagatattctcatttgttctgctccttcttgcacttgttttgttgtgcactctctttttctaccacagygtgaaactgtgtttgtactggaggcaaaggtagacaaaaaaggttactttttctacaggattattagagaccctccaatatgagaaaaactaactattgccaatactgacaactcatttgggaattgctaatgactatgggtttgtttgtttktttgttttgttttgtttttttgaactctacttgtataactctacttgtatctttcttactataaagatakctttttaaaaattgttacttgaattaccattttcaaataaatttgtacagctgagaaatatccttaatatcctggca

SEQ ID NO: 5471 - DNA, 600 bp, Chicken  19866894109053_6
taagctgatactggggtctccataagtgcaaratgagtgatctttttctcatattgcagagctrtccatttgtatattcagatattctcatttgttctgctccttcttgcacttgttttgttgtgcactctctttttctaccacagygtgaaactgtgtttgtactggaggcaaaggtagacaaaaaaggttactttttctacaggattattagagaccctccaatatgagaaaaactaactattgccaatactgacaactcatttgggaattgctaatgactatgggtttgtttgtttktttgttttgttttgtttttttgaactctacttgtataactctacttgtatctttcttactataaagatakctttttaaaaattgttacttgaattaccattttcaaataaatttgtacagctgagaaatatccttaatatcctggcacagttacggggtaatctggataacaatatgtagcacaagagaattacaaagtgaaatctttgagaccatatcagagaaccatttcagtacccttcttgtatgttacaaccacttgtattcatgcccatttttataacaattcctatttcaaaa

SEQ ID NO: 5472 - DNA, 600 bp, Chicken  19866894109053_7
tgtatattcagatattctcatttgttctgctccttcttgcacttgttttgttgtgcactctctttttctaccacagygtgaaactgtgtttgtactggaggcaaaggtagacaaaaaaggttactttttctacaggattattagagaccctccaatatgagaaaaactaactattgccaatactgacaactcatttgggaattgctaatgactatgggtttgtttgtttktttgttttgttttgtttttttgaactctacttgtataactctacttgtatctttcttactataaagatakctttttaaaaattgttacttgaattaccattttcaaataaatttgtacagctgagaaatatccttaatatcctggcacagttacggggtaatctggataacaatatgtagcacaagagaattacaaagtgaaatctttgagaccatatcagagaaccatttcagtacccttcttgtatgttacaaccacttgtattcatgcccatttttataacaattcctatttcaaaatgcatcactcccaagctggcttgaaacttcttttctctttttaaataaactgggaacatgctcccagact

SEQ ID NO: 5473 - DNA, 600 bp, Chicken  19866894109053_8
caacatttttctgatgcttttgtaatgttctcagaatctgtggaggaagtagccacatatatacaaaagctataccatgtattttgtaaacctcatttgattctcactggcagtggtgtaaaacagtaaaatgttatattaaactacttactcacaatcaaactccaatttgtttatctgaaaacatatatattttcttctgtgctcatgcttttttttccatggtacaatgaatcaggggaagtttaccaggatcagtagtttcagaagaattataataagcaagcctagaaagagtamatttgtgcattgcaatagctaagtcatcagtatggagaggacctagtgtgacaataggaaagaacatttcttaaactgaaaacatggaataaatataatttgagtcatggagagaagaacaattcatcttatgtaggagcactgagtatttctaaattaatacatttatcatttggtgcatttttttggcatttagattcaaataattgcttgaattaataatgctttggagaggtatggtttyrtccaaattccagggcatattttcttcttatgcagctacacacacagagacctcac

SEQ ID NO: 5474 - DNA, 600 bp, Chicken  19866894109053_9
tttaccaggatcagtagtttcagaagaattataataagcaagcctagaaagagtamatttgtgcattgcaatagctaagtcatcagtatggagaggacctagtgtgacaataggaaagaacatttcttaaactgaaaacatggaataaatataatttgagtcatggagagaagaacaattcatcttatgtaggagcactgagtatttctaaattaatacatttatcatttggtgcatttttttggcatttagattcaaataattgcttgaattaataatgctttggagaggtatggtttyrtccaaattccagggcatattttcttcttatgcagctacacacacagagacctcacaacaggattgaggactgagtaacattctaaacaaagactgttttaaaagatccaagayagatacaggtaaatcgattcacatcaatagactcaaaatgaggtgctcaataaaaacctaagcctgtctgaaaatatgaaatacagctgttgttcaggaaatattttatcacatgtctaaaaacagaaagatcctgtggyacaagtagaaacaagatatactttcgtttccaaggaacaacagaaa

SEQ ID NO: 5475 - DNA, 599 bp, Chicken  19866894109056_1
  misc_feature (1)..(95): n is any nucleotide
nnnnnnnnnnnnnnnnnnnnnnnnnnnnnnnnnnnnnnnnnnnnnnnnnnnnnnnnnnnnnnnnnnnnnnnnnnnnnnnnnnnnnnnnnnnnnnntgcagacgtacccacaagcaaactgcagggttctgtgaaagaaaacttgcagctgctatttcgcaatcaattactgggtatttgtccttatcttcaggacaatgtaacacgaaaatgggggtttataagtgattgtaaggtgactatggggcaatttgacataaggcataacagagaatgatcactgcaaagagaccatcagacraagcctcttaaggaacggagtatttcacccagcaggcattcataggcagctctcagcttcctggaggggaaactaaccaacaaactctttataaaatgaaaacaactttaagtaaacaaacaaacccctattttactatcttttagtcaactattcatgaaacacatcttaaagcttctcaatgaaatgatggcttctacgcatgcttcttacctttcccctcaaagttctgatgctgaagcagctcaagcaagtaatttatcagctgctggaagtggtgaaacagggcttcgctgatg

SEQ ID NO: 5476 - DNA, 600 bp, Chicken  19866894109056_2
acaactttaagtaaacaaacaaacccctattttactatcttttagtcaactattcatgaaacacatcttaaagcttctcaatgaaatgatggcttctacgcatgcttcttacctttcccctcaaagttctgatgctgaagcagctcaagcaagtaatttatcagctgctggaagtggtgaaacagggcttcgctgatgtgggggaaaataatgatctcgtggttcagactttgaactgagagctttgagacacagctcttattcccaatttcccaagactgtgtgtgtgacccctgtgartggtttcactccctcatgtttccatgcatgtgtgaacagctgagttctttcccccaggaattcttatgaaccagcacgtctgaagtggttggatcctggtctgcagcagcattcttgggcattgaaactggccattgatcccgtgcaattgtacctgccacacacgaacaattgccagtcatgattctggagtcatgtggcccagacgtcctcctggtttttcaataccatgttttctcttcaagagagattatcagtagtgataggagaaattccattacataggccaaagagtggtca

SEQ ID NO: 5477 - DNA, 600 bp, Chicken  19866894109064_1
cactaaattccatctgggtttaggaccatcagtactggttttatcaagacagaaacctctgcaagagctctctggagtgggcaagcatcgtttgtcatatccaggagaccaccaggagttgaaccaaggaaagacacatagatggaataaacaaggataaaagtagcaagcacacattccaagaacatgcttaaaaatagtgctgttttgtcagagacagcatgtacccaacttcaccagtagtaccaaggatctgttaaaataacatcaccagcaagaagtgagtttcctaaggaatayggtatattagacatcagaaaccaatcattcacaaggagaaagaaggcagaatattgcatttctccactactgctgagaatytccccaaaatgcagaagataacacatagtcagaaagaatggcttcacatgaacaacacccactgaaatgaaaatgtatcagaaaggcagactgattttatgaaatactaatttgagagagggagaaatagtttgagaaatgtcagaacttcttgttactgtattcctaagtgaatttgaagggagagaagaatctttctctcccttcaaattagtttgt

SEQ ID NO: 5478 - DNA, 600 bp, Chicken  19866894109064_2
caagcatcgtttgtcatatccaggagaccaccaggagttgaaccaaggaaagacacatagatggaataaacaaggataaaagtagcaagcacacattccaagaacatgcttaaaaatagtgctgttttgtcagagacagcatgtacccaacttcaccagtagtaccaaggatctgttaaaataacatcaccagcaagaagtgagtttcctaaggaatayggtatattagacatcagaaaccaatcattcacaaggagaaagaaggcagaatattgcatttctccactactgctgagaatytccccaaaatgcagaagataacacatagtcagaaagaatggcttcacatgaacaacacccactgaaatgaaaatgtatcagaaaggcagactgattttatgaaatactaatttgagagagggagaaatagtttgagaaatgtcagaacttcttgttactgtattcctaagtgaatttgaagggagagaagaatctttctctcccttcaaattagtttgttctgaaaggctgcgctaggcagagcaatatttgaaacatttaagcagtcaaatatgaaacaaaacagcctgatcctgatgg

SEQ ID NO: 5479 - DNA, 600 bp, Chicken  19866894109080_1
ttttaaataaaacctcatattaggatttaggggtttttctgggaggtggcaagagggccaagagtgagaagatgtggtcagtggggagaattaggggatttgcagctctgttaaattcccctttcttcccccgcagttaaatttctgtccagcttccttccacgcggaaacattgattcctttccaaagcaagcaaacaaatgggattttatttcagtcctgcaagtcatagaaaagcacttgcctgggtagattagtcaggattggcaactctctttgctgttgcaagtgttagaaatrtgtttatcactcaaacgctctgccccaggactgttatgaaagtttcattttcagcatgactccagtttgcagaccatcgtgttcctttctctgttttgctcattcatttgtatgtgtgcaattgaaggagatttatttaggaaactgtgtctatttcataacatcagagttggtaataatttcacaggtgacaagaatacttgggttgagtggaaagaaaaaaaggttaaatcaatacccacgtctgtcaaatgataaaaaaaaggggggaatattctcgttcatatggacatgacctca

SEQ ID NO: 5480 - DNA, 577 bp, Chicken  19866894109080_2
aagtacatagtgtacgtgaaattcagaaagattaaggagtaatgtttaatcaaaaggtctctgcacagcataaaagcgtgcagtcggcaacatcatgccctgtctgagctggcccacaaagaagcacagtacatagtgatgacccaccttaccagcgctctaacatcataactgaagcaccaggcacctacaggtatatctatcctaaacttctttgggctattagtcattatgataacaaaatgctttcctagcagcgtcaaagggagcagcaaaactttggattgtggataggaagayctcagcagggcaaatacattacttgatgaaaatttgttaatgccttgatcattacttactaccctgtttttttgcagggctctgtgcactggcaccctgcacactaatgtcacaccacagccacgtgtcacatggccaccccaaaatggtcattccacgtctcccatagcaggacaatgggccagtctggaaactaacgttcactctgtgtcattagaaattatcggggctgtacattttctgtagtacattggtaaactgtggactgggctgaaag

SEQ ID NO: 5481 - DNA, 599 bp, Chicken  19866894109084_1
  misc_feature (1)..(202): n is any nucleotide
nnnnnnnnnnnnnnnnnnnnnnnnnnnnnnnnnnnnnnnnnnnnnnnnnnnnnnnnnnnnnnnnnnnnnnnnnnnnnnnnnnnnnnnnnnnnnnnnnnnnnnnnnnnnnnnnnnnnnnnnnnnnnnnnnnnnnnnnnnnnnnnnnnnnnnnnnnnnnnnnnnnnnnnnnnnnnnnnnnnnnnnnnnnnnnnnnnnnnnnnnnttcactcaccccaaatgttaacttttatctgggtcttcagatcgtgccaataacacctacttaactctttttcttctcttcatcctgttctcactcamgtttctctgtttttgctgcaatagcaygtgcttctytctgaagtgttttcctttcttggaaagtacacagatctatattcttgatgtagtacagccctgaaaacgyactcttgagctgtagctttcccctcatgaaattaggataaagtatctattatcagtacttctaaactattaatattttttgtttatgaacaggaagactacatatttaagactgatcttcaaagtgcttgagcttgttacttctagagctgtaacttctagttcttgaagatccagacctcctcattaggcag

SEQ ID NO: 5482 - DNA, 599 bp, Chicken  19866894109084_2
  misc_feature (1)..(175): n is any nucleotide
nnnnnnnnnnnnnnnnnnnnnnnnnnnnnnnnnnnnnnnnnnnnnnnnnnnnnnnnnnnnnnnnnnnnnnnnnnnnnnnnnnnnnnnnnnnnnnnnnnnnnnnnnnnnnnnnnnnnnnnnnnnnnnnnnnnnnnnnnnnnnnnnnnnnnnnnnnnnnnnnnnnnnnnnnnnnnnnttcactcaccccaaatgttaacttttatctgggtcttcagatcgtgccaataacacctacttaactctttttcttctcttcatcctgttctcactcamgtttctctgtttttgctgcaatagcaygtgcttctytctgaagtgttttcctttcttggaaagtacacagatctatattcttgatgtagtacagccctgaaaacgyactcttgagctgtagctttcccctcatgaaattaggataaagtatctattatcagtacttctaaactattaatattttttgtttatgaacaggaagactacatatttaagactgatcttcaaagtgcttgagcttgttacttctagagctgtaacttctagttcttgaagatccagacctcctcattaggcagataatctgaagactggatatatgccat

SEQ ID NO: 5483 - DNA, 599 bp, Chicken  19866894109084_3
  misc_feature (1)..(166): n is any nucleotide
nnnnnnnnnnnnnnnnnnnnnnnnnnnnnnnnnnnnnnnnnnnnnnnnnnnnnnnnnnnnnnnnnnnnnnnnnnnnnnnnnnnnnnnnnnnnnnnnnnnnnnnnnnnnnnnnnnnnnnnnnnnnnnnnnnnnnnnnnnnnnnnnnnnnnnnnnnnnnnnnnnnnnnttcactcaccccaaatgttaacttttatctgggtcttcagatcgtgccaataacacctacttaactctttttcttctcttcatcctgttctcactcamgtttctctgtttttgctgcaatagcaygtgcttctytctgaagtgttttcctttcttggaaagtacacagatctatattcttgatgtagtacagccctgaaaacgyactcttgagctgtagctttcccctcatgaaattaggataaagtatctattatcagtacttctaaactattaatattttttgtttatgaacaggaagactacatatttaagactgatcttcaaagtgcttgagcttgttacttctagagctgtaacttctagttcttgaagatccagacctcctcattaggcagataatctgaagactggatatatgccatttttagaaa

SEQ ID NO: 5484 - DNA, 599 bp, Chicken  19866894109084_4
  misc_feature (1)..(96): n is any nucleotide
nnnnnnnnnnnnnnnnnnnnnnnnnnnnnnnnnnnnnnnnnnnnnnnnnnnnnnnnnnnnnnnnnnnnnnnnnnnnnnnnnnnnnnnnnnnnnnnnttcactcaccccaaatgttaacttttatctgggtcttcagatcgtgccaataacacctacttaactctttttcttctcttcatcctgttctcactcamgtttctctgtttttgctgcaatagcaygtgcttctytctgaagtgttttcctttcttggaaagtacacagatctatattcttgatgtagtacagccctgaaaacgyactcttgagctgtagctttcccctcatgaaattaggataaagtatctattatcagtacttctaaactattaatattttttgtttatgaacaggaagactacatatttaagactgatcttcaaagtgcttgagcttgttacttctagagctgtaacttctagttcttgaagatccagacctcctcattaggcagataatctgaagactggatatatgccatttttagaaaaactgcagtgtagtgcagaacaacagaaaaatgccttagagccaactcaagtaaaaccaagcacgttcag

SEQ ID NO: 5485 - DNA, 600 bp, Chicken  19866894109084_5
aagtatctattatcagtacttctaaactattaatattttttgtttatgaacaggaagactacatatttaagactgatcttcaaagtgcttgagcttgttacttctagagctgtaacttctagttcttgaagatccagacctcctcattaggcagataatctgaagactggatatatgccatttttagaaaaactgcagtgtagtgcagaacaacagaaaaatgccttagagccaactcaagtaaaaccaagcacgttcagaatgtcactgaaatcccctcttaacaaacaaacaaaaaamccccaacacatcaaatttgaagatacttggaaagatgaaatcaacgtattgaagattctctgcacaagtcaatctaggtagtatccgttgctatataacctgatcctcttcctgcaccaataataaaaatgatacattatttttgatcctttgtctgtatggctctcctgctttcagcaaggttgaggtgaggggaggaaatgttttctgtgtttcagcaagagcattatatttaagtgaggagttatttatactcagatagcaaaagcatacagcaattatatgttatcacagatgcca

SEQ ID NO: 5486 - DNA, 600 bp, Chicken  19866894109094_1
tctgctctgacagctcaagacatggatatgtgcattggggaaagcagactcagtcaattgattttatagctcctgctgagtactcatccgcatctttgatctgaggctggtaactgtttcagtgtaaaacctttcctttataaagaagcttgaatattttagcagggtagaattcaagcggggagggagcttccatgcagatagcaaataactttccattcagtcaccttctgcttgaggagtgtttgcagtaggtacaaaattatggcagtgtgaatgttggcgtgctgtgagtgcaakctgaaattatgaagtaaaacagtgataaatgttgcctattatgtgacaccacctattaggcaagaatgatctgtttgtgctgcgtgctgcatcgtttatttttgcattatatatacatggtcccctgtcccgtatcattcattgattctccacactgcatcctgctgatcctcaccggtttcaaaacagatttgtttgctccagtgattttgatgtaattacagagaatcacaccctcccagctctcaggtccaccagaacccagcaagcagcagctaccwgcagccaccagcacggaac

SEQ ID NO: 5487 - DNA, 600 bp, Chicken  19866894109094_10
tctttccaaatcatccacagggcccgatgttgcaatgccagcaatggagaacagctccagagaaaagaacaacgaacctgcggggaaaagccccgrattccaaagctttgcagctccccaccacggccctgctggaaggagcagcagtgcaccaagcaaaggtgcaaagcaaatactcaggagcctccatttgcaaagccagtgccacgatgacctcaggcagagcgggcacctgggagataccatgaagggaaaggttctgcagcagtaccayccgccttcacctggacctcaggacayggctccctctgcctttagtgcaggaaagagaagggctgcattaataacagctggagccaaggccagcagctctggaagcatccgcagagggaaaagcacatctcctcggagatggacgcctgtgcagaaagggcctgagaaggaaaaccaggaacagcctccaaagaggagggtaaagcttaaaaaacctcacccctacagccgtgacgtcgttcaggagttcatgtgtaggaagaatgaagagagaaggaaaaaaaagctggaagagaaaaagtctgtgatgcaggcagtggaaatgag

SEQ ID NO: 5488 - DNA, 600 bp, Chicken  19866894109094_2
ggcgtgctgtgagtgcaakctgaaattatgaagtaaaacagtgataaatgttgcctattatgtgacaccacctattaggcaagaatgatctgtttgtgctgcgtgctgcatcgtttatttttgcattatatatacatggtcccctgtcccgtatcattcattgattctccacactgcatcctgctgatcctcaccggtttcaaaacagatttgtttgctccagtgattttgatgtaattacagagaatcacaccctcccagctctcaggtccaccagaacccagcaagcagcagctaccwgcagccaccagcacggaacgatgctccccaacgctcatgtctgtttcaggttcaaagctccccggtgcttctgcatggagggaaggtcagaagttagccaggaagctgctcggtccaccgcctgcatttccaaagctgagaagcagagctgaagagcagagcactggaaatgcctatggtactgctgtcctctctgctacaccgctcgtttttggcacacaaacaaaaacgtggttggccgtttgtgraataaatggcttcaaggtcattctaagcaagtgtaagaggtttaagagtgag

SEQ ID NO: 5489 - DNA, 600 bp, Chicken  19866894109094_3
cacaccctcccagctctcaggtccaccagaacccagcaagcagcagctaccwgcagccaccagcacggaacgatgctccccaacgctcatgtctgtttcaggttcaaagctccccggtgcttctgcatggagggaaggtcagaagttagccaggaagctgctcggtccaccgcctgcatttccaaagctgagaagcagagctgaagagcagagcactggaaatgcctatggtactgctgtcctctctgctacaccgctcgtttttggcacacaaacaaaaacgtggttggccgtttgtgraataaatggcttcaaggtcattctaagcaagtgtaagaggtttaagagtgagtttcattgcccttstatgttgcattctatccacactctgaggggccacaatctacatcatttgtataattggasactgctaaaattagcrgagatttgtctyctctctgcaacactgaggatttgacagcagtcctcagccccgcggtaggaggcgtgctgtgagatgcacacagatgcaggagttgtctcaccaccaaagaaataacaccactgctctttccaaatcatccacagggcccgatgttg

SEQ ID NO: 5490 - DNA, 600 bp, Chicken  19866894109094_4
ggaacgatgctccccaacgctcatgtctgtttcaggttcaaagctccccggtgcttctgcatggagggaaggtcagaagttagccaggaagctgctcggtccaccgcctgcatttccaaagctgagaagcagagctgaagagcagagcactggaaatgcctatggtactgctgtcctctctgctacaccgctcgtttttggcacacaaacaaaaacgtggttggccgtttgtgraataaatggcttcaaggtcattctaagcaagtgtaagaggtttaagagtgagtttcattgcccttstatgttgcattctatccacactctgaggggccacaatctacatcatttgtataattggasactgctaaaattagcrgagatttgtctyctctctgcaacactgaggatttgacagcagtcctcagccccgcggtaggaggcgtgctgtgagatgcacacagatgcaggagttgtctcaccaccaaagaaataacaccactgctctttccaaatcatccacagggcccgatgttgcaatgccagcaatggagaacagctccagagaaaagaacaacgaacctgcggggaaaagccccgrat

SEQ ID NO: 5491 - DNA, 600 bp, Chicken  19866894109094_5
atggagggaaggtcagaagttagccaggaagctgctcggtccaccgcctgcatttccaaagctgagaagcagagctgaagagcagagcactggaaatgcctatggtactgctgtcctctctgctacaccgctcgtttttggcacacaaacaaaaacgtggttggccgtttgtgraataaatggcttcaaggtcattctaagcaagtgtaagaggtttaagagtgagtttcattgcccttstatgttgcattctatccacactctgaggggccacaatctacatcatttgtataattggasactgctaaaattagcrgagatttgtctyctctctgcaacactgaggatttgacagcagtcctcagccccgcggtaggaggcgtgctgtgagatgcacacagatgcaggagttgtctcaccaccaaagaaataacaccactgctctttccaaatcatccacagggcccgatgttgcaatgccagcaatggagaacagctccagagaaaagaacaacgaacctgcggggaaaagccccgrattccaaagctttgcagctccccaccacggccctgctggaaggagcagcagtgcaccaagca

SEQ ID NO: 5492 - DNA, 600 bp, Chicken  19866894109094_6
aagttagccaggaagctgctcggtccaccgcctgcatttccaaagctgagaagcagagctgaagagcagagcactggaaatgcctatggtactgctgtcctctctgctacaccgctcgtttttggcacacaaacaaaaacgtggttggccgtttgtgraataaatggcttcaaggtcattctaagcaagtgtaagaggtttaagagtgagtttcattgcccttstatgttgcattctatccacactctgaggggccacaatctacatcatttgtataattggasactgctaaaattagcrgagatttgtctyctctctgcaacactgaggatttgacagcagtcctcagccccgcggtaggaggcgtgctgtgagatgcacacagatgcaggagttgtctcaccaccaaagaaataacaccactgctctttccaaatcatccacagggcccgatgttgcaatgccagcaatggagaacagctccagagaaaagaacaacgaacctgcggggaaaagccccgrattccaaagctttgcagctccccaccacggccctgctggaaggagcagcagtgcaccaagcaaaggtgcaaagcaaat

SEQ ID NO: 5493 - DNA, 600 bp, Chicken  19866894109094_7
aagctgctcggtccaccgcctgcatttccaaagctgagaagcagagctgaagagcagagcactggaaatgcctatggtactgctgtcctctctgctacaccgctcgtttttggcacacaaacaaaaacgtggttggccgtttgtgraataaatggcttcaaggtcattctaagcaagtgtaagaggtttaagagtgagtttcattgcccttstatgttgcattctatccacactctgaggggccacaatctacatcatttgtataattggasactgctaaaattagcrgagatttgtctyctctctgcaacactgaggatttgacagcagtcctcagccccgcggtaggaggcgtgctgtgagatgcacacagatgcaggagttgtctcaccaccaaagaaataacaccactgctctttccaaatcatccacagggcccgatgttgcaatgccagcaatggagaacagctccagagaaaagaacaacgaacctgcggggaaaagccccgrattccaaagctttgcagctccccaccacggccctgctggaaggagcagcagtgcaccaagcaaaggtgcaaagcaaatactcaggagcct

SEQ ID NO: 5494 - DNA, 600 bp, Chicken  19866894109094_8
tstatgttgcattctatccacactctgaggggccacaatctacatcatttgtataattggasactgctaaaattagcrgagatttgtctyctctctgcaacactgaggatttgacagcagtcctcagccccgcggtaggaggcgtgctgtgagatgcacacagatgcaggagttgtctcaccaccaaagaaataacaccactgctctttccaaatcatccacagggcccgatgttgcaatgccagcaatggagaacagctccagagaaaagaacaacgaacctgcggggaaaagccccgrattccaaagctttgcagctccccaccacggccctgctggaaggagcagcagtgcaccaagcaaaggtgcaaagcaaatactcaggagcctccatttgcaaagccagtgccacgatgacctcaggcagagcgggcacctgggagataccatgaagggaaaggttctgcagcagtaccayccgccttcacctggacctcaggacayggctccctctgcctttagtgcaggaaagagaagggctgcattaataacagctggagccaaggccagcagctctggaagcatccgcagagggaaaag

SEQ ID NO: 5495 - DNA, 600 bp, Chicken  19866894109094_9
caccaccaaagaaataacaccactgctctttccaaatcatccacagggcccgatgttgcaatgccagcaatggagaacagctccagagaaaagaacaacgaacctgcggggaaaagccccgrattccaaagctttgcagctccccaccacggccctgctggaaggagcagcagtgcaccaagcaaaggtgcaaagcaaatactcaggagcctccatttgcaaagccagtgccacgatgacctcaggcagagcgggcacctgggagataccatgaagggaaaggttctgcagcagtaccayccgccttcacctggacctcaggacayggctccctctgcctttagtgcaggaaagagaagggctgcattaataacagctggagccaaggccagcagctctggaagcatccgcagagggaaaagcacatctcctcggagatggacgcctgtgcagaaagggcctgagaaggaaaaccaggaacagcctccaaagaggagggtaaagcttaaaaaacctcacccctacagccgtgacgtcgttcaggagttcatgtgtaggaagaatgaagagagaaggaaaaaaaagctggaagagaaaaag

SEQ ID NO: 5496 - DNA, 599 bp, Chicken  19866894109095_1
  misc_feature (1)..(34): n is any nucleotide
nnnnnnnnnnnnnnnnnnnnnnnnnnnnnnnnnnttttttgaaatattggtttccctttgcatttacttcttctttctttaatagagattagctgtcatccagtgcaataggaattgcacagttcagactttcaaatcttcctatatatttttaaataatcaaagctgttatgaattttgctaactgatcttttaaagctaaattaatgtttcataaagggtagaaattgaaattgaggcgggtaccaatcttgggattcaaatatcagaccatcttactttctatattatttatattawtkattcctggaattacagttaaattggcctattgttaggaaagccagtaataaatgtcagtgtgctgatgcctttgaaaaataactagtaaagtaaaagcttgcacacattcagcctatattttaggtaaggggtcagcatcatcaacaattcctgcttgacttttcttgcaaaaattttaagcttctaaatctttttttttgccttttattcataggtaacttcttttatattctgacttacaaaaactttccataatatttttcaagaaaaaagaaaaaagmaaaaaacaaaaaaca

SEQ ID NO: 5497 - DNA, 599 bp, Chicken  19866894109095_2
  misc_feature (1)..(32): n is any nucleotide
nnnnnnnnnnnnnnnnnnnnnnnnnnnnnnnnttttttgaaatattggtttccctttgcatttacttcttctttctttaatagagattagctgtcatccagtgcaataggaattgcacagttcagactttcaaatcttcctatatatttttaaataatcaaagctgttatgaattttgctaactgatcttttaaagctaaattaatgtttcataaagggtagaaattgaaattgaggcgggtaccaatcttgggattcaaatatcagaccatcttactttctatattatttatattawtkattcctggaattacagttaaattggcctattgttaggaaagccagtaataaatgtcagtgtgctgatgcctttgaaaaataactagtaaagtaaaagcttgcacacattcagcctatattttaggtaaggggtcagcatcatcaacaattcctgcttgacttttcttgcaaaaattttaagcttctaaatctttttttttgccttttattcataggtaacttcttttatattctgacttacaaaaactttccataatatttttcaagaaaaaagaaaaaagmaaaaaacaaaaaacagt

SEQ ID NO: 5498 - DNA, 600 bp, Chicken  19866894109095_3
atattatttatattawtkattcctggaattacagttaaattggcctattgttaggaaagccagtaataaatgtcagtgtgctgatgcctttgaaaaataactagtaaagtaaaagcttgcacacattcagcctatattttaggtaaggggtcagcatcatcaacaattcctgcttgacttttcttgcaaaaattttaagcttctaaatctttttttttgccttttattcataggtaacttcttttatattctgacttacaaaaactttccataatatttttcaagaaaaaagaaaaaagmaaaaaacaaaaaacagtgtactttgtagattaaaacaatttctaacattaaagaagattaaggttgttttgatcattttatcttgttctgagacctgaatgtgcaagcttttggaactgaatagtctgtgcattccacttctccaagttctttccttaagctgttggattattagaaggaactgagttaaccatttaggcagagtgtcaggtgtgcctatcaacagttataactgattatatactctgctgtgtatatcatttcctgactgaatactgacagaaaaaaatggttgttgag

SEQ ID NO: 5499 - DNA, 600 bp, Chicken  19866894109101_1
ccaacggttctggtagtagggatgtgtgaaaactccttaccgcgtggtttgtcatctggcagcatttccatctgcttggagctaacatgaattttaatttagtacaacgaagtaccttgctgctgagagtcatttctaagcagcgctgaaagcagtgtgtgttaaagtgcagcatctgaatactaagctgcccttctgggacgctgtgcaaaatgatgtaactgagtgaaaaggctctgcaggaataaacctcatcttctcccttgttgtagctcagtgtcaccacagcagaacttccaygaggcttgtgtatgaagcttgcttgactgtgtggttagattgtgttgtatgaaaaagggttctgactgtaacagctacagatcttgaggttttattttgctgtcctgagcctgtgcttcagcactactgcaaagagagaacacttaaggaagctttaaatgcttctggggtaagtttgcaaagtatttcgcttctgaaaaattgaggttccccttttcaaatgctttactgtttgtgctttggcaaaaggttcagataatcacctgttcctctctcacagcctattctaggtattcacat

SEQ ID NO: 5500 - DNA, 463 bp, Chicken  19866894109101_2
gcttgactgtgtggttagattgtgttgtatgaaaaagggttctgactgtaacagctacagatcttgaggttttattttgctgtcctgagcctgtgcttcagcactactgcaaagagagaacacttaaggaagctttaaatgcttctggggtaagtttgcaaagtatttcgcttctgaaaaattgaggttccccttttcaaatgctttactgtttgtgctttggcaaaaggttcagataatcacctgttcctctctcacagcctattctaggtattcacattcctacaacagattagagamgttgttgctactgaaataaaataaatggtgatctttgatgaatatgatgatactaatgagagatgaatgcatgtcagtttagtaatttcgacgttgctgctataattgctagaaatgtttgatagctctgaagtagactaggtagctcatctttctcccagca

SEQ ID NO: 5501 - DNA, 600 bp, Chicken  19866894109121_1
gaggagcggctctggaaaattcatgttccaatggaaaaaaaaaaaaaaggaaaaaaaaattaagcttaatgcactgctgtgttaggtgagcctaagtggaaaattccagtttgaactcaagtcttctttctggtatctgtatccttccatagggtctggcccttgtaacttaaaaagctaagttctggatccaaagctcactccacccagaacagtaatatatttctttgtcactatatttgctctccttggataagataatcctctactacaatagatagaaagagaaaaaaggtgccrttttgcctatgtgtgttcttaatcattctatctatctcagagcctcctagccatgcagcattactgtactacaagcctatacacacctcacagtgacaaacgtcccttggctaacagctgtcagcacagtatcttcaatgtatttcagaataattctaggcttggaatagcttatgaagaattggagtatttacttcatagtgagggaagctgcagtgcaaggtatgactgacaggatgacacggggatcgtgctcccaggagaatgcaggctcccagcactcatcctcacattgcaggt

SEQ ID NO: 5502 - DNA, 599 bp, Chicken  19866894109123_1
  misc_feature (1)..(34): n is any nucleotide
nnnnnnnnnnnnnnnnnnnnnnnnnnnnnnnnnnatttaaagattcacgcagcgttttcccgcagtgtttatatagccgctgggcagttgacaagtagttttgcagagaataacggttgcactgtatccttcccatggtacagagagagacacatacggcaatagaagggatgggggcttcgaataggccagcacaacttgttccaattgtggaggctgctgcctttgttactgacggtgtgtgcattcagggcgtgcaagcctccttctgtgtccctggtttgtccagtccacactgtkctcacttcatgtccaaagctcctttatctcctcacgcactgaggctttgcttccaccacacgatgtctccttaatctctgtaatcccagttcctcaccagaacaaactctgtgcgctggggagggatggcaggggtgagccaggagaggccgcacaygttggttctgctcggacacctcctttggcagggcagagaaggcaacagagaattattcaaagccccttggaggattttccatkgattacagcaccagccttwcctgtatttgcaggtctaacatcacacaaaaccttctgaa

SEQ ID NO: 5503 - DNA, 600 bp, Chicken  19866894109123_2
ggcaatagaagggatgggggcttcgaataggccagcacaacttgttccaattgtggaggctgctgcctttgttactgacggtgtgtgcattcagggcgtgcaagcctccttctgtgtccctggtttgtccagtccacactgtkctcacttcatgtccaaagctcctttatctcctcacgcactgaggctttgcttccaccacacgatgtctccttaatctctgtaatcccagttcctcaccagaacaaactctgtgcgctggggagggatggcaggggtgagccaggagaggccgcacaygttggttctgctcggacacctcctttggcagggcagagaaggcaacagagaattattcaaagccccttggaggattttccatkgattacagcaccagccttwcctgtatttgcaggtctaacatcacacaaaaccttctgaatgtgacccagccttcagcactgagataccacctgctgcgggtgctaccagcagagagaagctttttgagtgagatttcaggctgagggcaggctctacgcagacgttagtctgggtgcaggaaamaacaggcttgcatggaaagtttattccaaagaa

SEQ ID NO: 5504 - DNA, 600 bp, Chicken  19866894109123_3
tgtgcattcagggcgtgcaagcctccttctgtgtccctggtttgtccagtccacactgtkctcacttcatgtccaaagctcctttatctcctcacgcactgaggctttgcttccaccacacgatgtctccttaatctctgtaatcccagttcctcaccagaacaaactctgtgcgctggggagggatggcaggggtgagccaggagaggccgcacaygttggttctgctcggacacctcctttggcagggcagagaaggcaacagagaattattcaaagccccttggaggattttccatkgattacagcaccagccttwcctgtatttgcaggtctaacatcacacaaaaccttctgaatgtgacccagccttcagcactgagataccacctgctgcgggtgctaccagcagagagaagctttttgagtgagatttcaggctgagggcaggctctacgcagacgttagtctgggtgcaggaaamaacaggcttgcatggaaagtttattccaaagaaacactgtagattgtatttggaagcacgtggggggttatctacacaagccragtgttatgttttctgattgtccaataaaatag

SEQ ID NO: 5505 - DNA, 600 bp, Chicken  19866894109123_4
agcctccttctgtgtccctggtttgtccagtccacactgtkctcacttcatgtccaaagctcctttatctcctcacgcactgaggctttgcttccaccacacgatgtctccttaatctctgtaatcccagttcctcaccagaacaaactctgtgcgctggggagggatggcaggggtgagccaggagaggccgcacaygttggttctgctcggacacctcctttggcagggcagagaaggcaacagagaattattcaaagccccttggaggattttccatkgattacagcaccagccttwcctgtatttgcaggtctaacatcacacaaaaccttctgaatgtgacccagccttcagcactgagataccacctgctgcgggtgctaccagcagagagaagctttttgagtgagatttcaggctgagggcaggctctacgcagacgttagtctgggtgcaggaaamaacaggcttgcatggaaagtttattccaaagaaacactgtagattgtatttggaagcacgtggggggttatctacacaagccragtgttatgttttctgattgtccaataaaatagatttacataggagcaagga

SEQ ID NO: 5506 - DNA, 600 bp, Chicken  19866894109123_5
gatggcaggggtgagccaggagaggccgcacaygttggttctgctcggacacctcctttggcagggcagagaaggcaacagagaattattcaaagccccttggaggattttccatkgattacagcaccagccttwcctgtatttgcaggtctaacatcacacaaaaccttctgaatgtgacccagccttcagcactgagataccacctgctgcgggtgctaccagcagagagaagctttttgagtgagatttcaggctgagggcaggctctacgcagacgttagtctgggtgcaggaaamaacaggcttgcatggaaagtttattccaaagaaacactgtagattgtatttggaagcacgtggggggttatctacacaagccragtgttatgttttctgattgtccaataaaatagatttacataggagcaaggaagaaataaggcattttataagactgtttcccaacctccgtgaactaaggaatcttgatttaaagctgctcagtgcccagcaagaggaaatagtttagactatatatgaaaagagaataatggctccatcaggtagcctgtcagcttgggaaaatagagccaggtt

SEQ ID NO: 5507 - DNA, 600 bp, Chicken  19866894109123_6
aattattcaaagccccttggaggattttccatkgattacagcaccagccttwcctgtatttgcaggtctaacatcacacaaaaccttctgaatgtgacccagccttcagcactgagataccacctgctgcgggtgctaccagcagagagaagctttttgagtgagatttcaggctgagggcaggctctacgcagacgttagtctgggtgcaggaaamaacaggcttgcatggaaagtttattccaaagaaacactgtagattgtatttggaagcacgtggggggttatctacacaagccragtgttatgttttctgattgtccaataaaatagatttacataggagcaaggaagaaataaggcattttataagactgtttcccaacctccgtgaactaaggaatcttgatttaaagctgctcagtgcccagcaagaggaaatagtttagactatatatgaaaagagaataatggctccatcaggtagcctgtcagcttgggaaaatagagccaggttcgtgtgtaggaaagcagggtgaatgatctgctctcccaggaaagggcttcagtgaggcgtttaatgagactagaacagactta

SEQ ID NO: 5508 - DNA, 600 bp, Chicken  19866894109128_1
tgatgggttcctatataatttcacccagcttcttaaccacaaagaatacagaaaatcaaggaactgttcatactttttctcatatttagtgcgagagacatttcatttactattagtcattttcaatgctttaaagattgacaacttgcattttaataaattgataccataatttgtgataattattttttctttactatatcctgtgatactactttgcttgcaggtataagagggctgtcaaaaagctgcagagttacacccctggaggagggaggagtgtggctctccattgttacyagtctacttcaacttcccagatgaaagaaacccctagacaggaagaagtctagcatgctcagcagattgagttctcctctactactctggttgaagtggatatattccatctactcgtatttatttcctattgcaaaaccagcacactccatatggcaatctgatggacacattggcccagcgcctgcatttcaaaaaggatgctgaaaaccattgaaaaccattcagaaggaagataatagaatgatctgaagtatatgtttgaggtactacagagaggtagaatttagaaactaagat

SEQ ID NO: 5509 - DNA, 600 bp, Chicken  19866894109133_1
gaaattagttctgtgttcactttcacagcccagcacacacgtttatctggtactaacctcgctcctgctttgtttccacagaaattttactggttccatattaattaaattaagtcagaaacagacaatacttcacaaaggaccctctaatcagtggctaataagggcgggctgcaatacagcgtttatgcaaaatggggaagattgttttccaaagacaaatcacagctccaaagggtgagctactgcctccccacctatcaagggtagaaattaagatgatctttattattatgtgaygcttcggattaggtgagattgacttccaacaagtctcattccctataggaagaattgagctacttgtaacatacagacaatgcattcttcttttaggagaaaagctgcagatagaatgagtcagcagcagatgctcagccaggtccccaccgccagccctgcccaggagctgcacccatggggaagccgtatggctctcaaagaccccagcacaagaaaaatctccctgtgaggctgcctgccttccccggcacaacgcaggaacccaacctgcccacaagcccggccaccacggaggca

SEQ ID NO: 5510 - DNA, 600 bp, Chicken  19866894109133_2
agcagatgctcagccaggtccccaccgccagccctgcccaggagctgcacccatggggaagccgtatggctctcaaagaccccagcacaagaaaaatctccctgtgaggctgcctgccttccccggcacaacgcaggaacccaacctgcccacaagcccggccaccacggaggcaatgcaagcagctctgagtgcttggcagctctgccaggagcacagggctgtgtgccagcagagcatgcaccctgctccgatggagggggcagagcccaattaacgacacccatccttaacagtcarcaaacaccgcacaaacagctcgtttgggaattttttctttctgagagcttccatgcactaacagtaactattgcaggcatgcatttattagtacagaaagatttttatctgagagatctgcaatcagcttaacctctggaagcgcagcctgatgtaacttagcccctggccagagtttctcagctgctgttacatggggaggctgtgtccagcagtggggctggctcagagcagtgtgggtgacaccggcagggctgggtgctagactgcaacatgggggccagaagcacctcagtgtga

SEQ ID NO: 5511 - DNA, 600 bp, Chicken  19866894109139_1
ttaagccatggtgctttccctccaggactgccatcctgaattataacaaaatgcaccatcagtggctatgttatcgaacaagcaagccaaaagtagcagcgctcctaaataaaggtggtacggactcacccactgtgaaggattctaggttggcaatcctcagagacaaaagggcccttctgtatttctagattaggcattctggaggtagaatataggagtccctccctgcgactggatttccctaatggctgaatgatggcagttccatgctgattgtgttgactttaggtaatgccrtagttggcgtgctacctgttcactcagctgcctcgtgcagaaacatccattcctctgcatcacttaaagtgtttggacacggcctaaagtcatgtctttgctctgagggttaagtatcgtagggcacgggagctgttgtgcctggcacgtgggtttcatcttccggacatggccagaagtgctttaaatgctgggttgtcctggtcatttaggtaggctgatgactgcaattactagggtgggtatgttaatgggatgactgttgacattattaacttattaaacagcttctgtatgaca

SEQ ID NO: 5512 - DNA, 600 bp, Chicken  19866894109147_1
ataaaaggccatgtgtacaaatgctgtgagaggagaggatgggaagaaaaaagagcaagttatagaaatttttgtttccttcaaaagtttttctggtgattgtagtccactttggattgaacacctgagtgaaatggctataaatatgtatgctgttaattcaagaaattttcaagactgaaaatggaaaaacattctccacatttaagtacaagtcttctcataagtcctgtaggttatccagtgtaattgtttctcattttaattgcatgaactgcctcaaattttctatttaagcaytcttcaatcagtttatgtgtgaacttgacttttcctaagtataaatatattcccgagaaaagggaatcattctgttaatgaaatggaccagaaaaaaatgaagtagaccaggacattctgggaatatcacttggaacctgagatatgtttacaggggcttaggccttatacacaatggctggaagtgcaatatgtcagtggatgcaaagtctgagaatgcaaggtccttaacataaatcataacatttttcattctagaaaacctttgtttttcactttgaaggcttaattgaaacttgg

SEQ ID NO: 5513 - DNA, 600 bp, Chicken  19866894109151_1
gtccgctggcacctgcgccacttctgctgctttgaatgcgaggggccgctgggggggcagcgctacgtcatgcgccgcggccgcccctactgcgcccgctgccaccgcgcgcggcacgccgagttctgcgacgcctgcggggaccccatcggtgagtcggccccggaggagcctctgaaaatggcacttttctgctctaaaaacggctgaaaatggcgcttttctgctctaaaaacggctgaaaatggcaaccgtgtctgaaaattgcgctttgctgccacaaagtggctgaaaattgcrctttgctgccacaaagtggctgaaaattgcactttgctgccacaaagtggctgaaaattgctcaaaatggcgcttttctgctctaaaagcggctgaaaatggtgcttttctgcactgtgtctgaaaattgcactttgctgccacaaagtggctgaaaattgcactttgcagccacaaagcggctgaaaatgccattttttctgcctaaaaatggctgaaaatggctgaaaatggcacttttctgctctaaaaacggctgaaaatggcaccgtgtctgaaaattgcactttgctgccacaa

SEQ ID NO: 5514 - DNA, 600 bp, Chicken  19866894109153_1
gagatatctgactgcttggagactcacagcctctcctccccattgaactcaatcccctttttgaattctcttctagctcttctaaccgtgctgctctccacctagctccccgcctgcctttcctcagggtgtccgtcccctcctggcacaggccatggggcccacaggaaagaaggggacctcctccttgctcctgggcacacagaatgtcctactggctgtagagcccacctgcctactggcattcctgcaatgagatagataccgcaaccaacctgcaaatactatggtcatcaagargggacagacctccttagctgctttcaagaacagagctgtgttttgttgctttgcttaatgtgatcctggtgcrttcctcatagtaaattgctaggttrtgggagggttaagttgtatcaatttttaaaattttattttattttttaactttctgacttttcagaaaagggatgcatcaagggaagatgaaggatgtaaggaagtagcaccattgagattaaagggaccaaattttaccagcaatcacagcaaatatctgacttgcttaagtgaagccaattactgtattattgcctcctt

SEQ ID NO: 5515 - DNA, 600 bp, Chicken  19866894109153_2
tagctcttctaaccgtgctgctctccacctagctccccgcctgcctttcctcagggtgtccgtcccctcctggcacaggccatggggcccacaggaaagaaggggacctcctccttgctcctgggcacacagaatgtcctactggctgtagagcccacctgcctactggcattcctgcaatgagatagataccgcaaccaacctgcaaatactatggtcatcaagargggacagacctccttagctgctttcaagaacagagctgtgttttgttgctttgcttaatgtgatcctggtgcrttcctcatagtaaattgctaggttrtgggagggttaagttgtatcaatttttaaaattttattttattttttaactttctgacttttcagaaaagggatgcatcaagggaagatgaaggatgtaaggaagtagcaccattgagattaaagggaccaaattttaccagcaatcacagcaaatatctgacttgcttaagtgaagccaattactgtattattgcctccttttgcactatgcacagtagggatgtcactggataatggtttgcatgtagagttaatcactttgatgcatttctg

SEQ ID NO: 5516 - DNA, 600 bp, Chicken  19866894109153_3
cacctagctccccgcctgcctttcctcagggtgtccgtcccctcctggcacaggccatggggcccacaggaaagaaggggacctcctccttgctcctgggcacacagaatgtcctactggctgtagagcccacctgcctactggcattcctgcaatgagatagataccgcaaccaacctgcaaatactatggtcatcaagargggacagacctccttagctgctttcaagaacagagctgtgttttgttgctttgcttaatgtgatcctggtgcrttcctcatagtaaattgctaggttrtgggagggttaagttgtatcaatttttaaaattttattttattttttaactttctgacttttcagaaaagggatgcatcaagggaagatgaaggatgtaaggaagtagcaccattgagattaaagggaccaaattttaccagcaatcacagcaaatatctgacttgcttaagtgaagccaattactgtattattgcctccttttgcactatgcacagtagggatgtcactggataatggtttgcatgtagagttaatcactttgatgcatttctgactgatcccagcaaattatgttttg

SEQ ID NO: 5517 - DNA, 491 bp, Chicken  19866894109154_1
catttagcactctactccataagaccatctgaagcaagctgttgacaattgcaagtgttgtacctggtagctttaccattttatttcagataaatatttaatttgctatgaacattttcaagtttacagaataggatgtgtgtgaattcagggaaagacagtaagctgacatcatgtgagttttaaattaactttttaaaaaagctttattgttgctgttatttctttggtagaagacaaataccaaggtattagacctagcactagaagacgttctcccattcctctccgtcatgtgcrtcccttgtttcaactaaactctgcttaaattattctgtcaaattagatactgctttcatggtatattcacaagggcttgcttcagcttatgttttactggctgcaggattgagtccagagagtggtggtcaatgtttcaatgtctgcatggagattggtgatgagtggtgtccccgggggttagtgctggg

SEQ ID NO: 5518 - DNA, 600 bp, Chicken  19866894109160_1
gattacatcccttgctggctaattctataatatttaagtacttttacagcgaccaagaactatgccagaacacagtcgctgctgtaaagcaataataggactggattagagcaaatatatgatcttcaaaatactatactttgttttcagcactatcctgatatccaccagctctaaagagattatcagttgccacccactcagactctgagacacacaagctttgaaacactcagtgacaccagtgctctcactgcactcatagttctaatacaacatgcatacggggattttgacccrgaaatagcttaatttaatggggaaaaatatttaattctcaatcaccttatatggaaatagttgcaaaactgtagctaaattgtgtcacaatagaaagatagaaaggtaatctggtcgtctgaaatttctcatattcgcagcaagacttcatcattattaaacactggaaggtcatgcccarctaatctcactgctcaaataaataattagaatgcagaatgcttccagagtatcagctgcattcrgacaacagaatgctaaactagattgccaaggcattgatacagcacaggttagcaa

SEQ ID NO: 5519 - DNA, 600 bp, Chicken  19866894109160_2
attatcagttgccacccactcagactctgagacacacaagctttgaaacactcagtgacaccagtgctctcactgcactcatagttctaatacaacatgcatacggggattttgacccrgaaatagcttaatttaatggggaaaaatatttaattctcaatcaccttatatggaaatagttgcaaaactgtagctaaattgtgtcacaatagaaagatagaaaggtaatctggtcgtctgaaatttctcatattcgcagcaagacttcatcattattaaacactggaaggtcatgcccarctaatctcactgctcaaataaataattagaatgcagaatgcttccagagtatcagctgcattcrgacaacagaatgctaaactagattgccaaggcattgatacagcacaggttagcaatcaaagtatgttacagacatactttaatacatttttgtcaaaagcatcttgaaaggtcaaatccagtgctatttttttactaaaaaaagagaaacaatgccacagatagacagctcagattctttgtttcctttccagagtaccgttttacaatgtttaatcatatttgccaacaatcaga

SEQ ID NO: 5520 - DNA, 600 bp, Chicken  19866894109160_3
tgctctcactgcactcatagttctaatacaacatgcatacggggattttgacccrgaaatagcttaatttaatggggaaaaatatttaattctcaatcaccttatatggaaatagttgcaaaactgtagctaaattgtgtcacaatagaaagatagaaaggtaatctggtcgtctgaaatttctcatattcgcagcaagacttcatcattattaaacactggaaggtcatgcccarctaatctcactgctcaaataaataattagaatgcagaatgcttccagagtatcagctgcattcrgacaacagaatgctaaactagattgccaaggcattgatacagcacaggttagcaatcaaagtatgttacagacatactttaatacatttttgtcaaaagcatcttgaaaggtcaaatccagtgctatttttttactaaaaaaagagaaacaatgccacagatagacagctcagattctttgtttcctttccagagtaccgttttacaatgtttaatcatatttgccaacaatcagaattaagatgttgttatcatcatcgttattaccagatcagagcacaggatgctagctttaacaat

SEQ ID NO: 5521 - DNA, 599 bp, Chicken  19866894109162_1
  misc_feature (1)..(128): n is any nucleotide
nnnnnnnnnnnnnnnnnnnnnnnnnnnnnnnnnnnnnnnnnnnnnnnnnnnnnnnnnnnnnnnnnnnnnnnnnnnnnnnnnnnnnnnnnnnnnnnnnnnnnnnnnnnnnnnnnnnnnnnnnnnnnnnngacggggatgaatggggacctctgtcctgtcctatacccagcgggcacacgcagccccgtgtgccatccctttgcctgtgggcacgcctccatccagtagcagaacatggggggaaggatgcaggttgggaccactgggtgagccaggaggggatgctgggggccgaccccrccctggggccacccagtcctgctccagctgctggaggggggcaccgggtcacagctccagaccctgccctgctgatggggcagcagctctgagcacatgggaggtgacacrtcacacttcccaaagggctgtgacatggagcagctgtgacacgtgcacacgcgtgtgccrgggagccacgctcagagccaggaccaacccttcctttcctctctttcccacagcatttttcatccctctgtcactccggaattatattttttcccccattttctgctcattttcacctctccccagct

SEQ ID NO: 5522 - DNA, 599 bp, Chicken  19866894109162_2
  misc_feature (1)..(17): n is any nucleotide
nnnnnnnnnnnnnnnnngacggggatgaatggggacctctgtcctgtcctatacccagcgggcacacgcagccccgtgtgccatccctttgcctgtgggcacgcctccatccagtagcagaacatggggggaaggatgcaggttgggaccactgggtgagccaggaggggatgctgggggccgaccccrccctggggccacccagtcctgctccagctgctggaggggggcaccgggtcacagctccagaccctgccctgctgatggggcagcagctctgagcacatgggaggtgacacrtcacacttcccaaagggctgtgacatggagcagctgtgacacgtgcacacgcgtgtgccrgggagccacgctcagagccaggaccaacccttcctttcctctctttcccacagcatttttcatccctctgtcactccggaattatattttttcccccattttctgctcattttcacctctccccagctgacaactttcctgatttaagcagtgcttgctctgccgagggcggcgaggagggggtgttcgctccatctccatcatttccctacacaagctctgccccggccgccctccat

SEQ ID NO: 5523 - DNA, 600 bp, Chicken  19866894109162_3
ggcacacgcagccccgtgtgccatccctttgcctgtgggcacgcctccatccagtagcagaacatggggggaaggatgcaggttgggaccactgggtgagccaggaggggatgctgggggccgaccccrccctggggccacccagtcctgctccagctgctggaggggggcaccgggtcacagctccagaccctgccctgctgatggggcagcagctctgagcacatgggaggtgacacrtcacacttcccaaagggctgtgacatggagcagctgtgacacgtgcacacgcgtgtgccrgggagccacgctcagagccaggaccaacccttcctttcctctctttcccacagcatttttcatccctctgtcactccggaattatattttttcccccattttctgctcattttcacctctccccagctgacaactttcctgatttaagcagtgcttgctctgccgagggcggcgaggagggggtgttcgctccatctccatcatttccctacacaagctctgccccggccgccctccattccacgtcctacagagctgataaaaataaacatgtttttgtttgcgtccgtttgagtggtt

SEQ ID NO: 5524 - DNA, 599 bp, Chicken  19866894109165_1
  misc_feature (1)..(153): n is any nucleotide
nnnnnnnnnnnnnnnnnnnnnnnnnnnnnnnnnnnnnnnnnnnnnnnnnnnnnnnnnnnnnnnnnnnnnnnnnnnnnnnnnnnnnnnnnnnnnnnnnnnnnnnnnnnnnnnnnnnnnnnnnnnnnnnnnnnnnnnnnnnnnnnnnnnnnnnnnttgccatatgggctgccataaagaaaatcaactctatcctgaccctaaagtcatgactgaaattttatcagaaattgtgagcagtgatgttctatttttcttcttcctgaaatacaagttaaatatgtagctaatagtttgatttcrtgaaatattatctccttgatctgtacgtcctaggagggtgttgtcagtgttcttgacttgactttgggtattgatcagagctgtcacagttgcctgctccttagtttcccaacctgccatttcaaaatggaaggcttatatccttcaatattttcagacccgrgatgtttaaacataaaaggtagcagtgctgtgttttctagctatggtaaataaagtacattgaaaaaagaacttgatggtggtgtaaaactaactgcagtaagctaatctgagagtttagttatataaggcagaag

SEQ ID NO: 5525 - DNA, 600 bp, Chicken  19866894109165_2
ggctgccataaagaaaatcaactctatcctgaccctaaagtcatgactgaaattttatcagaaattgtgagcagtgatgttctatttttcttcttcctgaaatacaagttaaatatgtagctaatagtttgatttcrtgaaatattatctccttgatctgtacgtcctaggagggtgttgtcagtgttcttgacttgactttgggtattgatcagagctgtcacagttgcctgctccttagtttcccaacctgccatttcaaaatggaaggcttatatccttcaatattttcagacccgrgatgtttaaacataaaaggtagcagtgctgtgttttctagctatggtaaataaagtacattgaaaaaagaacttgatggtggtgtaaaactaactgcagtaagctaatctgagagtttagttatataaggcagaagaaaactgtattttgtttctttgcctattcaaaaaaaaaaaaaatcaagatttacagcactaatagatagttctgacactacatgtttcatggatatttgtattatactatactattatactagttactatacctgttatgtattatttggtattaaattataga

SEQ ID NO: 5526 - DNA, 599 bp, Chicken  19866894109170_1
  misc_feature (1)..(71): n is any nucleotide
nnnnnnnnnnnnnnnnnnnnnnnnnnnnnnnnnnnnnnnnnnnnnnnnnnnnnnnnnnnnnnnnnnnnnnnctgaataaactctaaagtctttgacttccttcctacttattagctttcatttgtaaaaaataaaatgcacagtaagacaaacatttctattgtgaacaataaaagtcaccttatttatttatttatttattgaggacacagctgttctgatctatagaatgctgccttacttataaaaaagcagacttcacattaaacagtgtatgaccaaacaaactgtgatcatttracttcccagacagctggagttgaactcagaggcagctaattgccttggggacctttctctggcatgtagcccttttgtgctctggaggggtggagaggcttcacacagaaagcttaaaagcatctgggctgctgttgtgcagaatgctactgctgacagatttaccatctgtctttgagaaagacaacagttttgggaacccagatactaccattcttctgtagaaagccctttgtcaatcaaaacctcctcattagagaacagaacttgaattatggcaaagtgtactaagtaaaaaa

SEQ ID NO: 5527 - DNA, 599 bp, Chicken  19866894109176_1
  misc_feature (1)..(170): n is any nucleotide
nnnnnnnnnnnnnnnnnnnnnnnnnnnnnnnnnnnnnnnnnnnnnnnnnnnnnnnnnnnnnnnnnnnnnnnnnnnnnnnnnnnnnnnnnnnnnnnnnnnnnnnnnnnnnnnnnnnnnnnnnnnnnnnnnnnnnnnnnnnnnnnnnnnnnnnnnnnnnnnnnnnnnnnnnnctttccctggtattttctaagcctgtgatgaatatcagtagtcgttgatcacttactaacatggtatttgcatgtatttttttatttggagcttgtcctacagtgattatgaagtatgtacagaggttgyttaaacagagattctcttctcctgagtagtgttatgtataaagcttttaaacatcattcagttttcagcattcagtgttgcttgaacacttgtcatatccctcccaaattcttttttgcattctcaacgtgaacttttttatttagtgacctgctttcaattaaaaatgataaaatgggtctatgacatgtttatcatgagctgatttcaagtgctcatatattccgaaaagcaagtctgaggcaatagttggaaggcgcttactaaaacacgcagatacaaactcttagaataagaat

SEQ ID NO: 5528 - DNA, 525 bp, Chicken  19866894109176_2
acacttgtcatatccctcccaaattcttttttgcattctcaacgtgaacttttttatttagtgacctgctttcaattaaaaatgataaaatgggtctatgacatgtttatcatgagctgatttcaagtgctcatatattccgaaaagcaagtctgaggcaatagttggaaggcgcttactaaaacacgcagatacaaactcttagaataagaattctctggggaatctgccttgaacaactgcttgtgcagaattgtttcttgtcatccctacaacaactgcttaccaatgtgatttaargtctctggagatagtgagacaatttttaggaaacacatcctgcagaaaacaaatagtgccaaggcctttacttaggcctttatttgtacgtgaatgcgtacaaaactatataactgtgaatgttgtgagactgggtatgactctgtatttaaaaaacttaaataaaatttctgaaagttctagctggcaaggtgaaagcttccctgtttgctttttggatctcag

SEQ ID NO: 5529 - DNA, 600 bp, Chicken  19866894109178_1
aatatatttttacactgtttattaattttagaaagtgttaaatgtatcactttatcagtgtgagtgttaaagtaatgatgatgctatggatgtattaaactttccagagttgtctcatttaaattctaagaacgtattaacaatggaaaatctattttgtctcccatgttactatcaaagttttaggaaaaaagttgaagtacagcaatttgaatagcactgtaaaagcttggcatggaaagttgtagtgaaatctatactgtaaacaccattttttttaaagcaggagttctcataaartatgttactgctgttgactgactgtttaaatttgtacctttagttggtaaagtgatcaataaatgtgttactacatcattttctggttttcttgaagtaaattatgcttgctgttaaattttgttgcaacagttattttacagtgtagatgttaagcaaattgctaatgaatatataaattaaaaaaaatagatattcatgaacaggtagttctctgaatattgacagatttttatttttttttttaccacttcttttcctagttttgataatgaaactggtcttggcattgtggccaaa

SEQ ID NO: 5530 - DNA, 600 bp, Chicken  19866894109178_2
taaatttgtacctttagttggtaaagtgatcaataaatgtgttactacatcattttctggttttcttgaagtaaattatgcttgctgttaaattttgttgcaacagttattttacagtgtagatgttaagcaaattgctaatgaatatataaattaaaaaaaatagatattcatgaacaggtagttctctgaatattgacagatttttatttttttttttaccacttcttttcctagttttgataatgaaactggtcttggcattgtggccaaacaggaacaagagcctgcatacagtgytcataaaaatttgcacttccagaggtgatccacttgttgctgttgccactgctatatcacaccactcattgcctcactgtgctaacgttcactgtttgatttccatgaacatttggcagttttttctgcatgggaggaagccagtttcacatctttgcttcatacacttttctgtcatacatcttttgttggactgcgtctctgctgccatctgtagcatggcaaaaaaaataaacagtactgtcaggaaggttcagcttctactgccatatcacaaacatccacatctgatctagtggg

SEQ ID NO: 5531 - DNA, 600 bp, Chicken  19866894109212_1
gacagtttttctcaaggaaaaaaaaaaaaagatttctatgaaaacttcagttgcacttcctcccccccacacacttctttttgtacacttgttccagaagtgtttctactgcactccttaactcttagttgttccaaaacttcttgccctgaggaacatccagcggatttctcttggaccagcacacatttttcatagcctttggtagaaagttctacccatgtaacacgaatctcactaaggagagttctgagcagattttgtgacagagtcaatgtcactgaaggcatcataggcccraagaagatagctgtcccaactcggtgctcagatttgggattcccacaggcaccatatataagctctgaaattggctcgcttgcttggaagcaagtccagctcctgaaaccaatggaacaacttttgtggcggtcacatctccttccatccagctgttaaatcatttaaaggcagctaaaactacattcaattccccctcattaccgtcacttcccacgtaagcaaactgctgaagctgtctctctttccagtggaaggagagggtggggtccgtgggatcatgttctctgcagagaatct

SEQ ID NO: 5532 - DNA, 600 bp, Chicken  19866894109225_1
cacctagtaataaatcgctccactagttactgtattttaccaagtaaaatacatttaggtgaggtaggagatataacaggatatgccaacgttaagtccagttgtttcatccaaactcctctttccagcttgcacctgtggattcctaataaaacctttggctgctctatactttcatctatgtcaacagaattactgtaacacagagcttgcagaaagggcacaggaggaccagtaacaattgctatagccctcccgaaccctgaaaagcctttgcatttaatttgagtccatgcaacwgtgacctcccttccctcaacacagggccaaatcaaaacctgcacacaataagaggagaatcaaatcaaattgaactaggtttatcacagtgcaactgccacctctccacaggtccctctcctcactgccatggttggtcagagcaacagaccagctgagaaactcagaggaacacaattctctgcactgttacactttgaagatctgtggggcagatttgcttcagctacttgatctcccactgctctgttaccacctacctggctttcttttgaaagctcagaagttttctgtacaaac

SEQ ID NO: 5533 - DNA, 600 bp, Chicken  19866894109226_1
catgcagttcttgcagtgaagatgcagtattgcctcaaagttcttacttaatggattattctcatctcagtgcctgctggcactctgagtgtatgttgagcagataagctccctgcactggggaggtagtggggtttgatctgacccttctgtccggctttggatgtctctgatgtcagatgctagcattattgctggtttcctttaacatggaaattgagtaaaaatgttaataacctgtattattatatcagttgctgaggatagtgaaaaggtgcaagaggactgactggacacaamggggcaggaacrggggttgaagggaaagctgcagttcatgctgaccagtggatgatccgtgtgttcagagaatgagtgagaaaagcattcagcagaaaactgggtggctaaaaaatttatagcaaagcagaagtgctagaccaagctccagagggtatacctgtgagtgtttggctttacaatagcaggacttaactttaaagattgagatctcactgtattgagtagatatgaacatatgatactcgttggttcctgttaaggaggaaaataacttgtataaaagccatgtactttcac

SEQ ID NO: 5534 - DNA, 600 bp, Chicken  19866894109226_2
gcagtgaagatgcagtattgcctcaaagttcttacttaatggattattctcatctcagtgcctgctggcactctgagtgtatgttgagcagataagctccctgcactggggaggtagtggggtttgatctgacccttctgtccggctttggatgtctctgatgtcagatgctagcattattgctggtttcctttaacatggaaattgagtaaaaatgttaataacctgtattattatatcagttgctgaggatagtgaaaaggtgcaagaggactgactggacacaamggggcaggaacrggggttgaagggaaagctgcagttcatgctgaccagtggatgatccgtgtgttcagagaatgagtgagaaaagcattcagcagaaaactgggtggctaaaaaatttatagcaaagcagaagtgctagaccaagctccagagggtatacctgtgagtgtttggctttacaatagcaggacttaactttaaagattgagatctcactgtattgagtagatatgaacatatgatactcgttggttcctgttaaggaggaaaataacttgtataaaagccatgtactttcacatctcattccgt

SEQ ID NO: 5535 - DNA, 600 bp, Chicken  19866894109228_1
cgacagtaagaagcagaaaaaactatgaaatcatagaagagcagaatggcttagttagaagggacctcacagcccacgcagccccaaccccctgccatgggcagggctgccccctgacagatcaggctgcgcagggccccatccagcctggccttctgtgcttccagggttggggcgtatatttctcctctacccattctaggctataagcatacagcagagcttcagtccagagcacgtccaagaggcaaaagctgtgctgtactgtatatgcatacttagggaactagcagatcacarcrttgtagctccctcagttccactgaggcacctctcctacgaagaaagactgagggagttgggcttcttcagcttggagaaaagaagccccaggggagacttcgttgcagccttctagtacctgaagggagcatacaagcagagaggactggatttttatacagtttgctagtgatagaacacggaggtgtggctttaaactaaaagaggggaaaattaggttagatgctagaaagaaacttaggaggtagtgaaggcctggcatgggctgcccagagaagctgcagatgccccatccct

SEQ ID NO: 5536 - DNA, 600 bp, Chicken  19866894109228_2
acagtaagaagcagaaaaaactatgaaatcatagaagagcagaatggcttagttagaagggacctcacagcccacgcagccccaaccccctgccatgggcagggctgccccctgacagatcaggctgcgcagggccccatccagcctggccttctgtgcttccagggttggggcgtatatttctcctctacccattctaggctataagcatacagcagagcttcagtccagagcacgtccaagaggcaaaagctgtgctgtactgtatatgcatacttagggaactagcagatcacarcrttgtagctccctcagttccactgaggcacctctcctacgaagaaagactgagggagttgggcttcttcagcttggagaaaagaagccccaggggagacttcgttgcagccttctagtacctgaagggagcatacaagcagagaggactggatttttatacagtttgctagtgatagaacacggaggtgtggctttaaactaaaagaggggaaaattaggttagatgctagaaagaaacttaggaggtagtgaaggcctggcatgggctgcccagagaagctgcagatgccccatccctgg

SEQ ID NO: 5537 - DNA, 600 bp, Chicken  19866894109229_1
gcccctttagttctgcctcaccatctgctttctacagccacatgaatctcctcacatgactgaaagctggaaggatagaagtcaaggagtgatcagtctggtagcaccagaagcctcctcgactcaaatgcttatagattaaggaaaggagggcgctgggaaccagatgtgagctggaatatccatgttggtttctcatagcctatttcagctttacttccatttttaaagcaagtcaaaacacccaggtatgatttagaagtgttctttaaagtaaggcaaatccctccctggcacacrtgctcaagggaagagtcacaaacatagcttatccaacaccagtgatgaacactcagacccagataatcccacaaaacgtcactgaggttataaataggtaaccagtggcactactgagcacgcagcatcccagggactagcaaggcaaacttctttgcaaagagtacatctcagcatttcttttcatatctgccagttatgagacaataagaagcttccagtttcaagtactatttgaagagctgaaataacccctccargaaccttatttggatatctttgttctcgatatcatattag

SEQ ID NO: 5538 - DNA, 600 bp, Chicken  19866894109229_2
agtgttctttaaagtaaggcaaatccctccctggcacacrtgctcaagggaagagtcacaaacatagcttatccaacaccagtgatgaacactcagacccagataatcccacaaaacgtcactgaggttataaataggtaaccagtggcactactgagcacgcagcatcccagggactagcaaggcaaacttctttgcaaagagtacatctcagcatttcttttcatatctgccagttatgagacaataagaagcttccagtttcaagtactatttgaagagctgaaataacccctccargaaccttatttggatatctttgttctcgatatcatattagctatgcaatgygaattttttcagctctcctatattaagagaacatatcctcataaagttcaaatacacaaataaacagcttaaaataaaggaagatttaagtcatacccatactcatctccgaggtctgaatatgctagcaaagggtctgatgaccaaacagatgggtatttataaagtatctatcttaccaattttacttatctaaacatacatacatttccacaaatgtaaataaaagcagatacaacaaaaatcact

SEQ ID NO: 5539 - DNA, 574 bp, Chicken  19866894109229_3
agagtcacaaacatagcttatccaacaccagtgatgaacactcagacccagataatcccacaaaacgtcactgaggttataaataggtaaccagtggcactactgagcacgcagcatcccagggactagcaaggcaaacttctttgcaaagagtacatctcagcatttcttttcatatctgccagttatgagacaataagaagcttccagtttcaagtactatttgaagagctgaaataacccctccargaaccttatttggatatctttgttctcgatatcatattagctatgcaatgygaattttttcagctctcctatattaagagaacatatcctcataaagttcaaatacacaaataaacagcttaaaataaaggaagatttaagtcatacccatactcatctccgaggtctgaatatgctagcaaagggtctgatgaccaaacagatgggtatttataaagtatctatcttaccaattttacttatctaaacatacatacatttccacaaatgtaaataaaagcagatacaacaaaaatcacttaaactttctgcagacaaaaactta

SEQ ID NO: 5540 - DNA, 600 bp, Chicken  19866894109234_1
gggtgagccaacgtcaccagctggagttaccatcagctcctggctcagcaaagcagactgtgggtagtcggtagggctttgccattctacagctgatatttgtatttttgctgctgcagaaagctgtcacttacatggaattgttgggtaggatatggcatttcaggtaaaagaaagtcttatggagaaatttgtactggctgatgtaattaaccttaaccagcttgtgtttccagcctgtaataagatgggaaagtctttttctgattctcaagtacataatctggtactggctttatrcaccagagctgcgaagrgaactggaggatggtcttggagtgatgtttcccagggaagggaccggcagccccargggggagatttgggagcaaccagccctaggaaaagcagagctggatctccccgtggggctgggccactttgcatcagctgagggcagtcctgctgatgttcagtaagcagcgatgagcagaggggcagaggatttgcataagcagtccaagagcctcaaagctaacctcacagaataatcttcccaggttatttcaatgtttgttactgattttcacatcagaaagg

SEQ ID NO: 5541 - DNA, 600 bp, Chicken  19866894109234_2
cagctggagttaccatcagctcctggctcagcaaagcagactgtgggtagtcggtagggctttgccattctacagctgatatttgtatttttgctgctgcagaaagctgtcacttacatggaattgttgggtaggatatggcatttcaggtaaaagaaagtcttatggagaaatttgtactggctgatgtaattaaccttaaccagcttgtgtttccagcctgtaataagatgggaaagtctttttctgattctcaagtacataatctggtactggctttatrcaccagagctgcgaagrgaactggaggatggtcttggagtgatgtttcccagggaagggaccggcagccccargggggagatttgggagcaaccagccctaggaaaagcagagctggatctccccgtggggctgggccactttgcatcagctgagggcagtcctgctgatgttcagtaagcagcgatgagcagaggggcagaggatttgcataagcagtccaagagcctcaaagctaacctcacagaataatcttcccaggttatttcaatgtttgttactgattttcacatcagaaaggcatttatgttggctttt

SEQ ID NO: 5542 - DNA, 600 bp, Chicken  19866894109234_3
gggctttgccattctacagctgatatttgtatttttgctgctgcagaaagctgtcacttacatggaattgttgggtaggatatggcatttcaggtaaaagaaagtcttatggagaaatttgtactggctgatgtaattaaccttaaccagcttgtgtttccagcctgtaataagatgggaaagtctttttctgattctcaagtacataatctggtactggctttatrcaccagagctgcgaagrgaactggaggatggtcttggagtgatgtttcccagggaagggaccggcagccccargggggagatttgggagcaaccagccctaggaaaagcagagctggatctccccgtggggctgggccactttgcatcagctgagggcagtcctgctgatgttcagtaagcagcgatgagcagaggggcagaggatttgcataagcagtccaagagcctcaaagctaacctcacagaataatcttcccaggttatttcaatgtttgttactgattttcacatcagaaaggcatttatgttggcttttcacttgctgctctttgtgtttctcctgacatcattggtgggagctgtcttggcatc

SEQ ID NO: 5543 - DNA, 599 bp, Chicken  19866894109236_1
  misc_feature (1)..(120): n is any nucleotide
nnnnnnnnnnnnnnnnnnnnnnnnnnnnnnnnnnnnnnnnnnnnnnnnnnnnnnnnnnnnnnnnnnnnnnnnnnnnnnnnnnnnnnnnnnnnnnnnnnnnnnnnnnnnnnnnnnnnnnnncacagggctaaggttgtaaattaaaaaagctatgctagtctgacaaagagcagcatcaccccatgtaagtgcaaaagctcactaagatgagagcagtactcctgggtgtgtgctctcaactttggagactgctgctctacagcagcaaagccatccattaccagtgtacaggtcccactstgggagaaagacaagggggctgtactttcagcaatccaagacactaaactgcacaacagagacagctttcttctgcagaaaccactttcagtggtatgcagccacaatttaataacagtactagctgaatgctgtgacatattacatgagaaaattacctggatttttccaaacttttttcttgtcttccagtyctcatcccagataatgaggagctgacagtggagctgtgctgctatttcagtcctactcctgaacagctgactggtgtggaaatacagacattagctgctattact

SEQ ID NO: 5544 - DNA, 600 bp, Chicken  19866894109236_2
aagctcactaagatgagagcagtactcctgggtgtgtgctctcaactttggagactgctgctctacagcagcaaagccatccattaccagtgtacaggtcccactstgggagaaagacaagggggctgtactttcagcaatccaagacactaaactgcacaacagagacagctttcttctgcagaaaccactttcagtggtatgcagccacaatttaataacagtactagctgaatgctgtgacatattacatgagaaaattacctggatttttccaaacttttttcttgtcttccagtyctcatcccagataatgaggagctgacagtggagctgtgctgctatttcagtcctactcctgaacagctgactggtgtggaaatacagacattagctgctattactcagctagggtgaaattacatcttataattcaagtcattgtcttaagtaaaaggaaaaaaaaatcaatagcatagaatctccattgccatttcactgtcaaaataactaatcactgaataaaasccagaaacttaattacttctcactactaataagagtagaaaccagggtttctaactccracatgtgcttctt

SEQ ID NO: 5545 - DNA, 475 bp, Chicken  19866894109236_3
agctgaatgctgtgacatattacatgagaaaattacctggatttttccaaacttttttcttgtcttccagtyctcatcccagataatgaggagctgacagtggagctgtgctgctatttcagtcctactcctgaacagctgactggtgtggaaatacagacattagctgctattactcagctagggtgaaattacatcttataattcaagtcattgtcttaagtaaaaggaaaaaaaaatcaatagcatagaatctccattgccatttcactgtcaaaataactaatcactgaataaaasccagaaacttaattacttctcactactaataagagtagaaaccagggtttctaactccracatgtgcttcttaaaagtgcacctgtaatgacagaaaggggaagctgcacgaccaccaargctcttaagaaaaatatcctgaacacacatcaacagttcctaggaaatgaactgt

SEQ ID NO: 5546 - DNA, 416 bp, Chicken  19866894109236_4
ttgtcttccagtyctcatcccagataatgaggagctgacagtggagctgtgctgctatttcagtcctactcctgaacagctgactggtgtggaaatacagacattagctgctattactcagctagggtgaaattacatcttataattcaagtcattgtcttaagtaaaaggaaaaaaaaatcaatagcatagaatctccattgccatttcactgtcaaaataactaatcactgaataaaasccagaaacttaattacttctcactactaataagagtagaaaccagggtttctaactccracatgtgcttcttaaaagtgcacctgtaatgacagaaaggggaagctgcacgaccaccaargctcttaagaaaaatatcctgaacacacatcaacagttcctaggaaatgaactgt

SEQ ID NO: 5547 - DNA, 355 bp, Chicken  19866894109236_5
agtcctactcctgaacagctgactggtgtggaaatacagacattagctgctattactcagctagggtgaaattacatcttataattcaagtcattgtcttaagtaaaaggaaaaaaaaatcaatagcatagaatctccattgccatttcactgtcaaaataactaatcactgaataaaasccagaaacttaattacttctcactactaataagagtagaaaccagggtttctaactccracatgtgcttcttaaaagtgcacctgtaatgacagaaaggggaagctgcacgaccaccaargctcttaagaaaaatatcctgaacacacatcaacagttcctaggaaatgaactgt

SEQ ID NO: 5548 - DNA, 599 bp, Chicken  19866894109247_1
  misc_feature (1)..(80): n is any nucleotide
nnnnnnnnnnnnnnnnnnnnnnnnnnnnnnnnnnnnnnnnnnnnnnnnnnnnnnnnnnnnnnnnnnnnnnnnnnnnnnnntggctctgctggagctgcctcagagcagcgccatgtgagggtgcttcccgccttttttagccagcccagcagggttgcagtgctgtcctggggcctcgttacctcgttctttgtgtgggaccctggtctaattgcctgtgcagcaccacctggtcccatcacctgcacagctgtcccagtaacaaaggcgagggaagttccctcccctggctgccatttkggggctgccagaggccatcttggaggcagttgcagctccgygttgggggcagctctggaaggactggggcaaaactgaggaatcytagatctkaagagcctctttctcagcatatgtagcctacagcttgttataggcaacttttttttyctttttttttcttttyttcctcctggttttcttctgttgtaacctcagagctttcctcatggaggtccctgtggtagcaccttctggaggcagctgtggagagcttgatggagcctcacttcaggacatcccgaggagagatttcttca

SEQ ID NO: 5549 - DNA, 599 bp, Chicken  19866894109247_2
  misc_feature (1)..(39): n is any nucleotide
nnnnnnnnnnnnnnnnnnnnnnnnnnnnnnnnnnnnnnntggctctgctggagctgcctcagagcagcgccatgtgagggtgcttcccgccttttttagccagcccagcagggttgcagtgctgtcctggggcctcgttacctcgttctttgtgtgggaccctggtctaattgcctgtgcagcaccacctggtcccatcacctgcacagctgtcccagtaacaaaggcgagggaagttccctcccctggctgccatttkggggctgccagaggccatcttggaggcagttgcagctccgygttgggggcagctctggaaggactggggcaaaactgaggaatcytagatctkaagagcctctttctcagcatatgtagcctacagcttgttataggcaacttttttttyctttttttttcttttyttcctcctggttttcttctgttgtaacctcagagctttcctcatggaggtccctgtggtagcaccttctggaggcagctgtggagagcttgatggagcctcacttcaggacatcccgaggagagatttcttcaagtgtcactcctggtgtcctggcaggcctgctggtgtttgg

SEQ ID NO: 5550 - DNA, 600 bp, Chicken  19866894109247_3
ctgctggagctgcctcagagcagcgccatgtgagggtgcttcccgccttttttagccagcccagcagggttgcagtgctgtcctggggcctcgttacctcgttctttgtgtgggaccctggtctaattgcctgtgcagcaccacctggtcccatcacctgcacagctgtcccagtaacaaaggcgagggaagttccctcccctggctgccatttkggggctgccagaggccatcttggaggcagttgcagctccgygttgggggcagctctggaaggactggggcaaaactgaggaatcytagatctkaagagcctctttctcagcatatgtagcctacagcttgttataggcaacttttttttyctttttttttcttttyttcctcctggttttcttctgttgtaacctcagagctttcctcatggaggtccctgtggtagcaccttctggaggcagctgtggagagcttgatggagcctcacttcaggacatcccgaggagagatttcttcaagtgtcactcctggtgtcctggcaggcctgctggtgtttgggacagacagacagccatggttagtgtgaggagccagctggatggg

SEQ ID NO: 5551 - DNA, 600 bp, Chicken  19866894109247_4
gctgcctcagagcagcgccatgtgagggtgcttcccgccttttttagccagcccagcagggttgcagtgctgtcctggggcctcgttacctcgttctttgtgtgggaccctggtctaattgcctgtgcagcaccacctggtcccatcacctgcacagctgtcccagtaacaaaggcgagggaagttccctcccctggctgccatttkggggctgccagaggccatcttggaggcagttgcagctccgygttgggggcagctctggaaggactggggcaaaactgaggaatcytagatctkaagagcctctttctcagcatatgtagcctacagcttgttataggcaacttttttttyctttttttttcttttyttcctcctggttttcttctgttgtaacctcagagctttcctcatggaggtccctgtggtagcaccttctggaggcagctgtggagagcttgatggagcctcacttcaggacatcccgaggagagatttcttcaagtgtcactcctggtgtcctggcaggcctgctggtgtttgggacagacagacagccatggttagtgtgaggagccagctggatgggyggccatt

SEQ ID NO: 5552 - DNA, 600 bp, Chicken  19866894109247_5
agggttgcagtgctgtcctggggcctcgttacctcgttctttgtgtgggaccctggtctaattgcctgtgcagcaccacctggtcccatcacctgcacagctgtcccagtaacaaaggcgagggaagttccctcccctggctgccatttkggggctgccagaggccatcttggaggcagttgcagctccgygttgggggcagctctggaaggactggggcaaaactgaggaatcytagatctkaagagcctctttctcagcatatgtagcctacagcttgttataggcaacttttttttyctttttttttcttttyttcctcctggttttcttctgttgtaacctcagagctttcctcatggaggtccctgtggtagcaccttctggaggcagctgtggagagcttgatggagcctcacttcaggacatcccgaggagagatttcttcaagtgtcactcctggtgtcctggcaggcctgctggtgtttgggacagacagacagccatggttagtgtgaggagccagctggatgggyggccattgggttccctgcagaagcagctctttgctgtgttcctgcaccagcagcaggtgagtat

SEQ ID NO: 5553 - DNA, 600 bp, Chicken  19866894109247_6
cctggggcctcgttacctcgttctttgtgtgggaccctggtctaattgcctgtgcagcaccacctggtcccatcacctgcacagctgtcccagtaacaaaggcgagggaagttccctcccctggctgccatttkggggctgccagaggccatcttggaggcagttgcagctccgygttgggggcagctctggaaggactggggcaaaactgaggaatcytagatctkaagagcctctttctcagcatatgtagcctacagcttgttataggcaacttttttttyctttttttttcttttyttcctcctggttttcttctgttgtaacctcagagctttcctcatggaggtccctgtggtagcaccttctggaggcagctgtggagagcttgatggagcctcacttcaggacatcccgaggagagatttcttcaagtgtcactcctggtgtcctggcaggcctgctggtgtttgggacagacagacagccatggttagtgtgaggagccagctggatgggyggccattgggttccctgcagaagcagctctttgctgtgttcctgcaccagcagcaggtgagtatttactccatttccaaa

SEQ ID NO: 5554 - DNA, 600 bp, Chicken  19866894109247_7
agatctkaagagcctctttctcagcatatgtagcctacagcttgttataggcaacttttttttyctttttttttcttttyttcctcctggttttcttctgttgtaacctcagagctttcctcatggaggtccctgtggtagcaccttctggaggcagctgtggagagcttgatggagcctcacttcaggacatcccgaggagagatttcttcaagtgtcactcctggtgtcctggcaggcctgctggtgtttgggacagacagacagccatggttagtgtgaggagccagctggatgggyggccattgggttccctgcagaagcagctctttgctgtgttcctgcaccagcagcaggtgagtatttactccatttccaaaaatctatctgtacttaagcatgtttacttaatcagcaagctgtcgggcaggctctgaatcctcaggacataacagccatggtctcatgagctgattccattaattttttcctttaagttttgtgtcaatccaaggtcgctggcctccaggcctgggctctccattgatctccttgagtgatataaataggttttcaacagagttgcctgctttcctggct

SEQ ID NO: 5555 - DNA, 600 bp, Chicken  19866894109248_1
ttaattaataagttgtaatgaaaaatatgatttgcccacttgccagtgatatcatgtacatattatcactcagaaccaggaaaaacttcaatccatatgaatgtattcaattgctgcaaggagtcacgtcaaatatgtcaactagaagtaattaccagtccaagaatgtgattaaaatggcttaaaattaagattttagcttgccatagttatttctatgcaaatatgctatattttttcaaccaacatgtagatcctaattaaaagcacaccaaagttttgaataacaagaaaattttwaaattcatattgtaaaaataattacttgagcctcagttgcaaatgaaagtcatatttttttcttgctggatttgttttcactcctcttatctaatgaagaaagacattgcacaatgcactattaaattatatgtttgctgaatgactgcttcaaagtatcagtctatttttttaatactgactagctataatagctcaaagaggtwtgttatattgcagatttatttttatatctaatatatatgtcttccaatatatgagttgagtgattcaatcttgagtatatgacatgaaaatttt

SEQ ID NO: 5556 - DNA, 600 bp, Chicken  19866894109248_2
attatcactcagaaccaggaaaaacttcaatccatatgaatgtattcaattgctgcaaggagtcacgtcaaatatgtcaactagaagtaattaccagtccaagaatgtgattaaaatggcttaaaattaagattttagcttgccatagttatttctatgcaaatatgctatattttttcaaccaacatgtagatcctaattaaaagcacaccaaagttttgaataacaagaaaattttwaaattcatattgtaaaaataattacttgagcctcagttgcaaatgaaagtcatattttttwcttgctggatttgttttcactcctcttatctaatgaagaaagacattgcacaatgcactattaaattatatgtttgctgaatgactgcttcaaagtatcagtctatttttttaatactgactagctataatagctcaaagaggtwtgttatattgcagatttatttttatatctaatatatatgtcttccaatatatgagttgagtgattcaatcttgagtatatgacatgaaaattttgttgcaatttgtgataggaaatagaaatcacaggaaacacttttgttgactgtatctactc

SEQ ID NO: 5557 - DNA, 600 bp, Chicken  19866894109248_3
tagttatttctatgcaaatatgctatattttttcaaccaacatgtagatcctaattaaaagcacaccaaagttttgaataacaagaaaattttwaaattcatattgtaaaaataattacttgagcctcagttgcaaatgaaagtcatatttttttcttgctggatttgttttcactcctcttatctaatgaagaaagacattgcacaatgcactattaaattatatgtttgctgaatgactgcttcaaagtatcagtctatttttttaatactgactagctataatagctcaaagaggtwtgttatattgcagatttatttttatatctaatatatatgtcttccaatatatgagttgagtgattcaatcttgagtatatgacatgaaaattttgttgcaatttgtgataggaaatagaaatcacaggaaacacttttgttgactgtatctactcagacatatttgattgacagtttgagctcttctgaaagctaggttagtatccttygtgccccatggagatcagtctgctgaatactacgtatagtgccctctgtgaaaattatctatttctcatatgccgtatcataggccaactt

SEQ ID NO: 5558 - DNA, 600 bp, Chicken  19866894109248_4
gcactattaaattatatgtttgctgaatgactgcttcaaagtatcagtctatttttttaatactgactagctataatagctcaaagaggtwtgttatattgcagatttatttttatatctaatatatatgtcttccaatatatgagttgagtgattcaatcttgagtatatgacatgaaaattttgttgcaatttgtgataggaaatagaaatcacaggaaacacttttgttgactgtatctactcagacatatttgattgacagtttgagctcttctgaaagctaggttagtatccttygtgccccatggagatcagtctgctgaatactacgtatagtgccctctgtgaaaattatctatttctcatatgccgtatcataggccaacttccataaaatagggcataatatatctgcatagctctcattggtgtaggtkgaccttgctccaaaagaatagggtaatcaaaaacctaatgcttttcatgygttagcattcctttgaccttcaaakaataggcaactaacaaagaaggaggaaaaacattcaratatttgatgaatttttatattttcttcccacctgttcctcattatct

SEQ ID NO: 5559 - DNA, 600 bp, Chicken  19866894109248_5
tatgagttgagtgattcaatcttgagtatatgacatgaaaattttgttgcaatttgtgataggaaatagaaatcacaggaaacacttttgttgactgtatctactcagacatatttgattgacagtttgagctcttctgaaagctaggttagtatccttygtgccccatggagatcagtctgctgaatactacgtatagtgccctctgtgaaaattatctatttctcatatgccgtatcataggccaacttccataaaatagggcataatatatctgcatagctctcattggtgtaggtkgaccttgctccaaaagaatagggtaatcaaaaacctaatgcttttcatgygttagcattcctttgaccttcaaakaataggcaactaacaaagaaggaggaaaaacattcaratatttgatgaatttttatattttcttcccacctgttcctcattatctgaaacaacacattagtatatgtgacttgattctgtgaataattgcagatgttcgaaacctccattgttcagtgaacatgctatttattcaagaagatctcttttcattttttaccattggcttaaatacaacacaccagc

SEQ ID NO: 5560 - DNA, 566 bp, Chicken  19866894109248_6
aatttgtgataggaaatagaaatcacaggaaacacttttgttgactgtatctactcagacatatttgattgacagtttgagctcttctgaaagctaggttagtatccttygtgccccatggagatcagtctgctgaatactacgtatagtgccctctgtgaaaattatctatttctcatatgccgtatcataggccaacttccataaaatagggcataatatatctgcatagctctcattggtgtaggtkgaccttgctccaaaagaatagggtaatcaaaaacctaatgcttttcatgygttagcattcctttgaccttcaaakaataggcaactaacaaagaaggaggaaaaacattcaratatttgatgaatttttatattttcttcccacctgttcctcattatctgaaacaacacattagtatatgtgacttgattctgtgaataattgcagatgttcgaaacctccattgttcagtgaacatgctatttattcaagaagatctcttttcattttttaccattggcttaaatacaacacaccagcacattattagttcata

SEQ ID NO: 5561 - DNA, 541 bp, Chicken  19866894109248_7
caggaaacacttttgttgactgtatctactcagacatatttgattgacagtttgagctcttctgaaagctaggttagtatccttygtgccccatggagatcagtctgctgaatactacgtatagtgccctctgtgaaaattatctatttctcatatgccgtatcataggccaacttccataaaatagggcataatatatctgcatagctctcattggtgtaggtkgaccttgctccaaaagaatagggtaatcaaaaacctaatgcttttcatgygttagcattcctttgaccttcaaakaataggcaactaacaaagaaggaggaaaaacattcaratatttgatgaatttttatattttcttcccacctgttcctcattatctgaaacaacacattagtatatgtgacttgattctgtgaataattgcagatgttcgaaacctccattgttcagtgaacatgctatttattcaagaagatctcttttcattttttaccattggcttaaatacaacacaccagcacattattagttcata

SEQ ID NO: 5562 - DNA, 504 bp, Chicken  19866894109248_8
atttgattgacagtttgagctcttctgaaagctaggttagtatccttygtgccccatggagatcagtctgctgaatactacgtatagtgccctctgtgaaaattatctatttctcatatgccgtatcataggccaacttccataaaatagggcataatatatctgcatagctctcattggtgtaggtkgaccttgctccaaaagaatagggtaatcaaaaacctaatgcttttcatgygttagcattcctttgaccttcaaakaataggcaactaacaaagaaggaggaaaaacattcaratatttgatgaatttttatattttcttcccacctgttcctcattatctgaaacaacacattagtatatgtgacttgattctgtgaataattgcagatgttcgaaacctccattgttcagtgaacatgctatttattcaagaagatctcttttcattttttaccattggcttaaatacaacacaccagcacattattagttcata

SEQ ID NO: 5563 - DNA, 599 bp, Chicken  19866894109250_1
  misc_feature (1)..(105): n is any nucleotide
nnnnnnnnnnnnnnnnnnnnnnnnnnnnnnnnnnnnnnnnnnnnnnnnnnnnnnnnnnnnnnnnnnnnnnnnnnnnnnnnnnnnnnnnnnnnnnnnnnnnnnnnncggtccctttgcgcaggtgcagcagtgcgttgcaagttttctgatctgcccgactaatccctcattacacggcaccgtgcttccttggagctgcggaaataatctcgttagatggggttggtttgttttgggaagccatgttctctttttccataccaacggtgcaatccttgcttaagttgggcatgtaaagargcatagcactagcacacaccaaaacccagtttttggactggtgaagtagtcagtcttcagaactctgctggttcccagaccagcttgtgctgctgcatgtgaagagcagctgcagtcgatcttcagcctttgttgtgaacataacttcggcggtatcagtttggggttttcacttcagtctgtgctgagatgagggcatcgtctctcaggtcagtgattcccttaagctccgggggcaggcgagcacagcctgtctcattcgccgcgtacaaccttgtgtgagttaagactgactcttt

SEQ ID NO: 5564 - DNA, 600 bp, Chicken  19866894109254_1
ccctcagggcctgcaaggaacatgtgcttcctgaggcagggggatgtgctggggaggggagtcccctgcccaaccaccttccaaggaaggcaagcttcgtgctgcactggagttgaactcaaagaagcctgggagcgctgagcagttccagatgctgtgccgtggggcactttggggccagcacgcaggcagattgctgctgcttgcttttggcaaaacccaggagggcaaagccagcctaactgcacggaaatgttttgtcacaccattacaaaccttgctaatgagcaactcggcttyttgaggcttttgctagattaattcactgatgtatatttcaggtctcgctccacttttagtctgtgtattgtgagtattggtgtgctgtgctttatctccatcagcatggaggcaaatcagccagaatggcagtgagcagagccagcaccactctgttccagcttgctttcagcatttgcttgaaccctgggaaatgcactgcttctctgagaccttccggagctccaagtgggtggctatcacagcagtgaggccacaaccattccctgcagaaatacttccaggagtgcaagtgatgaa

SEQ ID NO: 5565 - DNA, 600 bp, Chicken  19866894109254_2
agagccagcaccactctgttccagcttgctttcagcatttgcttgaaccctgggaaatgcactgcttctctgagaccttccggagctccaagtgggtggctatcacagcagtgaggccacaaccattccctgcagaaatacttccaggagtgcaagtgatgaagcacctaattgctgccaaaagcgcttgcaattgcacctctgaatatctgggcttcagtttccttgcaccacagctctgtctcccctcggcagatggggctttgctttcctgcagcagtaacgcacgtgtccatgctrcactcagtacagcatgcactgtaggtgggttaatacagagatcagcactcctagctgagcggtctgaccccagtcctcctccatgtgatgcttaccccagcacttcagctgatycagcaggttgcagtgtgtaaatgagctcaacaagcargtttgcactcatgccatttactgcatatgcgtaattygatttcctgagcttttgtgcaacgttttttttggaaaaatcaaccacctggaggaacatctgagctctgcccactgctccctaagttcaagtcaggtatgtctgtaagtggt

SEQ ID NO: 5566 - DNA, 600 bp, Chicken  19866894109254_3
ggccacaaccattccctgcagaaatacttccaggagtgcaagtgatgaagcacctaattgctgccaaaagcgcttgcaattgcacctctgaatatctgggcttcagtttccttgcaccacagctctgtctcccctcggcagatggggctttgctttcctgcagcagtaacgcacgtgtccatgctrcactcagtacagcatgcactgtaggtgggttaatacagagatcagcactcctagctgagcggtctgaccccagtcctcctccatgtgatgcttaccccagcacttcagctgatycagcaggttgcagtgtgtaaatgagctcaacaagcargtttgcactcatgccatttactgcatatgcgtaattygatttcctgagcttttgtgcaacgttttttttggaaaaatcaaccacctggaggaacatctgagctctgcccactgctccctaagttcaagtcaggtatgtctgtaagtggttgctgctgcatttatacacagagcgaattcagcactgaatgtgtaatgagccaggccttggaaatgaaggacaccagttcctttcttcagcttcctgcccgctctgcatctgac

SEQ ID NO: 5567 - DNA, 600 bp, Chicken  19866894109254_4
gcaagtgatgaagcacctaattgctgccaaaagcgcttgcaattgcacctctgaatatctgggcttcagtttccttgcaccacagctctgtctcccctcggcagatggggctttgctttcctgcagcagtaacgcacgtgtccatgctrcactcagtacagcatgcactgtaggtgggttaatacagagatcagcactcctagctgagcggtctgaccccagtcctcctccatgtgatgcttaccccagcacttcagctgatycagcaggttgcagtgtgtaaatgagctcaacaagcargtttgcactcatgccatttactgcatatgcgtaattygatttcctgagcttttgtgcaacgttttttttggaaaaatcaaccacctggaggaacatctgagctctgcccactgctccctaagttcaagtcaggtatgtctgtaagtggttgctgctgcatttatacacagagcgaattcagcactgaatgtgtaatgagccaggccttggaaatgaaggacaccagttcctttcttcagcttcctgcccgctctgcatctgacacgctccagccaaatagacaccatcatgagcattcac

SEQ ID NO: 5568 - DNA, 600 bp, Chicken  19866894109254_5
tgcaattgcacctctgaatatctgggcttcagtttccttgcaccacagctctgtctcccctcggcagatggggctttgctttcctgcagcagtaacgcacgtgtccatgctrcactcagtacagcatgcactgtaggtgggttaatacagagatcagcactcctagctgagcggtctgaccccagtcctcctccatgtgatgcttaccccagcacttcagctgatycagcaggttgcagtgtgtaaatgagctcaacaagcargtttgcactcatgccatttactgcatatgcgtaattygatttcctgagcttttgtgcaacgttttttttggaaaaatcaaccacctggaggaacatctgagctctgcccactgctccctaagttcaagtcaggtatgtctgtaagtggttgctgctgcatttatacacagagcgaattcagcactgaatgtgtaatgagccaggccttggaaatgaaggacaccagttcctttcttcagcttcctgcccgctctgcatctgacacgctccagccaaatagacaccatcatgagcattcacattctgggcagcagggcaagaagcaacaaagtggcat

SEQ ID NO: 5569 - DNA, 600 bp, Chicken  19866894109255_1
ctcatgtttgggttggagtctacctcttgtgaagttgcatggtctcaatttaaagccttccagattgtggcgctgggcactgtgtccccactgtgggtgagggaggcctcaaataaggttacattctttcccctatgagaggacacaatttatgtcccttctagattagttcctctttctctcacctcagttaacatatacagagaattacatttgcctgtgtattgttattgtcagttgtattttggcagccgtgaaaatgactgtgtattgcacaaaaaataatatttagcttaaacwgttcaagataaagaaagtatttattttttaaawgatgtttgtatctgagaggtaaatttgagattcataaaagggaaatttctcaaatatgacttgctttcaaaaaaaacagagtggtcatcacatgtcacagttttgcgtgtttcctttygataaacgctgatctctggaaaatgtttgcaataatctgctgaaggaagaccccatttgttttactcgtaagcaattacgtagtaaaacaccatataaaccatctccacatcttacaccttggcaacagtttaaagaataactgttgaa

SEQ ID NO: 5570 - DNA, 600 bp, Chicken  19866894109255_2
gttgcatggtctcaatttaaagccttccagattgtggcgctgggcactgtgtccccactgtgggtgagggaggcctcaaataaggttacattctttcccctatgagaggacacaatttatgtcccttctagattagttcctctttctctcacctcagttaacatatacagagaattacatttgcctgtgtattgttattgtcagttgtattttggcagccgtgaaaatgactgtgtattgcacaaaaaataatatttagcttaaacwgttcaagataaagaaagtatttattttttaaawgatgtttgtatctgagaggtaaatttgagattcataaaagggaaatttctcaaatatgacttgctttcaaaaaaaacagagtggtcatcacatgtcacagttttgcgtgtttcctttygataaacgctgatctctggaaaatgtttgcaataatctgctgaaggaagaccccatttgttttactcgtaagcaattacgtagtaaaacaccatataaaccatctccacatcttacaccttggcaacagtttaaagaataactgttgaaagctgcaagaacagcgagtttagttgtttgaaa

SEQ ID NO: 5571 - DNA, 600 bp, Chicken  19866894109255_3
atgtcccttctagattagttcctctttctctcacctcagttaacatatacagagaattacatttgcctgtgtattgttattgtcagttgtattttggcagccgtgaaaatgactgtgtattgcacaaaaaataatatttagcttaaacwgttcaagataaagaaagtatttattttttaaawgatgtttgtatctgagaggtaaatttgagattcataaaagggaaatttctcaaatatgacttgctttcaaaaaaaacagagtggtcatcacatgtcacagttttgcgtgtttcctttygataaacgctgatctctggaaaatgtttgcaataatctgctgaaggaagaccccatttgttttactcgtaagcaattacgtagtaaaacaccatataaaccatctccacatcttacaccttggcaacagtttaaagaataactgttgaaagctgcaagaacagcgagtttagttgtttgaaagtcagcaaattgtaggttgttttacttctgccctctcgtgtccgttctggatagcactatctgtcattgcatgaaaacaggaacattttaaagtaaaataattactgtattttttcaa

SEQ ID NO: 5572 - DNA, 600 bp, Chicken  19866894109269_1
attttgtgttgccatgtgaaagatggggagaaggagtgtgtccaattagttctgtgttgttcagagtggacatggtcgcagagcagtgagcacaaaggagctgacaccatgggctgcacggtgaaactcatcaacagccattgttgaatgcatgcaaactgtgcatgatgcttgaatagagtgaagaggaagtaaactctgataacttctgagggccaactatgggtgttttcaaaggtttttgaggcaggtagatgcttagctcccactgggaagggatgccttcagaagcaggtgccmaactcagttgaagagcttagggatatcatttccaaaaagctctgggtgcagagcagggagatgatggcttcctcagagctcacaggagactttccccacctccagctactcctagagactcctggcgccctgattacagacaaagcattgctgtgctcacctccccctcctccctgtcccgcaaagggttaaagggtgggagagccgtttgattaatagatgtcgtgtgaacatgcacatttccctatgactgcattcctggggcttttggctgggcgataagctgcgaccaaagtcctc

SEQ ID NO: 5573 - DNA, 429 bp, Chicken  19866894109269_2
taatgctgtgccagggccccaggctccaggatcctttcccatcagcagcatggaaaggagaggacgatattgccattggggtggtgggaacagaccccggtgcccaaactgctgttgtagctctgccatccgaccgtgcttttcttcaaaggaaattaaaagaataataataatacaaagcacacttcgcttcgaatttctttggctgcacatattccttgtccctccaggtggtttcagattgagtcaggccacaggttctctttttgacccccagatttgacatgaggacattggttkaaaatgaaactcctttccctccttgaaaagcaaaacaawcccaagcaacgtggacctttcagcttgtttgtcttcagataggacgttgccgtacttactcacaagccagttttcacaagggtgtgtatt

SEQ ID NO: 5574 - DNA, 390 bp, Chicken  19866894109269_3
catcagcagcatggaaaggagaggacgatattgccattggggtggtgggaacagaccccggtgcccaaactgctgttgtagctctgccatccgaccgtgcttttcttcaaaggaaattaaaagaataataataatacaaagcacacttcgcttcgaatttctttggctgcacatattccttgtccctccaggtggtttcagattgagtcaggccacaggttctctttttgacccccagatttgacatgaggacattggttkaaaatgaaactcctttccctccttgaaaagcaaaacaawcccaagcaacgtggacctttcagcttgtttgtcttcagataggacgttgccgtacttactcacaagccagttttcacaagggtgtgtatt

SEQ ID NO: 5575 - DNA, 599 bp, Chicken  19866894109274_1
  misc_feature (1)..(94): n is any nucleotide
nnnnnnnnnnnnnnnnnnnnnnnnnnnnnnnnnnnnnnnnnnnnnnnnnnnnnnnnnnnnnnnnnnnnnnnnnnnnnnnnnnnnnnnnnnnnnnggatctctgtatcgtaaaactttaacagctggatgcaatcaatggggattttccttcttttttttttttctttctttcttttcggttaagctgaagaaagaaaaagggaaaacaagaaagcgaagcttcctcatacccgagcaagctggtggtgcagctcagcattccgtgctcaccagcagcagctgtcattgctgccctacaawccccatccctcccacgccctccccatgctgtcccatcctggggaagcaatctcacagcaggaggtgtgcaatattcagtgagcagcgctgtgagagatggaaaccagaggggcgtgcrgtataattaatattggccagtgggaacaccgttctcagatcataccaaataattaattaacatcatatacrtgtatatatatatatattttgcttcagagtttattaactataatttgagcctgaactcccattgtaaatcccatagyatttcttcagcaacaggactcagctcggaggca

SEQ ID NO: 5576 - DNA, 600 bp, Chicken  19866894109274_2
acagctggatgcaatcaatggggattttccttcttttttttttttctttctttcttttcggttaagctgaagaaagaaaaagggaaaacaagaaagcgaagcttcctcatacccgagcaagctggtggtgcagctcagcattccgtgctcaccagcagcagctgtcattgctgccctacaawccccatccctcccacgccctccccatgctgtcccatcctggggaagcaatctcacagcaggaggtgtgcaatattcagtgagcagcgctgtgagagatggaaaccagaggggcgtgcrgtataattaatattggccagtgggaacaccgttctcagatcataccaaataattaattaacatcatatacrtgtatatatatatatattttgcttcagagtttattaactataatttgagcctgaactcccattgtaaatcccatagyatttcttcagcaacaggactcagctcggaggcaatggaaacatatggctgctcgcctgggcatcttctgctttgtcacctgtaaccacggcacagacccaactgcacttcttttggtccagcaccacttccctcgtgttgatgccaacactt

SEQ ID NO: 5577 - DNA, 600 bp, Chicken  19866894109274_3
gaaagaaaaagggaaaacaagaaagcgaagcttcctcatacccgagcaagctggtggtgcagctcagcattccgtgctcaccagcagcagctgtcattgctgccctacaawccccatccctcccacgccctccccatgctgtcccatcctggggaagcaatctcacagcaggaggtgtgcaatattcagtgagcagcgctgtgagagatggaaaccagaggggcgtgcrgtataattaatattggccagtgggaacaccgttctcagatcataccaaataattaattaacatcatatacrtgtatatatatatatattttgcttcagagtttattaactataatttgagcctgaactcccattgtaaatcccatagyatttcttcagcaacaggactcagctcggaggcaatggaaacatatggctgctcgcctgggcatcttctgctttgtcacctgtaaccacggcacagacccaactgcacttcttttggtccagcaccacttccctcgtgttgatgccaacactttctttgaggtaacttaagaaatagtttgcagtctcaggtttatcagactgtagagaagaagtaatgggatt

SEQ ID NO: 5578 - DNA, 600 bp, Chicken  19866894109274_4
tcaccagcagcagctgtcattgctgccctacaawccccatccctcccacgccctccccatgctgtcccatcctggggaagcaatctcacagcaggaggtgtgcaatattcagtgagcagcgctgtgagagatggaaaccagaggggcgtgcrgtataattaatattggccagtgggaacaccgttctcagatcataccaaataattaattaacatcatatacrtgtatatatatatatattttgcttcagagtttattaactataatttgagcctgaactcccattgtaaatcccatagyatttcttcagcaacaggactcagctcggaggcaatggaaacatatggctgctcgcctgggcatcttctgctttgtcacctgtaaccacggcacagacccaactgcacttcttttggtccagcaccacttccctcgtgttgatgccaacactttctttgaggtaacttaagaaatagtttgcagtctcaggtttatcagactgtagagaagaagtaatgggattttgaccaaataataataataataatgctgcatatgtttagcaaacaaggccaggattgtgtatagcttactgggaat

SEQ ID NO: 5579 - DNA, 600 bp, Chicken  19866894109276_1
gttatctgtagttgcttttgtacttaattttctcctccatactgtaggtggcagaagggaaggcagagctgcacctcaccagctgaggatcacagtctagtgtttttggtgtgaactaactttcacaggcaattaaaagcaaatatgctagactgtgaaccaagcagttctgttgtggaaatgtcctcaggcagaggggatggcaggacagctgggtgtagcaatgtattaaacattgcagctgttttcctcatagcatttaagaaagagctcttaagtgtacagtgttgaaaactttaycttcccactaaataatttgttccaatactaaacttctgagggagttacaaatagatatctttccgaamtgaattttgctgttatctccttcctgttatttatcttcttaagcatcaacaaactacagtactagaatttcttatttagaccataagtaggattttggcaagagtgtgagctaaacctccaatgttttctagctctctaagcgacactatagagtaggggggaagtggaagtgctagctcggggtaagaagttctcgaaaatggctgcatggaattaaaacagactggctga

SEQ ID NO: 5580 - DNA, 600 bp, Chicken  19866894109276_2
ctgcacctcaccagctgaggatcacagtctagtgtttttggtgtgaactaactttcacaggcaattaaaagcaaatatgctagactgtgaaccaagcagttctgttgtggaaatgtcctcaggcagaggggatggcaggacagctgggtgtagcaatgtattaaacattgcagctgttttcctcatagcatttaagaaagagctcttaagtgtacagtgttgaaaactttaycttcccactaaataatttgttccaatactaaacttctgagggagttacaaatagatatctttccgaamtgaattttgctgttatctccttcctgttatttatcttcttaagcatcaacaaactacagtactagaatttcttatttagaccataagtaggattttggcaagagtgtgagctaaacctccaatgttttctagctctctaagcgacactatagagtaggggggaagtggaagtgctagctcggggtaagaagttctcgaaaatggctgcatggaattaaaacagactggctgatgttttattatgggaaatgccatgaataacaattaagactaacagtcagattttaaatcacaagataa

SEQ ID NO: 5581 - DNA, 600 bp, Chicken  19866894109277_1
taaaagcttgggaagttaaggctttccctgccaagtctccagttctccacctttgcctggtgtttctggcctgtttctaaaactccagggggaattcagctgactccagatctatagcatctccttccagactgtcaaactgtgaaagtggattctgtgatgcagttgcaagtcctctaatgaccaaatggagatttctgactcgttttgtatataggccacagaacagctgtcatgtagtaaaatgtctcaggtgctggagccaggcattaatcggatgagaaagccatgattctgagyacaggcacttattagtgggcttttaatagtcagtatccaaacgtacacacacagaggaatattgctratgtttactggacatttagtcctgtcacctggggaaggcaggtgttgcaagctccattaagaaaagccaagaagaggattttcacctcattttgtcagtacgtaaggcttattcaaagaaacaggctaatccttggcctctgctgtggctggctacaaaatcaaaaggaaggtgtgtttttgacagtaatgaccaaccactgggttaagatctatgagaggcacctcaccagg

SEQ ID NO: 5582 - DNA, 600 bp, Chicken  19866894109277_2
ggcctgtttctaaaactccagggggaattcagctgactccagatctatagcatctccttccagactgtcaaactgtgaaagtggattctgtgatgcagttgcaagtcctctaatgaccaaatggagatttctgactcgttttgtatataggccacagaacagctgtcatgtagtaaaatgtctcaggtgctggagccaggcattaatcggatgagaaagccatgattctgagyacaggcacttattagtgggcttttaatagtcagtatccaaacgtacacacacagaggaatattgctratgtttactggacatttagtcctgtcacctggggaaggcaggtgttgcaagctccattaagaaaagccaagaagaggattttcacctcattttgtcagtacgtaaggcttattcaaagaaacaggctaatccttggcctctgctgtggctggctacaaaatcaaaaggaaggtgtgtttttgacagtaatgaccaaccactgggttaagatctatgagaggcacctcaccagggctaccaaacatgtcactaggacattataaatggaggaatcacgttggctaatgcaggcttccagct

SEQ ID NO: 5583 - DNA, 600 bp, Chicken  19866894109277_3
gaaggtgtgtttttgacagtaatgaccaaccactgggttaagatctatgagaggcacctcaccagggctaccaaacatgtcactaggacattataaatggaggaatcacgttggctaatgcaggcttccagctgtgcaaacaaactcctcaaagcttgcaatgcaaaccccaaactagttggggaagtacagcagagaactattattccagcagttcattaggccccttcgttttgcaaagcacccaagtcatgaaggcatgctgaaccactcaaccaccatgtgctacggctgctggaygtactgctgacttaggatggtacaaacaaatatcccagggtctgcataaatggtttgggtatcttgttttgctctctctagaagttatatgtcacatataagacactatacagtcttaaatcgcagcctgttgctgacttccttcaaggacaaaccaggtcacagaaacttgggactgtggaaaatggtcaagagactaacagaaggattgcagatggcataaatgtgaagtgggaacttctgtgcgctgttggagtaggagatagtctggaaaagatggttcaaaggggactttgagtg

SEQ ID NO: 5584 - DNA, 599 bp, Chicken  19866894109278_1
  misc_feature (1)..(172): n is any nucleotide
nnnnnnnnnnnnnnnnnnnnnnnnnnnnnnnnnnnnnnnnnnnnnnnnnnnnnnnnnnnnnnnnnnnnnnnnnnnnnnnnnnnnnnnnnnnnnnnnnnnnnnnnnnnnnnnnnnnnnnnnnnnnnnnnnnnnnnnnnnnnnnnnnnnnnnnnnnnnnnnnnnnnnnnnnnnncaaaaaaaaaaaaaaaggaagaaaggaagatctattttaggtaataataatattaaaaacgaatccagataaaacgtttgaagttttcctggtgttaatcataacagatggtagaaatcaatttgccrttaatttactttcatgtcaaacactcaacgtaattaagaaaagtgtcatctaaactttcaaattaaaattatgtgtaacacagactcctcattatcatactaatacctgtgaaacgctgtttgcagtttcaaagcttcacagcctttttagaatcagacttcaaagcctcctggcaggaattatgggtaggaaggttaggacttaaagctagatttctttaatattatccttcaagtgggagcacttgtttcagttgttaattccctttgctaaatttcacacatgcagtgaagcatga

SEQ ID NO: 5585 - DNA, 600 bp, Chicken  19866894109278_2
atctaaactttcaaattaaaattatgtgtaacacagactcctcattatcatactaatacctgtgaaacgctgtttgcagtttcaaagcttcacagcctttttagaatcagacttcaaagcctcctggcaggaattatgggtaggaaggttaggacttaaagctagatttctttaatattatccttcaagtgggagcacttgtttcagttgttaattccctttgctaaatttcacacatgcagtgaagcatgactatcggtgttacactctggttaccacttgcagggtacctgcacaaayaaataacaagcgttactctccctaagcctaacagaaattgtccgaatgaatcacaggcatgatttaaaaccataatccagtatacatctgtgggtttattccggaagaaagctatttgtgttagcattaattactgccaaattagaatagagaaayaaatctgactgaggaaaatgcattgtgtgccatttgctttgtaattgtgccagtacctaatcatccttccatagatatgagacatcaggaagagctcttgagctgttttgttttatacctactttgctacaaaatttttcctct

SEQ ID NO: 5586 - DNA, 600 bp, Chicken  19866894109278_3
taaagctagatttctttaatattatccttcaagtgggagcacttgtttcagttgttaattccctttgctaaatttcacacatgcagtgaagcatgactatcggtgttacactctggttaccacttgcagggtacctgcacaaayaaataacaagcgttactctccctaagcctaacagaaattgtccgaatgaatcacaggcatgatttaaaaccataatccagtatacatctgtgggtttattccggaagaaagctatttgtgttagcattaattactgccaaattagaatagagaaayaaatctgactgaggaaaatgcattgtgtgccatttgctttgtaattgtgccagtacctaatcatccttccatagatatgagacatcaggaagagctcttgagctgttttgttttatacctactttgctacaaaatttttcctctgtaagttgttgcatccagccttgttttcaacatttcaagctttggcaagtctttttttctttttcttcctgtttttttcttctgtttaatcttttacaaactgatcaagagttcctggcagtcaccatccttttatttttaatatgagtcatccaa

SEQ ID NO: 5587 - DNA, 600 bp, Chicken  19866894109281_1
actcattaaagacagtgggaaacaccaacaaaaaaaaaaggcaagctgatcaaattgaaatatttctcacttgattgagaaaatgaacatttgagcgaagcataattgcgagtgctacatcagcaggggagcaaacaaagctccacttttaacagcaatccccagcaaactttctgccacctgttttgctattgctctgtaccgtatcctatgctttgttaaccctaccagttcctcgctttcaaacacctacaaagccacaataatacagacagcttgtggtatcaactgcacacaacrcagcttgccttaatgcttgtcatggtaaaagctaaggctatgcttaaagcatgtccaacttacgtgactcccttaccttagcaccttctcctccaggaaaaacaatgccaggaatcattctatagaagaaggctctgaagtgcccactgcagactgggggaaaatccaaccctttggagggacttcttttttacatcayaccaactacttaaaaaagagaatacaacaaatctatattggatgcaggaaaatatatatcaaagcacagcctttgtgtctggggttaaatgaagaaagcag

SEQ ID NO: 5588 - DNA, 600 bp, Chicken  19866894109281_2
taccgtatcctatgctttgttaaccctaccagttcctcgctttcaaacacctacaaagccacaataatacagacagcttgtggtatcaactgcacacaacrcagcttgccttaatgcttgtcatggtaaaagctaaggctatgcttaaagcatgtccaacttacgtgactcccttaccttagcaccttctcctccaggaaaaacaatgccaggaatcattctatagaagaaggctctgaagtgcccactgcagactgggggaaaatccaaccctttggagggacttcttttttacatcayaccaactacttaaaaaagagaatacaacaaatctatattggatgcaggaaaatatatatcaaagcacagcctttgtgtctggggttaaatgaagaaagcagttgctagaagcaacaaatactcatttaaacacagcaaagtggatgtctagaaagactgcactcctctctgcagaaattggctgcagtgtgccaaggagacttcgctgtgaaagaaaaaaatgagagtaaaaagaaacccattgcaatcttgttactcctcatacagcgtctcttgctgatgaccgtggccatgcaccca

SEQ ID NO: 5589 - DNA, 599 bp, Chicken  19866894109283_1
  misc_feature (1)..(229): n is any nucleotide
nnnnnnnnnnnnnnnnnnnnnnnnnnnnnnnnnnnnnnnnnnnnnnnnnnnnnnnnnnnnnnnnnnnnnnnnnnnnnnnnnnnnnnnnnnnnnnnnnnnnnnnnnnnnnnnnnnnnnnnnnnnnnnnnnnnnnnnnnnnnnnnnnnnnnnnnnnnnnnnnnnnnnnnnnnnnnnnnnnnnnnnnnnnnnnnnnnnnnnnnnnnnnnnnnnnnnnnnnnnnnnnnnnnnnttaaatcagcttctgctgctcttgttcatccatgccatccaggaaagatgtctttctgaagccagacttcycagacgggacatggcaggtttgctgagcacaatggggggaagcacagcagattcagtggccactcgcttgtatggactcataagcctgttttcatagcatagttgagcaagcagaagagcctagcacaggtttcacagggactgggaagaagtcaggctgctttgggatcccgagacagaggtcttacagatgaagacacaagtatggtgctgacttgcagaggatcatgggggaatggagttgtgaaatgggaaaaccagagctagtttaaaagttaaagtacgcaaaaagataagac

SEQ ID NO: 5590 - DNA, 600 bp, Chicken  19866894109284_1
attatagagttctgtgaacatttctattaatgaaatctcctataaaactttacctactgaataaattttctggtgtgtaggaaggaataagtaatgttgcaggttgtcttaggattgagaaattaaaaacacctctgtcctcatgcatctctagtactttataaatatttaataatctcacattccagtcttcctgcatagaggtgctaacatctttctatcatagattcctgtcttcattaaatttacaagaaaaaaaaatattgagatttctgtttgtctgccaaatataactgaaaygggggaaaaaaatctgaaaataattaatagtagttatggaatatgtatagacaggtgtattcttcaaacagccacagctattcacaaatattcaatgaagcattctgagctgttggtccctagaaattaaccaggaagtcatacgtgctctggaaacattccccgaagagatctggctctcatggtaatagatgaaaagtcttttacttaacagtcatgtaatataatgaaattcagcagttgcaagattcagatgtgacatgacaaattcatgttctctagtactatgaaatgtaagca

SEQ ID NO: 5591 - DNA, 599 bp, Chicken  19866894109286_1
  misc_feature (1)..(92): n is any nucleotide
nnnnnnnnnnnnnnnnnnnnnnnnnnnnnnnnnnnnnnnnnnnnnnnnnnnnnnnnnnnnnnnnnnnnnnnnnnnnnnnnnnnnnnnnnnnnagtggagaaatttgtgtctgtgttgctttgtaatctaccctgaaaacgtgatgagcaccaactgctgccgtgctcggtcagagcgtggctggggggtggctcggtctggcatcctgccgccctggggagctctgggacaaaccccacagccccagatgtttaatttcaaacatgattacaagtcaggttgtgtttgtagaatgggatsacttgggaggagagcagcaggacaggcacagtgcctggcagagmccagcctgccgtgggggcaggacagcagtgccctgctctgtgcatgcctttggccagggctgggagcccrgctcayagaattgttccttctctcttttggaggagtcttattttaagaacttcagattgaatttctatcaaaatgaatcagaatatatttttgcaccagaattaaatcaggctgaaatagaacccagaggaacatgctgattttgactgaatattgcactttaaatattctcaaggccaaaaact

SEQ ID NO: 5592 - DNA, 599 bp, Chicken  19866894109286_2
  misc_feature (1)..(48): n is any nucleotide
nnnnnnnnnnnnnnnnnnnnnnnnnnnnnnnnnnnnnnnnnnnnnnnnagtggagaaatttgtgtctgtgttgctttgtaatctaccctgaaaacgtgatgagcaccaactgctgccgtgctcggtcagagcgtggctggggggtggctcggtctggcatcctgccgccctggggagctctgggacaaaccccacagccccagatgtttaatttcaaacatgattacaagtcaggttgtgtttgtagaatgggatsacttgggaggagagcagcaggacaggcacagtgcctggcagagmccagcctgccgtgggggcaggacagcagtgccctgctctgtgcatgcctttggccagggctgggagcccrgctcayagaattgttccttctctcttttggaggagtcttattttaagaacttcagattgaatttctatcaaaatgaatcagaatatatttttgcaccagaattaaatcaggctgaaatagaacccagaggaacatgctgattttgactgaatattgcactttaaatattctcaaggccaaaaactcagagcaaaactttactgagcaaaaacatgmcatcagagagcct

SEQ ID NO: 5593 - DNA, 600 bp, Chicken  19866894109286_3
ttgctttgtaatctaccctgaaaacgtgatgagcaccaactgctgccgtgctcggtcagagcgtggctggggggtggctcggtctggcatcctgccgccctggggagctctgggacaaaccccacagccccagatgtttaatttcaaacatgattacaagtcaggttgtgtttgtagaatgggatsacttgggaggagagcagcaggacaggcacagtgcctggcagagmccagcctgccgtgggggcaggacagcagtgccctgctctgtgcatgcctttggccagggctgggagcccrgctcayagaattgttccttctctcttttggaggagtcttattttaagaacttcagattgaatttctatcaaaatgaatcagaatatatttttgcaccagaattaaatcaggctgaaatagaacccagaggaacatgctgattttgactgaatattgcactttaaatattctcaaggccaaaaactcagagcaaaactttactgagcaaaaacatgmcatcagagagcctggaaatgtgtttatttgtgtcctacaaagagaattttactgatcttttctcakctcagggtttgcaycagt

SEQ ID NO: 5594 - DNA, 600 bp, Chicken  19866894109286_4
tgtaatctaccctgaaaacgtgatgagcaccaactgctgccgtgctcggtcagagcgtggctggggggtggctcggtctggcatcctgccgccctggggagctctgggacaaaccccacagccccagatgtttaatttcaaacatgattacaagtcaggttgtgtttgtagaatgggatsacttgggaggagagcagcaggacaggcacagtgcctggcagagmccagcctgccgtgggggcaggacagcagtgccctgctctgtgcatgcctttggccagggctgggagcccrgctcayagaattgttccttctctcttttggaggagtcttattttaagaacttcagattgaatttctatcaaaatgaatcagaatatatttttgcaccagaattaaatcaggctgaaatagaacccagaggaacatgctgattttgactgaatattgcactttaaatattctcaaggccaaaaactcagagcaaaactttactgagcaaaaacatgmcatcagagagcctggaaatgtgtttatttgtgtcctacaaagagaattttactgatcttttctcakctcagggtttgcaycagtagtgtg

SEQ ID NO: 5595 - DNA, 600 bp, Chicken  19866894109286_5
gtgcctggcagagmccagcctgccgtgggggcaggacagcagtgccctgctctgtgcatgcctttggccagggctgggagcccrgctcayagaattgttccttctctcttttggaggagtcttattttaagaacttcagattgaatttctatcaaaatgaatcagaatatatttttgcaccagaattaaatcaggctgaaatagaacccagaggaacatgctgattttgactgaatattgcactttaaatattctcaaggccaaaaactcagagcaaaactttactgagcaaaaacatgmcatcagagagcctggaaatgtgtttatttgtgtcctacaaagagaattttactgatcttttctcakctcagggtttgcaycagtagtgtggggaagttcagcattttgttctatattggaacagaggctgagctaaagcctggaaggagaaggcagcttttacaaacgcactctttgcatactcacgtgaaaatgtggaaacgggtcatcagctaaactaaatgtaacacctgtatggataatggatgctattgtatgaagtctggcagttctcgccctatggagacttgcagacctgta

SEQ ID NO: 5596 - DNA, 600 bp, Chicken  19866894109286_6
gccagggctgggagcccrgctcayagaattgttccttctctcttttggaggagtcttattttaagaacttcagattgaatttctatcaaaatgaatcagaatatatttttgcaccagaattaaatcaggctgaaatagaacccagaggaacatgctgattttgactgaatattgcactttaaatattctcaaggccaaaaactcagagcaaaactttactgagcaaaaacatgmcatcagagagcctggaaatgtgtttatttgtgtcctacaaagagaattttactgatcttttctcakctcagggtttgcaycagtagtgtggggaagttcagcattttgttctatattggaacagaggctgagctaaagcctggaaggagaaggcagcttttacaaacgcactctttgcatactcacgtgaaaatgtggaaacgggtcatcagctaaactaaatgtaacacctgtatggataatggatgctattgtatgaagtctggcagttctcgccctatggagacttgcagacctgtagcacgctgttcctagggagcgtcaggccccgctttcacctccctccaccaggccttgcacaccact

SEQ ID NO: 5597 - DNA, 600 bp, Chicken  19866894109286_7
cccrgctcayagaattgttccttctctcttttggaggagtcttattttaagaacttcagattgaatttctatcaaaatgaatcagaatatatttttgcaccagaattaaatcaggctgaaatagaacccagaggaacatgctgattttgactgaatattgcactttaaatattctcaaggccaaaaactcagagcaaaactttactgagcaaaaacatgmcatcagagagcctggaaatgtgtttatttgtgtcctacaaagagaattttactgatcttttctcakctcagggtttgcaycagtagtgtggggaagttcagcattttgttctatattggaacagaggctgagctaaagcctggaaggagaaggcagcttttacaaacgcactctttgcatactcacgtgaaaatgtggaaacgggtcatcagctaaactaaatgtaacacctgtatggataatggatgctattgtatgaagtctggcagttctcgccctatggagacttgcagacctgtagcacgctgttcctagggagcgtcaggccccgctttcacctccctccaccaggccttgcacaccactgctctggctgctgt

SEQ ID NO: 5598 - DNA, 599 bp, Chicken  19866894109287_1
  misc_feature (1)..(25): n is any nucleotide
nnnnnnnnnnnnnnnnnnnnnnnnncccaaggagacagcaaaagcagtttgccagcaggctaattactgctgatccccactgatgccatcgaaatcaagtcgcgttgccagagagacaggtggaggatccgagatgttacacttagttgtccttcccccattttgttcaccatttgctttgcagaaccccccagacaggcatacactgggaacgagtaggttattttctcagcattaacttctctgagtttatgcagacagatgggtgcaaagaagatggtacagaagagggcacaaaaygcaaaacccagttattggccacacaracagacccatagagcaaggggtaatcacaacactgagtggaggattcaagctctcagggtaaagcacgataaatctcagattcttgtttttcacacgtctggaataagttgttctacaaaggctggtgacaccgagtctgtctgggatgcaggtaagttgaaagtaagagacatgacagatctacaaaagaacgggagctatagggagtcagaaaaacagcagagatggggaaacgagaaagattcatgttttgtttacagtgcccaggtctg

SEQ ID NO: 5599 - DNA, 600 bp, Chicken  19866894109287_10
cctaggaaaatctatttctgctttgcttcagacaaaaccaaaaaccgagtactgaaggtaaccataacatgtggatgcatttacgggcaaagcacttgggaaaaaaaataagccagataaggatttgaagcaaaaacgctactgggccatccgtatccaccccatgtttgcaaagtagctggacaaactgatagatggaaaaaaaactgtgccaagagaatcactggcaaagggcaagcaacaagcrgtcagccctaagccacaaagcgttagcrtggggaaagctgggtcataaacacrgctcctgggtggttgccgtggaagttagtatagctagaggtggccacagcccactgcagcctttgaacagaggctcccagctgacgttacccagaactggagctgatgctacgcarcgtttcagaaaaaaataacctctcaagagtcgagcagctcatttttaagcataaaagcaacctctcaatgccatttaaagcaagtctcacatctcgtcttacctggacttttgccctgtccaaaggtttctacagtgagcatcccacgttcccctctccctccggatggcctgcaggaaaaggc

SEQ ID NO: 5600 - DNA, 600 bp, Chicken  19866894109287_11
ataaggatttgaagcaaaaacgctactgggccatccgtatccaccccatgtttgcaaagtagctggacaaactgatagatggaaaaaaaactgtgccaagagaatcactggcaaagggcaagcaacaagcrgtcagccctaagccacaaagcgttagcrtggggaaagctgggtcataaacacrgctcctgggtggttgccgtggaagttagtatagctagaggtggccacagcccactgcagcctttgaacagaggctcccagctgacgttacccagaactggagctgatgctacgcarcgtttcagaaaaaaataacctctcaagagtcgagcagctcatttttaagcataaaagcaacctctcaatgccatttaaagcaagtctcacatctcgtcttacctggacttttgccctgtccaaaggtttctacagtgagcatcccacgttcccctctccctccggatggcctgcaggaaaaggcagccctgctcttgcaaaggatagatgtaacaccacatgcagcctatatagaccttgatgagggtggcttaattaccaccagctgtcccttctagggtagaaatcactgcaaaacct

SEQ ID NO: 5601 - DNA, 600 bp, Chicken  19866894109287_2
ccaaggagacagcaaaagcagtttgccagcaggctaattactgctgatccccactgatgccatcgaaatcaagtcgcgttgccagagagacaggtggaggatccgagatgttacacttagttgtccttcccccattttgttcaccatttgctttgcagaaccccccagacaggcatacactgggaacgagtaggttattttctcagcattaacttctctgagtttatgcagacagatgggtgcaaagaagatggtacagaagagggcacaaaaygcaaaacccagttattggccacacaracagacccatagagcaaggggtaatcacaacactgagtggaggattcaagctctcagggtaaagcacgataaatctcagattcttgtttttcacacgtctggaataagttgttctacaaaggctggtgacaccgagtctgtctgggatgcaggtaagttgaaagtaagagacatgacagatctacaaaagaacgggagctatagggagtcagaaaaacagcagagatggggaaacgagaaagattcatgttttgtttacagtgcccaggtctgggaaaatggaatatttacagataagtt

SEQ ID NO: 5602 - DNA, 600 bp, Chicken  19866894109287_3
gttgaaagtaagagacatgacagatctacaaaagaacgggagctatagggagtcagaaaaacagcagagatggggaaacgagaaagattcatgttttgtttacagtgcccaggtctgggaaaatggaatatttacagataagttgcctttttctcctgtcctgcgtagcttctctgtaagaagcaatgtaaacaggtctctaaaggagccaaaggcaagcagggcaccttgcttttgtcacattcaagcaacacttctatctactgcctcttgaaaacagccaccaaaaccattcttcarctgaacacggggcttttccattccggatgattttcartaaggagggtttgctctataaaggaaatagaagaatctgctgtggtttggtgggcaaggaaaccrggattgggacacactcatatctgcattccttcctcgctggagaggcaagttttttcaagcaaaaccagatttctaagtgttttgtaagtgatactcctaattaaatctttccttgtttccaagcccccgtgttaattttcatctctgcaaaaagagaaacccaggaggatctccaacagcattttawtttttctgttg

SEQ ID NO: 5603 - DNA, 600 bp, Chicken  19866894109287_4
gggagctatagggagtcagaaaaacagcagagatggggaaacgagaaagattcatgttttgtttacagtgcccaggtctgggaaaatggaatatttacagataagttgcctttttctcctgtcctgcgtagcttctctgtaagaagcaatgtaaacaggtctctaaaggagccaaaggcaagcagggcaccttgcttttgtcacattcaagcaacacttctatctactgcctcttgaaaacagccaccaaaaccattcttcarctgaacacggggcttttccattccggatgattttcartaaggagggtttgctctataaaggaaatagaagaatctgctgtggtttggtgggcaaggaaaccrggattgggacacactcatatctgcattccttcctcgctggagaggcaagttttttcaagcaaaaccagatttctaagtgttttgtaagtgatactcctaattaaatctttccttgtttccaagcccccgtgttaattttcatctctgcaaaaagagaaacccaggaggatctccaacagcattttawtttttctgttgtcagaagcactgctggctttccttatctggaaagcag

SEQ ID NO: 5604 - DNA, 600 bp, Chicken  19866894109287_5
cagtgcccaggtctgggaaaatggaatatttacagataagttgcctttttctcctgtcctgcgtagcttctctgtaagaagcaatgtaaacaggtctctaaaggagccaaaggcaagcagggcaccttgcttttgtcacattcaagcaacacttctatctactgcctcttgaaaacagccaccaaaaccattcttcarctgaacacggggcttttccattccggatgattttcartaaggagggtttgctctataaaggaaatagaagaatctgctgtggtttggtgggcaaggaaaccrggattgggacacactcatatctgcattccttcctcgctggagaggcaagttttttcaagcaaaaccagatttctaagtgttttgtaagtgatactcctaattaaatctttccttgtttccaagcccccgtgttaattttcatctctgcaaaaagagaaacccaggaggatctccaacagcattttawtttttctgttgtcagaagcactgctggctttccttatctggaaagcaggcactcaacaacaagctctcatctygcctaggaaaatctatttctgctttgcttcagacaaaacc

SEQ ID NO: 5605 - DNA, 600 bp, Chicken  19866894109287_6
ccattcttcarctgaacacggggcttttccattccggatgattttcartaaggagggtttgctctataaaggaaatagaagaatctgctgtggtttggtgggcaaggaaaccrggattgggacacactcatatctgcattccttcctcgctggagaggcaagttttttcaagcaaaaccagatttctaagtgttttgtaagtgatactcctaattaaatctttccttgtttccaagcccccgtgttaattttcatctctgcaaaaagagaaacccaggaggatctccaacagcattttawtttttctgttgtcagaagcactgctggctttccttatctggaaagcaggcactcaacaacaagctctcatctygcctaggaaaatctatttctgctttgcttcagacaaaaccaaaaaccgagtactgaaggtaaccataacatgtggatgcatttacgggcaaagcacttgggaaaaaaaataagccagataaggatttgaagcaaaaacgctactgggccatccgtatccaccccatgtttgcaaagtagctggacaaactgatagatggaaaaaaaactgtgccaagagaatcactg

SEQ ID NO: 5606 - DNA, 600 bp, Chicken  19866894109287_7
aatagaagaatctgctgtggtttggtgggcaaggaaaccrggattgggacacactcatatctgcattccttcctcgctggagaggcaagttttttcaagcaaaaccagatttctaagtgttttgtaagtgatactcctaattaaatctttccttgtttccaagcccccgtgttaattttcatctctgcaaaaagagaaacccaggaggatctccaacagcattttawtttttctgttgtcagaagcactgctggctttccttatctggaaagcaggcactcaacaacaagctctcatctygcctaggaaaatctatttctgctttgcttcagacaaaaccaaaaaccgagtactgaaggtaaccataacatgtggatgcatttacgggcaaagcacttgggaaaaaaaataagccagataaggatttgaagcaaaaacgctactgggccatccgtatccaccccatgtttgcaaagtagctggacaaactgatagatggaaaaaaaactgtgccaagagaatcactggcaaagggcaagcaacaagcrgtcagccctaagccacaaagcgttagcrtggggaaagctgggtcataaacac

SEQ ID NO: 5607 - DNA, 600 bp, Chicken  19866894109287_8
tgctggctttccttatctggaaagcaggcactcaacaacaagctctcatctygcctaggaaaatctatttctgctttgcttcagacaaaaccaaaaaccgagtactgaaggtaaccataacatgtggatgcatttacgggcaaagcacttgggaaaaaaaataagccagataaggatttgaagcaaaaacgctactgggccatccgtatccaccccatgtttgcaaagtagctggacaaactgatagatggaaaaaaaactgtgccaagagaatcactggcaaagggcaagcaacaagcrgtcagccctaagccacaaagcgttagcrtggggaaagctgggtcataaacacrgctcctgggtggttgccgtggaagttagtatagctagaggtggccacagcccactgcagcctttgaacagaggctcccagctgacgttacccagaactggagctgatgctacgcarcgtttcagaaaaaaataacctctcaagagtcgagcagctcatttttaagcataaaagcaacctctcaatgccatttaaagcaagtctcacatctcgtcttacctggacttttgccctgtccaaaggtttct

SEQ ID NO: 5608 - DNA, 600 bp, Chicken  19866894109287_9
cactcaacaacaagctctcatctygcctaggaaaatctatttctgctttgcttcagacaaaaccaaaaaccgagtactgaaggtaaccataacatgtggatgcatttacgggcaaagcacttgggaaaaaaaataagccagataaggatttgaagcaaaaacgctactgggccatccgtatccaccccatgtttgcaaagtagctggacaaactgatagatggaaaaaaaactgtgccaagagaatcactggcaaagggcaagcaacaagcrgtcagccctaagccacaaagcgttagcrtggggaaagctgggtcataaacacrgctcctgggtggttgccgtggaagttagtatagctagaggtggccacagcccactgcagcctttgaacagaggctcccagctgacgttacccagaactggagctgatgctacgcarcgtttcagaaaaaaataacctctcaagagtcgagcagctcatttttaagcataaaagcaacctctcaatgccatttaaagcaagtctcacatctcgtcttacctggacttttgccctgtccaaaggtttctacagtgagcatcccacgttcccctctcc

SEQ ID NO: 5609 - DNA, 599 bp, Chicken  19866894109296_1
aagcaactatttatgtgtactcaacccttgttgttacattacacagccaaaatgaaagagagttgtactacagaccagtagtgtggtgaaacttctccaggtacaagggttcaataagctttatggatgtgtgaatgctcaaaatttctcagcctttcttaaacttctttgcagacatttctcttgatggtgttctgagccttaaaatatagcagggataaaacagtgactctgtaattgcaatggcaaaccaaagatttcagtggagttggaatttcacttctttatcagtagttcaasattatcaaggctataatatttcaagcatgagtgccaaagctatgacttagtgccccactctatattaagacttcaaatgctctcaaatggatccatattggaacatcagatgtagaatgacagagattatctgtatcatctgcacctcctacgcaactaattgttcagtattagttattcttgctgtcctgagagaagtgttttaacttagaaaaatgaatgaaacaaatagcgactgcctctgtttatgtacaagtcagttacaaacaagtcacttctaattgaggagcatctatgca

SEQ ID NO: 5610 - DNA, 600 bp, Chicken  19866894109304_1
tttcatcttgcagcacagagaaaaatagctgcaggtcttggaatacgtattctctcagtgcagaaaaacatcctttctaaattgcaacttttttcttttttcagaagaaaatgatttaattcccaagttgatataaacctgacactgcatacaagcaaaatccacacttcttatgctgttgttccttcagaaaccttcatttttaaggaaacattcagctactgaaattctacttaagagattcccatttcctaacaaggctgcctcttgggggttaaacagcatggccttgaagaatgyattctattttctggagtggcctttctattgaagaaaaggctaaaagtgcaaacagaagcagtgagttttcctggtaatgagcctcaaacctgaccttcataacccatcaggatactgcattgtccacatctgctttagtgattagcctctgctttcggagtgtggccaaagctggatcctggtgccagcagcacagaagtgttcgctttcggtgttgtgtgcacacctgacacctgctaactgaggtcgccaaattcatttcataagccaatgaacccctactggaagacattccaaaac

SEQ ID NO: 5611 - DNA, 600 bp, Chicken  19866894109307_1
cttgaacacccttggaattacccaaagtttgtgaaacaactgggcttcaagtgccccactcttctaattacaacataatttatgttagcagcagcttttgaacacaatgaagctgagtggtttcctgttcagtgagcagtctgtaaaccacaatagattcatttggtctttgctgtttgctgcttagagcacagccacattaataataaaacttctattgaagttacttatcggcgccttaaacagcagtttacttaccgattttttggcagagttttcttcctcccatttgaatctgtygggtgctgtatcgtagttttcctgttagttctgacacaattgaacaaagcttactgtcagcaagcaatagtaagtggaaaagaaatgtgaatttaaaatgaaattttcaaatctgggaaaaacatatgtaaatgattcccatctctacctcaaacatgattttctttcttgtttactttwgttttttwctatttggaaaaaaatattttactgctgagagaatgaaaggctggaaacagaattcctgcatccagtgttttaatttatttacgataaggtatttattaaactcttctacag

SEQ ID NO: 5612 - DNA, 600 bp, Chicken  19866894109307_2
tgcttagagcacagccacattaataataaaacttctattgaagttacttatcggcgccttaaacagcagtttacttaccgattttttggcagagttttcttcctcccatttgaatctgtygggtgctgtatcgtagttttcctgttagttctgacacaattgaacaaagcttactgtcagcaagcaatagtaagtggaaaagaaatgtgaatttaaaatgaaattttcaaatctgggaaaaacatatgtaaatgattcccatctctacctcaaacatgattttctttcttgtttactttwgttttttwctatttggaaaaaaatattttactgctgagagaatgaaaggctggaaacagaattcctgcatccagtgttttaatttatttacgataaggtatttattaaactcttctacagatgaatagaaattaagattcagggcacatatccagtatctctaataatagtaaatcacttgataaacactagccatgtagatagcaaagtaacagagacctgttattttggccctctgcttctggttgctcttaagcttaacttagaaacctaatttactcatttaaaataatattgatc

SEQ ID NO: 5613 - DNA, 600 bp, Chicken  19866894109307_3
gcacagccacattaataataaaacttctattgaagttacttatcggcgccttaaacagcagtttacttaccgattttttggcagagttttcttcctcccatttgaatctgtygggtgctgtatcgtagttttcctgttagttctgacacaattgaacaaagcttactgtcagcaagcaatagtaagtggaaaagaaatgtgaatttaaaatgaaattttcaaatctgggaaaaacatatgtaaatgattcccatctctacctcaaacatgattttctttcttgtttactttwgttttttwctatttggaaaaaaatattttactgctgagagaatgaaaggctggaaacagaattcctgcatccagtgttttaatttatttacgataaggtatttattaaactcttctacagatgaatagaaattaagattcagggcacatatccagtatctctaataatagtaaatcacttgataaacactagccatgtagatagcaaagtaacagagacctgttattttggccctctgcttctggttgctcttaagcttaacttagaaacctaatttactcatttaaaataatattgatctgaaacac

SEQ ID NO: 5614 - DNA, 600 bp, Chicken  19866894109307_4
aaacactagccatgtagatagcaaagtaacagagacctgttattttggccctctgcttctggttgctcttaagcttaacttagaaacctaatttactcatttaaaataatattgatctgaaacacagaggatttcagcttttaccccttaactactggaaacctcagtgttagcagcaaaagaagattatcttgccaaataattcctatagattgtcaaggtggccatgttctcttgaactcttgggcttagtcctgcccaaattcatctaaattcatatattctataaatagtattgcyaaataaagatttatttttygttgtatatgcttaaaaattcttaaaagaacagttcttaatatgtgaatgcacacacattttctaattttcagagtcaaagaactaatggccacaaatgcaaagacagaaatgttagaggtagaagacatgattttatttaatgtatttttgaacattggttataattgaattttgaactttgtgtatttcttagtttgcagacaagacctttagaagctttgtcccttgccaccagaagtataattggttaaatttttctgctgagttatctatgtagaa

SEQ ID NO: 5615 - DNA, 600 bp, Chicken  19866894109307_5
agcaaagtaacagagacctgttattttggccctctgcttctggttgctcttaagcttaacttagaaacctaatttactcatttaaaataatattgatctgaaacacagaggatttcagcttttaccccttaactactggaaacctcagtgttagcagcaaaagaagattatcttgccaaataattcctatagattgtcaaggtggccatgttctcttgaactcttgggcttagtcctgcccaaattcatctaaattcatatattctataaatagtattgcyaaataaagatttatttttygttgtatatgcttaaaaattcttaaaagaacagttcttaatatgtgaatgcacacacattttctaattttcagagtcaaagaactaatggccacaaatgcaaagacagaaatgttagaggtagaagacatgattttatttaatgtatttttgaacattggttataattgaattttgaactttgtgtatttcttagtttgcagacaagacctttagaagctttgtcccttgccaccagaagtataattggttaaatttttctgctgagttatctatgtagaacatcagaaatacaatcagt

SEQ ID NO: 5616 - DNA, 600 bp, Chicken  19866894109308_1
ggcagaaaggtgtggtgacaccatcctgtgtttatgggatggaaatgccctccctgtggcataagcaaaagccaaaaggataggggaggtgcaagcagcagtccccggtgaggaggggaaagcatgaggttgtgctaacagaggtgatctgcagggcagggatgcaaacagcagcctcctgcacaccaaaattgcctgtgtagcattgtcccagatttaaataatggttttccaggattaaacaaaaaacaattgaatgaactctactcagctcttgtgaggccccatctggagtactgygtccaggcctggggcccccagcacaagaaggacgtggagctcttggagcgggtccagaggagggccactaagatggccggagggctggagcatctctctatgaggaaaggttgagggaactgggcttgtttagcttggagaagagaaggctctggggagaccttattgtggctttctagtacttgaagggtgtgtataaacaggagggggaacggctgtttacgagggtggatagggataggacaagggggaatggttttaaactgggacagaggtttaggttggatgttaggaggaagt

SEQ ID NO: 5617 - DNA, 600 bp, Chicken  19866894109310_1
agtgcaagtttattttaccactcaccttaccctgttgtaaagtgttaatcagaaagaataaatcctgatgtctcccctggtacagctcagcatacggcatgctagaattattttgttgtgggtgaaaagtgtaccttggtatttgcatattttcaggttaattttccatgtcaatttagtctataaatacaagcaaaggtttgaaaagcatttgttaccccaaatggatcttccttgttattctcaaagtgacatactccttttaaaacaacaagctttaggatttactaatcagctccrtctaaaatcctttacttctagtcagtacaaagcacgatcactgtgttgagcatggaaaatttaaatgaattttgtatttgcaatagaatgtaagaaaaaaagtctaaacgcgaagttgtcgtttgtatttcatggcaagcttattgatctcaccagcacttaacacagaatctttactgagaagaaaattttgagaaattatatttctctagaaagtcaaagcaaacagtctgttatataaaaatagataatctgtagttttttctagtgtatacggtaacattgttttgttagcctaca

SEQ ID NO: 5618 - DNA, 599 bp, Chicken  19866894109312_1
  misc_feature (1)..(186): n is any nucleotide
nnnnnnnnnnnnnnnnnnnnnnnnnnnnnnnnnnnnnnnnnnnnnnnnnnnnnnnnnnnnnnnnnnnnnnnnnnnnnnnnnnnnnnnnnnnnnnnnnnnnnnnnnnnnnnnnnnnnnnnnnnnnnnnnnnnnnnnnnnnnnnnnnnnnnnnnnnnnnnnnnnnnnnnnnnnnnnnnnnnnnnnnnnacattgtttagggaagttgtgaagtttaataatcacttatggatgcatttgactctggataaaagtgaatgcagctgcacttgctgatagctacccctctcctgctctgatctkaggtaaccaggaaaagatctgtttcactcagtgtacatgttctaaagaaatatggctccaggactatagaaatccaaggaaaccacttggaaaagaatggactttcctaagatttctgtgaaatacttcacattcttgtaattagctaacgctcctactacaagttttagagaygagagcattgggaagactaaattactggggtccaaagaatccaaaatactyttggcactttatgctagatagactgaagaaagggtgtaccttaytgtatatgctrtacatcagacatagcagtg

SEQ ID NO: 5619 - DNA, 599 bp, Chicken  19866894109312_2
  misc_feature (1)..(12): n is any nucleotide
nnnnnnnnnnnnacattgtttagggaagttgtgaagtttaataatcacttatggatgcatttgactctggataaaagtgaatgcagctgcacttgctgatagctacccctctcctgctctgatctkaggtaaccaggaaaagatctgtttcactcagtgtacatgttctaaagaaatatggctccaggactatagaaatccaaggaaaccacttggaaaagaatggactttcctaagatttctgtgaaatacttcacattcttgtaattagctaacgctcctactacaagttttagagaygagagcattgggaagactaaattactggggtccaaagaatccaaaatactyttggcactttatgctagatagactgaagaaagggtgtaccttaytgtatatgctrtacatcagacatagcagtggaactaattayactgcagatgataatggttttctttccctgtccaaatgagctcaaatcacttaaagctgtgtagttaaatcccactgctggcttcaaacagggcagaaatgcctacaaatcggtatcaactctttatcattgggaactgtagttattggtatatcttaaagaa

SEQ ID NO: 5620 - DNA, 581 bp, Chicken  19866894109312_3
tggatgcatttgactctggataaaagtgaatgcagctgcacttgctgatagctacccctctcctgctctgatctkaggtaaccaggaaaagatctgtttcactcagtgtacatgttctaaagaaatatggctccaggactatagaaatccaaggaaaccacttggaaaagaatggactttcctaagatttctgtgaaatacttcacattcttgtaattagctaacgctcctactacaagttttagagaygagagcattgggaagactaaattactggggtccaaagaatccaaaatactyttggcactttatgctagatagactgaagaaagggtgtaccttaytgtatatgctrtacatcagacatagcagtggaactaattayactgcagatgataatggttttctttccctgtccaaatgagctcaaatcacttaaagctgtgtagttaaatcccactgctggcttcaaacagggcagaaatgcctacaaatcggtatcaactctttatcattgggaactgtagttattggtatatcttaaagaaatggatgtaaagtttgagttcacataatataaa

SEQ ID NO: 5621 - DNA, 537 bp, Chicken  19866894109312_4
ctgatagctacccctctcctgctctgatctkaggtaaccaggaaaagatctgtttcactcagtgtacatgttctaaagaaatatggctccaggactatagaaatccaaggaaaccacttggaaaagaatggactttcctaagatttctgtgaaatacttcacattcttgtaattagctaacgctcctactacaagttttagagaygagagcattgggaagactaaattactggggtccaaagaatccaaaatactyttggcactttatgctagatagactgaagaaagggtgtaccttaytgtatatgctrtacatcagacatagcagtggaactaattayactgcagatgataatggttttctttccctgtccaaatgagctcaaatcacttaaagctgtgtagttaaatcccactgctggcttcaaacagggcagaaatgcctacaaatcggtatcaactctttatcattgggaactgtagttattggtatatcttaaagaaatggatgtaaagtttgagttcacataatataaa

SEQ ID NO: 5622 - DNA, 526 bp, Chicken  19866894109312_5
ccctctcctgctctgatctkaggtaaccaggaaaagatctgtttcactcagtgtacatgttctaaagaaatatggctccaggactatagaaatccaaggaaaccacttggaaaagaatggactttcctaagatttctgtgaaatacttcacattcttgtaattagctaacgctcctactacaagttttagagaygagagcattgggaagactaaattactggggtccaaagaatccaaaatactyttggcactttatgctagatagactgaagaaagggtgtaccttaytgtatatgctrtacatcagacatagcagtggaactaattayactgcagatgataatggttttctttccctgtccaaatgagctcaaatcacttaaagctgtgtagttaaatcccactgctggcttcaaacagggcagaaatgcctacaaatcggtatcaactctttatcattgggaactgtagttattggtatatcttaaagaaatggatgtaaagtttgagttcacataatataaa

SEQ ID NO: 5623 - DNA, 496 bp, Chicken  19866894109312_6
gaaaagatctgtttcactcagtgtacatgttctaaagaaatatggctccaggactatagaaatccaaggaaaccacttggaaaagaatggactttcctaagatttctgtgaaatacttcacattcttgtaattagctaacgctcctactacaagttttagagaygagagcattgggaagactaaattactggggtccaaagaatccaaaatactyttggcactttatgctagatagactgaagaaagggtgtaccttaytgtatatgctrtacatcagacatagcagtggaactaattayactgcagatgataatggttttctttccctgtccaaatgagctcaaatcacttaaagctgtgtagttaaatcccactgctggcttcaaacagggcagaaatgcctacaaatcggtatcaactctttatcattgggaactgtagttattggtatatcttaaagaaatggatgtaaagtttgagttcacataatataaa

SEQ ID NO: 5624 - DNA, 600 bp, Chicken  19866894109323_1
aagcattattaccaaagggagagctgaaataattcttgctcctacagacctttctagtccttcctgccatcagaatcctccctctctttaattagcagaattaattatcaagcttatgaattgtggtttgaaaagaactgagcttaaagagcagtaagatttattagcaaagagaactaagagttggaatcagctgattttaaagacttgttttctaaatgggaaacattattaaatcatcaccataaaattaagcaattatttcaaagtgacaccaagtaccacagaaaggaaagctgsttttgtgtcctattagctaaaaaaaggtcagcaggggaaaaattaaaaaggaaaattaatttctaagagtaattgcaagttaggagatacagaggaaagcacatcaccaaggggtaatattttctctctcttttttttttctttaaggctataaatatatcttatatttcattaaattctgaccataggaggacctgttcagtactaaccacattattcagcaataaataattattgcaattatttagacactgcatttacagaacttacataaatgacctcaactgagtatttaaacta

SEQ ID NO: 5625 - DNA, 600 bp, Chicken  19866894109326_1
tggcagcagaggggcagtctgacagaatagcatctgacatagaagtgtggatgaagcaaaggtgtgacactgaattcttccatgcagaaaaaatggcacctgttgacattcatcagtgcttgctgaacatttatggggacccaacagtggatgtgagcacagtaaggcggcgagtggtgcatttcagcaaaggcagcagtgctgcgaaaggcaagctgcatttcagatcaccatgcacagctgtcacaccatgaaatgaagagtgtttcaatcagttcatccacaaaaatcagcagactrtgaccaaggaactgtgtatggaactgaatattagcttcaaaacgatggtggcaacattggaatattgcaaagtttgctccagctgggtcccacgaatgttcacacaggaacagaaagaacactatatgcaagtttgtcagcatttactgaaccaatayggagctkaaagtggcagtttcctggatcacatyattactggtgacaaggcatgttgtcatcactatgaggtgaagtcaaaacatcaaagaaaaaaagttcaagatgcagctatcagcaggtaaagtgatgtgcgctttctgt

SEQ ID NO: 5626 - DNA, 600 bp, Chicken  19866894109326_2
acagtaaggcggcgagtggtgcatttcagcaaaggcagcagtgctgcgaaaggcaagctgcatttcagatcaccatgcacagctgtcacaccatgaaatgaagagtgtttcaatcagttcatccacaaaaatcagcagactrtgaccaaggaactgtgtatggaactgaatattagcttcaaaacgatggtggcaacattggaatattgcaaagtttgctccagctgggtcccacgaatgttcacacaggaacagaaagaacactatatgcaagtttgtcagcatttactgaaccaatayggagctkaaagtggcagtttcctggatcacatyattactggtgacaaggcatgttgtcatcactatgaggtgaagtcaaaacatcaaagaaaaaaagttcaagatgcagctatcagcaggtaaagtgatgtgcgctttctgttggattaggaaaggggcaatccttctggatttcctggaacgcagacaaaacatccactctgactgctacattgtgacactgactaagccaaaggctccaatccycagaatcaggccagagaaggcaatctttctcttgcaacacaacaatgccaggct

SEQ ID NO: 5627 - DNA, 600 bp, Chicken  19866894109326_3
ggcggcgagtggtgcatttcagcaaaggcagcagtgctgcgaaaggcaagctgcatttcagatcaccatgcacagctgtcacaccatgaaatgaagagtgtttcaatcagttcatccacaaaaatcagcagactrtgaccaaggaactgtgtatggaactgaatattagcttcaaaacgatggtggcaacattggaatattgcaaagtttgctccagctgggtcccacgaatgttcacacaggaacagaaagaacactatatgcaagtttgtcagcatttactgaaccaatayggagctkaaagtggcagtttcctggatcacatyattactggtgacaaggcatgttgtcatcactatgaggtgaagtcaaaacatcaaagaaaaaaagttcaagatgcagctatcagcaggtaaagtgatgtgcgctttctgttggattaggaaaggggcaatccttctggatttcctggaacgcagacaaaacatccactctgactgctacattgtgacactgactaagccaaaggctccaatccycagaatcaggccagagaaggcaatctttctcttgcaacacaacaatgccaggctccataac

SEQ ID NO: 5628 - DNA, 600 bp, Chicken  19866894109326_4
ggcagcagtgctgcgaaaggcaagctgcatttcagatcaccatgcacagctgtcacaccatgaaatgaagagtgtttcaatcagttcatccacaaaaatcagcagactrtgaccaaggaactgtgtatggaactgaatattagcttcaaaacgatggtggcaacattggaatattgcaaagtttgctccagctgggtcccacgaatgttcacacaggaacagaaagaacactatatgcaagtttgtcagcatttactgaaccaatayggagctkaaagtggcagtttcctggatcacatyattactggtgacaaggcatgttgtcatcactatgaggtgaagtcaaaacatcaaagaaaaaaagttcaagatgcagctatcagcaggtaaagtgatgtgcgctttctgttggattaggaaaggggcaatccttctggatttcctggaacgcagacaaaacatccactctgactgctacattgtgacactgactaagccaaaggctccaatccycagaatcaggccagagaaggcaatctttctcttgcaacacaacaatgccaggctccataacagtttgaagaccatggagcacgtcgc

SEQ ID NO: 5629 - DNA, 566 bp, Chicken  19866894109326_5
caggaacagaaagaacactatatgcaagtttgtcagcatttactgaaccaatayggagctkaaagtggcagtttcctggatcacatyattactggtgacaaggcatgttgtcatcactatgaggtgaagtcaaaacatcaaagaaaaaaagttcaagatgcagctatcagcaggtaaagtgatgtgcgctttctgttggattaggaaaggggcaatccttctggatttcctggaacgcagacaaaacatccactctgactgctacattgtgacactgactaagccaaaggctccaatccycagaatcaggccagagaaggcaatctttctcttgcaacacaacaatgccaggctccataacagtttgaagaccatggagcacgtcgctgatcttggttggactgtcctaccacacccaccatatactctgaattagatgccttctaatttacatctgtttgggacagtagatgatggactgcatggacaatgacttcctagcaggaacaccatcatagaagctgtggaacagtgagtcacctgcactggtgcagatttttatgggg

SEQ ID NO: 5630 - DNA, 600 bp, Chicken  19866894109327_1
agaaaatcagctaacaagaagcagatttccagttgaggtctcccttgtgatataccaaataaaacattccttcctggagggagtattcgtgacaagtaatgatgtgtttctgtgggcctgtaagaaacatgattggtgatcctatatattggctggattggttgttcttttagtattacagttaagaacctcttaaaattaaacagaagttgcataatgaagttaacctgtttggagctatccagcttctctgacactttgattgctctatcagagcaaaaatcaccagaaaagtacttytgtctctttgcaaatcagcagaagaaagagcagccatgtygctatcattcttttgcaggactgtaaagccgaagggctgttccacctgcccatttctggttctagccactccaaaatgagctgaagtrggacactgtgggaaggagtgactgggaacaggcaaatgtgtcaacacatgawggggacatggaataaagacatgtcctgtgtgagaatgttcatcatcagagaaccgcagagtaaatatgtgagaaattggtggaaaggaatatggcatgtggtaggtttttcaagaaacat

SEQ ID NO: 5631 - DNA, 600 bp, Chicken  19866894109327_2
tcccttgtgatataccaaataaaacattccttcctggagggagtattcgtgacaagtaatgatgtgtttctgtgggcctgtaagaaacatgattggtgatcctatatattggctggattggttgttcttttagtattacagttaagaacctcttaaaattaaacagaagttgcataatgaagttaacctgtttggagctatccagcttctctgacactttgattgctctatcagagcaaaaatcaccagaaaagtacttytgtctctttgcaaatcagcagaagaaagagcagccatgtygctatcattcttttgcaggactgtaaagccgaagggctgttccacctgcccatttctggttctagccactccaaaatgagctgaagtrggacactgtgggaaggagtgactgggaacaggcaaatgtgtcaacacatgawggggacatggaataaagacatgtcctgtgtgagaatgttcatcatcagagaaccgcagagtaaatatgtgagaaattggtggaaaggaatatggcatgtggtaggtttttcaagaaacatgytttttgaacacccttttgtttctgttcttagacataca

SEQ ID NO: 5632 - DNA, 600 bp, Chicken  19866894109327_3
atgattggtgatcctatatattggctggattggttgttcttttagtattacagttaagaacctcttaaaattaaacagaagttgcataatgaagttaacctgtttggagctatccagcttctctgacactttgattgctctatcagagcaaaaatcaccagaaaagtacttytgtctctttgcaaatcagcagaagaaagagcagccatgtygctatcattcttttgcaggactgtaaagccgaagggctgttccacctgcccatttctggttctagccactccaaaatgagctgaagtrggacactgtgggaaggagtgactgggaacaggcaaatgtgtcaacacatgawggggacatggaataaagacatgtcctgtgtgagaatgttcatcatcagagaaccgcagagtaaatatgtgagaaattggtggaaaggaatatggcatgtggtaggtttttcaagaaacatgytttttgaacacccttttgtttctgttcttagacatacaaggagggagtgaatcattgctaggcagtttgctgcaccagctgaaatgtaccatacacttctgtttgtctcacattcctaaggcgaag

SEQ ID NO: 5633 - DNA, 600 bp, Chicken  19866894109327_4
gttaagaacctcttaaaattaaacagaagttgcataatgaagttaacctgtttggagctatccagcttctctgacactttgattgctctatcagagcaaaaatcaccagaaaagtacttytgtctctttgcaaatcagcagaagaaagagcagccatgtygctatcattcttttgcaggactgtaaagccgaagggctgttccacctgcccatttctggttctagccactccaaaatgagctgaagtrggacactgtgggaaggagtgactgggaacaggcaaatgtgtcaacacatgawggggacatggaataaagacatgtcctgtgtgagaatgttcatcatcagagaaccgcagagtaaatatgtgagaaattggtggaaaggaatatggcatgtggtaggtttttcaagaaacatgytttttgaacacccttttgtttctgttcttagacatacaaggagggagtgaatcattgctaggcagtttgctgcaccagctgaaatgtaccatacacttctgtttgtctcacattcctaaggcgaagctaacacctgcttcatcaggatctgtgcagctccacagaagatgttatgggc

SEQ ID NO: 5634 - DNA, 600 bp, Chicken  19866894109327_5
tctctttgcaaatcagcagaagaaagagcagccatgtygctatcattcttttgcaggactgtaaagccgaagggctgttccacctgcccatttctggttctagccactccaaaatgagctgaagtrggacactgtgggaaggagtgactgggaacaggcaaatgtgtcaacacatgawggggacatggaataaagacatgtcctgtgtgagaatgttcatcatcagagaaccgcagagtaaatatgtgagaaattggtggaaaggaatatggcatgtggtaggtttttcaagaaacatgytttttgaacacccttttgtttctgttcttagacatacaaggagggagtgaatcattgctaggcagtttgctgcaccagctgaaatgtaccatacacttctgtttgtctcacattcctaaggcgaagctaacacctgcttcatcaggatctgtgcagctccacagaagatgttatgggcattacaataacttgctgcagggggcaagtggataagagaaaatgcatttaaggtgttgtaagcctcatcctacattccaaaaaacctcctttgactctcagtagtgctgggtttcagcttat

SEQ ID NO: 5635 - DNA, 600 bp, Chicken  19866894109335_1
gtaagaccttgcttaatagaaagtcaaactgtccattttatacagccccaatgacttacatacaccaaaagcaccataaggttggcttaaatgacttctttatagtaggtgtgcagcccacctacttttactcatttaagtcgaaatactattggtagagaaacagaagccaccaaaggcagacatcccacacattcttggagaccctcaaaacccaaagccagtctccatgctcaacaacatggtgactgcaacccattcctaccttctgccttttctctcctttcccaaggggacagrctctccagaacacctaagtgcccagagtgacacagtgagggccctgtccctgcagtgactgtctccccaggcacccactcacaggatcatggcagccttgatcagggacatgcttcaggcagctgtgacctatggaagctttgactagctgacgaaatgcaacccacacctacagtctggacaatctttatgagataacagtatttgatgtacaaacaaatagttcttttctcagaaggaaaagtctgtgtgctttttctgatgagaactgagaggctatattttctatggatctcagag

SEQ ID NO: 5636 - DNA, 479 bp, Chicken  19866894109335_2
tttatgagataacagtatttgatgtacaaacaaatagttcttttctcagaaggaaaagtctgtgtgctttttctgatgagaactgagaggctatattttctatggatctcagagacgtgcaattaaagaatgtcaaatttgcatgcatacagaatctaactgaagggtgagcaggctatgttacaacatttcttacttgacttgacaaccctaatattcttttaacagctcctgtatgtaatcctgttaccttaaaaaaactaaatgtgccattgtgcaactcaaccctacagcccacaygggtcaggagaaggatggaaaccccccgaggtttctgcttcccaacggctgctggctactatcacagcccaagcagtatgcaacatcacaccaaacagagttagaatgagcagagcatggctctgaaggctccattggtttaccagaaaccagatttcacaggcagcattaggcagaag

SEQ ID NO: 5637 - DNA, 600 bp, Chicken  19866894109336_1
aattactgagaatgacacaagaattactaacctacagatcatagtgtatcggcattctgttacaacagaagcagccaaaagtttaggaatggcctgcttctgaattaggaggagaagtaataataattacttattatgttgcctttactcatgagaaaagtatcacaggccaaagcagcgatagattctgtaagattaaactgctgtttacaagcttttttcccccccttccctttactgatagcattcagactacgtaaagaagccttcaaaacaagtccagacgtggtgctgttttcmctgatggtgttgcaagaaagcatcgcacccatcttgaagtgcttcggtttctaatgattgcctcactgcagacagatcacagcagcacacttcaaacacgtacaaagccgcgctcccaggagcagagctctgcctgcacaccagggtccacactgagaacgctgaccatgctggtgagagggtgcacctaaccataaccatacctcccacattttttcaaatcaaggactttaatagagtaagtcaccaaaacgaagtagacattggagctttttaaatctttcagttcaggccagtgtt

SEQ ID NO: 5638 - DNA, 600 bp, Chicken  19866894109337_1
acatcttggcttttaaatccgccagctcccatttattggtattaataatacattgggaaagctgttctttttattttattttagtcttctgattattctttttggagtggttctaaaataaaatatttaaaaaagagaatgtttttaactgctttcccacatcctacaggtgaccacccaatgccaaccgatcagaagtcatttgcagagcttaggaaaggggaaaggtgaagaggaaaaaacaaagaaacagcaaaactgttttcataatcatttatgagcccaaagcatccagggaaraactttttaataatgaaggaaatacctaaattagtttccatttaaagtttaggcgtctctaatttataaacgctccttaagcagagccatgttgatgagagttggagtaattactcgcataagtggaaatgcaaaactttggtgcttccacgcagttcattctccttctgttaactccgctgagctttctttaagctcagcacacccagggaattgctgctgcatgtttatgtatttaccagagaagacatttcttatttttttttgtgccaagccagcataggctctttaatctttcac

SEQ ID NO: 5639 - DNA, 600 bp, Chicken  19866894109341_1
gaaaagagaccagtctgaaaaccttccccttcgtgggctttgcaggtgtctgctagaatgtttcttatgaatgcttctcctctggtagctcttcagacacaatgggaatcctttggaccagtgaggaattgtagataccctgtttgcttctctgagtctgaaggggacgtcaccagaacctccgtacatgcaaaagttcagatgatcataagaagcctgcaaagtcaagagtctcccctgggtatgaacaatgagtgtgaatgtattatgcagaagaaacaaaagggagaaaaaggcacragcaatagggttgcatctagcaccacactgctccagaagcatcctaaatacaccaagaggrgttgtcctgctgattcagatgacactgaagagaatgtggagtttgggactctcttgcttgattctgatagtgacgattctgttgaccgaggcatagaggaagctattcaagagtacttgaaagcaaaaggtaaaagtgaccagtcattacagaggaatgcagagtgttctgaaaacatatccagaaacaaaaggcttaagagagaattctcccagaacaaaatgtctagtaaccttctc

SEQ ID NO: 5640 - DNA, 600 bp, Chicken  19866894109341_2
ttcttatgaatgcttctcctctggtagctcttcagacacaatgggaatcctttggaccagtgaggaattgtagataccctgtttgcttctctgagtctgaaggggacgtcaccagaacctccgtacatgcaaaagttcagatgatcataagaagcctgcaaagtcaagagtctcccctgggtatgaacaatgagtgtgaatgtattatgcagaagaaacaaaagggagaaaaaggcacragcaatagggttgcatctagcaccacactgctccagaagcatcctaaatacaccaagaggrgttgtcctgctgattcagatgacactgaagagaatgtggagtttgggactctcttgcttgattctgatagtgacgattctgttgaccgaggcatagaggaagctattcaagagtacttgaaagcaaaaggtaaaagtgaccagtcattacagaggaatgcagagtgttctgaaaacatatccagaaacaaaaggcttaagagagaattctcccagaacaaaatgtctagtaaccttctccctgtgaaatttaaagcaaatatgctctctgaagagtacttttctgaccagcttggaattg

SEQ ID NO: 5641 - DNA, 600 bp, Chicken  19866894109343_1
ctgctgttattctaattactatattttttccatatggccaaatatatgcttagaactaagaggaatatttagggtcttcttacataatcactttctataaagcaagtgcaacaaatcaaataatttcaagcctaacatatttcggattgttttacacttgtctctattaaatttgcctaagttttcctttaaaaatgacaagctggttaatcttgggtagctgctttcccagactagcagcctcttccagggttaaaagaaaaaacaacaattgccagatcttttaattctggggcctcwctgaatgtaatgcctgttaacccctaaggactgctgaaacatttgtgccgcrtaggcccttagccaagcttagcatgccacagatgaagtaatgccatacctgtccatctgcttggcctattgctttacactatttgaaataaaaatttaatttcgtataattttctgtgacattgtttagaaatagaccattcgtatatgtcagaatgaaatgcaaatgacccccttagcaaatgaaagtgtgatttctgactgatattttgtaagacctggttgttatgattgctacccagttgtata

SEQ ID NO: 5642 - DNA, 600 bp, Chicken  19866894109343_2
gaactaagaggaatatttagggtcttcttacataatcactttctataaagcaagtgcaacaaatcaaataatttcaagcctaacatatttcggattgttttacacttgtctctattaaatttgcctaagttttcctttaaaaatgacaagctggttaatcttgggtagctgctttcccagactagcagcctcttccagggttaaaagaaaaaacaacaattgccagatcttttaattctggggcctcwctgaatgtaatgcctgttaacccctaaggactgctgaaacatttgtgccgcrtaggcccttagccaagcttagcatgccacagatgaagtaatgccatacctgtccatctgcttggcctattgctttacactatttgaaataaaaatttaatttcgtataattttctgtgacattgtttagaaatagaccattcgtatatgtcagaatgaaatgcaaatgacccccttagcaaatgaaagtgtgatttctgactgatattttgtaagacctggttgttatgattgctacccagttgtatatcctcaccttcctccagaagaaaatgtaatggaaaacgtaaccctaacaatt

SEQ ID NO: 5643 - DNA, 600 bp, Chicken  19866894109343_3
aaatagaccattcgtatatgtcagaatgaaatgcaaatgacccccttagcaaatgaaagtgtgatttctgactgatattttgtaagacctggttgttatgattgctacccagttgtatatcctcaccttcctccagaagaaaatgtaatggaaaacgtaaccctaacaattacatacagatggcaccatccacatgatttcagccctgagtagtggcttatgtttctgtagtacaactggtgtaaattaaattgtagttgtcttctgcacatgtattatatcgtatctttgctagcatasgaacaagagccgcacatctgttaggtgagaggacatgttggcaatattgtttatatggctattgcgtgttgttaatgccagtgaggacccrgggatccakctgaatttgtgggaaatgctgttggatttcttaaatcgccctggcaacaattttttgtctttgcactgtgtcagagcaggctgtggtgtaattgtatcttcattttctcgcacacaggaagcaacagccttttccagctgcagttatgggatcggagaggggagcatcatgtacagggggaggaggattgggtctgctgg

SEQ ID NO: 5644 - DNA, 600 bp, Chicken  19866894109343_4
gttgttatgattgctacccagttgtatatcctcaccttcctccagaagaaaatgtaatggaaaacgtaaccctaacaattacatacagatggcaccatccacatgatttcagccctgagtagtggcttatgtttctgtagtacaactggtgtaaattaaattgtagttgtcttctgcacatgtattatatcgtatctttgctagcatasgaacaagagccgcacatctgttaggtgagaggacatgttggcaatattgtttatatggctattgcgtgttgttaatgccagtgaggacccrgggatccakctgaatttgtgggaaatgctgttggatttcttaaatcgccctggcaacaattttttgtctttgcactgtgtcagagcaggctgtggtgtaattgtatcttcattttctcgcacacaggaagcaacagccttttccagctgcagttatgggatcggagaggggagcatcatgtacagggggaggaggattgggtctgctggaagtggaggagggaggaaagggagattagactttgtgcacttcgctcagccttcaaaatccattctctatttttcctctcttactggatct

SEQ ID NO: 5645 - DNA, 600 bp, Chicken  19866894109343_5
attgctacccagttgtatatcctcaccttcctccagaagaaaatgtaatggaaaacgtaaccctaacaattacatacagatggcaccatccacatgatttcagccctgagtagtggcttatgtttctgtagtacaactggtgtaaattaaattgtagttgtcttctgcacatgtattatatcgtatctttgctagcatasgaacaagagccgcacatctgttaggtgagaggacatgttggcaatattgtttatatggctattgcgtgttgttaatgccagtgaggacccrgggatccakctgaatttgtgggaaatgctgttggatttcttaaatcgccctggcaacaattttttgtctttgcactgtgtcagagcaggctgtggtgtaattgtatcttcattttctcgcacacaggaagcaacagccttttccagctgcagttatgggatcggagaggggagcatcatgtacagggggaggaggattgggtctgctggaagtggaggagggaggaaagggagattagactttgtgcacttcgctcagccttcaaaatccattctctatttttcctctcttactggatcttgaataaga

SEQ ID NO: 5646 - DNA, 600 bp, Chicken  19866894109344_1
cgcacagagccttcatatctggccagagatttggccgttctctttgcagcgctccagggaagtgctgtgagtgtggcacaggggtcgcttggcccagaacctcaaaggtgttcagggttctgcaaagtgcaatagccctcatctttgtctttgagcatttggccttgaagctttcacagatatagggttatttccttcttactggagcatcaagggtgcagaatctttgaagagggccgaggaggctcccatgccccatagcacagagctaagtgctcctgagcacttgggctgcagcascaatactgagagaccctgctacacagcctccacagaaagaccatctacctgctgaacttcacatatgggagaggtttgcttgtagagcttagagtgcaacccaatatacgcttaacacaaagaagcagagcgatgctcttgttgtagtactactgtaagaataatgtccaaacctcacaagtatgaacaaaactgattatgaccagggtttagatccctcctgatctccaagttaaccttcctggtaccaagattaagtactggttactacagagatagtcttcaggcaaagctgatggc

SEQ ID NO: 5647 - DNA, 467 bp, Chicken  19866894109344_2
acctcacaagtatgaacaaaactgattatgaccagggtttagatccctcctgatctccaagttaaccttcctggtaccaagattaagtactggttactacagagatagtcttcaggcaaagctgatggcaggcagtgacaaactgttaattgtggtaaggctgtttatccacggtggctgaacacagcatacagagcaatccatgcaaggttacactcagtattttgtaagctctgcatgggtaattaaataccccatcctcttctttagtgtcctccatctcaccttccccattcagckgraacggtgcttacagatgaaccatctccagagaacagcacttggaaagcacagtgcagcagcaggcacttcaatgagtccaaggctgctgtccggggtcaccacagacaagggagaggtcccctgtttcccaaaaaggtctcacagggagacgtcttctcaggctt

SEQ ID NO: 5648 - DNA, 465 bp, Chicken  19866894109344_3
ctcacaagtatgaacaaaactgattatgaccagggtttagatccctcctgatctccaagttaaccttcctggtaccaagattaagtactggttactacagagatagtcttcaggcaaagctgatggcaggcagtgacaaactgttaattgtggtaaggctgtttatccacggtggctgaacacagcatacagagcaatccatgcaaggttacactcagtattttgtaagctctgcatgggtaattaaataccccatcctcttctttagtgtcctccatctcaccttccccattcagckgraacggtgcttacagatgaaccatctccagagaacagcacttggaaagcacagtgcagcagcaggcacttcaatgagtccaaggctgctgtccggggtcaccacagacaagggagaggtcccctgtttcccaaaaaggtctcacagggagacgtcttctcaggctt

SEQ ID NO: 5649 - DNA, 600 bp, Chicken  19866894109345_1
agctattcaggaaaagcctctctacctgtatctttctcttacaccaacactgcagctgtataaaagagttagtgatctgcagcaggggcgtgtgtttccaacttcagcagattcttccaggttttgtcttcacagtattctgtgccattctattcccactatgcagccacttaggagttctaataccacattagtttcctacaggctgctgtcaaaatagtatattaaaagagagaaaaaaaatatgtaagcaaagtattgcagatggactgaagaaacagcaatgccattttcacttayaaagaccaggaaattagattaccttaggtgaaaaagaaaggcaagacttrcaaaaccctggcatcattgtaatgggcaaaaattctgctcatgtgggttttgtgcagagggcaaattacaggcactcaagtcatacttacagcaccatccackatacgtggaagctgtaactattcctatccttgaataaaattttatacgtttgctcttctaaataaataagactgcacatttccaaaggcagcataagcctttttttcaccagagaactcatcagctgttgatagcaatgagcagatg

SEQ ID NO: 5650 - DNA, 600 bp, Chicken  19866894109345_2
tgcagctgtataaaagagttagtgatctgcagcaggggcgtgtgtttccaacttcagcagattcttccaggttttgtcttcacagtattctgtgccattctattcccactatgcagccacttaggagttctaataccacattagtttcctacaggctgctgtcaaaatagtatattaaaagagagaaaaaaaatatgtaagcaaagtattgcagatggactgaagaaacagcaatgccattttcacttayaaagaccaggaaattagattaccttaggtgaaaaagaaaggcaagacttrcaaaaccctggcatcattgtaatgggcaaaaattctgctcatgtgggttttgtgcagagggcaaattacaggcactcaagtcatacttacagcaccatccackatacgtggaagctgtaactattcctatccttgaataaaattttatacgtttgctcttctaaataaataagactgcacatttccaaaggcagcataagcctttttttcaccagagaactcatcagctgttgatagcaatgagcagatgagctttcagcctgcagtagttgtagataagtcattataaggtgaaaggat

SEQ ID NO: 5651 - DNA, 600 bp, Chicken  19866894109345_3
tcccactatgcagccacttaggagttctaataccacattagtttcctacaggctgctgtcaaaatagtatattaaaagagagaaaaaaaatatgtaagcaaagtattgcagatggactgaagaaacagcaatgccattttcacttayaaagaccaggaaattagattaccttaggtgaaaaagaaaggcaagacttrcaaaaccctggcatcattgtaatgggcaaaaattctgctcatgtgggttttgtgcagagggcaaattacaggcactcaagtcatacttacagcaccatccackatacgtggaagctgtaactattcctatccttgaataaaattttatacgtttgctcttctaaataaataagactgcacatttccaaaggcagcataagcctttttttcaccagagaactcatcagctgttgatagcaatgagcagatgagctttcagcctgcagtagttgtagataagtcattataaggtgaaaggattattgtgtaaacctattaccagtgtgactccaggtgaggacatgcctcacacctggaagaggatcagctgacatctcaataccctgctgtcatttctagtcat

SEQ ID NO: 5652 - DNA, 600 bp, Chicken  19866894109345_4
atacgtttgctcttctaaataaataagactgcacatttccaaaggcagcataagcctttttttcaccagagaactcatcagctgttgatagcaatgagcagatgagctttcagcctgcagtagttgtagataagtcattataaggtgaaaggattattgtgtaaacctattaccagtgtgactccaggtgaggacatgcctcacacctggaagaggatcagctgacatctcaataccctgctgtcatttctagtcatgccagatatgcaccacagatttggtccattggtcagtgatagmtggctgagttttccaaaagcaaggctaacttgatcaaacacggtctggaaagcaaaaaaaaaaaaaaaaaaaaaaaaaaaaaaaaaccccaccacaaaaacgcataaaacaaggagagcatctgtgtgcttttaagctcctccgtctcttcaaaaataagtaatattccaaaaccaaagctgggacatggcaaaatatgattacaacaatctggtcatattgtatgggagttgctaagtcacagcttgaaccaacgattgaactcctggtgaaggtacacagccagccctgggagcacag

SEQ ID NO: 5653 - DNA, 600 bp, Chicken  19866894109349_1
agagcagctcaaaaacatttggcagggaggtgattagatgtctacagggcaagttgaaaccggttcaggagatgccccccctttgggggcagaagtttgcagcaaggaaggctacgagccttcgcgaggaagactatgagccttcatcatcatgacctactacgcacgcgcaaggggggggagggactgcatgctaatgggctctcgggaatgtaatgaatatgtatccgaattcctgtcaactattgattatgtattagttcgatctatatctatagcacgatttctcctgatggtgtrcaagttaggtggagcgatcccccttgcaccagggtgtacgtgcgtcaccaataaacacatgcctactctgtatccttaccggctatagggtctgatttccacacgtcagttgatcataactaattacattacrggcagttgactgcctatagattatgtaaatataactgtaaacctcacatacctgagttgctcaattacatttcttcagtatcaggtatgcaaaatccgcgtattgatacaaaatttactattacttagttatcattaaataaattatgtattttaccactatttagt

SEQ ID NO: 5654 - DNA, 505 bp, Chicken  19866894109349_2
ctatgagccttcatcatcatgacctactacgcacgcgcaaggggggggagggactgcatgctaatgggctctcgggaatgtaatgaatatgtatccgaattcctgtcaactattgattatgtattagttcgatctatatctatagcacgatttctcctgatggtgtrcaagttaggtggagcgatcccccttgcaccagggtgtacgtgcgtcaccaataaacacatgcctactctgtatccttaccggctatagggtctgatttccacacgtcagttgatcataactaattacattacrggcagttgactgcctatagattatgtaaatataactgtaaacctcacatacctgagttgctcaattacatttcttcagtatcaggtatgcaaaatccgcgtattgatacaaaatttactattacttagttatcattaaataaattatgtattttaccactatttagtctgatagcttgccctgaaagcctagttgcaatctggat

SEQ ID NO: 5655 - DNA, 600 bp, Chicken  19866894109352_1
accagagagaggaatgatttaataaagtgagattgctttttagtggatgcagtcctggcatatggaaattcttgtaactcctagtgcttttttgataacagttcagttctccagagccactgttgttgttgttttccccctaaatattcgtttgtttggagcttaaaatatttcaaagttactgatggaagaaataacacgttaagatccgtgctttgtctgtgtaaaaacgtttacatttcaacataggcttcctctgttgagtgaggtgtctgaaagtcaggaggtaggtgcctgctyacagacatagctctgcccagtcacctcttgggtcacagaakgagagttctgacctgtattaactgtgtcgctgatttggttgttctttgcctcatctaaggcaaaactgctggctaaatgctgagaaatggagtgaacttataatagctttagaagaaaccgttccagatagaaatgtgtcctgaagttgtggatacaytctctagaaaagccaaaaaacactttaaaattacttctccgagaggaaggaggagtaataagcccgctcaagcaaagggcattgcagtccacagggtgtgc

SEQ ID NO: 5656 - DNA, 600 bp, Chicken  19866894109352_2
agtggatgcagtcctggcatatggaaattcttgtaactcctagtgcttttttgataacagttcagttctccagagccactgttgttgttgttttccccctaaatattcgtttgtttggagcttaaaatatttcaaagttactgatggaagaaataacacgttaagatccgtgctttgtctgtgtaaaaacgtttacatttcaacataggcttcctctgttgagtgaggtgtctgaaagtcaggaggtaggtgcctgctyacagacatagctctgcccagtcacctcttgggtcacagaakgagagttctgacctgtattaactgtgtcgctgatttggttgttctttgcctcatctaaggcaaaactgctggctaaatgctgagaaatggagtgaacttataatagctttagaagaaaccgttccagatagaaatgtgtcctgaagttgtggatacaytctctagaaaagccaaaaaacactttaaaattacttctccgagaggaaggaggagtaataagcccgctcaagcaaagggcattgcagtccacagggtgtgctaggagtggggagctgaaagacagctaaggaggagcaccat

SEQ ID NO: 5657 - DNA, 600 bp, Chicken  19866894109352_3
cgttaagatccgtgctttgtctgtgtaaaaacgtttacatttcaacataggcttcctctgttgagtgaggtgtctgaaagtcaggaggtaggtgcctgctyacagacatagctctgcccagtcacctcttgggtcacagaakgagagttctgacctgtattaactgtgtcgctgatttggttgttctttgcctcatctaaggcaaaactgctggctaaatgctgagaaatggagtgaacttataatagctttagaagaaaccgttccagatagaaatgtgtcctgaagttgtggatacaytctctagaaaagccaaaaaacactttaaaattacttctccgagaggaaggaggagtaataagcccgctcaagcaaagggcattgcagtccacagggtgtgctaggagtggggagctgaaagacagctaaggaggagcaccatcctcgrctccctgcaaggtatctggaggcagttccaagccttgtttggactgccttcaatgtcacgtggaatgattaaatgagtaaaatccactgtgatggaataagccgctgaatcacacacgagtgctggaaagatgggatttggagatgggaagt

SEQ ID NO: 5658 - DNA, 600 bp, Chicken  19866894109352_4
tctgacctgtattaactgtgtcgctgatttggttgttctttgcctcatctaaggcaaaactgctggctaaatgctgagaaatggagtgaacttataatagctttagaagaaaccgttccagatagaaatgtgtcctgaagttgtggatacaytctctagaaaagccaaaaaacactttaaaattacttctccgagaggaaggaggagtaataagcccgctcaagcaaagggcattgcagtccacagggtgtgctaggagtggggagctgaaagacagctaaggaggagcaccatcctcgrctccctgcaaggtatctggaggcagttccaagccttgtttggactgccttcaatgtcacgtggaatgattaaatgagtaaaatccactgtgatggaataagccgctgaatcacacacgagtgctggaaagatgggatttggagatgggaagtgtttgtctgtggtttcgtttggtggtagtattgtttttggtttggtggttgtgtggcttggtggcggttgtgatttttgttgttttgttccccctccccccccacacacacgcccaatgggctcaatcatctggaattataggggtta

SEQ ID NO: 5659 - DNA, 599 bp, Chicken  19866894109353_1
  misc_feature (1)..(111): n is any nucleotide
nnnnnnnnnnnnnnnnnnnnnnnnnnnnnnnnnnnnnnnnnnnnnnnnnnnnnnnnnnnnnnnnnnnnnnnnnnnnnnnnnnnnnnnnnnnnnnnnnnnnnnnnnnnnnnntattgcagatacttattttgtaaattttttgtttccttttcagctaaataggccaattctgttttttaactaattctaaatcaatggcagataaagactgaatcctttgtgctaccatcaaaaaaaaggatattaatgttttcctaaggaaaactaggacctgtcatatgacttggaggcacttggatwcttgtgaaccaaaacagttcaagactgatcaatcaccattatttgttccactggtagtcagaatagcctgaacatcgtttctgccttccaattctaattatgacaagaaaacaaaggagcaggagcaatccccttcccgcccccccaccccccccccaaaaaaaaccaatttatattatagaacaattgtaataattgaaataaagggtttctacctagttcttcaataagaaaagcaaggacagaaaagcacacagttgcaagataatctcttttttacatgtggcacatgacagata

SEQ ID NO: 5660 - DNA, 600 bp, Chicken  19866894109355_1
accacaaagtctcaacaccccgtggccatctattttactagtgggacaacgggagctccaaaaatgacagaacattcccactgcagctatggcattggcctcacagtgagtggaaggtatgtccacttctttctcagacagattggttgtgtggcagaaggaagagagatgcaaggtttaaccagaagtgtttgtttcgctgctctaaagaacaacccttctgtgacacccaaccaagatttggttggttggttgttttccccaggaaacaaggcacattttgagtccagctgtcctagygtgcatggaatttagcagccaaatagatgtactaacttctttttaacattttctttaacttttgctgtgtgttcaacaagttagcagttaacagattgtccaccaaatgaacatcagcataagtttataaagcctgtatccaaaatgggagaattacgtgggtctgacaggcttctgggttcatgtgtgcctgggttcaacacagctcccagaggattgaaatgctgataattcagaatctctaaatttataaagcaatattgtttataaaattgatagggtagtgcacttcactctaac

SEQ ID NO: 5661 - DNA, 600 bp, Chicken  19866894109360_1
cctactgcccagtatggtgaagggagaaaggaataacccactacatcacttacaaggatacaatccaccatctcccagtctgccccagaacatacaggattagagaaggctgctcgcaaagcagaacattttcatggtactccagggaagatgcactgtcctatcccttccctaacaaatatcaagcactgacaagaacaccacagctgtcctgaagggacagaggtatagccaggaagatggacagcagcagctgttccagcctgcaggacatccgtaagtacacttttacacagcgcytttcatccccaaccacttcacgcactatttatagagagcactccacctggtaccaaaatgcagctccccctggcacagaggccccaacagctccaaatgctgctacatgcaggagaacttgctgttattttcccacaagtggagagaatagctctgtaggctgcacttctcctaaagcttgctcagtgttcacacacccttgcctgctctcacgtccctggctgcatgaagcatcgaagcagaaaacagggagtccttttctttagaaacagataggttgttacagagatcaggatggtc

SEQ ID NO: 5662 - DNA, 595 bp, Chicken  19866894109364_1
aaaaacgcaaggcttatcctagttgtgacttcctaagcttgcaagaacactgtaatgtcctttcataaaagtggtaaggcacattataaaatcctagacttctctttctttgaggagacataaggagaggagagcatcttaaattcagtctccagtcatatatcagatgttgtatagtgaagggagagctaggttcttttcaagagcacacagtaaaaggataaaaagttgctgggtgcaggaggggaaattccagttgtatatatatagtgaaaattcttcagaaagagattggggaascgttagaacaggttgtgctttgaagccttccatacctgggcactttccaaatttacttggctaaagctgtgaacattcttgttagccctgcttgatcagagagttttgaactgtcagacctgaggtgccttccaacctaaccttttctcctcttctgtggtgattactatatataaaaataaatatacttacatatgtttaaaatgtttttctttaatttggcagaatttcactgctatcttcaaagaggggaaaaaatctcctcagtctttctagctaggtgcttctccttatg

SEQ ID NO: 5663 - DNA, 600 bp, Chicken  19866894109366_1
gaaggcttgcaggaccgggcctcccctgcacagctccacacctggcccttgctggcagagccgcagggcagcaccatcctctgcaccccccctacctgcccactctcaccaacccaaaaccaggttgctggctgcagcctattctaactaacagtctgcaagagggagcccacccctctggcattcccccttctccaacccagcctgcactgtgcccacgtggcagtgccaaggggactgagcccgagcccttcttgctataccaccaggaccgcagcagcctcctttccatagcgccakgtcctgctgcctccattagccaaagcaaaccatcctcctgcacctcagccacacaggtatctgcagggcactgcttctcgccacagtaattgtatttccagagaaggaaatacaaggctaagagaccttaactctttctatgattttttttccccagttgtggtttttttcttctccttcaaattcagagctggtgttattttaccacagccatcaatcaggcaacaagcaagcagggcttttctttcttcctttctttctttgtctttctttctaatgcttgttatatctctcctacat

SEQ ID NO: 5664 - DNA, 600 bp, Chicken  19866894109370_1
tggggaacatgacacctcacagtgctgtgctgaggctccacacactcattgcacggatggccatcccctccctaggagggacaaagctcccctccacccattaatccccccatgcatccccccccatccccactcacagtgtggctgttgagggtgacgctgttagtgtagaggaactcaatgacagctaggaagacttctggctgtacattgcccaggatgaagggtccctggggtgggacactgctgagggggtcctcattgctcgtcagcatcccccggaacgcctggcagcggcaygccagcacacagcgatgtgcaaacacctgctgctgctcccggcccaccacgaacgtcacatcactgctggggagagrggatcatgaagaacagggagaacacmaccccagggctgggacagggcacagggtggtggcttcggtggggaatgggcactgtgtgggtttattgtgaggcatggggtcgcactgcctccctgattcccccagccccacagtctttgtgcatcgcgctggctacagtcctgttgtctccctgtcctctgttctgctcttctccagttccagtagggcagcaaac

SEQ ID NO: 5665 - DNA, 600 bp, Chicken  19866894109370_2
gggacaaagctcccctccacccattaatccccccatgcatccccccccatccccactcacagtgtggctgttgagggtgacgctgttagtgtagaggaactcaatgacagctaggaagacttctggctgtacattgcccaggatgaagggtccctggggtgggacactgctgagggggtcctcattgctcgtcagcatcccccggaacgcctggcagcggcaygccagcacacagcgatgtgcaaacacctgctgctgctcccggcccaccacgaacgtcacatcactgctggggagagrggatcatgaagaacagggagaacacmaccccagggctgggacagggcacagggtggtggcttcggtggggaatgggcactgtgtgggtttattgtgaggcatggggtcgcactgcctccctgattcccccagccccacagtctttgtgcatcgcgctggctacagtcctgttgtctccctgtcctctgttctgctcttctccagttccagtagggcagcaaacctgacccccacagtgatccactgcagatgaggacacctggcccatcccaggtctggagatgtgagcagagccctacg

SEQ ID NO: 5666 - DNA, 600 bp, Chicken  19866894109370_3
atccccccatgcatccccccccatccccactcacagtgtggctgttgagggtgacgctgttagtgtagaggaactcaatgacagctaggaagacttctggctgtacattgcccaggatgaagggtccctggggtgggacactgctgagggggtcctcattgctcgtcagcatcccccggaacgcctggcagcggcaygccagcacacagcgatgtgcaaacacctgctgctgctcccggcccaccacgaacgtcacatcactgctggggagagrggatcatgaagaacagggagaacacmaccccagggctgggacagggcacagggtggtggcttcggtggggaatgggcactgtgtgggtttattgtgaggcatggggtcgcactgcctccctgattcccccagccccacagtctttgtgcatcgcgctggctacagtcctgttgtctccctgtcctctgttctgctcttctccagttccagtagggcagcaaacctgacccccacagtgatccactgcagatgaggacacctggcccatcccaggtctggagatgtgagcagagccctacgagtcctccataaatccagcagcaaag

SEQ ID NO: 5667 - DNA, 600 bp, Chicken  19866894109373_1
gcttgaggagttagaaccaataacattcttattcccttagatcccatatttttgcatatccattgtgaagccatcaatatctcctgaaggttggagtgaaggtgtaggttctctgaggatcagacaggtgttacctttgcacctctcagctcctctttccaatatatttcctcaccagtgattctgattccatagacaagcacaacagcaaactcagggcaggttggggaaagagaattcaaagaagtttggccatctcaggtttgtgcccagctgcctggccactggtttcctgtaaayttgcgcctctaagcattgtatttgatatgcagagcggcatacaggtaggcaagctcttcccttagatatcttctagtctccagtgttgaagaaaacatcagcaatgctttgccaataattcccacagagagtctgtcatgggaattgttgtcagcataggtgggtggaggaggtaacagcccacctgctttgcaagtagcccatatttaaaagtcttagacccagcaggaaatctgaaagttgttggaaatacaaacctggacaaaatatctatggttggaatttagattatttatttac

SEQ ID NO: 5668 - DNA, 600 bp, Chicken  19866894109374_1
tcttgatttgatctcactggaaaggggattcatctcactttaagttcctacataggccacagctcacctgatcctgtgatagacaatggacacctactcaaaaccattcacgaagtttagggtatgaattatatgggtatctgcttaaagatgaattgacttgtacagcaagtttctatgacagtaataattagtccttagtgactatgaagggagctgaggttgtatttgttcagatacgaacacctacgctctgtattcttccatacttataaactacagatctgatttctacagaaycataataagcaaggtttgaatttcctgcagggctacattcaaataaaaacattttctggactatgattccagctttctgttgtagtatctggccaagatcatggagtcttaattgaagaagcacaaggttaatctaaaatctcttaccaaagaaataggcagctgcttaggtctgctaccctctgtacatcaggcatcctgctgtggacactgagagttatgtatctggtaaggaatggtaaaaagatggttccaactgaatacttcattatttctccccagaagagcttgattatcatt

SEQ ID NO: 5669 - DNA, 558 bp, Chicken  19866894109376_1
gcgtgacacctctgggcaacagcagcagtgacctccctccccccggagaggtggactggagcctcagccaggctgagaacacgcaccagggtgacgcagggaggatgagcctcatgccagggggctgtggcaggaggggaggggccgtagggaatgggtgcaagtagcattggggtgcacgtggcagggaggggtgcggtgggttgcagaggctgcagccatcccctccgcaggcagggtgatgctgggcactgccctgaccccaagtcctgctacaggggagcttcaaaaaccaggtckgtgtccccgggacttcacacgctgcctccaccaggagccccctctctgcaccaacgactcagcgtgtcccggttggctcaagtgctgttcccacgagtgccgcctccgctgcatacccccagcagaaggtatggcaacactggcacagccccagcaccgccaccagcaccctttgtccaccagccccatccccgtccttgtcctctccccattgcccagagcagctccagcaccaccggcagcctccatctcccgagg

SEQ ID NO: 5670 - DNA, 600 bp, Chicken  19866894109380_1
agactgcaggagcactacatttggaactgccttctttttagattgtgctccattcttgcatgtattgaagaatcagttactcaacatactgatagaggcagttcagctgaaacagggatcagcactgtgcagatgtgcagacagcctgcaaagctgcaccacagcacctgctgcagtgagaaggcactgctccatactaggaaactccatctgcagaacgtgtctgttatcccctacacctcaacttaacagacagcactggggagaagaaacccctttgcagacagagccttggcaaasctcaggccatggcttttgggtctaactcctgacatctgcaatgactgccttccccctaacctcaagctgatgcagtattttccatttaattacagcaagcacccaatgcattaacaatgagaccaccttcatgcttctgtaggaatgcaattaaaggtaactgccaagctcatttttcttgctattttgttttgaaggaactaaggataaatatgattatgggatgagatttttcctatgtagcaatggggatttttctccaattactacctcttttgaaggagctctaatactttaagc

SEQ ID NO: 5671 - DNA, 600 bp, Chicken  19866894109380_2
tccctccagctgtccagtaattaaacatcatgtaaagcccagaagatatcattgctgtgctaccttatcttatttatgaaggactttcatttgttaaatctacaataacttccttcccattctcagaaataattgctgaattcctccaccacgtcaaacgtactcaagttacatctatctgctatacagatgacagcaattttgggctagccatgtttcctttcaccacatactgaaataatcatgaatatcagataaatattctttcaataagcacaaatgcaatagtatgaactttawcaccattaaaattcagtttctcagggagattgtatggcaaaacttgatcctctgcctttgatttccctctgaactcaccgaggaacgtgacattactctgcacctagcctgttaatgaagacaacaaacagaattcctaattttgaggaaagcatttattaatcaggctgcaaaggaagaccaagttagtgctgtatcactgccaatggataaaactctcagcagaatctgcagagctggcatgagcagaactggtatggtcaaatgcccatcgatggcactggaagtgactcttagatg

SEQ ID NO: 5672 - DNA, 470 bp, Chicken  19866894109380_3
tctcagggagattgtatggcaaaacttgatcctctgcctttgatttccctctgaactcaccgaggaacgtgacattactctgcacctagcctgttaatgaagacaacaaacagaattcctaattttgaggaaagcatttattaatcaggctgcaaaggaagaccaagttagtgctgtatcactgccaatggataaaactctcagcagaatctgcagagctggcatgagcagaactggtatggtcaaatgcccatcgatggcactggaagtgactcttagatgcaaaacataggcaccttyactgcatccaggagaaaatgacaagatgacacaatgatcctcatccctacatgatgaaacaatttcactgtcaacagaaaggtgagattttctaattcatgtgagcgtaggggcaggaacaatgcagaggaagacggctttaaatcagctttgttacatcctccctccaa

SEQ ID NO: 5673 - DNA, 600 bp, Chicken  19866894109381_1
cttcagtctgatccagtatagcttttcttctgtactttctacttttgatttttatgttcattatttacaggaagttacagggtagcccaccttgccttcatcatcctccagcaggatccgtcctgagtcagagtccttcacaactgccccaatagggacattaaattcactgtgtggctgagcttccagccacacatgatcaccctggggagaaaaaaatccagtgtcaagtaaagtgacatactagatgcaatgtagttcacatgcattcatttcttggtcttaatttactattgcttyctattgttatttaaccggacaagttcttactgcttgcaggcagtacaacttaatggttttagcactgggacctcagctccacacctgccatggagcatgactttggccaagtcaggcccagttgtctgagttaacaccttttacaaggrcagtgattgcacagctccactacctcccagaggctgtggggtgtacagtgaatgctgacaaggtgccttggcatcctcacattagctatggtattctttcagaagagatgcttgaaaacaaagacagtaccaggtgagaaaagaatgaaca

SEQ ID NO: 5674 - DNA, 600 bp, Chicken  19866894109381_2
caatagggacattaaattcactgtgtggctgagcttccagccacacatgatcaccctggggagaaaaaaatccagtgtcaagtaaagtgacatactagatgcaatgtagttcacatgcattcatttcttggtcttaatttactattgcttyctattgttatttaaccggacaagttcttactgcttgcaggcagtacaacttaatggttttagcactgggacctcagctccacacctgccatggagcatgactttggccaagtcaggcccagttgtctgagttaacaccttttacaaggrcagtgattgcacagctccactacctcccagaggctgtggggtgtacagtgaatgctgacaaggtgccttggcatcctcacattagctatggtattctttcagaagagatgcttgaaaacaaagacagtaccaggtgagaaaagaatgaacagactgggtgcctgctctgctgtcctctgctggaggaaaggtgtgagctatggctgrccrttcctaggaatgagcaccaccttgatgttgcctgcactactgcctgttagtactcccagacctcaggagtaccttctcttgctccagaca

SEQ ID NO: 5675 - DNA, 600 bp, Chicken  19866894109381_3
ttttagcactgggacctcagctccacacctgccatggagcatgactttggccaagtcaggcccagttgtctgagttaacaccttttacaaggrcagtgattgcacagctccactacctcccagaggctgtggggtgtacagtgaatgctgacaaggtgccttggcatcctcacattagctatggtattctttcagaagagatgcttgaaaacaaagacagtaccaggtgagaaaagaatgaacagactgggtgcctgctctgctgtcctctgctggaggaaaggtgtgagctatggctgrccrttcctaggaatgagcaccaccttgatgttgcctgcactactgcctgttagtactcccagacctcaggagtaccttctcttgctccagacactaattcagattgaaacaaaaatttactgcagttcctagaatgaaaatggaacaaagctgtatgctggatcttcagtgggcatgaactggcttatgcctgctgagaagctggtgttccagctgagtttgttgattacaacaaacattttatttattttactgcattctcaccatagcattactgtcaaagttttaagttttttactg

SEQ ID NO: 5676 - DNA, 600 bp, Chicken  19866894109381_4
tagcactgggacctcagctccacacctgccatggagcatgactttggccaagtcaggcccagttgtctgagttaacaccttttacaaggrcagtgattgcacagctccactacctcccagaggctgtggggtgtacagtgaatgctgacaaggtgccttggcatcctcacattagctatggtattctttcagaagagatgcttgaaaacaaagacagtaccaggtgagaaaagaatgaacagactgggtgcctgctctgctgtcctctgctggaggaaaggtgtgagctatggctgrccrttcctaggaatgagcaccaccttgatgttgcctgcactactgcctgttagtactcccagacctcaggagtaccttctcttgctccagacactaattcagattgaaacaaaaatttactgcagttcctagaatgaaaatggaacaaagctgtatgctggatcttcagtgggcatgaactggcttatgcctgctgagaagctggtgttccagctgagtttgttgattacaacaaacattttatttattttactgcattctcaccatagcattactgtcaaagttttaagttttttactgaaa

SEQ ID NO: 5677 - DNA, 599 bp, Chicken  19866894109382_1
  misc_feature (1)..(30): n is any nucleotide
nnnnnnnnnnnnnnnnnnnnnnnnnnnnnnctttggggatgggaggtcctgcaggagtgtccagacctgcagtgggaaggagcgggtggctttgtgtccagcccgagctgccccacgggaactgctggtggctgcagctgggctgtccctgctgctggttcaggtgtccctgctgcccattgggttgttcctgcttcccatcgaggtgtcactgccacccatctgagtgcccctgctgcatgctgggtgtcccttgccctgagagccagagttggatctaaccacacctcctcgacttcmtccccccaccyccccttatcagctgccagagaacaaaggggccggggccattgcgtgcccctgtcctacttccctcagctcacagcccactcccttcctgtcgtgctaatataattcaatgtcaagggggcttatgtaatatttaggcatgtattacactaaattaatcttaacatgaaaaatcttttgattacatagtatgcttttgtcattgattgattaattcatttattcatatagtaatgctatgtccaactcctatttatattcagttgtaagaaaaagttcccgttcatgtc

SEQ ID NO: 5678 - DNA, 599 bp, Chicken  19866894109382_2
  misc_feature (1)..(19): n is any nucleotide
nnnnnnnnnnnnnnnnnnnctttggggatgggaggtcctgcaggagtgtccagacctgcagtgggaaggagcgggtggctttgtgtccagcccgagctgccccacgggaactgctggtggctgcagctgggctgtccctgctgctggttcaggtgtccctgctgcccattgggttgttcctgcttcccatcgaggtgtcactgccacccatctgagtgcccctgctgcatgctgggtgtcccttgccctgagagccagagttggatctaaccacacctcctcgacttcmtccccccaccyccccttatcagctgccagagaacaaaggggccggggccattgcgtgcccctgtcctacttccctcagctcacagcccactcccttcctgtcgtgctaatataattcaatgtcaagggggcttatgtaatatttaggcatgtattacactaaattaatcttaacatgaaaaatcttttgattacatagtatgcttttgtcattgattgattaattcatttattcatatagtaatgctatgtccaactcctatttatattcagttgtaagaaaaagttcccgttcatgtcaggrgagatga

SEQ ID NO: 5679 - DNA, 600 bp, Chicken  19866894109382_3
ccccaccyccccttatcagctgccagagaacaaaggggccggggccattgcgtgcccctgtcctacttccctcagctcacagcccactcccttcctgtcgtgctaatataattcaatgtcaagggggcttatgtaatatttaggcatgtattacactaaattaatcttaacatgaaaaatcttttgattacatagtatgcttttgtcattgattgattaattcatttattcatatagtaatgctatgtccaactcctatttatattcagttgtaagaaaaagttcccgttcatgtcaggrgagatgaattaaaatggatatcgctgctgttttccaccctactttagtatggctctttcacaatgcccacttcctccaccttcttccaaggggtctgccttccaccggccctgcctgccatcccctccatggcaccacraaggctgacaacaaagtgagctaaaattaccaccaatctgttgtctcaaattcgagcacaataacgaagccattggaaaagtggtgtgtacacacgaaatataccttctgctatttatatgtgtttttctaaattaaagggaatgtaaaaccggtgagaaa

SEQ ID NO: 5680 - DNA, 600 bp, Chicken  19866894109382_4
ttaggcatgtattacactaaattaatcttaacatgaaaaatcttttgattacatagtatgcttttgtcattgattgattaattcatttattcatatagtaatgctatgtccaactcctatttatattcagttgtaagaaaaagttcccgttcatgtcaggrgagatgaattaaaatggatatcgctgctgttttccaccctactttagtatggctctttcacaatgcccacttcctccaccttcttccaaggggtctgccttccaccggccctgcctgccatcccctccatggcaccacraaggctgacaacaaagtgagctaaaattaccaccaatctgttgtctcaaattcgagcacaataacgaagccattggaaaagtggtgtgtacacacgaaatataccttctgctatttatatgtgtttttctaaattaaagggaatgtaaaaccggtgagaaatcaacttggaaacgttccccttttgggtagaataaaaatacaccgagccaagcaatgccagcaaggagggggagtgcccaaatgtggcagctccacgtcttgccatgcagtagggcaggagctctggccccatgtgcct

SEQ ID NO: 5681 - DNA, 600 bp, Chicken  19866894109384_1
gggcctcctggaagtgtttgtgggctgtgcaaatgaagtttgtatttattgccacttgtgagaagggggagaggataaccgccggttgctccaagtatctctgttttggttacaaagagattcagcaatcacagttaaaaagctcagatgggaagagatgggctggggcaggagcacctaatgtagctgtgttctccaggagtaagagccaagcgtcagctgggtgggggagtgctcagggctgcatggccgctgatgggaatggctacggatcaggtgcatgagggatacttaaaagcrtcccttggagctggattggggcagttaagatttcttcagatagcgaagttatttatggggatggagatgatggatatggtttatagtctgacctgtgcttatgcagagcgcagagataagtgcggacttgtcactaatgtgtttggcatggcgggttttatttcctgtaatctgttcttgtagaagtcaacatctgatcatttttctcttcagtgctgttacagtggaaagcaaaacagaacttgtaaacacttgaggctcgagtgctgcctgtaactgttcagagatacccagccctct

SEQ ID NO: 5682 - DNA, 599 bp, Chicken  19866894109387_1
  misc_feature (1)..(128): n is any nucleotide
nnnnnnnnnnnnnnnnnnnnnnnnnnnnnnnnnnnnnnnnnnnnnnnnnnnnnnnnnnnnnnnnnnnnnnnnnnnnnnnnnnnnnnnnnnnnnnnnnnnnnnnnnnnnnnnnnnnnnnnnnnnnnnnnaagaaagacccagcactaagttaacgtgctacagcccctcaaaaactgcgtggctgggatggatcacaaaagctacttcacactgctctcaccaatacagagtcctgtatgtgcaaggcccttcctgccaacaactgtcctgacttcagtcgggtacaacattctccttcayggaagacaggctctagcctgaccaaaggcagagtgctgaagtgcagacagggaacctcagcccacctgctgagacatgaaccattacagcagtaatgcaggagtgcctctgttaccttcgcattatggagtgggtggggaagarctcccagccaggttgccctgagctgagattgctaacagtgcaaggccacagcagaattaggcatgcctgttgcaggtagtgaagtttccagaggtggaaggtaggggtggataaaggtcataataagttaagtcataatcgtaagtcacagtact

SEQ ID NO: 5683 - DNA, 600 bp, Chicken  19866894109387_2
taagttaacgtgctacagcccctcaaaaactgcgtggctgggatggatcacaaaagctacttcacactgctctcaccaatacagagtcctgtatgtgcaaggcccttcctgccaacaactgtcctgacttcagtcgggtacaacattctccttcayggaagacaggctctagcctgaccaaaggcagagtgctgaagtgcagacagggaacctcagcccacctgctgagacatgaaccattacagcagtaatgcaggagtgcctctgttaccttcgcattatggagtgggtggggaagarctcccagccaggttgccctgagctgagattgctaacagtgcaaggccacagcagaattaggcatgcctgttgcaggtagtgaagtttccagaggtggaaggtaggggtggataaaggtcataataagttaagtcataatcgtaagtcacagtactaatcaagtgataaaggcagaaaagagtaccagtatctactggtcatgtttacaaaggctaarcattactttccagtagagagtacaataagaaggaaaagactactgtccaattttgatagactgcttttcagaaaaagggtaga

SEQ ID NO: 5684 - DNA, 398 bp, Chicken  19866894109387_3
ccacctgctgagacatgaaccattacagcagtaatgcaggagtgcctctgttaccttcgcattatggagtgggtggggaagarctcccagccaggttgccctgagctgagattgctaacagtgcaaggccacagcagaattaggcatgcctgttgcaggtagtgaagtttccagaggtggaaggtaggggtggataaaggtcataataagttaagtcataatcgtaagtcacagtactaatcaagtgataaaggcagaaaagagtaccagtatctactggtcatgtttacaaaggctaarcattactttccagtagagagtacaataagaaggaaaagactactgtccaattttgatagactgcttttcagaaaaagggtagaagttagggctactgg

SEQ ID NO: 5685 - DNA, 600 bp, Chicken  19866894109399_1
tgtagtgcagagagggaggtttaatttcagtataaaactgctgtttcaagagactgaggtttttgtagtcttcaaagttcagggcttgtattgttagttgctgattcgtgtttgattagaggcatttaaatgtagttttgcctaaagaagtgaaccagaatacacagatgagcaaagaagggtttgagtcctttgcttctattttagatgttattgtgtgcacttttgggactatttttgattaagattggttttcctgcagaagaaaaagttctctctgcgtaataaaggggtccttaracaatgccaattttaatttctgatataggaatagatcagttaatatcacaatacttggcaaaatctagttgttttgaaacctttacagatttgttagtgaaacttcctctctgtcattaatttttcactgtgagttaaatgctggtcagaaatgcactttctttttagagaggagggtacatagaatcttctttgattcatgctttgctgccctgtraagaaacagaaaggagttggtgttgtgcaaagtaaaggcttctgggcacaggtcagaattttgtctgcctgtgatcggtgctc

SEQ ID NO: 5686 - DNA, 600 bp, Chicken  19866894109399_2
gtgcacttttgggactatttttgattaagattggttttcctgcagaagaaaaagttctctctgcgtaataaaggggtccttaracaatgccaattttaatttctgatataggaatagatcagttaatatcacaatacttggcaaaatctagttgttttgaaacctttacagatttgttagtgaaacttcctctctgtcattaatttttcactgtgagttaaatgctggtcagaaatgcactttctttttagagaggagggtacatagaatcttctttgattcatgctttgctgccctgtraagaaacagaaaggagttggtgttgtgcaaagtaaaggcttctgggcacaggtcagaattttgtctgcctgtgatcggtgctctgttcttcaaatataattgctagcgtaaggcttaagatcttatgagttttagcctttcctattatgcaaacagcatactctgaatactggaaggttgaagaatgttgatgttgacctacttaaattacttatttttttcagtctttagacttagatagaattacctaagcttaggtaattctatctaagcttgacacaacagttcattatgagggtt

SEQ ID NO: 5687 - DNA, 600 bp, Chicken  19866894109399_3
agttaaatgctggtcagaaatgcactttctttttagagaggagggtacatagaatcttctttgattcatgctttgctgccctgtraagaaacagaaaggagttggtgttgtgcaaagtaaaggcttctgggcacaggtcagaattttgtctgcctgtgatcggtgctctgttcttcaaatataattgctagcgtaaggcttaagatcttatgagttttagcctttcctattatgcaaacagcatactctgaatactggaaggttgaagaatgttgatgttgacctacttaaattacttarttttttcagtctttagacttagatagaattacctaagcttaggtaattctatctaagcttgacacaacagttcattatgagggttgattgccatgtttgccctgacgctattctgttccaagttgtggaattagcaagtagctttactttatttttttctccattaggaagacaagatttcttattacctcatagcactttttagcaagtgartaaatgtgaaaattgcacaagatgcctatgactctgaatgtcagggttctttgattttggtctttcataccatgcatctcttcactg

SEQ ID NO: 5688 - DNA, 600 bp, Chicken  19866894109399_4
cctgtgatcggtgctctgttcttcaaatataattgctagcgtaaggcttaagatcttatgagttttagcctttcctattatgcaaacagcatactctgaatactggaaggttgaagaatgttgatgttgacctacttaaattacttatttttttcagtctttagacttagatagaattacctaagcttaggtaattctatctaagcttgacacaacagttcattatgagggttgattgccatgtttgccctgacgctattctgttccaagttgtggaattagcaagtagctttactttarttttttctccattaggaagacaagatttcttattacctcatagcactttttagcaagtgartaaatgtgaaaattgcacaagatgcctatgactctgaatgtcagggttctttgattttggtctttcataccatgcatctcttcactgcccaggtcctcttagtgaaagttaaggctgagatttatttggcacagctttttaaatagatatgtgacagttctcggttcttatgtgtagcacgtgtaattcatgtcccttacgggagctgcagaacctgttgattattttttccctttcag

SEQ ID NO: 5689 - DNA, 600 bp, Chicken  19866894109399_5
gttttagcctttcctattatgcaaacagcatactctgaatactggaaggttgaagaatgttgatgttgacctacttaaattacttatttttttcagtctttagacttagatagaattacctaagcttaggtaattctatctaagcttgacacaacagttcattatgagggttgattgccatgtttgccctgacgctattctgttccaagttgtggaattagcaagtagctttactttatttttttctccattaggaagacaagatttcttattacctcatagcactttttagcaagtgartaaatgtgaaaattgcacaagatgcctatgactctgaatgtcagggttctttgattttggtctttcataccatgcatctcttcactgcccaggtcctcttagtgaaagttaaggctgagatttatttggcacagctttttaaatagatatgtgacagttctcggttcttatgtgtagcacgtgtaattcatgtcccttacgggagctgcagaacctgttgattattttttccctttcagaaattgaacggagtggtgggaatggtttatgtgtttatctgaggtcatctgtttgtcagcg

SEQ ID NO: 5690 - DNA, 600 bp, Chicken  19866894109403_1
cctatgcttcatttggagcatttcaattaagtatagcaaccagaatttcagcatctcgtaattttgaattccttgattttacagtctttgcaaccctaatgtttctttaaactgaagcttccttttttatttttttatttgttatggtgatgttatcatattcaaaatatgaacaggcagaaatgcaaaagcgtgcagtgtataattactatcaaagaaactcagtgtagaatcttcatcttctttcaggagaaaagatgctttgcaaaagaaaacaagatcatgtaaagatttaatacrtctcaaagccaacgcaatttggtttgatacatgacccttttattttgctgccttaaaatgtctccctcctgccaaaaccatttgttacctccttccttggggaaatatgcaaagacatgcagttatgctctggcctccccactggaaggtttttatttctatcctatcagcctctattctcaccaatcatttttcttttgttctcaatatccattctttccagtaattcacttgagctacaatatctgagaaagactgagtgccactgtaatttaaaggaaaagatcttttcaggctgat

SEQ ID NO: 5691 - DNA, 600 bp, Chicken  19866894109403_2
tgagtgacagtataaagctcagctatgcaagcacatagctgctgtttgcggtagctgtgacaagaaggctgcaatggaagtgatagaaacctggattgaagcactgatgacaccaaaatccttagtcagtgccacccgtttcagcagggccaaggtttctgcccaacaatggctcagatgactatgaagaagtacaggcacactgttgtgaccatagaggaaatgaagcaccttctctacaatagactaggcaaagcttgacaaataggacaggcaaaggatttttttctagataagcarcctggactgcagcaggtccaaacatctccaactgcaatgaatcagccttgtcracaaactttgtcattttggaaaatgacatgaatgtgacaatagaagagcagtagaaaaaacagaagtgatggattctgttttctggattaagtttgggttagtcattattaagttttctagcagcaggagcaatctccattttttctaaatctgccttcatctgcttaagaagggaatactcatttccaatggtggaattctcttctgtacctccctaatatcacctttattgaatattgatcagat

SEQ ID NO: 5692 - DNA, 600 bp, Chicken  19866894109403_3
gctgtgacaagaaggctgcaatggaagtgatagaaacctggattgaagcactgatgacaccaaaatccttagtcagtgccacccgtttcagcagggccaaggtttctgcccaacaatggctcagatgactatgaagaagtacaggcacactgttgtgaccatagaggaaatgaagcaccttctctacaatagactaggcaaagcttgacaaataggacaggcaaaggatttttttctagataagcarcctggactgcagcaggtccaaacatctccaactgcaatgaatcagccttgtcracaaactttgtcattttggaaaatgacatgaatgtgacaatagaagagcagtagaaaaaacagaagtgatggattctgttttctggattaagtttgggttagtcattattaagttttctagcagcaggagcaatctccattttttctaaatctgccttcatctgcttaagaagggaatactcatttccaatggtggaattctcttctgtacctccctaatatcacctttattgaatattgatcagatatttgcctactatataatcataggtggactgctttgttgtcagttatcaagaa

SEQ ID NO: 5693 - DNA, 600 bp, Chicken  19866894109405_1
ctgctgctgtagaagtactaccaccaccattcttatgaggactaaaggggttaaagcttgccatttacttttcagaattatttgtgatgcaacttgagagacagcaaaaccacaaacagaagtatgaaaaaaaaaaaggagcaagaagaattcgtctgtcagcagagaacagcaaccagcagaatgcaaagaatttcaagaatcatcattgacataccaaccataccataccaggagaaggtaaggtgatgtacaaaggagacctaggttcagactttggcatcaactaaaaaagcaacrgagtgaaagaactgaagagggtttatttaaaatcactttcaattagtttaagaagctgaacagcagaaaggcacaggacagctttaagcagatacagatgcacaaggtcttatgctgcttttctcatgtgctggcagatcttatgattatctcaaggcaagctggccattttctccaacagaggatgrgggagagaaggctgacaaacaaaaagaacacaaaagtgagcttgaggaaatgatgaaatagaactgggtcactagggtacagaaaaggtttttcaagatgcaagatgaagaa

SEQ ID NO: 5694 - DNA, 600 bp, Chicken  19866894109405_2
aagaatttcaagaatcatcattgacataccaaccataccataccaggagaaggtaaggtgatgtacaaaggagacctaggttcagactttggcatcaactaaaaaagcaacrgagtgaaagaactgaagagggtttatttaaaatcactttcaattagtttaagaagctgaacagcagaaaggcacaggacagctttaagcagatacagatgcacaaggtcttatgctgcttttctcatgtgctggcagatcttatgattatctcaaggcaagctggccattttctccaacagaggatgrgggagagaaggctgacaaacaaaaagaacacaaaagtgagcttgaggaaatgatgaaatagaactgggtcactagggtacagaaaaggtttttcaagatgcaagatgaagaattttgagagttaaacactgaataacaggaaagaagccatcacaacaccatactggggtagaagtagttggctgtactcaatctggtatgttggctgcccttaatatatggctaggaatactcaatgtaacaccaggcaaacatatcaaaggggttaagcagaaggcaggcagcagagcagaagttata

SEQ ID NO: 5695 - DNA, 600 bp, Chicken  19866894109407_1
gccttgaatttttgtttttatttaactacttttacttgggaatggaaatcagtctaagagttaacgtaaaatcctacatgctggcttaattctgttttatgggagctgtattggtattagcacagagatactacactgacagcaaagctgtcaaaaaatgatgtggggattagacagtgagatatttgaagtacttaatctttgtgtggtccatctgagatagaaagaccaatggtaggtgaatgtacgtatggaagtaaagccacaggaaacatatttgcactgaaaaaatacaaatcrcttggtacttccagcattttttagaccacctttatttatcttcctcatacgtctgacctaaatgctgcagactgtgttgtatttgagaaaatagagcatgtgttgcccaggatcgtactgagagccgatgagaaagtcagaaatagctatgagaggttcatgactccaactgctggaattaattcagtaggtgtcttactacattcctctcaaatattagatttgtataatttaacggttagtgatttccatatttattttcaaccagcctaaagtagcatgaggatactcaggggcagt

SEQ ID NO: 5696 - DNA, 600 bp, Chicken  19866894109407_2
tgcattttaaaagcaaaatatttttggtgttagtacagttattcacactctcttgctggttagttttaaactcacagatggaaatactgctttgactagcaacaattccatcattttggatgcagtattctgttaatatcctttcagtatctcatgtaagtaaacaaaatgtctaaagcctgaggtactaaaacttaaaataccagagtgagcatagacaacctttgtgcttaaatttggtatgtggcaaaatcttggcatgtcttgagcattgtgtccattggacaagtaggtgagagsrtgggcagaagcccaggagcatcttctcaggaaagaggcaacgctagctttctagaggccatgaacttcactgagggctgagcatacagtcagatcctgaagcaaatatggtgccactggccttagacactccttctcgctcgtatttccttgtcacaatggattcatgtttgccaagctgtccagtttttggttcaatgcctggagacaaaatgcctggagacttacgcgcagttatgcgccatgctgtgactgctcttgaacttggtcatgcttttctacgtaagggagtaatttgaa

SEQ ID NO: 5697 - DNA, 600 bp, Chicken  19866894109407_3
gcattttaaaagcaaaatatttttggtgttagtacagttattcacactctcttgctggttagttttaaactcacagatggaaatactgctttgactagcaacaattccatcattttggatgcagtattctgttaatatcctttcagtatctcatgtaagtaaacaaaatgtctaaagcctgaggtactaaaacttaaaataccagagtgagcatagacaacctttgtgcttaaatttggtatgtggcaaaatcttggcatgtcttgagcattgtgtccattggacaagtaggtgagagsrtgggcagaagcccaggagcatcttctcaggaaagaggcaacgctagctttctagaggccatgaacttcactgagggctgagcatacagtcagatcctgaagcaaatatggtgccactggccttagacactccttctcgctcgtatttccttgtcacaatggattcatgtttgccaagctgtccagtttttggttcaatgcctggagacaaaatgcctggagacttacgcgcagttatgcgccatgctgtgactgctcttgaacttggtcatgcttttctacgtaagggagtaatttgaat

SEQ ID NO: 5698 - DNA, 599 bp, Chicken  19866894109411_1
  misc_feature (1)..(187): n is any nucleotide
nnnnnnnnnnnnnnnnnnnnnnnnnnnnnnnnnnnnnnnnnnnnnnnnnnnnnnnnnnnnnnnnnnnnnnnnnnnnnnnnnnnnnnnnnnnnnnnnnnnnnnnnnnnnnnnnnnnnnnnnnnnnnnnnnnnnnnnnnnnnnnnnnnnnnnnnnnnnnnnnnnnnnnnnnnnnnnnnnnnnnnnnnnngtaaattgtttgagaaaacaacaacaaaaaaaacccctaatacttaactgaaaatcttgtgatttttaaggcaggatgctacacttcttcagtgtttgccttgtgatttgctmatgctaatagggacaaagtcgcaaacgtgaaacctgagaatctcttttgtagcaagttttcagactgtaatgaagtgaatatattcctgtcccgcagaagtccttgacctccctgattttgtgctccaaattgtttgcctgtccattgctattcctacttctaaagcaggggactaaagattmtggcacagctggaggaggggctgtcgtgatacttcagcacctattaaggtagatcttctttactccccttccttccccttctgggaacaatcaaaaccaagtttccctagatttcc

SEQ ID NO: 5699 - DNA, 599 bp, Chicken  19866894109411_2
  misc_feature (1)..(4): n is any nucleotide
nnnngtaaattgtttgagaaaacaacaacaaaaaaaacccctaatacttaactgaaaatcttgtgatttttaaggcaggatgctacacttcttcagtgtttgccttgtgatttgctmatgctaatagggacaaagtcgcaaacgtgaaacctgagaatctcttttgtagcaagttttcagactgtaatgaagtgaatatattcctgtcccgcagaagtccttgacctccctgattttgtgctccaaattgtttgcctgtccattgctattcctacttctaaagcaggggactaaagattmtggcacagctggaggaggggctgtcgtgatacttcagcacctattaaggtagatcttctttactccccttccttccccttctgggaacaatcaaaaccaagtttccctagatttccctagatctaattgcagcaggaagaagaaccaaaggttattacaacacatrccatgcctttttgtccaaaagcacacacatcgatatattagttttactgggaaggcagtgcaagagcttatagcaggcttgatacagttcagatgtccttatttatttacagagaaatgtatgcatatacaaa

SEQ ID NO: 5700 - DNA, 600 bp, Chicken  19866894109411_3
tagcaagttttcagactgtaatgaagtgaatatattcctgtcccgcagaagtccttgacctccctgattttgtgctccaaattgtttgcctgtccattgctattcctacttctaaagcaggggactaaagattmtggcacagctggaggaggggctgtcgtgatacttcagcacctattaaggtagatcttctttactccccttccttccccttctgggaacaatcaaaaccaagtttccctagatttccctagatctaattgcagcaggaagaagaaccaaaggttattacaacacatrccatgcctttttgtccaaaagcacacacatcgatatattagttttactgggaaggcagtgcaagagcttatagcaggcttgatacagttcagatgtccttatttatttacagagaaatgtatgcatatacaaaagaaaaaaataagctaaaagaatgatatggttgtgagccaaatgctaaaatgctagcaaatgccagaatttggattgcctgggcacgattagctccctccactccccacgtgtaggcatgatgacatcattctggaatttcctccctcttgagtgcttggcctcatt

SEQ ID NO: 5701 - DNA, 600 bp, Chicken  19866894109413_1
aatttctccatgcagataatatggcacccagtgacatacatcgacacctgctgaacatttatggagaccaagcagtggatgtgagtgggtagtgtgtttcagtgatagtggcagtggctcatctctgctggtgcagattactacaagtgcagtgtgcgggctcttgttcattgctgatgaaaatacatagtttgtggtggtggctatgccgaaaaaatgttctgtagctgagactttgccttatcaaatagtattattgtgctctttgtatctgttgtagttgccatggaaacaaatagraggcattactttcggagcaacctatatacatccattttagaactggataaagtgtgaattacayaatatggccttgagtgaactacaaatgtaagagaaataaggaaccaggagtgttccatcagtctttgttgcaaacattaggcatgttcattactttcctgcactagcaatcagtagacataatatttccgtagatactggagtatcaattgcaaatataagtgttctaygyttattaaagggaatacaatataaatataaacatgaagccatgatttgtccttgcttattgtgttc

SEQ ID NO: 5702 - DNA, 600 bp, Chicken  19866894109413_2
agaccaagcagtggatgtgagtgggtagtgtgtttcagtgatagtggcagtggctcatctctgctggtgcagattactacaagtgcagtgtgcgggctcttgttcattgctgatgaaaatacatagtttgtggtggtggctatgccgaaaaaatgttctgtagctgagactttgccttatcaaatagtattattgtgctctttgtatctgttgtagttgccatggaaacaaatagraggcattactttcggagcaacctatatacatccattttagaactggataaagtgtgaattacayaatatggccttgagtgaactacaaatgtaagagaaataaggaaccaggagtgttccatcagtctttgttgcaaacattaggcatgttcattactttcctgcactagcaatcagtagacataatatttccgtagatactggagtatcaattgcaaatataagtgttctaygyttattaaagggaatacaatataaatataaacatgaagccatgatttgtccttgcttattgtgttctggcgctgcctgagaagtaccaagatggcactcaaacccacaatatcaactcgatccttattgg

SEQ ID NO: 5703 - DNA, 600 bp, Chicken  19866894109413_3
ctttgccttatcaaatagtattattgtgctctttgtatctgttgtagttgccatggaaacaaatagraggcattactttcggagcaacctatatacatccattttagaactggataaagtgtgaattacayaatatggccttgagtgaactacaaatgtaagagaaataaggaaccaggagtgttccatcagtctttgttgcaaacattaggcatgttcattactttcctgcactagcaatcagtagacataatatttccgtagatactggagtatcaattgcaaatataagtgttctaygyttattaaagggaatacaatataaatataaacatgaagccatgatttgtccttgcttattgtgttctggcgctgcctgagaagtaccaagatggcactcaaacccacaatatcaactcgatccttattggttgcattgccaggaatacatttttggaatgcagaagtgtagcctcccgtgtaaataaactgtagcataattggaagatttatagcattgcgttgcttagctgtgtgagatttaatctaactctgaaacaaatgcacataataaaattctttgatctgtttttttttttt

SEQ ID NO: 5704 - DNA, 600 bp, Chicken  19866894109413_4
ttgccttatcaaatagtattattgtgctctttgtatctgttgtagttgccatggaaacaaatagraggcattactttcggagcaacctatatacatccattttagaactggataaagtgtgaattacayaatatggccttgagtgaactacaaatgtaagagaaataaggaaccaggagtgttccatcagtctttgttgcaaacattaggcatgttcattactttcctgcactagcaatcagtagacataatatttccgtagatactggagtatcaattgcaaatataagtgttctaygyttattaaagggaatacaatataaatataaacatgaagccatgatttgtccttgcttattgtgttctggcgctgcctgagaagtaccaagatggcactcaaacccacaatatcaactcgatccttattggttgcattgccaggaatacatttttggaatgcagaagtgtagcctcccgtgtaaataaactgtagcataattggaagatttatagcattgcgttgcttagctgtgtgagatttaatctaactctgaaacaaatgcacataataaaattctttgatctgtttttttttttttc

SEQ ID NO: 5705 - DNA, 600 bp, Chicken  19866894109416_1
ctactaggcagaagctgaagaagattgtcactctgatttggtaagaactgatgacaatgaaagatctggtgaagcaaaccttcaggtacgtctctcatgacagtattttatcacagatagagcactgctgtcatttaaactgtgctgctaatgcgtgtttggttaccatgtatttgttgatctgatgtgcttaatctctctgcccctccaaaagtgaagtagttgaattttgcattatgttccaagggtgtgagtcagttgtaagttgtctgtacagatgaaaaagtttgtgtcagattyggaatttctttgaagaayggtagaaatcagacagcaatttatggattaaactcaggtttaatttgtcactttgttctggagtagaaagttgacaaaagcagtctgatagaaaagcacattttcttacgttacttgctttctatgtagytgttctccaggagccttgacagatacaacrtttaaagcataacttcaaaggtgctagaaaaacacatggcaaaaatgacttgtcttgtttcacagaacatagtgcttcattttaaaaagagaaaggaggrtagggcctcaaatrtactttat

SEQ ID NO: 5706 - DNA, 600 bp, Chicken  19866894109416_2
agaagattgtcactctgatttggtaagaactgatgacaatgaaagatctggtgaagcaaaccttcaggtacgtctctcatgacagtattttatcacagatagagcactgctgtcatttaaactgtgctgctaatgcgtgtttggttaccatgtatttgttgatctgatgtgcttaatctctctgcccctccaaaagtgaagtagttgaattttgcattatgttccaagggtgtgagtcagttgtaagttgtctgtacagatgaaaaagtttgtgtcagattyggaatttctttgaagaayggtagaaatcagacagcaatttatggattaaactcaggtttaatttgtcactttgttctggagtagaaagttgacaaaagcagtctgatagaaaagcacattttcttacgttacttgctttctatgtagytgttctccaggagccttgacagatacaacrtttaaagcataacttcaaaggtgctagaaaaacacatggcaaaaatgacttgtcttgtttcacagaacatagtgcttcattttaaaaagagaaaggaggrtagggcctcaaatrtactttattccaaatgacagtcttga

SEQ ID NO: 5707 - DNA, 600 bp, Chicken  19866894109416_3
taatgcgtgtttggttaccatgtatttgttgatctgatgtgcttaatctctctgcccctccaaaagtgaagtagttgaattttgcattatgttccaagggtgtgagtcagttgtaagttgtctgtacagatgaaaaagtttgtgtcagattyggaatttctttgaagaayggtagaaatcagacagcaatttatggattaaactcaggtttaatttgtcactttgttctggagtagaaagttgacaaaagcagtctgatagaaaagcacattttcttacgttacttgctttctatgtagytgttctccaggagccttgacagatacaacrtttaaagcataacttcaaaggtgctagaaaaacacatggcaaaaatgacttgtcttgtttcacagaacatagtgcttcattttaaaaagagaaaggaggrtagggcctcaaatrtactttattccaaatgacagtcttgattttaatgaagtttagtatgctgatgtacaaaaattagctcaatactcctttataatttcgagagcttttcttctgaggtggacagtccagataaaggcatttgttattgaatgatattgaacaaatact

SEQ ID NO: 5708 - DNA, 600 bp, Chicken  19866894109416_4
gatctgatgtgcttaatctctctgcccctccaaaagtgaagtagttgaattttgcattatgttccaagggtgtgagtcagttgtaagttgtctgtacagatgaaaaagtttgtgtcagattyggaatttctttgaagaayggtagaaatcagacagcaatttatggattaaactcaggtttaatttgtcactttgttctggagtagaaagttgacaaaagcagtctgatagaaaagcacattttcttacgttacttgctttctatgtagytgttctccaggagccttgacagatacaacrtttaaagcataacttcaaaggtgctagaaaaacacatggcaaaaatgacttgtcttgtttcacagaacatagtgcttcattttaaaaagagaaaggaggrtagggcctcaaatrtactttattccaaatgacagtcttgattttaatgaagtttagtatgctgatgtacaaaaattagctcaatactcctttataatttcgagagcttttcttctgaggtggacagtccagataaaggcatttgttattgaatgatattgaacaaatacttgtgtacttaaaacaaaaaaagtctacaaa

SEQ ID NO: 5709 - DNA, 600 bp, Chicken  19866894109416_5
tgaaaaagtttgtgtcagattyggaatttctttgaagaayggtagaaatcagacagcaatttatggattaaactcaggtttaatttgtcactttgttctggagtagaaagttgacaaaagcagtctgatagaaaagcacattttcttacgttacttgctttctatgtagytgttctccaggagccttgacagatacaacrtttaaagcataacttcaaaggtgctagaaaaacacatggcaaaaatgacttgtcttgtttcacagaacatagtgcttcattttaaaaagagaaaggaggrtagggcctcaaatrtactttattccaaatgacagtcttgattttaatgaagtttagtatgctgatgtacaaaaattagctcaatactcctttataatttcgagagcttttcttctgaggtggacagtccagataaaggcatttgttattgaatgatattgaacaaatacttgtgtacttaaaacaaaaaaagtctacaaaacggtggctaattctccatgtctgaattgactttaggatttgtaagtataaagcataactttgaaattctcttttgagttagtattatatcatctttgat

SEQ ID NO: 5710 - DNA, 600 bp, Chicken  19866894109416_6
tcagattyggaatttctttgaagaayggtagaaatcagacagcaatttatggattaaactcaggtttaatttgtcactttgttctggagtagaaagttgacaaaagcagtctgatagaaaagcacattttcttacgttacttgctttctatgtagytgttctccaggagccttgacagatacaacrtttaaagcataacttcaaaggtgctagaaaaacacatggcaaaaatgacttgtcttgtttcacagaacatagtgcttcattttaaaaagagaaaggaggrtagggcctcaaatrtactttattccaaatgacagtcttgattttaatgaagtttagtatgctgatgtacaaaaattagctcaatactcctttataatttcgagagcttttcttctgaggtggacagtccagataaaggcatttgttattgaatgatattgaacaaatacttgtgtacttaaaacaaaaaaagtctacaaaacggtggctaattctccatgtctgaattgactttaggatttgtaagtataaagcataactttgaaattctcttttgagttagtattatatcatctttgattggaagatctactg

SEQ ID NO: 5711 - DNA, 600 bp, Chicken  19866894109418_1
tatcctttccagtttaaaaccatttcctcttgtcctgtcactacctgcctttataaaaagtccctgcccagcttttctgtaggtttccttcaggtactgaaaggccattataaggtctccttggatccttctcttctccagtctgaagagccccagctctcgtagcctatcctcataggggagatgttccaactctccaataatcttcctggccctcctctggacctgctccaacagctccatgtccttcttgtgttgggagctccagaactgaagacagtactccaggtggtgtctcgygagagcagagtagaggagcagaatcacctcccttgacctgctggtcacacttctcttgatgcaacccatggttacagttggccttctgggctgtagaaaataaaaacgaggtgatattatgatactgcttttctcccatgtcttctccctttggtccaagccttgatccttttgacttgtattgtaacatgtcctgcccaaagcacttcaagagctcccatttagtgcacacagtgcaatgattgcatcacactgctactcaaacatggagaggtgaggctgaaaatgtgacctcttgtg

SEQ ID NO: 5712 - DNA, 600 bp, Chicken  19866894109419_1
cagaagatggctgttaatagagatgcgtgaaggtacatattccgtgtgcctgcagaaaggaggttttgatacctgttgtgtggtgggagatggttaatgcaccagagccttttggctcctttcagactaagcaggaggatgcaagcacctttacgatagccaaggtgtaccttcaggtaaaactgcctctgtcttgtgaggctcttgtcaatctcagcattccgaaccatgcagctttctggcatcgggctagcaaagtagtaaaacgcttactgactttgcagtgtgatcaataaagtygaatttgcaggtctccatggctcggcgtgctggcctccaagtgcttggcacgtacgggatcgaggccctaaagtagcataacaaaaatcaaataattgttggagttaatagcatacacttagtacaaattagagctctgaagaaaattaccctgtagcgtgcctttttctctctcagctaaaccatacgaagaatgtgttgtaactatccaaatgaataattgtgctagggatgaatgtgtgtgatttacattcttaaacaaaaccatagccatccttcagctttaaatgcatgtcgagt

SEQ ID NO: 5713 - DNA, 600 bp, Chicken  19866894109424_1
gctgagggctgttcctggctgtggctgcttctgcagcacccaaagtgctcctggacctgtggttttgatggatcaggtgtagctaccacccctatgtcacggcgttgttacgtgccttgcacttagcacagccagtcgcagcttcagctgatttccattccgtttgttttgtgctctcagcaatagaattatagaatcatagaatgatttaggttggaagggaccttaaagcccatccagttctggtccctaccatgggctgtctgccccccatgggatcacattgcccagtgccccatycaacctggccttggacacctgaccaaaagctgaacaagggatttctctctatttctgtcataaaacctggctgctacacagacatgcttgtgtaactttggaactgagatgtagtaaaatatatatatatcctcagctttttgtttcaaaaagccttgcttggcttaaatctccagagatccacaaagtgttcgtgttctgtttgtcccgtggtcattctgcagcagtgccctacaacacagacacatgaaatatatcgtcttgaggctggtttggttaagattggcttcaagaagtagt

SEQ ID NO: 5714 - DNA, 600 bp, Chicken  19866894109432_1
agatcagtaattttaaagtgacaattttatttaaacttctttgcaaaatctaagcagtgactactaaatatttttcacagaatcacagaatgtcagggattggaagggacctcaaaagatcacctagtccaattcccctgccagagcaggaacaccaagattaggtcatctaggaaagtgtccaggtgggttttgaatgtctccaaagaaggagaccccatagcctctctgggcagcctgtaaatttttgtcttagcattacccttaaacaaaaaataaaaattactcaaagtctgtttsgtgcagcacatctgtgctttcttgaaaatatctctagagtgattcatagaatcgctcgctcaggttggaaaagaccttaaagatcatcgagtccaacagcaatagcggttttttaatcygattttcagattaaactgctaagtggctagatttagcatcaatacctctgttttcttcataaataaatgtttaggagcagaagaagataattcactcagaacttatatgtctagaggagcagttttgacgtagtcagttgctattcccaccagcactccaaaacacacattcagggtatga

SEQ ID NO: 5715 - DNA, 600 bp, Chicken  19866894109432_2
tcacctagtccaattcccctgccagagcaggaacaccaagattaggtcatctaggaaagtgtccaggtgggttttgaatgtctccaaagaaggagaccccatagcctctctgggcagcctgtaaatttttgtcttagcattacccttaaacaaaaaataaaaattactcaaagtctgtttsgtgcagcacatctgtgctttcttgaaaatatctctagagtgattcatagaatcgctcgctcaggttggaaaagaccttaaagatcatcgagtccaacagcaatagcggttttttaatcygattttcagattaaactgctaagtggctagatttagcatcaatacctctgttttcttcataaataaatgtttaggagcagaagaagataattcactcagaacttatatgtctagaggagcagttttgacgtagtcagttgctattcccaccagcactccaaaacacacattcagggtatgagaggaaaataaatgcaagattgcacacttcctagtgtagaaatggtaggaaaaaagagtatggaaaaggttgcaattaaacggctgtccctcaagagagggaaagggggagaaaactta

SEQ ID NO: 5716 - DNA, 600 bp, Chicken  19866894109436_1
gtatgtgcagatatctggccccataattattttgttttgatgtaaatgtaaggtaaggaaattgccaccgttattgttttacagaggcagacttactggtaagcttctaggatgctgtgacacttcagaagtgagcttgatgtttcgtttgccttaatgttttaaacttgtcttatttacagacatcttaaatagcctaagctgatagctggatagtcttacggtgctgatgacttactaaagaaagttaggaatcttcacttaaaagtgaagcataacttgtcttgctctgttctttcmttttacgacttcaaatttgcatggtttcaaactgatttacattttataaatgcctacagtgtttgtaggaagagtgagaaggagtttaagtgtgttgaagctcagaagaggcaatctgaaatgctgctgcaggatgtggttattgtgtaaggagctgtgtttgcagcattggtgaggcttgctttgtggcttacttctggggcataaccataatctgatttgccagatggtcaaagaatctgatagtgctaagcagaatctgagggaacgcggtccaattggcttaagaagctctagagc

SEQ ID NO: 5717 - DNA, 600 bp, Chicken  19866894109436_2
tttaagtgtgttgaagctcagaagaggcaatctgaaatgctgctgcaggatgtggttattgtgtaaggagctgtgtttgcagcattggtgaggcttgctttgtggcttacttctggggcataaccataatctgatttgccagatggtcaaagaatctgatagtgctaagcagaatctgagggaacgcggtccaattggcttaagaagctctagagcccaagtttaggtggttgtggagggaactgtagatgtccttgtgagggagtgtggtacatatggctgggcagagatagtttgagygcgtgggtaacaaaattatgttgggaagaggcttttatttagatgccaatgtgaacctttttaaatggatgcagcctgtgctacctagacttaaagaacctaggttccttttttgcttctaataaagcttaagattacaaggagaactttaaaatcrgagaagactgatagcattgagacacttacaattcagtaatgccctcctgcatgaaattgaataggactgaagtccaagttgaaggaagaaatagcaaaggatatgtgaagtaaaacagttgtggtgcacagtcaaattgtatt

SEQ ID NO: 5718 - DNA, 600 bp, Chicken  19866894109436_3
gatagtgctaagcagaatctgagggaacgcggtccaattggcttaagaagctctagagcccaagtttaggtggttgtggagggaactgtagatgtccttgtgagggagtgtggtacatatggctgggcagagatagtttgagygcgtgggtaacaaaattatgttgggaagaggcttttatttagatgccaatgtgaacctttttaaatggatgcagcctgtgctacctagacttaaagaacctaggttccttttttgcttctaataaagcttaagattacaaggagaactttaaaatcrgagaagactgatagcattgagacacttacaattcagtaatgccctcctgcatgaaattgaataggactgaagtccaagttgaaggaagaaatagcaaaggatatgtgaagtaaaacagttgtggtgcacagtcaaattgtattccattagagggcattgtcagctggagtttgatataagttttaggtgggttttggtgatccaaccacgagtatcaattttaatacatcacttttaaggttgaaataattgtacaagttaataagcataaacaaacaatgtggttctgtagaagctcat

SEQ ID NO: 5719 - DNA, 599 bp, Chicken  19866894109437_1
  misc_feature (1)..(199): n is any nucleotide
nnnnnnnnnnnnnnnnnnnnnnnnnnnnnnnnnnnnnnnnnnnnnnnnnnnnnnnnnnnnnnnnnnnnnnnnnnnnnnnnnnnnnnnnnnnnnnnnnnnnnnnnnnnnnnnnnnnnnnnnnnnnnnnnnnnnnnnnnnnnnnnnnnnnnnnnnnnnnnnnnnnnnnnnnnnnnnnnnnnnnnnnnnnnnnnnnnnnnnnatttacagatgaatttatagctactgaaaatgtcacatgtccaatagttatttctcctgagctcaccgtgctcaggatccctatctcaacagctgggcccmagctccatggcaggcaatgagagtaatcacaggtggcttttatttgttcaatgcaggcaagacaacaccttgggctgctatattgaattcttcacaaaattaaatatgctgtcctttaattaatttycaactttgtatatagaaagctggcttaagtagggctgctgggcaacctgttctcaggtaactttcaacatcaaatctagctggaattgtcatcaaattcaaatgttgttagggggacggaagccaaactatggatgaactctgattataggtcttgtttccttcagaaacct

SEQ ID NO: 5720 - DNA, 599 bp, Chicken  19866894109437_2
  misc_feature (1)..(72): n is any nucleotide
nnnnnnnnnnnnnnnnnnnnnnnnnnnnnnnnnnnnnnnnnnnnnnnnnnnnnnnnnnnnnnnnnnnnnnnnatttacagatgaatttatagctactgaaaatgtcacatgtccaatagttatttctcctgagctcaccgtgctcaggatccctatctcaacagctgggcccmagctccatggcaggcaatgagagtaatcacaggtggcttttatttgttcaatgcaggcaagacaacaccttgggctgctatattgaattcttcacaaaattaaatatgctgtcctttaattaatttycaactttgtatatagaaagctggcttaagtagggctgctgggcaacctgttctcaggtaactttcaacatcaaatctagctggaattgtcatcaaattcaaatgttgttagggggacggaagccaaactatggatgaactctgattataggtcttgtttccttcagaaacctagctgatacccagttagaaccagccttcagaaggtctcctaaagataaccaaactgtttgctataatgccagtttaagtctcaagctacattttcagtggacttatgatagatgtagtgggtcttct

SEQ ID NO: 5721 - DNA, 600 bp, Chicken  19866894109441_1
gtgagagtatgtgagaagcaatctaaagggctctcctgctattgctaaagttgtgctgttggctgtaataagggtgggtacatgcctcctgttaggcagaattattctcccagtctcaaggggcaattttgtgtcttatgtctgcaaaatgaaactgatctcacagatgcttagtccagaagtgttaatttaattttggaagtagtcccactgaattttatgatcccatagatggtaaatttcttgggacttttattttcttttttgccatattcagtggtaagcacaatctccattagyttttacattatcatctactgttacttatagcaaaatgcttttaggttttggcttgaaaatgataattcgaacacataagcacaaaaaccatgtgtcagaagacaacaattaaattagaattattgcaataktacgtctgaataatctgagtaggctttgtgaaatttcaaaagctactttttttttagtaccactgcagagctcgtctgatttggcctgaacaggaaaaagtcatatagctatgaggatgttagagaaaggaagggctgtagaccgcatatagttaattccccaacctgc

SEQ ID NO: 5722 - DNA, 600 bp, Chicken  19866894109441_10
tagaagtgctgtgctttatgccttcaaaaacatgctttatatggaagtaaataamtgtgcattaagaaagtgaaatgccctggaggttacctggttcattacagacagtgctattcagattaagggcctgaccccctatagccaaagcrtatttgcttggctgagtagccagtagcaaaytacaggtcctggctttgctgttggaactaaggggaaagctactccaaaacctaggagaaaaaaggcaacagcaaagccatcaaaacattgcccatattctcaggygatagcttgcattaygttcagctttagggaattctaccattcttcaggttaaagcgagtttcctcatgggacttgtatcagcgccatctccttattcttcacagcagccactcaggggtcctgcaagaaatcagttttaagmctgcattgtctttctgacgaatgcttccaaagattgaatgaggggatctgattaaaccytctgctttcagagagacctcagatcacgctgatactgttcagctggttggagcagygatactgaatgaataaaaccacgtagctttaaaaggtcactcctttgcagagacagag

SEQ ID NO: 5723 - DNA, 600 bp, Chicken  19866894109441_11
ctgaccccctatagccaaagcrtatttgcttggctgagtagccagtagcaaaytacaggtcctggctttgctgttggaactaaggggaaagctactccaaaacctaggagaaaaaaggcaacagcaaagccatcaaaacattgcccatattctcaggygatagcttgcattaygttcagctttagggaattctaccattcttcaggttaaagcgagtttcctcatgggacttgtatcagcgccatctccttattcttcacagcagccactcaggggtcctgcaagaaatcagttttaagmctgcattgtctttctgacgaatgcttccaaagattgaatgaggggatctgattaaaccytctgctttcagagagacctcagatcacgctgatactgttcagctggttggagcagygatactgaatgaataaaaccacgtagctttaaaaggtcactcctttgcagagacagagagggttgctgtcggcagaagttggctgcgcacraggctggagtyccacatcaaaggtgttgagtggaaaattgtattttgcagctgaggtaataccagaggatgtgtagcagtgtgtaaatgaatat

SEQ ID NO: 5724 - DNA, 600 bp, Chicken  19866894109441_12
tcctggctttgctgttggaactaaggggaaagctactccaaaacctaggagaaaaaaggcaacagcaaagccatcaaaacattgcccatattctcaggygatagcttgcattaygttcagctttagggaattctaccattcttcaggttaaagcgagtttcctcatgggacttgtatcagcgccatctccttattcttcacagcagccactcaggggtcctgcaagaaatcagttttaagmctgcattgtctttctgacgaatgcttccaaagattgaatgaggggatctgattaaaccytctgctttcagagagacctcagatcacgctgatactgttcagctggttggagcagygatactgaatgaataaaaccacgtagctttaaaaggtcactcctttgcagagacagagagggttgctgtcggcagaagttggctgcgcacraggctggagtyccacatcaaaggtgttgagtggaaaattgtattttgcagctgaggtaataccagaggatgtgtagcagtgtgtaaatgaatattgtttgctatataaaagaagcagctttctaaaaagtaaacaaatgcagctttagaaaaa

SEQ ID NO: 5725 - DNA, 600 bp, Chicken  19866894109441_13
aggcaacagcaaagccatcaaaacattgcccatattctcaggygatagcttgcattaygttcagctttagggaattctaccattcttcaggttaaagcgagtttcctcatgggacttgtatcagcgccatctccttattcttcacagcagccactcaggggtcctgcaagaaatcagttttaagmctgcattgtctttctgacgaatgcttccaaagattgaatgaggggatctgattaaaccytctgctttcagagagacctcagatcacgctgatactgttcagctggttggagcagygatactgaatgaataaaaccacgtagctttaaaaggtcactcctttgcagagacagagagggttgctgtcggcagaagttggctgcgcacraggctggagtyccacatcaaaggtgttgagtggaaaattgtattttgcagctgaggtaataccagaggatgtgtagcagtgtgtaaatgaatattgtttgctatataaaagaagcagctttctaaaaagtaaacaaatgcagctttagaaaaaagcaaatagggtagcagaatttactgcctgtattctaaaatacaccttcagctctg

SEQ ID NO: 5726 - DNA, 600 bp, Chicken  19866894109441_14
ttaaagcgagtttcctcatgggacttgtatcagcgccatctccttattcttcacagcagccactcaggggtcctgcaagaaatcagttttaagmctgcattgtctttctgacgaatgcttccaaagattgaatgaggggatctgattaaaccytctgctttcagagagacctcagatcacgctgatactgttcagctggttggagcagygatactgaatgaataaaaccacgtagctttaaaaggtcactcctttgcagagacagagagggttgctgtcggcagaagttggctgcgcacraggctggagtyccacatcaaaggtgttgagtggaaaattgtattttgcagctgaggtaataccagaggatgtgtagcagtgtgtaaatgaatattgtttgctatataaaagaagcagctttctaaaaagtaaacaaatgcagctttagaaaaaagcaaatagggtagcagaatttactgcctgtattctaaaatacaccttcagctctgttgcagacacaaaaggtaagagaactctgtgtgtaacaaaagaaataagcatgcaaatcaatttggcagcaaacttcagttaccgatctgc

SEQ ID NO: 5727 - DNA, 600 bp, Chicken  19866894109441_15
ttcctcatgggacttgtatcagcgccatctccttattcttcacagcagccactcaggggtcctgcaagaaatcagttttaagmctgcattgtctttctgacgaatgcttccaaagattgaatgaggggatctgattaaaccytctgctttcagagagacctcagatcacgctgatactgttcagctggttggagcagygatactgaatgaataaaaccacgtagctttaaaaggtcactcctttgcagagacagagagggttgctgtcggcagaagttggctgcgcacraggctggagtyccacatcaaaggtgttgagtggaaaattgtattttgcagctgaggtaataccagaggatgtgtagcagtgtgtaaatgaatattgtttgctatataaaagaagcagctttctaaaaagtaaacaaatgcagctttagaaaaaagcaaatagggtagcagaatttactgcctgtattctaaaatacaccttcagctctgttgcagacacaaaaggtaagagaactctgtgtgtaacaaaagaaataagcatgcaaatcaatttggcagcaaacttcagttaccgatctgccattaggtgat

SEQ ID NO: 5728 - DNA, 600 bp, Chicken  19866894109441_2
tgtcttatgtctgcaaaatgaaactgatctcacagatgcttagtccagaagtgttaatttaattttggaagtagtcccactgaattttatgatcccatagatggtaaatttcttgggacttttattttcttttttgccatattcagtggtaagcacaatctccattagyttttacattatcatctactgttacttatagcaaaatgcttttaggttttggcttgaaaatgataattcgaacacataagcacaaaaaccatgtgtcagaagacaacaattaaattagaattattgcaataktacgtctgaataatctgagtaggctttgtgaaatttcaaaagctactttttttttagtaccactgcagagctcgtctgatttggcctgaacaggaaaaagtcatatagctatgaggatgttagagaaaggaagggctgtagaccgcatatagttaattccccaacctgctgatgaccactgatggtcacggtaaatctggctgctatgaatggacagtaagggtagagaaatgcagcttttgtaagctccagaacgggcggccagaggtatgtggctgtttcctgttgggtccccccaaa

SEQ ID NO: 5729 - DNA, 600 bp, Chicken  19866894109441_3
caatgcatggccatatcgctttagcggcaggcttaggaagaattctgagaagctgtgcatgctctttaagatatttttatcttgagggttactctgcaagcatctcaccctctgattattttctcagaaaaaaaaaaagggggggtaggaaataggaggaacagacagcagtaatgaatacaaatgtagccaataaaagcaaactagtctattattgcgatgagaaaatcaggtgagatgagttcatttgtgtattggttttcacttcaaaacagtatttgaaaggcccgttatctaccrctttggttttcatgttaaaaatattgtattctggctcagcactgctgtcaagaagtacaatatgtcccacctcattaagtatcatctctttcttctccatctgtcctgaacagcaggaaaactagttttcaaacaggaaaataatcagttttgtatatttcctttctcttctatattcatctaaaaatataatcaaatttccagaggagtgcccctgaaacaccacggctaataaaggcactgtttggaacatcaggagctgttgtttgggatgtagcaaggtgagcaaatgtgagaagc

SEQ ID NO: 5730 - DNA, 600 bp, Chicken  19866894109441_4
tattgtattctggctcagcactgctgtcaagaagtacaatatgtcccacctcattaagtatcatctctttcttctccatctgtcctgaacagcaggaaaactagttttcaaacaggaaaataatcagttttgtatatttcctttctcttctatattcatctaaaaatataatcaaatttccagaggagtgcccctgaaacaccacggctaataaaggcactgtttggaacatcaggagctgttgtttgggatgtagcaaggtgagcaaatgtgagaagcaagagccccaacaaaaatacrgtgggttagagagggaaaatctactaatctagtataaatgcaaactggttraccatacagcgcagatagaagaagttaagaaagagaggcattttctcctctgtttgaatatgtaaataggagttcattgccctttgcgtgttagaagtgctgtgctttatgccttcaaaaacatgctttatatggaagtaaataamtgtgcattaagaaagtgaaatgccctggaggttacctggttcattacagacagtgctattcagattaagggcctgaccccctatagccaaagcrtatttgctt

SEQ ID NO: 5731 - DNA, 600 bp, Chicken  19866894109441_5
cattaagtatcatctctttcttctccatctgtcctgaacagcaggaaaactagttttcaaacaggaaaataatcagttttgtatatttcctttctcttctatattcatctaaaaatataatcaaatttccagaggagtgcccctgaaacaccacggctaataaaggcactgtttggaacatcaggagctgttgtttgggatgtagcaaggtgagcaaatgtgagaagcaagagccccaacaaaaatacrgtgggttagagagggaaaatctactaatctagtataaatgcaaactggttraccatacagcgcagatagaagaagttaagaaagagaggcattttctcctctgtttgaatatgtaaataggagttcattgccctttgcgtgttagaagtgctgtgctttatgccttcaaaaacatgctttatatggaagtaaataamtgtgcattaagaaagtgaaatgccctggaggttacctggttcattacagacagtgctattcagattaagggcctgaccccctatagccaaagcrtatttgcttggctgagtagccagtagcaaaytacaggtcctggctttgctgttggaacta

SEQ ID NO: 5732 - DNA, 600 bp, Chicken  19866894109441_6
aacaccacggctaataaaggcactgtttggaacatcaggagctgttgtttgggatgtagcaaggtgagcaaatgtgagaagcaagagccccaacaaaaatacrgtgggttagagagggaaaatctactaatctagtataaatgcaaactggttraccatacagcgcagatagaagaagttaagaaagagaggcattttctcctctgtttgaatatgtaaataggagttcattgccctttgcgtgttagaagtgctgtgctttatgccttcaaaaacatgctttatatggaagtaaataamtgtgcattaagaaagtgaaatgccctggaggttacctggttcattacagacagtgctattcagattaagggcctgaccccctatagccaaagcrtatttgcttggctgagtagccagtagcaaaytacaggtcctggctttgctgttggaactaaggggaaagctactccaaaacctaggagaaaaaaggcaacagcaaagccatcaaaacattgcccatattctcaggygatagcttgcattaygttcagctttagggaattctaccattcttcaggttaaagcgagtttcctcatggg

SEQ ID NO: 5733 - DNA, 600 bp, Chicken  19866894109441_7
aaaaatacrgtgggttagagagggaaaatctactaatctagtataaatgcaaactggttraccatacagcgcagatagaagaagttaagaaagagaggcattttctcctctgtttgaatatgtaaataggagttcattgccctttgcgtgttagaagtgctgtgctttatgccttcaaaaacatgctttatatggaagtaaataamtgtgcattaagaaagtgaaatgccctggaggttacctggttcattacagacagtgctattcagattaagggcctgaccccctatagccaaagcrtatttgcttggctgagtagccagtagcaaaytacaggtcctggctttgctgttggaactaaggggaaagctactccaaaacctaggagaaaaaaggcaacagcaaagccatcaaaacattgcccatattctcaggygatagcttgcattaygttcagctttagggaattctaccattcttcaggttaaagcgagtttcctcatgggacttgtatcagcgccatctccttattcttcacagcagccactcaggggtcctgcaagaaatcagttttaagmctgcattgtctttctgacgaat

SEQ ID NO: 5734 - DNA, 600 bp, Chicken  19866894109441_8
actaatctagtataaatgcaaactggttraccatacagcgcagatagaagaagttaagaaagagaggcattttctcctctgtttgaatatgtaaataggagttcattgccctttgcgtgttagaagtgctgtgctttatgccttcaaaaacatgctttatatggaagtaaataamtgtgcattaagaaagtgaaatgccctggaggttacctggttcattacagacagtgctattcagattaagggcctgaccccctatagccaaagcrtatttgcttggctgagtagccagtagcaaaytacaggtcctggctttgctgttggaactaaggggaaagctactccaaaacctaggagaaaaaaggcaacagcaaagccatcaaaacattgcccatattctcaggygatagcttgcattaygttcagctttagggaattctaccattcttcaggttaaagcgagtttcctcatgggacttgtatcagcgccatctccttattcttcacagcagccactcaggggtcctgcaagaaatcagttttaagmctgcattgtctttctgacgaatgcttccaaagattgaatgaggggatctgatt

SEQ ID NO: 5735 - DNA, 600 bp, Chicken  19866894109441_9
ttgccctttgcgtgttagaagtgctgtgctttatgccttcaaaaacatgctttatatggaagtaaataamtgtgcattaagaaagtgaaatgccctggaggttacctggttcattacagacagtgctattcagattaagggcctgaccccctatagccaaagcrtatttgcttggctgagtagccagtagcaaaytacaggtcctggctttgctgttggaactaaggggaaagctactccaaaacctaggagaaaaaaggcaacagcaaagccatcaaaacattgcccatattctcaggygatagcttgcattaygttcagctttagggaattctaccattcttcaggttaaagcgagtttcctcatgggacttgtatcagcgccatctccttattcttcacagcagccactcaggggtcctgcaagaaatcagttttaagmctgcattgtctttctgacgaatgcttccaaagattgaatgaggggatctgattaaaccytctgctttcagagagacctcagatcacgctgatactgttcagctggttggagcagygatactgaatgaataaaaccacgtagctttaaaaggtcactcc

SEQ ID NO: 5736 - DNA, 600 bp, Chicken  19866894109446_1
gatgtactgaaaattgtacacgtgtttcaattgttagtgagacacatgcagattttagctgactgttaaatggttgttaatcttttggttagttgaaagaacatgttattctcataccttataccaacaagtattgttgaatataaaatcacagagagcattttgtagttatcataaatgcttagtagcctatcaaaatctttaacaattaagaagttattttagatgcttcttagatattttttgcatttaggcttacggggacatatttaaaatttgtttttgcttgtaatgtgtgcyttcayctatctaatttactatgtggatatttcagcatggaagaggcacccatcgaagtctgaagagtcttgcagtgtaattccctggtagacacccagctcagtgcaaggctatagaaaccaaaggaagcttaaagttgatttcatatagctttggctcagactatcagctttcctctgatcttaattctttatattattattttcatgtgctactactaagagatgtttaacctcacaaaacatcaaagaatcacaaatcagactgtaataaaagaaggcatatttgttatacttaaag

SEQ ID NO: 5737 - DNA, 600 bp, Chicken  19866894109446_2
actgaaaattgtacacgtgtttcaattgttagtgagacacatgcagattttagctgactgttaaatggttgttaatcttttggttagttgaaagaacatgttattctcataccttataccaacaagtattgttgaatataaaatcacagagagcattttgtagttatcataaatgcttagtagcctatcaaaatctttaacaattaagaagttattttagatgcttcttagatattttttgcatttaggcttacggggacatatttaaaatttgtttttgcttgtaatgtgtgcyttcayctatctaatttactatgtggatatttcagcatggaagaggcacccatcgaagtctgaagagtcttgcagtgtaattccctggtagacacccagctcagtgcaaggctatagaaaccaaaggaagcttaaagttgatttcatatagctttggctcagactatcagctttcctctgatcttaattctttatattattattttcatgtgctactactaagagatgtttaacctcacaaaacatcaaagaatcacaaatcagactgtaataaaagaaggcatatttgttatacttaaagcatcc

SEQ ID NO: 5738 - DNA, 599 bp, Chicken  19866894109448_1
  misc_feature (1)..(196): n is any nucleotide
nnnnnnnnnnnnnnnnnnnnnnnnnnnnnnnnnnnnnnnnnnnnnnnnnnnnnnnnnnnnnnnnnnnnnnnnnnnnnnnnnnnnnnnnnnnnnnnnnnnnnnnnnnnnnnnnnnnnnnnnnnnnnnnnnnnnnnnnnnnnnnnnnnnnnnnnnnnnnnnnnnnnnnnnnnnnnnnnnnnnnnnnnnnnnnnnnnnntaggcttacagggacatatttaaaatttgtttttgcttgtaatgtgtgccttcatctatctaatttactatgtggatatttcagcatggaagaggcacccatcraagtctsaagagtcttgcagtgtaattccctggtagacacccagctcagtgcaaggctatagaaaccaaaggaagcttaaagttkatttcatatagctttggctcagactatcagctttcctctgatcttaattctttatattattattttcatgtgctactactaagagatgtttaacctcacaaaacatcaaagaatcacaaatcagactgtaataaaagaaggcatatttgttatacttaaagcatccattcttgtgaatatacagagattagtaaattttgtcactatcatttaa

SEQ ID NO: 5739 - DNA, 599 bp, Chicken  19866894109448_2
  misc_feature (1)..(189): n is any nucleotide
nnnnnnnnnnnnnnnnnnnnnnnnnnnnnnnnnnnnnnnnnnnnnnnnnnnnnnnnnnnnnnnnnnnnnnnnnnnnnnnnnnnnnnnnnnnnnnnnnnnnnnnnnnnnnnnnnnnnnnnnnnnnnnnnnnnnnnnnnnnnnnnnnnnnnnnnnnnnnnnnnnnnnnnnnnnnnnnnnnnnnnnnnnnnntaggcttacagggacatatttaaaatttgtttttgcttgtaatgtgtgccttcatctatctaatttactatgtggatatttcagcatggaagaggcacccatcraagtctsaagagtcttgcagtgtaattccctggtagacacccagctcagtgcaaggctatagaaaccaaaggaagcttaaagttkatttcatatagctttggctcagactatcagctttcctctgatcttaattctttatattattattttcatgtgctactactaagagatgtttaacctcacaaaacatcaaagaatcacaaatcagactgtaataaaagaaggcatatttgttatacttaaagcatccattcttgtgaatatacagagattagtaaattttgtcactatcatttaatgagtaa

SEQ ID NO: 5740 - DNA, 599 bp, Chicken  19866894109448_3
  misc_feature (1)..(111): n is any nucleotide
nnnnnnnnnnnnnnnnnnnnnnnnnnnnnnnnnnnnnnnnnnnnnnnnnnnnnnnnnnnnnnnnnnnnnnnnnnnnnnnnnnnnnnnnnnnnnnnnnnnnnnnnnnnnnnntaggcttacagggacatatttaaaatttgtttttgcttgtaatgtgtgccttcatctatctaatttactatgtggatatttcagcatggaagaggcacccatcraagtctsaagagtcttgcagtgtaattccctggtagacacccagctcagtgcaaggctatagaaaccaaaggaagcttaaagttkatttcatatagctttggctcagactatcagctttcctctgatcttaattctttatattattattttcatgtgctactactaagagatgtttaacctcacaaaacatcaaagaatcacaaatcagactgtaataaaagaaggcatatttgttatacttaaagcatccattcttgtgaatatacagagattagtaaattttgtcactatcatttaatgagtaaaataatataaatygatctctaattatctccagagaagaagcctacagctgcaataattttagttttgttaccggttgc

SEQ ID NO: 5741 - DNA, 600 bp, Chicken  19866894109448_4
gtgtaattccctggtagacacccagctcagtgcaaggctatagaaaccaaaggaagcttaaagttkatttcatatagctttggctcagactatcagctttcctctgatcttaattctttatattattattttcatgtgctactactaagagatgtttaacctcacaaaacatcaaagaatcacaaatcagactgtaataaaagaaggcatatttgttatacttaaagcatccattcttgtgaatatacagagattagtaaattttgtcactatcatttaatgagtaaaataatataaatygatctctaattatctccagagaagaagcctacagctgcaataattttagttttgttaccggttgctgcattatgttctacatatcatgtgtaacagttttaactaggctgctgatgagagccaaggcacagattctcagggctgtttaggttcctaatttctgcaacaatctatgaagtaattcagtcactacagctcttggttttggcatgcctaaacctgaagagcattgacaccagagaggaactcacaatccgaagcttaagtagtttcactttttattggatgctctatgacagt

SEQ ID NO: 5742 - DNA, 599 bp, Chicken  19866894109449_1
  misc_feature (1)..(121): n is any nucleotide
nnnnnnnnnnnnnnnnnnnnnnnnnnnnnnnnnnnnnnnnnnnnnnnnnnnnnnnnnnnnnnnnnnnnnnnnnnnnnnnnnnnnnnnnnnnnnnnnnnnnnnnnnnnnnnnnnnnnnnnnnctgagctcctgcaaccgtgctatacttctttgctaggataaaggaaggggagaaagcagcagggaaattcacaagccctcaaacgctcagccgtatagatcaacctcagagggacaagtgtgcttgcagctgcttgctccaagagtttaacaggtaatccctaccacctaaaagacacragatgcccccatacccatctgcttgtggtgcagagcacaagaaatcaggaggcctacagctcctgcatgacggctgaaaatctgtgtcagcctctttgctatatcaagaacaggaacatggtttctttggtactgaacaagacaggcaaggtgctgctgtcctgcaggagctctgcgmtgtacctgtatcctgtccgtgtagttgtccagcaggaggactcctgagctggtcaccttcttagtttccaccatcgtcttcagatccgccagcaggctcatgtgcttggacatatctgttg

SEQ ID NO: 5743 - DNA, 600 bp, Chicken  19866894109449_2
agcagggaaattcacaagccctcaaacgctcagccgtatagatcaacctcagagggacaagtgtgcttgcagctgcttgctccaagagtttaacaggtaatccctaccacctaaaagacacragatgcccccatacccatctgcttgtggtgcagagcacaagaaatcaggaggcctacagctcctgcatgacggctgaaaatctgtgtcagcctctttgctatatcaagaacaggaacatggtttctttggtactgaacaagacaggcaaggtgctgctgtcctgcaggagctctgcgmtgtacctgtatcctgtccgtgtagttgtccagcaggaggactcctgagctggtcaccttcttagtttccaccatcgtcttcagatccgccagcaggctcatgtgcttggacatatctgttgccaatacctttacggaagagaaaacacaacctcagcgagggtggccaggtgragaagccagtatgtgaagagcagcagygtgccaggggccctaccatgtcaatcaccatcttcctgagcgtctgccgctgcttcttggtcaggttctggaagatgtcgcagtgctcctcctgcagcag

SEQ ID NO: 5744 - DNA, 600 bp, Chicken  19866894109449_3
gcctacagctcctgcatgacggctgaaaatctgtgtcagcctctttgctatatcaagaacaggaacatggtttctttggtactgaacaagacaggcaaggtgctgctgtcctgcaggagctctgcgmtgtacctgtatcctgtccgtgtagttgtccagcaggaggactcctgagctggtcaccttcttagtttccaccatcgtcttcagatccgccagcaggctcatgtgcttggacatatctgttgccaatacctttacggaagagaaaacacaacctcagcgagggtggccaggtgragaagccagtatgtgaagagcagcagygtgccaggggccctaccatgtcaatcaccatcttcctgagcgtctgccgctgcttcttggtcaggttctggaagatgtcgcagtgctcctcctgcagcagtttgaagcccactgccaggtggtggttctccaggacagactcgtcgttgtacatcagcgccagctcggaatctaccaaagcaacacaaacatggggctcagtgcatgcagtgtgggactcccacggcgagcacggggcgctgcaatgtttgcctgcgtgcaacaaatggaaaa

SEQ ID NO: 5745 - DNA, 600 bp, Chicken  19866894109449_4
aatctgtgtcagcctctttgctatatcaagaacaggaacatggtttctttggtactgaacaagacaggcaaggtgctgctgtcctgcaggagctctgcgmtgtacctgtatcctgtccgtgtagttgtccagcaggaggactcctgagctggtcaccttcttagtttccaccatcgtcttcagatccgccagcaggctcatgtgcttggacatatctgttgccaatacctttacggaagagaaaacacaacctcagcgagggtggccaggtgragaagccagtatgtgaagagcagcagygtgccaggggccctaccatgtcaatcaccatcttcctgagcgtctgccgctgcttcttggtcaggttctggaagatgtcgcagtgctcctcctgcagcagtttgaagcccactgccaggtggtggttctccaggacagactcgtcgttgtacatcagcgccagctcggaatctaccaaagcaacacaaacatggggctcagtgcatgcagtgtgggactcccacggcgagcacggggcgctgcaatgtttgcctgcgtgcaacaaatggaaaactttccttttttgtaccacataatctg

SEQ ID NO: 5746 - DNA, 600 bp, Chicken  19866894109457_1
aaagcaattttataaaacctatagaatcacagaatcatcaaggttggaaaagacctttaagatcatctagtctaactgtccacataccaaaaatgttgcccattaaaccatgttccactaaaccatgtttataaaaccttctgaacaccaatgtatttattctgtaaactagaataacatccactgtacacgacgagagcttgcattgtatgggtgatccatcattcaatttctttatgtcagttataataaatatatagatatgtttctccatgatacaagagtttaaggtgggcttgwctatttctgtaccacgtacctgggaagagagacgtactaggatgcagactacacaaagagcagggaggagaagaaccaacaagatgatttacattgtcagaactgaagggttctgtctgcaaaggcatacagaacagaaggacaattgtgactccttctaagctgcagagttgatattacagatttctgtcattactaaagttgtgtctaggtacgagtaggagtgaatttataatattctcacagcatgctctcaaggtccataagtattctgtgtagaagtacacaagtctgtgggct

SEQ ID NO: 5747 - DNA, 600 bp, Chicken  19866894109462_1
gaattgcacacacagcttcaggagcagacgcagcccatcaacagagcattaaagcataagctatggggaaaattgaaaggtttgaacaacacagtagctaaataattgtgggctttttacaaacagtaggactcacaacatttatgtgtgcaaaaatgcatgtttgaaactggataagaattttgcaccatttcctatgtagagaggggtggcaaacatgacccagtcagtatctgcctaaggaagtagtttggcacttcctaccatgatgggaaagcagaagtgaccacgtaggtgtgratgagcaaaaaataaatcttgctgagatttctgcacctcagacaggggaggatttatgcttcatgtagtggtattagattgctttatgggcttttttttccccagatcaggtgaagaatgaagggcactttcaagtttaagcccccagcgaccatgcagactggtttgtgttaagtagtggtcatgcatggtggaaaactccatgctgcagataagctgcataaagaggccctttctcttaccactgaaaaacagcactcttttatttaagctggggaagagcgcgagcaacatttcact

SEQ ID NO: 5748 - DNA, 556 bp, Chicken  19866894109482_1
gcacagggagtttgctgagctggatgagcatggaaaatgcagaactgcaaggagatgaggaggagaaagtgctcgtgttcagagctctggatttcccatggcactccctgcccctgcgctcatgcagctgaggcacagcctcatgctggctcttggcacacagggcagtgtttgctcccttagagcatccctgctgctgtccccgcacagggagaggtttgtctgtactgtgactgttgtgtcaacagcaaaggacacagggctggttcagtgtgtacttcctgggacacacgtcaccckcatgctgcagggattggcagcagtgcagtggtggtggcggtgctctgctggtgcagctttcagagcttatttggggagagttcattctgtgctgctgcactgacacagcactgctcttgctggtgagcatccctgggctcctcctggtgtgctgtgctgtgccacaccgtgccatgccatatggtactacagcatgccatgctgtaccattctgtgccgtgccatgccatgccattctgtgctattctgctccatg

SEQ ID NO: 5749 - DNA, 599 bp, Chicken  19866894109484_1
  misc_feature (1)..(136): n is any nucleotide
nnnnnnnnnnnnnnnnnnnnnnnnnnnnnnnnnnnnnnnnnnnnnnnnnnnnnnnnnnnnnnnnnnnnnnnnnnnnnnnnnnnnnnnnnnnnnnnnnnnnnnnnnnnnnnnnnnnnnnnnnnnnnnnnnnnnnnnntctgcacatttctcacagatattttgactgtgagcatcaaaaccaggggcatcactggcttttggataataaattgacttggtcagtgtaatcaccaggaagctggtacagaattttttccttgtgtctcagtacagatttgcttgcagacctttgatcattcrcgcttttcctctggctcagcctggaagaggttctgggagtatttcacctttgtgcagcaaagatgtggtttggcttctggaactgtaagcaattctgcatgctcattagttcctggccattgtgaaggcattgtgtaccacaggagctttggctgcttcttttctctggtttattgtaggtgaagtattctacgactaartgaaaatgtgtaacccggctctttcagcttgatatagcttatttgggtgcaaaacggttgtgcatcytgtggaggtcaggcggaccagaaggatctgct

SEQ ID NO: 5750 - DNA, 600 bp, Chicken  19866894109484_2
gataataaattgacttggtcagtgtaatcaccaggaagctggtacagaattttttccttgtgtctcagtacagatttgcttgcagacctttgatcattcrcgcttttcctctggctcagcctggaagaggttctgggagtatttcacctttgtgcagcaaagatgtggtttggcttctggaactgtaagcaattctgcatgctcattagttcctggccattgtgaaggcattgtgtaccacaggagctttggctgcttcttttctctggtttattgtaggtgaagtattctacgactaartgaaaatgtgtaacccggctctttcagcttgatatagcttatttgggtgcaaaacggttgtgcatcytgtggaggtcaggcggaccagaaggatctgctttgccttagctgattaagatatgtgtcctcctatgcaaaaagaatttaacattctctaagacttactctcagcatttgagtaactgaaatcagcatcattttctctcaagtagccccctatgtccaatctttatcacgattccaaggacagacttaatgttttgccgatgtttttctccaggctgagatgtctttgaagaa

SEQ ID NO: 5751 - DNA, 600 bp, Chicken  19866894109484_3
gtacagatttgcttgcagacctttgatcattcrcgcttttcctctggctcagcctggaagaggttctgggagtatttcacctttgtgcagcaaagatgtggtttggcttctggaactgtaagcaattctgcatgctcattagttcctggccattgtgaaggcattgtgtaccacaggagctttggctgcttcttttctctggtttattgtaggtgaagtattctacgactaartgaaaatgtgtaacccggctctttcagcttgatatagcttatttgggtgcaaaacggttgtgcatcytgtggaggtcaggcggaccagaaggatctgctttgccttagctgattaagatatgtgtcctcctatgcaaaaagaatttaacattctctaagacttactctcagcatttgagtaactgaaatcagcatcattttctctcaagtagccccctatgtccaatctttatcacgattccaaggacagacttaatgttttgccgatgtttttctccaggctgagatgtctttgaagaattggtgttttacacctgattgtaaagcagaacaactcttcccgcaacttaaccaaagatatctccca

SEQ ID NO: 5752 - DNA, 600 bp, Chicken  19866894109501_1
ggagatgaaaagatctgtctgtagctctgattcattaagaatttactgctgcatcttaagcactaagtgccgaggacagcgaacataatatgtagttactttatgacattgattttccttgtcatctatgaatagccagaaataagcttaaaaaaatggaacaatgttgacaataattaaataacaagcagaagccagtcgcgatgtgattctgcttctgctgaactgagattggtcatttatggttcataaatgcaagtgctgctgattctgggaaagctttgtaaagagacctattgmttttccttttgtcatggaaagaataatatggacacatttaggaaaactgggctaaaatatgattttacctcactcccaggcacagaagtatgcttctgaacactgcactacaggctcttgtttgaacaagactattggctggaaacagaatcaactaatttctggtttctatttattatccaagtgtgtgaaaccatttttcacgtattaattcagcccattaattggtgtgtccatatttatgaccctcaggctacatcctaccttagtgattttatctcttcaaagaatgaagtatga

SEQ ID NO: 5753 - DNA, 600 bp, Chicken  19866894109503_1
cccttcgggtacttacggaaattgagtgttttcttctctgggctaaacagtcacatatttctcagcctttccttataggagaaatgctccggttcactcatctttttcactgtcctttcttaactgttcaggagctccgtgcctctcttgtaatggggaactcagaactggacacatgacttattagagaagaatcacctccttcagcctgctggtaacactcctactagtgcagctcaggatactgttagcctttaggtacaagggggcattgttggctcatatacagcttggtgaacwctatgacaacygtgttcaccaggaccccctgttacatactttataagaagtaaatatttcatttctggtatttaaattattacatatgttaggtattctatttttaccaggaaaatatcttttacctaaggaaacacataaataagaaatccatggtaaaaggcagatttcaaaactatttgatttcactgtttccagtaaccaccatctcgaacttcaggaggaaaaatggaatacagtccttatgctgggcaagaacaaccaggtgtgataataaaggtgtgtagtagatttgtagga

SEQ ID NO: 5754 - DNA, 600 bp, Chicken  19866894109503_2
cttacggaaattgagtgttttcttctctgggctaaacagtcacatatttctcagcctttccttataggagaaatgctccggttcactcatctttttcactgtcctttcttaactgttcaggagctccgtgcctctcttgtaatggggaactcagaactggacacatgacttattagagaagaatcacctccttcagcctgctggtaacactcctactagtgcagctcaggatactgttagcctttaggtacaagggggcattgttggctcatatacagcttggtgaacwctatgacaacygtgttcaccaggaccccctgttacatactttataagaagtaaatatttcatttctggtatttaaattattacatatgttaggtattctatttttaccaggaaaatatcttttacctaaggaaacacataaataagaaatccatggtaaaaggcagatttcaaaactatttgatttcactgtttccagtaaccaccatctcgaacttcaggaggaaaaatggaatacagtccttatgctgggcaagaacaaccaggtgtgataataaaggtgtgtagtagatttgtaggatatcctgaggt

SEQ ID NO: 5755 - DNA, 600 bp, Chicken  19866894109503_3
tttctggtatttaaattattacatatgttaggtattctatttttaccaggaaaatatcttttacctaaggaaacacataaataagaaatccatggtaaaaggcagatttcaaaactatttgatttcactgtttccagtaaccaccatctcgaacttcaggaggaaaaatggaatacagtccttatgctgggcaagaacaaccaggtgtgataataaaggtgtgtagtagatttgtaggatatcctgaggtaatcttgagactgaaaatgatgttgaaacttcatttgaaatgatgaagargttgaattctgggagtagtaaggagaagaaaggataaacatatgatataatgataaagtaatgggaaagtatgtgatagagcagtacagcatgcagcagtagatgaacactgaatgaggggctgcaaagaaaaatgtatggggaaaaagaatgaatacagaaaagtagaaatatatcttagtaatggatacttcacaccgccattatcactttctccttggccatatccatctttataaaccattttatgcaattgaatattttctttctttttctgttggcaacccgccagctatttca

SEQ ID NO: 5756 - DNA, 599 bp, Chicken  19866894109514_1
  misc_feature (1)..(17): n is any nucleotide
nnnnnnnnnnnnnnnnncacactgggcttttcaatcagtaaagctgggttactccagctgctatctgttcaactgaagatgcacgtgtgaacttgtagctaccagccacaagcataaccaacaacccccactgaagaaaggacaggaaaatacacacgcatacccctctgttcagtcccactggggccgaaccactgaagctgtaatatattgacctctgctacattccctgcttacagaccagcacttgcccacacaaaaaaaaaaatcagagttcttctgactgaggcatttctgctygcccctcatttaaaaggttgacttcccccaaacttaagatgaaatcatacattgtaaaagtcatacggcacatcccagagatcyccaggaaggcctcyacaatcacttgcagtcacgatcaacacttcttccatttcacagaaggctgctcacctagaagagctggtagtcaatcagtgcagaaggaccagcaaaagcaatagtgctgaatgagccccgcatcagatgaatacggccccagcacagccagccacttcagcgtacatctaattcaagcacacaacctcaacaggacaata

SEQ ID NO: 5757 - DNA, 600 bp, Chicken  19866894109514_2
gtgtgaacttgtagctaccagccacaagcataaccaacaacccccactgaagaaaggacaggaaaatacacacgcatacccctctgttcagtcccactggggccgaaccactgaagctgtaatatattgacctctgctacattccctgcttacagaccagcacttgcccacacaaaaaaaaaaatcagagttcttctgactgaggcatttctgctygcccctcatttaaaaggttgacttcccccaaacttaagatgaaatcatacattgtaaaagtcatacggcacatcccagagatcyccaggaaggcctcyacaatcacttgcagtcacgatcaacacttcttccatttcacagaaggctgctcacctagaagagctggtagtcaatcagtgcagaaggaccagcaaaagcaatagtgctgaatgagccccgcatcagatgaatacggccccagcacagccagccacttcagcgtacatctaattcaagcacacaacctcaacaggacaatatataaaaggcttggttaagctcagtgtctctaaaaagatacagagccaattataaatcatatctatagtccccagaagatctaag

SEQ ID NO: 5758 - DNA, 600 bp, Chicken  19866894109514_3
ctaccagccacaagcataaccaacaacccccactgaagaaaggacaggaaaatacacacgcatacccctctgttcagtcccactggggccgaaccactgaagctgtaatatattgacctctgctacattccctgcttacagaccagcacttgcccacacaaaaaaaaaaatcagagttcttctgactgaggcatttctgctygcccctcatttaaaaggttgacttcccccaaacttaagatgaaatcatacattgtaaaagtcatacggcacatcccagagatcyccaggaaggcctcyacaatcacttgcagtcacgatcaacacttcttccatttcacagaaggctgctcacctagaagagctggtagtcaatcagtgcagaaggaccagcaaaagcaatagtgctgaatgagccccgcatcagatgaatacggccccagcacagccagccacttcagcgtacatctaattcaagcacacaacctcaacaggacaatatataaaaggcttggttaagctcagtgtctctaaaaagatacagagccaattataaatcatatctatagtccccagaagatctaagtcactactagcatt

SEQ ID NO: 5759 - DNA, 600 bp, Chicken  19866894109530_1
atgaaaaagaaaatcctcaaagggttgtggaagaacaactggagttgataaaggaaaatcctgccaaactgaggtctgattttggcaaaaatgggatgtcacaattctgcaaatgtccagaaaaacaaattaataaaccaaatagaggtacagtttggattctgataccactttggaatgaaaaggttgtaatataatcccaggctggatcatgctgcttccagccataattcccttggaaacagaataataaccacgctgaaatgatgagagaataatgacacctttactgcatcttcrtatgtttattagaacagacatggacaaactctgagtgactaacacaaggcaaagtcctggctcttcaagcagaaatcctattcagctaaactaagcgtgactgtcggtgaggtcttgggtagcatgtatcactggtttaagaaaaaacgtatctacatctccaccttgatctcatttctgcaaagcttcagaagagaaatctgtcccattaaraagtccagagagaaaycttactacgagattcagaaagcaaagaatattgtaatgtgaagctgaaaaaacttaagccatgtgtatgac

SEQ ID NO: 5760 - DNA, 600 bp, Chicken  19866894109530_2
gctgcttccagccataattcccttggaaacagaataataaccacgctgaaatgatgagagaataatgacacctttactgcatcttcrtatgtttattagaacagacatggacaaactctgagtgactaacacaaggcaaagtcctggctcttcaagcagaaatcctattcagctaaactaagcgtgactgtcggtgaggtcttgggtagcatgtatcactggtttaagaaaaaacgtatctacatctccaccttgatctcatttctgcaaagcttcagaagagaaatctgtcccattaaraagtccagagagaaaycttactacgagattcagaaagcaaagaatattgtaatgtgaagctgaaaaaacttaagccatgtgtatgactgaaaaaatcatttacagagtgagctgtgattccttgtctcacagtaatctctttccataccttctacaaaatgaaagtaatttcattttataagactgaccagaaaataaataaaaggtgtgaattatcaacatgtgctttgtttggggttatctcagtatttacaaagaaatctccatgtgatcagcaaacaagtgaggagtatgaaaaag

SEQ ID NO: 5761 - DNA, 600 bp, Chicken  19866894109530_3
attcccttggaaacagaataataaccacgctgaaatgatgagagaataatgacacctttactgcatcttcrtatgtttattagaacagacatggacaaactctgagtgactaacacaaggcaaagtcctggctcttcaagcagaaatcctattcagctaaactaagcgtgactgtcggtgaggtcttgggtagcatgtatcactggtttaagaaaaaacgtatctacatctccaccttgatctcatttctgcaaagcttcagaagagaaatctgtcccattaaraagtccagagagaaaycttactacgagattcagaaagcaaagaatattgtaatgtgaagctgaaaaaacttaagccatgtgtatgactgaaaaaatcatttacagagtgagctgtgattccttgtctcacagtaatctctttccataccttctacaaaatgaaagtaatttcattttataagactgaccagaaaataaataaaaggtgtgaattatcaacatgtgctttgtttggggttatctcagtatttacaaagaaatctccatgtgatcagcaaacaagtgaggagtatgaaaaaggcagtagcttctgaat

SEQ ID NO: 5762 - DNA, 599 bp, Chicken  19866894109534_1
  misc_feature (1)..(48): n is any nucleotide
nnnnnnnnnnnnnnnnnnnnnnnnnnnnnnnnnnnnnnnnnnnnnnnngtgctctcacacgtaaggaggagggaagcagccctaagagtgcacgaggagctctgggtcagcctcgctccgggtgatggatgtacccgcagcgccccgtaaaccggaggctggagttgcgttggcacaaagctgcgagggttacaagcgtgtttatcatagccgtgggtgatgccgctgtccctgtgagctcagggatgagcagcaaactcccattcacgtggcccgagagcagagagagtgcagctggaygtgaccttgatggtcttctccagcctgaaggattccatattggcacgaggagaggggcagtcccatggggaacgtggagatgtggcactgcgggacgtgggcatggccatggtgggrcgggttgggttgggggatctgagaggtcctctccaaccttcakgcttctatgatcatcagagctccctcccggtgcagcccagaagctggatgaaatacagtgcctttaagccgataactgctcccaactcttccagctcaccgctctcaatgagcccttccctgccctgttatcctcgctg

SEQ ID NO: 5763 - DNA, 600 bp, Chicken  19866894109534_2
ccgggtgatggatgtacccgcagcgccccgtaaaccggaggctggagttgcgttggcacaaagctgcgagggttacaagcgtgtttatcatagccgtgggtgatgccgctgtccctgtgagctcagggatgagcagcaaactcccattcacgtggcccgagagcagagagagtgcagctggaygtgaccttgatggtcttctccagcctgaaggattccatattggcacgaggagaggggcagtcccatggggaacgtggagatgtggcactgcgggacgtgggcatggccatggtgggrcgggttgggttgggggatctgagaggtcctctccaaccttcakgcttctatgatcatcagagctccctcccggtgcagcccagaagctggatgaaatacagtgcctttaagccgataactgctcccaactcttccagctcaccgctctcaatgagcccttccctgccctgttatcctcgctgtcagctaactgtggttgctccaaaaccctcctgccagcactgcaagcagcggatcttgttctgctttggtcagtgytgtcgcaaagccgttccctatcagttgctttttaaaggtgtg

SEQ ID NO: 5764 - DNA, 600 bp, Chicken  19866894109534_3
ggagttgcgttggcacaaagctgcgagggttacaagcgtgtttatcatagccgtgggtgatgccgctgtccctgtgagctcagggatgagcagcaaactcccattcacgtggcccgagagcagagagagtgcagctggaygtgaccttgatggtcttctccagcctgaaggattccatattggcacgaggagaggggcagtcccatggggaacgtggagatgtggcactgcgggacgtgggcatggccatggtgggrcgggttgggttgggggatctgagaggtcctctccaaccttcakgcttctatgatcatcagagctccctcccggtgcagcccagaagctggatgaaatacagtgcctttaagccgataactgctcccaactcttccagctcaccgctctcaatgagcccttccctgccctgttatcctcgctgtcagctaactgtggttgctccaaaaccctcctgccagcactgcaagcagcggatcttgttctgctttggtcagtgytgtcgcaaagccgttccctatcagttgctttttaaaggtgtgtgtggatacacacggcgatcaagtcaccccttaaccttctttt

SEQ ID NO: 5765 - DNA, 514 bp, Chicken  19866894109534_4
ggagatgtggcactgcgggacgtgggcatggccatggtgggrcgggttgggttgggggatctgagaggtcctctccaaccttcakgcttctatgatcatcagagctccctcccggtgcagcccagaagctggatgaaatacagtgcctttaagccgataactgctcccaactcttccagctcaccgctctcaatgagcccttccctgccctgttatcctcgctgtcagctaactgtggttgctccaaaaccctcctgccagcactgcaagcagcggatcttgttctgctttggtcagtgytgtcgcaaagccgttccctatcagttgctttttaaaggtgtgtgtggatacacacggcgatcaagtcaccccttaaccttcttttcaattaagctgagtaagttaagctccttaaaccttacatcattaatgcttgttttccaggagctggatcatttctgtggcccctctttgaacctgccttagcatttccccatccttctgtagacaaaga

SEQ ID NO: 5766 - DNA, 600 bp, Chicken  19866894109537_1
gaaggagttgacaagagagtccatcagacttcggagagatggagcaggttccaaaaatctccctgaagatcacagttcaaccagatagcggttaattatcttagtgaagaaagagcaagggatggggaaatgtggagagcagtgggaagagcgtgtgtccagatggcctgctgaaaacatgcccttcagcatggtcattacttaggagagctggagacacctggataatgaaggacatgaaatatgctgcagggtagagcagcggaggacactgggcattagtcacagggcattggcacwggcaccactgcctgttccgctgtacctgaaggaatctgtgtaattcagatccttcaaactgagttctagaaaatgttgtccttcttaaaaaraaaaaaraaaaaaraaaaaaaaaaaaaaaaaaagacacaaaatcccctgtgttttcaacttaaaaagaaagtggacatctgagaatatcagaatttctgaagtgtgttagtacattttcattcacttctatctctgtcttcaattctttgtttcaattttgttgacattaacgtcttccagacttacagctctaaaaagaagatccct

SEQ ID NO: 5767 - DNA, 582 bp, Chicken  19866894109537_2
taattatcttagtgaagaaagagcaagggatggggaaatgtggagagcagtgggaagagcgtgtgtccagatggcctgctgaaaacatgcccttcagcatggtcattacttaggagagctggagacacctggataatgaaggacatgaaatatgctgcagggtagagcagcggaggacactgggcattagtcacagggcattggcacwggcaccactgcctgttccgctgtacctgaaggaatctgtgtaattcagatccttcaaactgagttctagaaaatgttgtccttcttaaaaaraaaaaaraaaaaaraaaaaaaaaaaaaaaaaaagacacaaaatcccctgtgttttcaacttaaaaagaaagtggacatctgagaatatcagaatttctgaagtgtgttagtacattttcattcacttctatctctgtcttcaattctttgtttcaattttgttgacattaacgtcttccagacttacagctctaaaaagaagatccctctttgtgtctcctcacacgaaaactgctccaaaaccaatcagcttgtgtgaattttacaaaatacactccaggt

SEQ ID NO: 5768 - DNA, 575 bp, Chicken  19866894109537_3
cttagtgaagaaagagcaagggatggggaaatgtggagagcagtgggaagagcgtgtgtccagatggcctgctgaaaacatgcccttcagcatggtcattacttaggagagctggagacacctggataatgaaggacatgaaatatgctgcagggtagagcagcggaggacactgggcattagtcacagggcattggcacwggcaccactgcctgttccgctgtacctgaaggaatctgtgtaattcagatccttcaaactgagttctagaaaatgttgtccttcttaaaaaraaaaaaraaaaaaraaaaaaaaaaaaaaaaaaagacacaaaatcccctgtgttttcaacttaaaaagaaagtggacatctgagaatatcagaatttctgaagtgtgttagtacattttcattcacttctatctctgtcttcaattctttgtttcaattttgttgacattaacgtcttccagacttacagctctaaaaagaagatccctctttgtgtctcctcacacgaaaactgctccaaaaccaatcagcttgtgtgaattttacaaaatacactccaggt

SEQ ID NO: 5769 - DNA, 568 bp, Chicken  19866894109537_4
aagaaagagcaagggatggggaaatgtggagagcagtgggaagagcgtgtgtccagatggcctgctgaaaacatgcccttcagcatggtcattacttaggagagctggagacacctggataatgaaggacatgaaatatgctgcagggtagagcagcggaggacactgggcattagtcacagggcattggcacwggcaccactgcctgttccgctgtacctgaaggaatctgtgtaattcagatccttcaaactgagttctagaaaatgttgtccttcttaaaaaraaaaaaraaaaaaraaaaaaaaaaaaaaaaaaagacacaaaatcccctgtgttttcaacttaaaaagaaagtggacatctgagaatatcagaatttctgaagtgtgttagtacattttcattcacttctatctctgtcttcaattctttgtttcaattttgttgacattaacgtcttccagacttacagctctaaaaagaagatccctctttgtgtctcctcacacgaaaactgctccaaaaccaatcagcttgtgtgaattttacaaaatacactccaggt

SEQ ID NO: 5770 - DNA, 600 bp, Chicken  19866894109552_1
tctacttaccccaagtcccccacaaggcagcaaggaaaagagtttttgagacacgtttcctatatatcgaagaaaaaaaaaaaaagaaagaaacaataagtatcaattatcaaaaaatcatttaaatactgaaacagcaatcactactgtagttctgatttctgaatttaggcatcacataatgaaaataaaggacttcattaatacctcaaaagcaaatcagccatgggacatataaattacttttttgcaacagtgacaaatcctaagattggtaagcgatagtttcaaaggagtgtrtaagtaatgaactcaacttcacagcaaatcactctgaactagggatagtagtcaacctggtatctttagctgctgaaaagataagcagcttgcctacactactcatctcagtttattccacagccagtagagtgaggtaggcacttctccccagcctggacgactgatgagatgaattgtacttgagaagtgtctgtttcttttcactgacaacagagggaacctcattaagcttcacatgcaactggtgactatttcttaaattcagctctccaaaaagtttctcctttgaaaactgct

SEQ ID NO: 5771 - DNA, 600 bp, Chicken  19866894109557_1
ctcgctgtaccagagctgaaagtggattgaagttgaacgagatttcacagaaagacaggactgagggtgtgcgtctgcctgctgcactcagccaagctatcctggaggcagttttttccactcctgcccattaaaaacccagtggcacgtacaggccaggaaaatttccctccaaatccctttcaggtatttcagagactgcagcagcatgaagatctctgacagtgagcaaacaggagttgttaccatccagtgcttgttttgtgtaagcaatttattatggctcagtgtggttcctgstggacagacatcatatcaaataaataaaaaaaatgtgatgtaggtataagtcagtgctgtaaaatagtctcraaaaggtgtttgcagytcatactctagggggactatgggatataggagtgcaaatgcttgcaagatggtgggaatggctctctcttatactctgaataggtgacttcataaatatgccttttgcttcccaaaaaactgctaggtctttctgtctctgctgagaccaggaagagtacagccaatatatgtgcaggatccccatcactctgagcacaaatcataataata

SEQ ID NO: 5772 - DNA, 600 bp, Chicken  19866894109557_2
ttgaagttgaacgagatttcacagaaagacaggactgagggtgtgcgtctgcctgctgcactcagccaagctatcctggaggcagttttttccactcctgcccattaaaaacccagtggcacgtacaggccaggaaaatttccctccaaatccctttcaggtatttcagagactgcagcagcatgaagatctctgacagtgagcaaacaggagttgttaccatccagtgcttgttttgtgtaagcaatttattatggctcagtgtggttcctgstggacagacatcatatcaaataaatsaaaaaaatgtgatgtaggtataagtcagtgctgtaaaatagtctcraaaaggtgtttgcagytcatactctagggggactatgggatataggagtgcaaatgcttgcaagatggtgggaatggctctctcttatactctgaataggtgacttcataaatatgccttttgcttcccaaaaaactgctaggtctttctgtctctgctgagaccaggaagagtacagccaatatatgtgcaggatccccatcactctgagcacaaatcataataataagcctgtggaacagcatatcttgctt

SEQ ID NO: 5773 - DNA, 600 bp, Chicken  19866894109557_3
gtctgcctgctgcactcagccaagctatcctggaggcagttttttccactcctgcccattaaaaacccagtggcacgtacaggccaggaaaatttccctccaaatccctttcaggtatttcagagactgcagcagcatgaagatctctgacagtgagcaaacaggagttgttaccatccagtgcttgttttgtgtaagcaatttattatggctcagtgtggttcctgstggacagacatcatatcaaataaataaaaaaaatgtgatgtaggtataagtcagtgctgtaaaatagtctcraaaaggtgtttgcagytcatactctagggggactatgggatataggagtgcaaatgcttgcaagatggtgggaatggctctctcttatactctgaataggtgacttcataaatatgccttttgcttcccaaaaaactgctaggtctttctgtctctgctgagaccaggaagagtacagccaatatatgtgcaggatccccatcactctgagcacaaatcataataataagcctgtggaacagcatatcttgcttgatcctgagcttgatgcataccactttctgtttggcctctgcataa

SEQ ID NO: 5774 - DNA, 600 bp, Chicken  19866894109557_4
cagccaagctatcctggaggcagttttttccactcctgcccattaaaaacccagtggcacgtacaggccaggaaaatttccctccaaatccctttcaggtatttcagagactgcagcagcatgaagatctctgacagtgagcaaacaggagttgttaccatccagtgcttgttttgtgtaagcaatttattatggctcagtgtggttcctgstggacagacatcatatcaaataaataaaaaaaatgtgatgtaggtataagtcagtgctgtaaaatagtctcraaaaggtgtttgcagytcatactctagggggactatgggatataggagtgcaaatgcttgcaagatggtgggaatggctctctcttatactctgaataggtgacttcataaatatgccttttgcttcccaaaaaactgctaggtctttctgtctctgctgagaccaggaagagtacagccaatatatgtgcaggatccccatcactctgagcacaaatcataataataagcctgtggaacagcatatcttgcttgatcctgagcttgatgcataccactttctgtttggcctctgcataacacttgagggaagcag

SEQ ID NO: 5775 - DNA, 600 bp, Chicken  19866894109566_1
ctgagaagactaaactgacaacagaagaagcctacccaagcagagtaagtacctcaatgacaaatggagtgaggccgatcagtccattgttcacacttgctggaagtgatgtcaagacacagattcttgaaatgtaatttactcaatgaaatatatttcctatttattttgccaaaacaaaacaaaataaacaaacaaaacccagctgatttacttcaatctgacaccagaaacccaattctagatggtttcacactggctttccttactcaccaaactgcattcaggcccaatcaaatragcccagggataaccacacagtttgsgcccatttcctcacaaaacagcacttccatcagacagcggtgcctgctttcgggcacccaggaacagggggcacatttgcaaaagaggaatacaacaacacatcacaaacaacagcagagccaggaaataacaacagaagacacacataacaccagcccagggaaactgtcgytactgtatgtgcaaagctgcaggaagcccagcacttaccaacgtgtgagcagtcacctggaggcagcagcaacggccctcactgttgaagcatataagggt

SEQ ID NO: 5776 - DNA, 600 bp, Chicken  19866894109566_2
gaagcctacccaagcagagtaagtacctcaatgacaaatggagtgaggccgatcagtccattgttcacacttgctggaagtgatgtcaagacacagattcttgaaatgtaatttactcaatgaaatatatttcctatttattttgccaaaacaaaacaaaataaacaaacaaaacccagctgatttacttcaatctgacaccagaaacccaattctagatggtttcacactggctttccttactcaccaaactgcattcaggcccaatcaaatragcccagggataaccacacagtttgsgcccatttcctcacaaaacagcacttccatcagacagcggtgcctgctttcgggcacccaggaacagggggcacatttgcaaaagaggaatacaacaacacatcacaaacaacagcagagccaggaaataacaacagaagacacacataacaccagcccagggaaactgtcgytactgtatgtgcaaagctgcaggaagcccagcacttaccaacgtgtgagcagtcacctggaggcagcagcaacggccctcactgttgaagcatataagggttatttttggcagggtagaagtccctg

SEQ ID NO: 5777 - DNA, 600 bp, Chicken  19866894109566_3
acccagctgatttacttcaatctgacaccagaaacccaattctagatggtttcacactggctttccttactcaccaaactgcattcaggcccaatcaaatragcccagggataaccacacagtttgsgcccatttcctcacaaaacagcacttccatcagacagcggtgcctgctttcgggcacccaggaacagggggcacatttgcaaaagaggaatacaacaacacatcacaaacaacagcagagccaggaaataacaacagaagacacacataacaccagcccagggaaactgtcgytactgtatgtgcaaagctgcaggaagcccagcacttaccaacgtgtgagcagtcacctggaggcagcagcaacggccctcactgttgaagcatataagggttatttttggcagggtagaagtccctgtggttgtagaacaaaaagacaagaatttaaactaaccaaataagcctgcatgagtctgggacatggggctgcagggatggctaccacagcacagacctcctgccctgcacacagcggtttctgcacagagagtataaagaagaaatgtggagaacagctgagctgaagcactc

SEQ ID NO: 5778 - DNA, 600 bp, Chicken  19866894109579_1
tctaaacttggatgaaatgcttggaaatagctacatcattagctaagtgtttttctaacactagtaattgtgacatgccaacctacttttgaaagtgaacgtttatttttaagattaaaatgcaatttttacaaacagtatttttagtttgggtgtaaatacatacacagtttggccagatttctaattcaaattccagctattcctctgaaaaagtaactcaaattttaatgagctaaaatctctccagttaaaatctagatttctttagggaataataatgaacaatcaactttaacrgagaaacaaagaattggaaaacaagaattttcagatacaacagctcataagtaatcaaaaccatctatcttgttatgttacaatttctagagtgaataactaaggtcggaaaaatctaatgttctgtggacatcaatatgtgttgctgcaagacattcggcatgatcagactgaaatatctaaacgaacatgcttatgagttaaacatatacactggataacaggcaaacaagtaggatcagggtgcgctctaatgtactgtaattgggttgacagaaataaaaggaaaagtcagagtcc

SEQ ID NO: 5779 - DNA, 600 bp, Chicken  19866894109579_2
caaaaggaaaagaaacaaaagaaaaagccctctatcctttacaacagtggcaagttttttggcctgcaaatatctcaaaacaacagtttttctttggaaagacttaaatattttatttatggctgctgaatacaaatttagtgtgcactataactgtataaagctctgctttactttttatgagagcaccccaggcaaacaaacacataatgtagacctgatgtcagccaccctaatatacttgctacgatttttattttattttactccccaggtgaaaggacagaattcacaagtttytggtaactactgattatctattttaaatataagctcctcgaatcagggagaacaaaacaaaaaatagggaaaggaaaggtaaggaaaaaggtgcaattttgtttgcatcaccctttaaagagacttctccgattttgttaaatattatggcataccaccacacggaatctaaactcacttagctatcaaaatgcattttaaagacaattgcactttagctgcgattcttgatgcactgtaatgtaaatatcttgtcttgtttcaggcaagcatactgttagtaaaatacatgacatttgc

SEQ ID NO: 5780 - DNA, 600 bp, Chicken  19866894109580_1
gggtggaagtggcgtggagtggacgtggatctggttccagcagccccccccgaaggcaccagctccaaggcagcgcgctcggtgccagcagcacatcacgcagcccctcctgttctgaggctgttcttccctctcccaccctccttactccgtttcccctttctcctccatctccacgggggccgcagggcgaggaggggggcatcggccgtgtccttccagcagcactgcggcgtcggccggctgctggcagcagctattctgggcccggatcgatggcagcggcggcactgggagggrgagagcagggctgggggaccccggggaaaaacccgggggctgcggctgagcccgatgctctcagccctatttacaagcaggggcctcctgcggtcaggatgagtgcgtgggattttttcaggagtttcccccgtcccttcccgttccccaaagggcttcagtgcagccactgccaccrtcggtgccaacagatgtgattgaaggccacggcaatggcatatcctggccgcaggcaatgtaggcacagaggggcaggagtggcatgtggggtgggcagggtgaggtgtgccccacggcatc

SEQ ID NO: 5781 - DNA, 600 bp, Chicken  19866894109580_2
ggggccgcagggcgaggaggggggcatcggccgtgtccttccagcagcactgcggcgtcggccggctgctggcagcagctattctgggcccggatcgatggcagcggcggcactgggagggrgagagcagggctgggggaccccggggaaaaacccgggggctgcggctgagcccgatgctctcagccctatttacaagcaggggcctcctgcggtcaggatgagtgcgtgggattttttcaggagtttcccccgtcccttcccgttccccaaagggcttcagtgcagccactgccaccrtcggtgccaacagatgtgattgaaggccacggcaatggcatatcctggccgcaggcaatgtaggcacagaggggcaggagtggcatgtggggtgggcagggtgaggtgtgccccacggcatctccccaggagcgctccttgtttgctctccagctcctcaattatttatctccgctgaaataaactcagccaagcaaacttcatgccccgtagtgacaccgccagttattaaaaataaaataataaaaattccccaatgagtcacttaagatgtacataatcagctccaactacagccgt

SEQ ID NO: 5782 - DNA, 599 bp, Chicken  19866894109584_1
  misc_feature (1)..(96): n is any nucleotide
nnnnnnnnnnnnnnnnnnnnnnnnnnnnnnnnnnnnnnnnnnnnnnnnnnnnnnnnnnnnnnnnnnnnnnnnnnnnnnnnnnnnnnnnnnnnnnnnacacatttgtccacccaagctatccataccattgaatattgccttggctgcatttccaacacagcatcctacctgcggctctgggcactgagcctagcccatgcacgtgagtgatgacctgttagctacctcaccagcaattccgtgctgatcttctcatggtgtttgattattgctgggattttccacggtaaatcaaagtcytcctcgtagatgtttgcatctcagagtatttttcttcagatwaatccaagtgttttatgatggacttatctgttttttkgtggtgattcccaggagctaatgtcagggacctcctgactgcatttcctagccagggcccatttcccatgctattccttagctgtacttttggaagagtccccatggcatgtggctgtgtaggaggtgcaacccaaatggttgttcctgtccaaaaaggtaattgcagtatcggtactatagctgcacattccaggaagcacttgctgtagccttagggt

SEQ ID NO: 5783 - DNA, 599 bp, Chicken  19866894109584_2
  misc_feature (1)..(54): n is any nucleotide
nnnnnnnnnnnnnnnnnnnnnnnnnnnnnnnnnnnnnnnnnnnnnnnnnnnnnnacacatttgtccacccaagctatccataccattgaatattgccttggctgcatttccaacacagcatcctacctgcggctctgggcactgagcctagcccatgcacgtgagtgatgacctgttagctacctcaccagcaattccgtgctgatcttctcatggtgtttgattattgctgggattttccacggtaaatcaaagtcytcctcgtagatgtttgcatctcagagtatttttcttcagatwaatccaagtgttttatgatggacttatctgttttttkgtggtgattcccaggagctaatgtcagggacctcctgactgcatttcctagccagggcccatttcccatgctattccttagctgtacttttggaagagtccccatggcatgtggctgtgtaggaggtgcaacccaaatggttgttcctgtccaaaaaggtaattgcagtatcggtactatagctgcacattccaggaagcacttgctgtagccttagggtatgcagatgaatgtgaaaaacttgtaaaagatattctgattt

SEQ ID NO: 5784 - DNA, 599 bp, Chicken  19866894109584_3
  misc_feature (1)..(17): n is any nucleotide
nnnnnnnnnnnnnnnnnacacatttgtccacccaagctatccataccattgaatattgccttggctgcatttccaacacagcatcctacctgcggctctgggcactgagcctagcccatgcacgtgagtgatgacctgttagctacctcaccagcaattccgtgctgatcttctcatggtgtttgattattgctgggattttccacggtaaatcaaagtcytcctcgtagatgtttgcatctcagagtatttttcttcagatwaatccaagtgttttatgatggacttatctgttttttkgtggtgattcccaggagctaatgtcagggacctcctgactgcatttcctagccagggcccatttcccatgctattccttagctgtacttttggaagagtccccatggcatgtggctgtgtaggaggtgcaacccaaatggttgttcctgtccaaaaaggtaattgcagtatcggtactatagctgcacattccaggaagcacttgctgtagccttagggtatgcagatgaatgtgaaaaacttgtaaaagatattctgatttggttcagagaaagaaaaagaaaagtttaacctccaag

SEQ ID NO: 5785 - DNA, 600 bp, Chicken  19866894109585_1
cgtagaagagacaatgcagaaaagacagctgcactttaaaagacttctgggttctaaacagtctgaacaacgtgtgtccttcagaccttctctaacaaagcctgttcttaagctaaagaagtacagtaaataactgaactggacaacctgtttgtatgtagggctttgacagtttggatggaaactactcagtggttacaggacaaagtttttgcaacggcagcctcaatatggcttaataatttatttaccaagttagtatttgattgatgatgtcctaccaaaaagaaccatgtaatkagtttggggagattactatagcatcataatatttgccagattcttattcttttttttttctttttttttcctaacctctataaatttgttgtgttaaaataggtttcctccattttttgatgacaatccatttggtatataccagaagattcttgctggcaaaatagatttcccacggcatttggatttgtatgtaaagtaagtctgtgactcccaagcatgtcttttatattctaatttccttctgagcattctttctgaaaggatcttcatagaagattctgattttctgaaacacta

SEQ ID NO: 5786 - DNA, 599 bp, Chicken  19866894109586_1
  misc_feature (1)..(196): n is any nucleotide
nnnnnnnnnnnnnnnnnnnnnnnnnnnnnnnnnnnnnnnnnnnnnnnnnnnnnnnnnnnnnnnnnnnnnnnnnnnnnnnnnnnnnnnnnnnnnnnnnnnnnnnnnnnnnnnnnnnnnnnnnnnnnnnnnnnnnnnnnnnnnnnnnnnnnnnnnnnnnnnnnnnnnnnnnnnnnnnnnnnnnnnnnnnnnnnnnnnnctacagaactaacagctcgtatgccaattctgaaactccaaacatgaagttacctgtgcattccaataatatgatacatataaaaatacaataaaaatatatartgtacctcactagaattatctcacgcacacagcagaagaaagaaacattaagtggctcaaagacaaccgcaaaaatacctatraaaaggacacactgatgggaacatgcaaagtattcaacaacacagaacctattgctactgaaaacacagccatagaaaccagtcaagacacatstctctagatataacctaaccaaaggagcctctgtggaaataccaaatgactgtgttaccaaaaacttaaaagcaaactacaagcaaaagctgatgctctggttacctgagagtctccttaca

SEQ ID NO: 5787 - DNA, 599 bp, Chicken  19866894109586_2
  misc_feature (1)..(113): n is any nucleotide
nnnnnnnnnnnnnnnnnnnnnnnnnnnnnnnnnnnnnnnnnnnnnnnnnnnnnnnnnnnnnnnnnnnnnnnnnnnnnnnnnnnnnnnnnnnnnnnnnnnnnnnnnnnnnnnnnctacagaactaacagctcgtatgccaattctgaaactccaaacatgaagttacctgtgcattccaataatatgatacatataaaaatacaataaaaatatatartgtacctcactagaattatctcacgcacacagcagaagaaagaaacattaagtggctcaaagacaaccgcaaaaatacctatraaaaggacacactgatgggaacatgcaaagtattcaacaacacagaacctattgctactgaaaacacagccatagaaaccagtcaagacacatstctctagatataacctaaccaaaggagcctctgtggaaataccaaatgactgtgttaccaaaaacttaaaagcaaactacaagcaaaagctgatgctctggttacctgagagtctccttacaccatgagactgagcaggaggccgacccagagccaattacagcagcctgcagtggcctctccaggttcattgctcaggtaagaa

SEQ ID NO: 5788 - DNA, 599 bp, Chicken  19866894109586_3
  misc_feature (1)..(19): n is any nucleotide
nnnnnnnnnnnnnnnnnnnctacagaactaacagctcgtatgccaattctgaaactccaaacatgaagttacctgtgcattccaataatatgatacatataaaaatacaataaaaatatatartgtacctcactagaattatctcacgcacacagcagaagaaagaaacattaagtggctcaaagacaaccgcaaaaatacctatraaaaggacacactgatgggaacatgcaaagtattcaacaacacagaacctattgctactgaaaacacagccatagaaaccagtcaagacacatstctctagatataacctaaccaaaggagcctctgtggaaataccaaatgactgtgttaccaaaaacttaaaagcaaactacaagcaaaagctgatgctctggttacctgagagtctccttacaccatgagactgagcaggaggccgacccagagccaattacagcagcctgcagtggcctctccaggttcattgctcaggtaagaattaccagcacagaccctgtttgagatcctcacctgattttccccggtatgataagaacgggaggaagcaggggaagtggtgagaggtggatacc

SEQ ID NO: 5789 - DNA, 600 bp, Chicken  19866894109591_1
caaagagagaaaacccaagtcaagtgaggccatacctgctcttgtccaggcaatcacaggtggggggtgaccctcagcagtgcaggggaaatccacgctttgtccctcagttactgtctgatcagtggggacgaggagaaacctgggagaatctggaagggaaagcagtgactgagcagcaggcaaaacaaaaaataatcacagcacaagctcagattcattctcagatcatgggagcatgaaaattaactagtcttgatgcacagcggttaaacacacaccgagcacttcaccccagaramrgyaccagcctggggctccccaccttgcactatgatcctcgctgtcgcctggatggatccctcagtgttgctggcattgcagttgtactgtccctggtctgagaaggtgacgttctggatgaagagtcctccagagctrgtgatagcgaagcggggatcctgcggtaaaggagagcctgtgccaagtgtccagctgatgcgagggtgggggtgcccagagaccccacactccaaggtgacgctttccccaaccagcacttcagtgttctgcggctggatcacaaaagtgggcttggct

SEQ ID NO: 5790 - DNA, 600 bp, Chicken  19866894109591_2
aagagagaaaacccaagtcaagtgaggccatacctgctcttgtccaggcaatcacaggtggggggtgaccctcagcagtgcaggggaaatccacgctttgtccctcagttactgtctgatcagtggggacgaggagaaacctgggagaatctggaagggaaagcagtgactgagcagcaggcaaaacaaaaaataatcacagcacaagctcagattcattctcagatcatgggagcatgaaaattaactagtcttgatgcacagcggttaaacacacaccgagcacttcaccccagaramrgyaccagcctggggctccccaccttgcactatgatcctcgctgtcgcctggatggatccctcagtgttgctggcattgcagttgtactgtccctggtctgagaaggtgacgttctggatgaagagtcctccagagctrgtgatagcgaagcggggatcctgcggtaaaggagagcctgtgccaagtgtccagctgatgcgagggtgggggtgcccagagaccccacactccaaggtgacgctttccccaaccagcacttcagtgttctgcggctggatcacaaaagtgggcttggctgg

SEQ ID NO: 5791 - DNA, 600 bp, Chicken  19866894109591_3
agagagaaaacccaagtcaagtgaggccatacctgctcttgtccaggcaatcacaggtggggggtgaccctcagcagtgcaggggaaatccacgctttgtccctcagttactgtctgatcagtggggacgaggagaaacctgggagaatctggaagggaaagcagtgactgagcagcaggcaaaacaaaaaataatcacagcacaagctcagattcattctcagatcatgggagcatgaaaattaactagtcttgatgcacagcggttaaacacacaccgagcacttcaccccagaramrgyaccagcctggggctccccaccttgcactatgatcctcgctgtcgcctggatggatccctcagtgttgctggcattgcagttgtactgtccctggtctgagaaggtgacgttctggatgaagagtcctccagagctrgtgatagcgaagcggggatcctgcggtaaaggagagcctgtgccaagtgtccagctgatgcgagggtgggggtgcccagagaccccacactccaaggtgacgctttccccaaccagcacttcagtgttctgcggctggatcacaaaagtgggcttggctgga

SEQ ID NO: 5792 - DNA, 600 bp, Chicken  19866894109591_4
agagaaaacccaagtcaagtgaggccatacctgctcttgtccaggcaatcacaggtggggggtgaccctcagcagtgcaggggaaatccacgctttgtccctcagttactgtctgatcagtggggacgaggagaaacctgggagaatctggaagggaaagcagtgactgagcagcaggcaaaacaaaaaataatcacagcacaagctcagattcattctcagatcatgggagcatgaaaattaactagtcttgatgcacagcggttaaacacacaccgagcacttcaccccagaramrgyaccagcctggggctccccaccttgcactatgatcctcgctgtcgcctggatggatccctcagtgttgctggcattgcagttgtactgtccctggtctgagaaggtgacgttctggatgaagagtcctccagagctrgtgatagcgaagcggggatcctgcggtaaaggagagcctgtgccaagtgtccagctgatgcgagggtgggggtgcccagagaccccacactccaaggtgacgctttccccaaccagcacttcagtgttctgcggctggatcacaaaagtgggcttggctggaag

SEQ ID NO: 5793 - DNA, 600 bp, Chicken  19866894109591_5
cctgggagaatctggaagggaaagcagtgactgagcagcaggcaaaacaaaaaataatcacagcacaagctcagattcattctcagatcatgggagcatgaaaattaactagtcttgatgcacagcggttaaacacacaccgagcacttcaccccagaramrgyaccagcctggggctccccaccttgcactatgatcctcgctgtcgcctggatggatccctcagtgttgctggcattgcagttgtactgtccctggtctgagaaggtgacgttctggatgaagagtcctccagagctrgtgatagcgaagcggggatcctgcggtaaaggagagcctgtgccaagtgtccagctgatgcgagggtgggggtgcccagagaccccacactccaaggtgacgctttccccaaccagcacttcagtgttctgcggctggatcacaaaagtgggcttggctggaaggaaacgagtgcttcagaaaccaggagccctgctgcttgtttgcttacggactgaaattgctcactcttcatgcagcccagctagcgtccatctagctcttccctgacctccaaaccctcagcaatgcccccagccc

SEQ ID NO: 5794 - DNA, 600 bp, Chicken  19866894109592_1
acagaaaaataaaccactttccagttcacctctccccacccctctctgatgaaaagcaagctataaacgtctcagctggatgaactccagagccaagtaacccaaccaccccgctgacacctgggatgaggctgttacccaacgcctgtgtttatttcccagcgttattttatcggtttcacaacacaaagctatgtgcacacgctgaaacgccgaccccagccccttccccccctttcagtatcactttcagaccaagaatatagcaaacaaaagtggaaaagcaccctgagcttccarcaagcgttcgggagcacgctgtgcttcggccccatgccattcccatggccacgtgctcgtcacgcagcacacacaaaacaccactcgctctgatggacagcaaagaagccaacgccgggctgccccccaagccaagacgtaagaaggagccgcctacctctttggtcaggtccccgttcactggggcagccaccgctcccaggtcctccagctcttccccaaagccctgctcagccccactctccctcacagcaccatcaggaccggtcccatcctgcagaccaccgctgttctcaaggg

SEQ ID NO: 5795 - DNA, 600 bp, Chicken  19866894109594_1
aatggctcaggataaaaggaagggaaaagcaccattaggcgtccgtccgctcgttagccgtctgtccgcgctgctctccggggaggccgttcccaggaaaggtagcagacgatggctttacaaggcgagggagtgaggaaactgcagcagaggaaagagagcagacgaattgctaaatgaaaaggcaaatgagcgctgtgagcaaacagtgctgctccgggggcagaggcacagcccggggctgcgctgtgctggggctgtttgcgcagcagcgtccaaagtcggctccatgcaatgctkcctgagtgctcccacgttcagtgctgcaaacctcccggccacaatccctcccacatcacgggccgtggctctcacgggagtaccacagcggcaggaaggcacacgaggagctatcggccctagcacagcactcctcggttccactcygagcagctctggaggtgatttgtagtcttcagaccaacgaatggccaacggagcgcaggcagcaggagagcagcagctgccaagccatggcacttcacactccaaacgcttttatctgtgtktctctgcgcacttcacaggagatagcagcgt

SEQ ID NO: 5796 - DNA, 600 bp, Chicken  19866894109594_2
cagaggaaagagagcagacgaattgctaaatgaaaaggcaaatgagcgctgtgagcaaacagtgctgctccgggggcagaggcacagcccggggctgcgctgtgctggggctgtttgcgcagcagcgtccaaagtcggctccatgcaatgctkcctgagtgctcccacgttcagtgctgcaaacctcccggccacaatccctcccacatcacgggccgtggctctcacgggagtaccacagcggcaggaaggcacacgaggagctatcggccctagcacagcactcctcggttccactcygagcagctctggaggtgatttgtagtcttcagaccaacgaatggccaacggagcgcaggcagcaggagagcagcagctgccaagccatggcacttcacactccaaacgcttttatctgtgtktctctgcgcacttcacaggagatagcagcgtgycgttatcactccctatctctgtggaagctgaggcatagctcagagtgagatgctatggtctttcttaacacccartcctccggaggcctgytggggagggaggtgtgaggcggactgccctccttcagagcackcactgccgtgg

SEQ ID NO: 5797 - DNA, 600 bp, Chicken  19866894109594_3
cagcgtccaaagtcggctccatgcaatgctkcctgagtgctcccacgttcagtgctgcaaacctcccggccacaatccctcccacatcacgggccgtggctctcacgggagtaccacagcggcaggaaggcacacgaggagctatcggccctagcacagcactcctcggttccactcygagcagctctggaggtgatttgtagtcttcagaccaacgaatggccaacggagcgcaggcagcaggagagcagcagctgccaagccatggcacttcacactccaaacgcttttatctgtgtktctctgcgcacttcacaggagatagcagcgtgycgttatcactccctatctctgtggaagctgaggcatagctcagagtgagatgctatggtctttcttaacacccartcctccggaggcctgytggggagggaggtgtgaggcggactgccctccttcagagcackcactgccgtgggcacagaggggagaaaagccgagtgccggtgatcggggatgctctaaggctgatggcagtgctgcctttgtgcaaaccccacccctgtaacagccctgccttacgggaaggccgaaaggaag

SEQ ID NO: 5798 - DNA, 600 bp, Chicken  19866894109594_4
tgagtgctcccacgttcagtgctgcaaacctcccggccacaatccctcccacatcacgggccgtggctctcacgggagtaccacagcggcaggaaggcacacgaggagctatcggccctagcacagcactcctcggttccactcygagcagctctggaggtgatttgtagtcttcagaccaacgaatggccaacggagcgcaggcagcaggagagcagcagctgccaagccatggcacttcacactccaaacgcttttatctgtgtktctctgcgcacttcacaggagatagcagcgtgycgttatcactccctatctctgtggaagctgaggcatagctcagagtgagatgctatggtctttcttaacacccartcctccggaggcctgytggggagggaggtgtgaggcggactgccctccttcagagcackcactgccgtgggcacagaggggagaaaagccgagtgccggtgatcggggatgctctaaggctgatggcagtgctgcctttgtgcaaaccccacccctgtaacagccctgccttacgggaaggccgaaaggaaggagaggacaccgtgaggttcagctgttaccaca

SEQ ID NO: 5799 - DNA, 600 bp, Chicken  19866894109594_5
gagtaccacagcggcaggaaggcacacgaggagctatcggccctagcacagcactcctcggttccactcygagcagctctggaggtgatttgtagtcttcagaccaacgaatggccaacggagcgcaggcagcaggagagcagcagctgccaagccatggcacttcacactccaaacgcttttatctgtgtktctctgcgcacttcacaggagatagcagcgtgycgttatcactccctatctctgtggaagctgaggcatagctcagagtgagatgctatggtctttcttaacacccartcctccggaggcctgytggggagggaggtgtgaggcggactgccctccttcagagcackcactgccgtgggcacagaggggagaaaagccgagtgccggtgatcggggatgctctaaggctgatggcagtgctgcctttgtgcaaaccccacccctgtaacagccctgccttacgggaaggccgaaaggaaggagaggacaccgtgaggttcagctgttaccacattttgccaaactttgcactacttttacraaagcctccttcatattttattgaaaattctatacagagcctgataa

SEQ ID NO: 5800 - DNA, 600 bp, Chicken  19866894109594_6
ggaaggcacacgaggagctatcggccctagcacagcactcctcggttccactcygagcagctctggaggtgatttgtagtcttcagaccaacgaatggccaacggagcgcaggcagcaggagagcagcagctgccaagccatggcacttcacactccaaacgcttttatctgtgtktctctgcgcacttcacaggagatagcagcgtgycgttatcactccctatctctgtggaagctgaggcatagctcagagtgagatgctatggtctttcttaacacccartcctccggaggcctgytggggagggaggtgtgaggcggactgccctccttcagagcackcactgccgtgggcacagaggggagaaaagccgagtgccggtgatcggggatgctctaaggctgatggcagtgctgcctttgtgcaaaccccacccctgtaacagccctgccttacgggaaggccgaaaggaaggagaggacaccgtgaggttcagctgttaccacattttgccaaactttgcactacttttacraaagcctccttcatattttattgaaaattctatacagagcctgataaaaaagaaaacaaagcc

SEQ ID NO: 5801 - DNA, 600 bp, Chicken  19866894109594_7
ggttccactcygagcagctctggaggtgatttgtagtcttcagaccaacgaatggccaacggagcgcaggcagcaggagagcagcagctgccaagccatggcacttcacactccaaacgcttttatctgtgtktctctgcgcacttcacaggagatagcagcgtgycgttatcactccctatctctgtggaagctgaggcatagctcagagtgagatgctatggtctttcttaacacccartcctccggaggcctgytggggagggaggtgtgaggcggactgccctccttcagagcackcactgccgtgggcacagaggggagaaaagccgagtgccggtgatcggggatgctctaaggctgatggcagtgctgcctttgtgcaaaccccacccctgtaacagccctgccttacgggaaggccgaaaggaaggagaggacaccgtgaggttcagctgttaccacattttgccaaactttgcactacttttacraaagcctccttcatattttattgaaaattctatacagagcctgataaaaaagaaaacaaagcccttaatgatgcctgtagtatggaaagcaggcaaatgtccgctc

SEQ ID NO: 5802 - DNA, 600 bp, Chicken  19866894109594_8
tgaggcatagctcagagtgagatgctatggtctttcttaacacccartcctccggaggcctgytggggagggaggtgtgaggcggactgccctccttcagagcackcactgccgtgggcacagaggggagaaaagccgagtgccggtgatcggggatgctctaaggctgatggcagtgctgcctttgtgcaaaccccacccctgtaacagccctgccttacgggaaggccgaaaggaaggagaggacaccgtgaggttcagctgttaccacattttgccaaactttgcactacttttacraaagcctccttcatattttattgaaaattctatacagagcctgataaaaaagaaaacaaagcccttaatgatgcctgtagtatggaaagcaggcaaatgtccgctcctttgagtgcttattcctacrtggtgagaccttacagagccaaccaagtgacccacaattacccggcacagcagagctgcacatgggcttccatgtgaatgcactcatctgcaccagatacctgctggcatcagcagtccttacacacagcaaaggagagcatcacaccagcttacaccacgctctgggcctgc

SEQ ID NO: 5803 - DNA, 597 bp, Chicken  19866894109594_9
gagaaaagccgagtgccggtgatcggggatgctctaaggctgatggcagtgctgcctttgtgcaaaccccacccctgtaacagccctgccttacgggaaggccgaaaggaaggagaggacaccgtgaggttcagctgttaccacattttgccaaactttgcactacttttacraaagcctccttcatattttattgaaaattctatacagagcctgataaaaaagaaaacaaagcccttaatgatgcctgtagtatggaaagcaggcaaatgtccgctcctttgagtgcttattcctacrtggtgagaccttacagagccaaccaagtgacccacaattacccggcacagcagagctgcacatgggcttccatgtgaatgcactcatctgcaccagatacctgctggcatcagcagtccttacacacagcaaaggagagcatcacaccagcttacaccacgctctgggcctgcaggtactgctgcttctttgttaggaataaaaaggatgagaccaaaattgaccagttgcttttgggtttgaccttcattatcaaacagggaatgctgagttgcatagtgtgcacactgcagaaga

SEQ ID NO: 5804 - DNA, 600 bp, Chicken  19866894109598_1
aattgggtaactgattttcttgtgcctaatacagcacttattgcagtacttagggttttgtttgatataatgcacacaaaattatggcttgctgttgaatttagcaggataagtttggagtacgtattcaatatgacacaattgtcattctgtaagacttttactgctttatcaagtattttgtttctgccaggaaagaattcataggaatagtccaggcagctttcaatgttttgaacatatatgaaaaatgcccgacacctttcccagaagagcactcatttaatatgatgaactttrccagttccaagagaaaaggcagcattccaccagctctggcattttagctctgtgttgattttgcattgatttgaagataagatgagtgttcattttttagatgtctttaaagttttacgcagtgcttctaaatgatgaggttggaattcccattaaccttaggttgtcaagtagtgtgtctgatgtggccgtgtccaagccctcagtagccactatggtccatggcatgatgcttttgtcctgtaaccagtctagcaaaccatatacygtgaaattgcttgtaaatgaattagttgatca

SEQ ID NO: 5805 - DNA, 600 bp, Chicken  19866894109598_2
agaagagcactcatttaatatgatgaactttcccagttccaagagaaaaggcagcattccaccagctctggcattttagctctgtgttgattttgcattgatttgaagataagatgagtgttcattttttagatgtctttaaagttttacgcagtgcttctaaatgatgaggttggaattcccattaaccttaggttgtcaagtagtgtgtctgatgtggccgtgtccaagccctcagtagccactatggtccatggcatgatgcttttgtcctgtaaccagtctagcaaaccatatacygtgaaattgcttgtaaatgaattagttgatcagaatcacctactgttcagtcacagggtggtgacgcactgaacaggttgcccaaggaggctgtggatgccccatccctggaggcattcaaggccaggctggatgtggctctggrcagcctggtctggtggttggcgaccctgcacatagcagggggttggaactggatgagcattgcggtccttttcaacccaggccattctatgattctatgattctatgctatatttaaggcagattgcattattctaatacttcttctggggctag

SEQ ID NO: 5806 - DNA, 517 bp, Chicken  19866894109598_3
tttacgcagtgcttctaaatgatgaggttggaattcccattaaccttaggttgtcaagtagtgtgtctgatgtggccgtgtccaagccctcagtagccactatggtccatggcatgatgcttttgtcctgtaaccagtctagcaaaccatatacygtgaaattgcttgtaaatgaattagttgatcagaatcacctactgttcagtcacagggtggtgacgcactgaacaggttgcccaaggaggctgtggatgccccatccctggaggcattcaaggccaggctggatgtggctctggrcagcctggtctggtggttggcgaccctgcacatagcagggggttggaactggatgagcattgcggtccttttcaacccaggccattctatgattctatgattctatgctatatttaaggcagattgcattattctaatacttcttctggggctagtcaggtgcaatttcaagttactgatatccaggcaaggatgcacataattaacatttggaaaa

SEQ ID NO: 5807 - DNA, 599 bp, Chicken  19866894109609_1
  misc_feature (1)..(6): n is any nucleotide
nnnnnnggttttgggtaaactgttctgtaatatctacaattcacagtcataaactgttcaccctctccagcagtaagggttgaagtgaatctgccagagaatgagtatcagtgcacattggatgaaggtccaggcaaagagacttaagggccatttatttccagttcttaccttccctgtcaacttggaggaccgtttcagcttcagggaagagatgcccttggaaatcttgttatcctttttgctttctctctacaacaaatattgccaatataggaaattatgcacagcaagaactaytcatggaggaagaaaagctagtcaaattgagatgtttttgttttgtcccctctggccagaaggagctatgttgtcctcctgggtctgaccccgcacccttttgcaattcagctatttcaagtacagcagcatgcaaaggttcctcagcttttctcagtctcagtagaacagtacagaaaccagggaaagcatatgaaaatacaaatatagcttgatcaactcaccgtatctgggctgttcttgaactggacttggttttttctgccaagtgtgtcatatatctgtgtcatcatagaacc

SEQ ID NO: 5808 - DNA, 549 bp, Chicken  19866894109613_1
tgcgtgtattttcattttccccttaccggcgccatctgccagcagtcggtgcccccacattgctgggattttatttacacacgcagcgcgctgctgctgaggtcccagccaggctccaagtccccatgtcaccacgagccctgcacaggagggcttggagcagcagcaatgccctgcgctgcagtgggacctcactgtgccttcacgccctgcacagaaatccatggaaaaagcaaaacgggagcgcagccgggggagcagagaggtggctgaggatgcagcacatggcactgccccacracccagctcgtggcacaaagcagaggggaagagagcaggggaggagctccctgcgtgccccccccataaagcctgtgccaggaattagcaccattagtgcccgtragcccaygtgccggagccacgcaggccagtcggtgcccccacacgtgccatttcctcccttctttttttcytttttttttttttgcctacagtaatcctcagcctttagagcaaattattaaaattcacttatatttaatctgc

SEQ ID NO: 5809 - DNA, 444 bp, Chicken  19866894109613_2
cagccaggctccaagtccccatgtcaccacgagccctgcacaggagggcttggagcagcagcaatgccctgcgctgcagtgggacctcactgtgccttcacgccctgcacagaaatccatggaaaaagcaaaacgggagcgcagccgggggagcagagaggtggctgaggatgcagcacatggcactgccccacracccagctcgtggcacaaagcagaggggaagagagcaggggaggagctccctgcgtgccccccccataaagcctgtgccaggaattagcaccattagtgcccgtragcccaygtgccggagccacgcaggccagtcggtgcccccacacgtgccatttcctcccttctttttttcytttttttttttttgcctacagtaatcctcagcctttagagcaaattattaaaattcacttatatttaatctgc

SEQ ID NO: 5810 - DNA, 437 bp, Chicken  19866894109613_3
gctccaagtccccatgtcaccacgagccctgcacaggagggcttggagcagcagcaatgccctgcgctgcagtgggacctcactgtgccttcacgccctgcacagaaatccatggaaaaagcaaaacgggagcgcagccgggggagcagagaggtggctgaggatgcagcacatggcactgccccacracccagctcgtggcacaaagcagaggggaagagagcaggggaggagctccctgcgtgccccccccataaagcctgtgccaggaattagcaccattagtgcccgtragcccaygtgccggagccacgcaggccagtcggtgcccccacacgtgccatttcctcccttctttttttcytttttttttttttgcctacagtaatcctcagcctttagagcaaattattaaaattcacttatatttaatctgc

SEQ ID NO: 5811 - DNA, 373 bp, Chicken  19866894109613_4
cgctgcagtgggacctcactgtgccttcacgccctgcacagaaatccatggaaaaagcaaaacgggagcgcagccgggggagcagagaggtggctgaggatgcagcacatggcactgccccacracccagctcgtggcacaaagcagaggggaagagagcaggggaggagctccctgcgtgccccccccataaagcctgtgccaggaattagcaccattagtgcccgtragcccaygtgccggagccacgcaggccagtcggtgcccccacacgtgccatttcctcccttctttttttcytttttttttttttgcctacagtaatcctcagcctttagagcaaattattaaaattcacttatatttaatctgc

SEQ ID NO: 5812 - DNA, 600 bp, Chicken  19866894109618_1
tgtgacatgatgatgtgtggtgacatgctgaacaggctgcccaaggaggttgtggatgccccatccctggaggcattcaaggccaggctggatgtggctctgggcagcctggtctgggttggcaaccctgcacatagcagaggggttgaatctagatgatcattgtggtccttttcatcccaggccattctatgactgctctgtccatccaaacacctagggcagtccagggaaggagaggagggttttgtacacagagatgcactgaggaatctctgctatgtgtgtttcattttattytcttcttttttcccctttctttgtgctggaatcctccagcttgctcagcacctaggttgttaatggcttctggaaatgaattatggctgccaggagtgctaaagccccatctcagatttgttcccacatcatgtgtaagatatggttaggttctggtccagataacttttcggtctttaaattggagtagtgaacctttttcataggttcatccatcatgagtgtcttagttctgccagattttgatcctgaaaataattgtttttcagacagaagctatgggtttgatagagcaggaga

SEQ ID NO: 5813 - DNA, 600 bp, Chicken  19866894109618_2
gtgacatgatgatgtgtggtgacatgctgaacaggctgcccaaggaggttgtggatgccccatccctggaggcattcaaggccaggctggatgtggctctgggcagcctggtctgggttggcaaccctgcacatagcagaggggttgaatctagatgatcattgtggtccttttcatcccaggccattctatgactgctctgtccatccaaacacctagggcagtccagggaaggagaggagggttttgtacacagagatgcactgaggaatctctgctatgtgtgtttcattttatttycttcttttttcccctttctttgtgctggaatcctccagcttgctcagcacctaggttgttaatggcttctggaaatgaattatggctgccaggagtgctaaagccccatctcagatttgttcccacatcatgtgtaagatatggttaggttctggtccagataacttttcggtctttaaattggagtagtgaacctttttcataggttcatccatcatgagtgtcttagttctgccagattttgatcctgaaaataattgtttttcagacagaagctatgggtttgatagagcaggagat

SEQ ID NO: 5814 - DNA, 600 bp, Chicken  19866894109618_3
tgacatgatgatgtgtggtgacatgctgaacaggctgcccaaggaggttgtggatgccccatccctggaggcattcaaggccaggctggatgtggctctgggcagcctggtctgggttggcaaccctgcacatagcagaggggttgaatctagatgatcattgtggtccttttcatcccaggccattctatgactgctctgtccatccaaacacctagggcagtccagggaaggagaggagggttttgtacacagagatgcactgaggaatctctgctatgtgtgtttcattttattttyttcttttttcccctttctttgtgctggaatcctccagcttgctcagcacctaggttgttaatggcttctggaaatgaattatggctgccaggagtgctaaagccccatctcagatttgttcccacatcatgtgtaagatatggttaggttctggtccagataacttttcggtctttaaattggagtagtgaacctttttcataggttcatccatcatgagtgtcttagttctgccagattttgatcctgaaaataattgtttttcagacagaagctatgggtttgatagagcaggagatg

SEQ ID NO: 5815 - DNA, 600 bp, Chicken  19866894109621_1
caagcagaagtgcatttccatgcatttccatcatcctgtgactttttttttttttttgacaataccagtgtgagctttgtattatcatgagtaggataccatgaggatttcatagaaatatgctcaatttatttccatggaaactagtagcatttcttccctatcccacaacaccaatttgtgttccttagaaaaatattcccaagtttttcagtacctctcccctttctcaaaaaatgtgctttagttacaaatcccaacaggattccctaagtaggaaaaaaaggagtgtagaatatrtattttaaaagtcgcttaaatagttaaaggtgtgatgcagcagggctttttaccactaagtatgtagagtggttctcttcaatatattggacttaatacttgccatttgtagtgaattggatgttgacagtcctgtccccaagactagaatagttgtggggagagcattccttgtctgaaatacaacttgagcagcattttattatactgtgaccctgtgactatacaatcaggagggactcctggggtttatttcagctgattatggaacacagagcagaatataaccattgacctctg

SEQ ID NO: 5816 - DNA, 600 bp, Chicken  19866894109623_1
tggccttgtgtgatcttggatgcccactcccaaacccacacagctaatagctaagagatccacactgtctcaggaaggagaaaatctgcaattttgtgttagccttgggaaatcttattattactctgcccactatattagaagaacccactaatctccacttgccagcccactatctttatgggagcccagataaggtatctggaagttccttattgagagcagccctgcaagcaccacactgcattgggcagcagcatccaggagggagcagagcccccaggaccaccacgggacacrgcagrgcttagccaggccccaacctccccacagctccagccctgcacatgggaccaccgcaggaaacagggaacacatttttaaataagaggaggaagtggtgcctttttgtcagacaagtggaagaaatccargaccaggagactgcagagcctttccacttcagacagcaggtgctctccaagatgtggttatggcaacaaaataaatgatggataattgcttttgtgacaacttgccaattaaattagactcagcagaataacataatgacaatttgttatgctctggtgggcacta

SEQ ID NO: 5817 - DNA, 600 bp, Chicken  19866894109623_2
ttgtgtgatcttggatgcccactcccaaacccacacagctaatagctaagagatccacactgtctcaggaaggagaaaatctgcaattttgtgttagccttgggaaatcttattattactctgcccactatattagaagaacccactaatctccacttgccagcccactatctttatgggagcccagataaggtatctggaagttccttattgagagcagccctgcaagcaccacactgcattgggcagcagcatccaggagggagcagagcccccaggaccaccacgggacacrgcagrgcttagccaggccccaacctccccacagctccagccctgcacatgggaccaccgcaggaaacagggaacacatttttaaataagaggaggaagtggtgcctttttgtcagacaagtggaagaaatccargaccaggagactgcagagcctttccacttcagacagcaggtgctctccaagatgtggttatggcaacaaaataaatgatggataattgcttttgtgacaacttgccaattaaattagactcagcagaataacataatgacaatttgttatgctctggtgggcactaacaca

SEQ ID NO: 5818 - DNA, 600 bp, Chicken  19866894109623_3
atattagaagaacccactaatctccacttgccagcccactatctttatgggagcccagataaggtatctggaagttccttattgagagcagccctgcaagcaccacactgcattgggcagcagcatccaggagggagcagagcccccaggaccaccacgggacacrgcagrgcttagccaggccccaacctccccacagctccagccctgcacatgggaccaccgcaggaaacagggaacacatttttaaataagaggaggaagtggtgcctttttgtcagacaagtggaagaaatccargaccaggagactgcagagcctttccacttcagacagcaggtgctctccaagatgtggttatggcaacaaaataaatgatggataattgcttttgtgacaacttgccaattaaattagactcagcagaataacataatgacaatttgttatgctctggtgggcactaacacaccaatcataattaaatgctatgactgaaatagaatgctgctgtacacaggaatatataaccccaattccctcccagtgaaacattataggttcagacttgatttcaatttctggaggataatagcatta

SEQ ID NO: 5819 - DNA, 600 bp, Chicken  19866894109623_4
ataaatgatggataattgcttttgtgacaacttgccaattaaattagactcagcagaataacataatgacaatttgttatgctctggtgggcactaacacaccaatcataattaaatgctatgactgaaatagaatgctgctgtacacaggaatatataaccccaattccctcccagtgaaacattataggttcagacttgatttcaatttctggaggataatagcattagcgcacatcagaatgagctcgcggtatgcacacaggcagcagcactgagacagcagcaaggatggccccrgtgggacctcagacaccacatccccagcaagcaatgggcagtgggtgaccagccccatcccagccctsctccaacacgcagggatggagacaaatgcatgtgtgcctgcacacaaaggtgggagaagtggacaccaagagcctctgtccatacagagaccacttagaacccaagccacracaaggctgccttcatctggaaggctctcagctcaaactgtcacaactggaactaaacaagtctctaacagcttaactagaactgcattttcagaacattaaccgccttgctacctgccct

SEQ ID NO: 5820 - DNA, 600 bp, Chicken  19866894109623_5
acaatttgttatgctctggtgggcactaacacaccaatcataattaaatgctatgactgaaatagaatgctgctgtacacaggaatatataaccccaattccctcccagtgaaacattataggttcagacttgatttcaatttctggaggataatagcattagcgcacatcagaatgagctcgcggtatgcacacaggcagcagcactgagacagcagcaaggatggccccrgtgggacctcagacaccacatccccagcaagcaatgggcagtgggtgaccagccccatcccagccctsctccaacacgcagggatggagacaaatgcatgtgtgcctgcacacaaaggtgggagaagtggacaccaagagcctctgtccatacagagaccacttagaacccaagccacracaaggctgccttcatctggaaggctctcagctcaaactgtcacaactggaactaaacaagtctctaacagcttaactagaactgcattttcagaacattaaccgccttgctacctgccctcccaaagcctggcactggcacactcaggcctccagttccctggcacagctgcaaattgctctggcagc

SEQ ID NO: 5821 - DNA, 600 bp, Chicken  19866894109623_6
aaacattataggttcagacttgatttcaatttctggaggataatagcattagcgcacatcagaatgagctcgcggtatgcacacaggcagcagcactgagacagcagcaaggatggccccrgtgggacctcagacaccacatccccagcaagcaatgggcagtgggtgaccagccccatcccagccctsctccaacacgcagggatggagacaaatgcatgtgtgcctgcacacaaaggtgggagaagtggacaccaagagcctctgtccatacagagaccacttagaacccaagccacracaaggctgccttcatctggaaggctctcagctcaaactgtcacaactggaactaaacaagtctctaacagcttaactagaactgcattttcagaacattaaccgccttgctacctgccctcccaaagcctggcactggcacactcaggcctccagttccctggcacagctgcaaattgctctggcagctcctggcaccaggcctggccctgttacaccctttgctcccttacccccaccatgtagtagggataatccgatagcacrtaaccagggatgtgctgactgcagaacactggg

SEQ ID NO: 5822 - DNA, 600 bp, Chicken  19866894109623_7
tccatacagagaccacttagaacccaagccacracaaggctgccttcatctggaaggctctcagctcaaactgtcacaactggaactaaacaagtctctaacagcttaactagaactgcattttcagaacattaaccgccttgctacctgccctcccaaagcctggcactggcacactcaggcctccagttccctggcacagctgcaaattgctctggcagctcctggcaccaggcctggccctgttacaccctttgctcccttacccccaccatgtagtagggataatccgatagcacrtaaccagggatgtgctgactgcagaacactggggagcagctgcagtgctcatccgtcagtcagggcaccgtggggtcaggaggcaccatccacctgcaccacttcatctctctccagcaatttctctgcagagcatcagcacaggacacacttgcaagaggtcattgctctacgggcacccagctcagcaggcgttctgcagaacagagccctgactcgaggagcacacagcagcaaaaggggcctccccacagcacagctgggttcactactagcactgctgcaacgagctaactacac

SEQ ID NO: 5823 - DNA, 599 bp, Chicken  19866894109631_1
  misc_feature (1)..(37): n is any nucleotide
nnnnnnnnnnnnnnnnnnnnnnnnnnnnnnnnnnnnnatatctatacactactctatttgtatgattcatccatggacacaggcccacttaaaagaaaacgcatacatgaaaaggatagatatgaaatcctaaaggaaaagctcccctgtaacctgttcacatgctggcaggaaggaaacacttgatatatataaggaaacacttgaacactgaaactagttattaaggtcagggcaaaaaagacaaatcccttgacagctaaggactggaattgcgtctccaaaatgatgatgaagatmcaaataaagaaagragtccaaaactgaaaaaatgtcttactcaccagatgatcccacgttcctgaggaagtatagggagtagaaatgtaaatctcttactagaatgtagcagtacagactaaaattgagaatttgtctattcttttacatwcagaggcatatatatatatwtttttttgtctagcttgtaaagctctgatcaatgtgctggccttctactcatccttgctgtgctatactggcatatcatattggatttagcataattggagatatttgagcctattttgagcatcttt

SEQ ID NO: 5824 - DNA, 599 bp, Chicken  19866894109631_2
  misc_feature (1)..(23): n is any nucleotide
nnnnnnnnnnnnnnnnnnnnnnnatatctatacactactctatttgtatgattcatccatggacacaggcccacttaaaagaaaacgcatacatgaaaaggatagatatgaaatcctaaaggaaaagctcccctgtaacctgttcacatgctggcaggaaggaaacacttgatatatataaggaaacacttgaacactgaaactagttattaaggtcagggcaaaaaagacaaatcccttgacagctaaggactggaattgcgtctccaaaatgatgatgaagatmcaaataaagaaagragtccaaaactgaaaaaatgtcttactcaccagatgatcccacgttcctgaggaagtatagggagtagaaatgtaaatctcttactagaatgtagcagtacagactaaaattgagaatttgtctattcttttacatwcagaggcatatatatatatwtttttttgtctagcttgtaaagctctgatcaatgtgctggccttctactcatccttgctgtgctatactggcatatcatattggatttagcataattggagatatttgagcctattttgagcatctttagtgctgtagaata

SEQ ID NO: 5825 - DNA, 600 bp, Chicken  19866894109631_3
acctgttcacatgctggcaggaaggaaacacttgatatatataaggaaacacttgaacactgaaactagttattaaggtcagggcaaaaaagacaaatcccttgacagctaaggactggaattgcgtctccaaaatgatgatgaagatmcaaataaagaaagragtccaaaactgaaaaaatgtcttactcaccagatgatcccacgttcctgaggaagtatagggagtagaaatgtaaatctcttactagaatgtagcagtacagactaaaattgagaatttgtctattcttttacatwcagaggcatatatatatatwtttttttgtctagcttgtaaagctctgatcaatgtgctggccttctactcatccttgctgtgctatactggcatatcatattggatttagcataattggagatatttgagcctattttgagcatctttagtgctgtagaatatatgaggaaataaagcaggtagtgctaagggaagaacagttgcacgtgagatgctcaagaattatatccctgttaaggtcttgtgtaagctagggcaaaaggttgcagtggaatatgtgaagtaaacctactggaaac

SEQ ID NO: 5826 - DNA, 600 bp, Chicken  19866894109631_4
gaaggaaacacttgatatatataaggaaacacttgaacactgaaactagttattaaggtcagggcaaaaaagacaaatcccttgacagctaaggactggaattgcgtctccaaaatgatgatgaagatmcaaataaagaaagragtccaaaactgaaaaaatgtcttactcaccagatgatcccacgttcctgaggaagtatagggagtagaaatgtaaatctcttactagaatgtagcagtacagactaaaattgagaatttgtctattcttttacatwcagaggcatatatatatatwtttttttgtctagcttgtaaagctctgatcaatgtgctggccttctactcatccttgctgtgctatactggcatatcatattggatttagcataattggagatatttgagcctattttgagcatctttagtgctgtagaatatatgaggaaataaagcaggtagtgctaagggaagaacagttgcacgtgagatgctcaagaattatatccctgttaaggtcttgtgtaagctagggcaaaaggttgcagtggaatatgtgaagtaaacctactggaaacgtctcctgggcacaaggcac

SEQ ID NO: 5827 - DNA, 600 bp, Chicken  19866894109639_1
tctctgctagatatgacacagttcacttttcaatttaaaacagaatcttgtataccatcagaaggtcatgtattccacttatcatatataatgctttgcatctttccaaagcttgtgcataattcacatgtaagaaatattcaataaaatgttcagagcattttggaaacaacacactgcaaataagtctttctctgctccctttttttatgctctcattctctcttccgtataatttttgatccagtatttctgtgttgttgctgttctgctaccttacctaagtaaatcacatatcamgaatataatcagatgcttacttgcagctacattctcagcaagaaatatatgcagtgaattcgctgctgaaagatttatgtgcttctaatcaaaaagtgtcataataaaatgtttacatttgaaaataaaagatcttagggtttttgaggaagcrgggtgggaagttcactgcttggcatagctaagcttttatgaatgtttatgaattattctactggaaaatgaatgacaggctgtaatagtttttgtgtatgtgtcactattccctgctgcactgtgatgggactactcatgtataac

SEQ ID NO: 5828 - DNA, 600 bp, Chicken  19866894109639_2
agagcattttggaaacaacacactgcaaataagtctttctctgctccctttttttatgctctcattctctcttccgtataatttttgatccagtatttctgtgttgttgctgttctgctaccttacctaagtaaatcacatatcamgaatataatcagatgcttacttgcagctacattctcagcaagaaatatatgcagtgaattcgctgctgaaagatttatgtgcttctaatcaaaaagtgtcataataaaatgtttacatttgaaaataaaagatcttagggtttttgaggaagcrgggtgggaagttcactgcttggcatagctaagcttttatgaatgtttatgaattattctactggaaaatgaatgacaggctgtaatagtttttgtgtatgtgtcactattccctgctgcactgtgatgggactactcatgtataacagttaatacagcagagttgcagcttttcccttcttcagtagatgttgcagttttcagagccagatacttgctaatgcctatttgtatgcatctgatttcaagcacttcccaactcaagggagacaaaagggacttctgagacctgttttaggac

SEQ ID NO: 5829 - DNA, 600 bp, Chicken  19866894109642_1
actcctgtcaatgaatgtggagtaaacacaactttaaagccaattcagttaacagaggtgagttaagccatttccactagttttgttcaagaattctgacagaagatgggagcagtagttgataaagaagagagacatgacagcagttttgaagactaagacagcacaaagagatgaaaagagagcagagaagaaaaaacagaacaggacataaaagggcaggaatcaggaggtgaatgtttagaaaggatgtgcatctgttgagcaatctcatacaggagagtggggaagcaagcagaygacaggagaaattaagtgaaaagtttttgaaarccattagatggctggtgttgcaaagttacaaacccatgacactggtggaaagaatctacctattttacattccaatcaaacacttcattaaactcatgatcctccttttgattgtggtctgcaaatagccaaaagctttcatcacatttccaaagctgctccatctcctctggtcagaaatagctcaagggaaaccgctcagtctccactcttggaagtgtatggagctgtttatgagctgtgcgttggagatggacgctgaatatt

SEQ ID NO: 5830 - DNA, 600 bp, Chicken  19866894109642_2
ttaaagccaattcagttaacagaggtgagttaagccatttccactagttttgttcaagaattctgacagaagatgggagcagtagttgataaagaagagagacatgacagcagttttgaagactaagacagcacaaagagatgaaaagagagcagagaagaaaaaacagaacaggacataaaagggcaggaatcaggaggtgaatgtttagaaaggatgtgcatctgttgagcaatctcatacaggagagtggggaagcaagcagaygacaggagaaattaagtgaaaagtttttgaaarccattagatggctggtgttgcaaagttacaaacccatgacactggtggaaagaatctacctattttacattccaatcaaacacttcattaaactcatgatcctccttttgattgtggtctgcaaatagccaaaagctttcatcacatttccaaagctgctccatctcctctggtcagaaatagctcaagggaaaccgctcagtctccactcttggaagtgtatggagctgtttatgagctgtgcgttggagatggacgctgaatattaaaagtctcatcctagggagcaataggcttacc

SEQ ID NO: 5831 - DNA, 600 bp, Chicken  19866894109645_1
aacattcctatgcacccgagtgcgccggggccgggtgtgcccccccagaaccccatgatgctgcccccagggccccaggactcgctgaaccagcagtgcggccccgtgcccaacagttcccagatgattccttccaaccagctcgtgttcccccgcatgcagcagccccacaacgccatgcagtctcctgcgggaagcatgcccatggcccctggtggggcaggtggccctggcatgcagcagcatttcccaccgggaatgtcattgccacccgaggaccttcctacccagcagcccggmcagatgcctcctcagcagcacatgatgggcaagaacatccctcctcggatcggcgagccctacccagctgtgcttccgggggtggcgtcggtactgaacgatcctgagctcagtgaggtcatccgccccacacccacgggcatccccgagtttgacctctccaggatcatcccatcggagaagccaagcagcaccttgcagtatttccccaagagcgacagccaagcacccaaatcacagccttccaacctccacctcatgaacctgcagaacatgatggctgatcagccccccgtgagg

SEQ ID NO: 5832 - DNA, 600 bp, Chicken  19866894109649_1
actttacaattccttgttttgctttcagtacttcaaacaagatgttgggcaaaaaatattcaaaatatataagcactttgcaaatattccattaaacttctgactttaaaaatacctctacttgagatttcataaaaatcaaacattctttttgtagcctataaagaaatcagtcctctgaaaagtgaaaactttgtcaagtgttaaacttcaagcctttctgttccaactctaccactttgtctgtataatctgtcaagtgttatgctttatcttgtttgatctttgctacggtaaaayatacatatgcaaattttgatgaattgtatctaaatttataaataaatcactataaaatgtgatataaaataatgtatgtaaaaatccatactttaataaggcaataaattatcaattggcctaaatcttacgtcaaataatcacagttcttattatatttgcccttttctcttcctcctgatttcaaacagtccatgttaattatctcccctctgatcgcatttccctgggtgggtgcaagtgaacagtatattccaacaaacaagagagtagtcattcaaaaraggcaccattcagaag

SEQ ID NO: 5833 - DNA, 555 bp, Chicken  19866894109649_2
tttgctacggtaaaayatacatatgcaaattttgatgaattgtatctaaatttataaataaatcactataaaatgtgatataaaataatgtatgtaaaaatccatactttaataaggcaataaattatcaattggcctaaatcttacgtcaaataatcacagttcttattatatttgcccttttctcttcctcctgatttcaaacagtccatgttaattatctcccctctgatcgcatttccctgggtgggtgcaagtgaacagtatattccaacaaacaagagagtagtcattcaaaaraggcaccattcagaagttttagatgatggaaaagacagggcagccatcggtccctttgtttcaggaagaagttaccgaaaagcaaggttgctttcctcttttccagaagtgctcccatcagcgggagcaattttatgctgtcttagaacttgcagagtgctacgaaggagaataaattgattcagtgatgctaagcaaaagtttcaaataaatactccctttgtgcagtagcattcttcaaaacagacctgtaaa

SEQ ID NO: 5834 - DNA, 598 bp, Chicken  19866894109652_1
ttggttagaaaggggggaaaaatactattttcagttatccagaattcctccaacagatttaggtagtaggtagctcttttcttactttttatctgcaggcaaagcaggttgcatttttactgtgctttaatcacaactatgacacacctccagacaaagttggtttttctgataaatatcttactcctcttacatatgtattttaataggcactaatcatgcagaagctccctttccattaatttaaagcctttctttttttataagccttttccagaagagctgtcagaccaactcacracagccagctcaggattgagtttctgagagtggctacctacggatttctaaagacagcttctaagaaaactgtaagcaaaaccacactctcccttgtatgacttagcaacttagatagagagcaggaaacgcagaagtggtataacttctgatttagggaatacctatcttcttcctaattgaatcatactgctagtgtacgcatccagtactaaatgtcacaaattgcatgaaaactccttgtcatagctttgttacactgtaccctcatctacaccataaacaactgctcattcat

SEQ ID NO: 5835 - DNA, 599 bp, Chicken  19866894109653_1
  misc_feature (1)..(214): n is any nucleotide
nnnnnnnnnnnnnnnnnnnnnnnnnnnnnnnnnnnnnnnnnnnnnnnnnnnnnnnnnnnnnnnnnnnnnnnnnnnnnnnnnnnnnnnnnnnnnnnnnnnnnnnnnnnnnnnnnnnnnnnnnnnnnnnnnnnnnnnnnnnnnnnnnnnnnnnnnnnnnnnnnnnnnnnnnnnnnnnnnnnnnnnnnnnnnnnnnnnnnnnnnnnnnnnnnnnnnncaggacttgaggggagcttacaaacaggagggagagcgacattttacacaggcagatcatgacagaaaaggagaatggctttaaartaaaagaggggagatttaggttagatgctaggaggaaattttttactcagagggcagtgacgcaccagcactgctgccaagagatcccatccctggaggtgctcaagaacaggctggttggggccctgggcagcctgatctggtgggggacagccagctcacagcagagggttataactgggtgggctttagggtcccttccaagccaagccattcwgcgattctgtgattcctgcctcacatcccatcccagcctgcaagcacttgtgcragaagcagatcagctgcagacgtgcttc

SEQ ID NO: 5836 - DNA, 600 bp, Chicken  19866894109653_2
gacttgaggggagcttacaaacaggagggagagcgacattttacacaggcagatcatgacagaaaaggagaatggctttaaartaaaagaggggagatttaggttagatgctaggaggaaattttttactcagagggcagtgacgcaccagcactgctgccaagagatcccatccctggaggtgctcaagaacaggctggttggggccctgggcagcctgatctggtgggggacagccagctcacagcagagggttataactgggtgggctttagggtcccttccaagccaagccattcwgcgattctgtgattcctgcctcacatcccatcccagcctgcaagcacttgtgcragaagcagatcagctgcagacgtgcttcctcagagcacatgagcaccatgattcccaagtgtttgcagaggcaggaagaggcatgtatttggaaggaagcaacatctggggaaaggggaaccaaagacaaaaatattacagatgtatttgaatcattaaacaaacacctatagatcaaagagcacagggcaaaggttgtgaactcatatggcaaaggcaagcaggggtggtgaggagagcaggcaa

SEQ ID NO: 5837 - DNA, 600 bp, Chicken  19866894109653_3
catgacagaaaaggagaatggctttaaartaaaagaggggagatttaggttagatgctaggaggaaattttttactcagagggcagtgacgcaccagcactgctgccaagagatcccatccctggaggtgctcaagaacaggctggttggggccctgggcagcctgatctggtgggggacagccagctcacagcagagggttataactgggtgggctttagggtcccttccaagccaagccattcwgcgattctgtgattcctgcctcacatcccatcccagcctgcaagcacttgtgcragaagcagatcagctgcagacgtgcttcctcagagcacatgagcaccatgattcccaagtgtttgcagaggcaggaagaggcatgtatttggaaggaagcaacatctggggaaaggggaaccaaagacaaaaatattacagatgtatttgaatcattaaacaaacacctatagatcaaagagcacagggcaaaggttgtgaactcatatggcaaaggcaagcaggggtggtgaggagagcaggcaagaaaggccawggagggcatctgtggaaactttactacttacagattttgggctt

SEQ ID NO: 5838 - DNA, 600 bp, Chicken  19866894109653_4
gattcctgcctcacatcccatcccagcctgcaagcacttgtgcragaagcagatcagctgcagacgtgcttcctcagagcacatgagcaccatgattcccaagtgtttgcagaggcaggaagaggcatgtatttggaaggaagcaacatctggggaaaggggaaccaaagacaaaaatattacagatgtatttgaatcattaaacaaacacctatagatcaaagagcacagggcaaaggttgtgaactcatatggcaaaggcaagcaggggtggtgaggagagcaggcaagaaaggccawggagggcatctgtggaaactttactacttacagattttgggctttcctttgatgggaaacttcacaaccatctcctggggattagtgcagataaagacaaatggagacccagattcctggctcaaatccggatactgtgaaacacagacacatgcacaaaacagtcagacaaactgcagtgggtgtgaaaagatctcaacagtgaggagcagcacaaaaggaaatgcttccaggcaaaccattactgaagaggtgtaaaacagggttttactggtacagaaacagctctgccccgatgcc

SEQ ID NO: 5839 - DNA, 600 bp, Chicken  19866894109653_5
ggaaactttactacttacagattttgggctttcctttgatgggaaacttcacaaccatctcctggggattagtgcagataaagacaaatggagacccagattcctggctcaaatccggatactgtgaaacacagacacatgcacaaaacagtcagacaaactgcagtgggtgtgaaaagatctcaacagtgaggagcagcacaaaaggaaatgcttccaggcaaaccattactgaagaggtgtaaaacagggttttactggtacagaaacagctctgccccgatgcccttatgcagcttrcgacaagtgaggttgatgggttggagaagctggctgctcctctgggccaggcaccttgggacaggaactcaaagtctactgagagatttcactgtgatgaaagaaccagggaattttacaggtggagtgtaaacagagtgcttctctcattaaccatggtgaaaaggaaagaaatgctgctcagtgtgggaagcacatggaaacgctgtctggatgcagctcaacctcactgctgtgcaaacgtgaaatgcagaactacaataaaaaaacgtaaataccaactctcccttcagatcctcc

SEQ ID NO: 5840 - DNA, 600 bp, Chicken  19866894109653_6
acaggaactcaaagtctactgagagatttcactgtgatgaaagaaccagggaattttacaggtggagtgtaaacagagtgcttctctcattaaccatggtgaaaaggaaagaaatgctgctcagtgtgggaagcacatggaaacgctgtctggatgcagctcaacctcactgctgtgcaaacgtgaaatgcagaactacaataaaaaaacgtaaataccaactctcccttcagatcctccgctgcaggcctagtgctggcaggtgtgtgtggagtggaggaacagggcagcacaggagcyccagcccaggataagcctgtccaaacacacagcggaagcggtttcccttccacgggaaaaatgcctttttttttcccccttgctttcctcaagcagatccatcgaggctgctgtatgcatgggacaggatgccagaccagatggagcagtgtgtcctggcaaatcccccatttgttcctaacaaatgacttctaggcggaatgtttgaaaagctctccctctcctgccgatctgccaagatgggtttggatgtgtcctgaacagctgggcacggagagcggagcagggagcagcccactt

SEQ ID NO: 5841 - DNA, 600 bp, Chicken  19866894109653_7
gctgggcacggagagcggagcagggagcagcccacttttcctgcgtcgcagcggggtttggcagcgctgccggcagttaggggagatttacagaagcctgacaccaggagtggatcaactggaaagcatttccagccccctcattttacaacagagtgggccacgtttgctgagcaagagatgtatgtgcacttagctgctctgtgcaacacctgtgctgggagggaaggagccacgctcatctgcgaggcccacagatgccctgctgcactgatctggcgctggacaagttccttccaytttttttttttttttcctaagccacattactggacttgcttccaccactttgtgctgatgccaaggattttcatttcccatctgcagggagggaggatcttggaaggttacaaaacaccaatacaaatatcctgagccaacgcctggtgagtgcgaaatgctagcccggctttattgctctcgctatcgtacgggtgactgctcagctttccacagccagggactggactttccagcggctctcacattagcggggcctctgaagaccacaccataaagctgcggggcctaagccaccat

SEQ ID NO: 5842 - DNA, 600 bp, Chicken  19866894109653_8
ctgggcacggagagcggagcagggagcagcccacttttcctgcgtcgcagcggggtttggcagcgctgccggcagttaggggagatttacagaagcctgacaccaggagtggatcaactggaaagcatttccagccccctcattttacaacagagtgggccacgtttgctgagcaagagatgtatgtgcacttagctgctctgtgcaacacctgtgctgggagggaaggagccacgctcatctgcgaggcccacagatgccctgctgcactgatctggcgctggacaagttccttccatyttttttttttttttcctaagccacattactggacttgcttccaccactttgtgctgatgccaaggattttcatttcccatctgcagggagggaggatcttggaaggttacaaaacaccaatacaaatatcctgagccaacgcctggtgagtgcgaaatgctagcccggctttattgctctcgctatcgtacgggtgactgctcagctttccacagccagggactggactttccagcggctctcacattagcggggcctctgaagaccacaccataaagctgcggggcctaagccaccatc

SEQ ID NO: 5843 - DNA, 600 bp, Chicken  19866894109655_1
cttacctagagcagcccagctgctgaacttcattagggaaaggaatcgaacactaatcatgcactcaacattgaggcacatttccgagtgagaaagtaaaactaacaaatgaaacctggctatttctgagcctgcgtctaccccttggacacaatgagatgtttcgcttcaggggacctgagcaatgaggctctcatagaggggggactcttcatgccttaaccaaaaagtgccatcagtcacattccagtggtagcatctttactgggtgtatgggagaaaccatcagagcgggcaggragtactaaagtagaggaaaaggactgttcagttactttatgtgcaaggaggctccccagaagtctaaacaaaccaagtaattgtaagagaggagtctgctgagaaaactaccgctcttcttgagaaaagctgagagcagattgaatgccttccctggagttttccaattttttcattaaatgactcaaaacaaaaacatgtaaaaatgtggttggtgtctaaaaaggcagtttttgttagagaaatgtttttctctggcctacacatgcaagcaactgtgtgcctcacactgccgtatct

SEQ ID NO: 5844 - DNA, 600 bp, Chicken  19866894109656_1
gctggtcaaataatactttgtgcttgcaagtatatctcagcaaagttcattcttggtcctctcctcaggaggtaggaatctgttctctcttagtttcctgcttattttgatttttacttatgaaacaaaacaaaaaaaaccccatcaatctactatgtacaatatcttaagttccatttgtcttttcatagaatgtttctgtcccactgaaacacactaacatgttaagaactgcaaaatgttaaactgagagcaagaatgtttgcaccatgtatttggactgtaatatttgtgagatayaagcatgtgcttaaattaagaacatgcttaactttgaattttgacctctttgctcatgtagtaaatgaattcattcctataaatcactactataaatactataaatgtacttctataggaccattctctgcccaggccaaacaatctatcattattttgccctgtcctatttacatgtccactcagttgaagtttaagttattaagaggaaggaggtaagattatctcagtactgttttaaagaaaagtattctttctggatatttaatgaagtaaatttgaatttataaggctgttctg

SEQ ID NO: 5845 - DNA, 600 bp, Chicken  19866894109656_2
tgccctgtcctatttacatgtccactcagttgaagtttaagttattaagaggaaggaggtaagattatctcagtactgttttaaagaaaagtattctttctggatatttaatgaagtaaatttgaatttataaggctgttctgacaattccttctgcaagtttgggtatccccaggtgaaccaagcagagatgttgcttctttgggtacagtggtatgtctggggttggcaggaaacagattgttcttatggtgtctggagacggatttagaaaaatagctcaccaaaataggtcccaamagggactaaggttcttgatgcttgcactacctaaaataaggttcttagttctgggaatagagctcagaagccaaaggcagatgcttgagtttttgtatgttgactagagttaaagcaacaaatgtaatgataggaaggaacttaaactgaacagcatgctgtgccaaggggagcatccaaactcctctcttttgtttattaggggcttgcagtcagtgatctctgcagaggggtattcaaatatcataattcttcctatatttagaatgcaaaagggccaaggaacggagagtgtaggac

SEQ ID NO: 5846 - DNA, 387 bp, Chicken  19866894109661_1
agccatacggagccaacatcatattcaaaactacagatttttctgtagttctttggttaacttgcaattaatatttacttatacaatgaaatgctaattataagtgttcaccaacagtattcatttaacatctttatttatgttcaggcttaactctccctactaattaatattctattcaaatcataataattagcatgtagcataattttatgttgttaaaacggtaattaaaaagcagctagaatttctatatgttgcacatccttagtttgttctgcaagcgtaaacgtaattcartgagtttcctatttttaattataattttcaacttcctacagagcaagaacagaaacacctacaagcagttttcttgtttggtgtttt

SEQ ID NO: 5847 - DNA, 599 bp, Chicken  19866894109666_1
  misc_feature (1)..(21): n is any nucleotide
nnnnnnnnnnnnnnnnnnnnnatacaggaatgcttaataaaaagaatctggcttttctgaagacacttttcccccaagaactattcttggtttgtatgttccaagtcaacaacaaatggtctgcaaattgcagggtccatttataagtcatttctgttgttgcaaacactaccaattaccaattgtttcaagaaatgggagcttgaagctgagccagacaccttcaaggtccctgaaaacacacattagcgtagtaaaacaatgagaagcatacacgaggttacccctcactgcacagtrctaggatgtttggatagaagccgcaggcaggattatttggatggagtgtaatattggaaattttccaatcttgaaaagcaagtctgtattttgtcattacagaagtagtctcaacagtaatactgatagatttatactgttaaatggcaaattacacctgttaatgtcacatcacasttctgagtcctggtacctcagagaagtatgccaawttattgtgtcagtaacagtaggtagaatggtcaaacctgaaaatctctgtccatactacaaagttgcaaatcatattagcacatgty

SEQ ID NO: 5848 - DNA, 600 bp, Chicken  19866894109666_10
atgttcgtggtgtttgaaagatgaagttctcacaagtgtcagtgacatggaagaaagcccttacatgggtctgcttccactcaagacagagtatcctgtcatgttasaggtrggaaaagccctgtagaaggccccatacaatgacaaggagtctgttcttggctaacgttacacactcattaaaacggcagctgcattaccctgcagaaaaaatggttatttccattctacacacttctattacagagasattattattgtaagaatgtattacaaaagaaaagaaaatgttctagggarttttttttttttttttcattttcctaccttttatctctggaacttatatttgtatttgcctcaatcaggcacaggttgtagttagtgggagtgtttgtcccttaaagcttgtgataaattcacttttctattaaaaagtttaaatacttgttataaataatttctccacacttgtgtgctttgatctaatctactgcatagttttagctaaaatggttgtggttctaaagattacaagtattaggagaaagaaataagttgtcgaaattatcttcagcttgcagcttgctttacaaaggt

SEQ ID NO: 5849 - DNA, 600 bp, Chicken  19866894109666_2
accaattgtttcaagaaatgggagcttgaagctgagccagacaccttcaaggtccctgaaaacacacattagcgtagtaaaacaatgagaagcatacacgaggttacccctcactgcacagtrctaggatgtttggatagaagccgcaggcaggattatttggatggagtgtaatattggaaattttccaatcttgaaaagcaagtctgtattttgtcattacagaagtagtctcaacagtaatactgatagatttatactgttaaatggcaaattacacctgttaatgtcacatcacasttctgagtcctggtacctcagagaagtatgccaawttattgtgtcagtaacagtaggtagaatggtcaaacctgaaaatctctgtccatactacaaagttgcaaatcatattagcacatgtycccttaaactaggttcacaaggttcaactaaacagatttaatgggaggaggttgttggagaggggcatattaaaagggtcctctgcagctacacttatagttgcrgtgattcacttccaaattttccttttaatggcttgtagactttgggtaagtacagcattaatagtcttttcay

SEQ ID NO: 5850 - DNA, 600 bp, Chicken  19866894109666_3
gccagacaccttcaaggtccctgaaaacacacattagcgtagtaaaacaatgagaagcatacacgaggttacccctcactgcacagtrctaggatgtttggatagaagccgcaggcaggattatttggatggagtgtaatattggaaattttccaatcttgaaaagcaagtctgtattttgtcattacagaagtagtctcaacagtaatactgatagatttatactgttaaatggcaaattacacctgttaatgtcacatcacasttctgagtcctggtacctcagagaagtatgccaawttattgtgtcagtaacagtaggtagaatggtcaaacctgaaaatctctgtccatactacaaagttgcaaatcatattagcacatgtycccttaaactaggttcacaaggttcaactaaacagatttaatgggaggaggttgttggagaggggcatattaaaagggtcctctgcagctacacttatagttgcrgtgattcacttccaaattttccttttaatggcttgtagactttgggtaagtacagcattaatagtcttttcayaccactaccaagcagcctaatttctatgaccagct

SEQ ID NO: 5851 - DNA, 600 bp, Chicken  19866894109666_4
rctaggatgtttggatagaagccgcaggcaggattatttggatggagtgtaatattggaaattttccaatcttgaaaagcaagtctgtattttgtcattacagaagtagtctcaacagtaatactgatagatttatactgttaaatggcaaattacacctgttaatgtcacatcacasttctgagtcctggtacctcagagaagtatgccaawttattgtgtcagtaacagtaggtagaatggtcaaacctgaaaatctctgtccatactacaaagttgcaaatcatattagcacatgtycccttaaactaggttcacaaggttcaactaaacagatttaatgggaggaggttgttggagaggggcatattaaaagggtcctctgcagctacacttatagttgcrgtgattcacttccaaattttccttttaatggcttgtagactttgggtaagtacagcattaatagtcttttcayaccactaccaagcagcctaatttctatgaccagcttgacatctactctattgctgttcctcgcagtaggtataagtggagggatgtaacctatgttcgtggtgtttgaaagatgaagttctc

SEQ ID NO: 5852 - DNA, 600 bp, Chicken  19866894109666_5
gtagtctcaacagtaatactgatagatttatactgttaaatggcaaattacacctgttaatgtcacatcacasttctgagtcctggtacctcagagaagtatgccaawttattgtgtcagtaacagtaggtagaatggtcaaacctgaaaatctctgtccatactacaaagttgcaaatcatattagcacatgtycccttaaactaggttcacaaggttcaactaaacagatttaatgggaggaggttgttggagaggggcatattaaaagggtcctctgcagctacacttatagttgcrgtgattcacttccaaattttccttttaatggcttgtagactttgggtaagtacagcattaatagtcttttcayaccactaccaagcagcctaatttctatgaccagcttgacatctactctattgctgttcctcgcagtaggtataagtggagggatgtaacctatgttcgtggtgtttgaaagatgaagttctcacaagtgtcagtgacatggaagaaagcccttacatgggtctgcttccactcaagacagagtatcctgtcatgttasaggtrggaaaagccctgtagaaggcccca

SEQ ID NO: 5853 - DNA, 600 bp, Chicken  19866894109666_6
ttctgagtcctggtacctcagagaagtatgccaawttattgtgtcagtaacagtaggtagaatggtcaaacctgaaaatctctgtccatactacaaagttgcaaatcatattagcacatgtycccttaaactaggttcacaaggttcaactaaacagatttaatgggaggaggttgttggagaggggcatattaaaagggtcctctgcagctacacttatagttgcrgtgattcacttccaaattttccttttaatggcttgtagactttgggtaagtacagcattaatagtcttttcayaccactaccaagcagcctaatttctatgaccagcttgacatctactctattgctgttcctcgcagtaggtataagtggagggatgtaacctatgttcgtggtgtttgaaagatgaagttctcacaagtgtcagtgacatggaagaaagcccttacatgggtctgcttccactcaagacagagtatcctgtcatgttasaggtrggaaaagccctgtagaaggccccatacaatgacaaggagtctgttcttggctaacgttacacactcattaaaacggcagctgcattaccctgcagaa

SEQ ID NO: 5854 - DNA, 600 bp, Chicken  19866894109666_7
ggtcctctgcagctacacttatagttgcrgtgattcacttccaaattttccttttaatggcttgtagactttgggtaagtacagcattaatagtcttttcayaccactaccaagcagcctaatttctatgaccagcttgacatctactctattgctgttcctcgcagtaggtataagtggagggatgtaacctatgttcgtggtgtttgaaagatgaagttctcacaagtgtcagtgacatggaagaaagcccttacatgggtctgcttccactcaagacagagtatcctgtcatgttasaggtrggaaaagccctgtagaaggccccatacaatgacaaggagtctgttcttggctaacgttacacactcattaaaacggcagctgcattaccctgcagaaaaaatggttatttccattctacacacttctattacagagasattattattgtaagaatgtattacaaaagaaaagaaaatgttctagggatttttttttttttttttcattttcctaccttttatctctggaacttatatttgtatttgcctcaatcaggcacaggttgtagttagtgggagtgtttgtcccttaaag

SEQ ID NO: 5855 - DNA, 600 bp, Chicken  19866894109666_8
tctgcagctacacttatagttgcrgtgattcacttccaaattttccttttaatggcttgtagactttgggtaagtacagcattaatagtcttttcayaccactaccaagcagcctaatttctatgaccagcttgacatctactctattgctgttcctcgcagtaggtataagtggagggatgtaacctatgttcgtggtgtttgaaagatgaagttctcacaagtgtcagtgacatggaagaaagcccttacatgggtctgcttccactcaagacagagtatcctgtcatgttasaggtrggaaaagccctgtagaaggccccatacaatgacaaggagtctgttcttggctaacgttacacactcattaaaacggcagctgcattaccctgcagaaaaaatggttatttccattctacacacttctattacagagasattattattgtaagaatgtattacaaaagaaaagaaaatgttctagggatttttttttttttttttcattttcctaccttttatctctggaacttatatttgtatttgcctcaatcaggcacaggttgtagttagtgggagtgtttgtcccttaaagcttgt

SEQ ID NO: 5856 - DNA, 600 bp, Chicken  19866894109666_9
ctactctattgctgttcctcgcagtaggtataagtggagggatgtaacctatgttcgtggtgtttgaaagatgaagttctcacaagtgtcagtgacatggaagaaagcccttacatgggtctgcttccactcaagacagagtatcctgtcatgttasaggtrggaaaagccctgtagaaggccccatacaatgacaaggagtctgttcttggctaacgttacacactcattaaaacggcagctgcattaccctgcagaaaaaatggttatttccattctacacacttctattacagagasattattattgtaagaatgtattacaaaagaaaagaaaatgttctagggatttttttttttttttttcattttcctaccttttatctctggaacttatatttgtatttgcctcaatcaggcacaggttgtagttagtgggagtgtttgtcccttaaagcttgtgataaattcacttttctattaaaaagtttaaatacttgttataaataatttctccacacttgtgtgctttgatctaatctactgcatagttttagctaaaatggttgtggttctaaagattacaagtattaggagaaa

SEQ ID NO: 5857 - DNA, 600 bp, Chicken  19866894109670_1
agagcaatgatgtgaaattttgtcttgagagcatgaagattttttatggctctgggaaacagcattaaaacagactctaaaacaggatgtaaatgttataatgatgagttattccttcctgcttactaagaagcagcagacatcactagtagaggccagcatgtcccacatggattatttacattattttttttaacaacagctgcatatgctttttgcttttagtctgtatcgaccaaaggatgtggattttcaaaggaaaactcccttcattttgcacttggctttaaagcaaaagartagagatttaggttagctgttaggrataaattctttactcagaggctggtgaggccatggcacaggctgcccagagagctgtgggtgctccatccctgcaggccttcaaagccaggttggatggggctctgggcatcccatgatggtgggggcagccctacagacatttgcagttttggtggctatatataagcttccaggctgctggatgttggcacctgtttgggttgcaccccacttcccattgaagggaaaaggtgggtgagcactcttgtgccctgatttttgaacagagaaaac

SEQ ID NO: 5858 - DNA, 600 bp, Chicken  19866894109670_2
tgagagcatgaagattttttatggctctgggaaacagcattaaaacagactctaaaacaggatgtaaatgttataatgatgagttattccttcctgcttactaagaagcagcagacatcactagtagaggccagcatgtcccacatggattatttacattattttttttaacaacagctgcatatgctttttgcttttagtctgtatcgaccaaaggatgtggattttcaaaggaaaactcccttcattttgcacttggctttaaagcaaaagartagagatttaggttagctgttaggrataaattctttactcagaggctggtgaggccatggcacaggctgcccagagagctgtgggtgctccatccctgcaggccttcaaagccaggttggatggggctctgggcatcccatgatggtgggggcagccctacagacatttgcagttttggtggctatatataagcttccaggctgctggatgttggcacctgtttgggttgcaccccacttcccattgaagggaaaaggtgggtgagcactcttgtgccctgatttttgaacagagaaaacctgactataatagcagggcatggtc

SEQ ID NO: 5859 - DNA, 600 bp, Chicken  19866894109674_1
gaaatgttaggacagaaaatcatagaagcaatagcatgaaggactagatgattgtacatgatgaatggaatggccttgacacgcagaatgcaagatgggacaaatttcaataaagctgagacaggcgtttttaaagagaattttggtagtaaaaaacattgtttccacaagactgtggaaaggtcggtttggagctaaagaaaatacatacagatctaagaggtggagaaggcagcactgcagtccataacgctcacacaggatttgattgaaacacttggtgtgcagattttacttcaytcagtgttgttgtttccctaaagaatattatttacctaagttttatagcagctagaaggctaacaatggaaaaaaaaatcaatactatagtatggaaaaaattggtggtttttgttgaaggaaaagttagtaagattttgccattttttttccttctgaatcctaaactctataatcaaccgtgtttacaacaaaaaggctgaaaggaaagcagcagcatggagtctgccatggtttgggaataatccttctgtagttgggggcttttgcctacctgatgaagattttgactggatgata

SEQ ID NO: 5860 - DNA, 600 bp, Chicken  19866894109674_2
ccattttttttccttctgaatcctaaactctataatcaaccgtgtttacaacaaaaaggctgaaaggaaagcagcagcatggagtctgccatggtttgggaataatccttctgtagttgggggcttttgcctacctgatgaagattttgactggatgataaaaatgaaggatattttcagctaacaggatttataagtgcaaacattctgacaatagagatgtctcttgattttgaagaggcctgtcaagttaatgaagaattatttagcaaagaatattaagttttaaattcagggggraaaaaaaaggcctctagttccrtacagatctcagaaggcaggtgtttactcacactcctgggatttctttttgtgtttttcagagataaagaggaaagaatcgagtgaactatattcggttttatctttttctttctgcatacccgctgtgtctattgatgatactctctccctatttatttcttcacttgagaaatggaaatcctaccttcctctttcatttcattgaccattcccttgtctcaaactcactagtgctgaagcatgcatctaacaaaggaggtttttgtttctgcagac

SEQ ID NO: 5861 - DNA, 600 bp, Chicken  19866894109674_3
ctaaactctataatcaaccgtgtttacaacaaaaaggctgaaaggaaagcagcagcatggagtctgccatggtttgggaataatccttctgtagttgggggcttttgcctacctgatgaagattttgactggatgataaaaatgaaggatattttcagctaacaggatttataagtgcaaacattctgacaatagagatgtctcttgattttgaagaggcctgtcaagttaatgaagaattatttagcaaagaatattaagttttaaattcagggggraaaaaaaaggcctctagttccrtacagatctcagaaggcaggtgtttactcacactcctgggatttctttttgtgtttttcagagataaagaggaaagaatcgagtgaactatattcggttttatctttttctttctgcatacccgctgtgtctattgatgatactctctccctatttatttcttcacttgagaaatggaaatcctaccttcctctttcatttcattgaccattcccttgtctcaaactcactagtgctgaagcatgcatctaacaaaggaggtttttgtttctgcagacttccagacatagtttactactt

SEQ ID NO: 5862 - DNA, 599 bp, Chicken  19866894109676_1
  misc_feature (1)..(254): n is any nucleotide
nnnnnnnnnnnnnnnnnnnnnnnnnnnnnnnnnnnnnnnnnnnnnnnnnnnnnnnnnnnnnnnnnnnnnnnnnnnnnnnnnnnnnnnnnnnnnnnnnnnnnnnnnnnnnnnnnnnnnnnnnnnnnnnnnnnnnnnnnnnnnnnnnnnnnnnnnnnnnnnnnnnnnnnnnnnnnnnnnnnnnnnnnnnnnnnnnnnnnnnnnnnnnnnnnnnnnnnnnnnnnnnnnnnnnnnnnnnnnnnnnnnnnnnnnnnnnnattagcaagggaatttctccctagcggagcatttcaatacaaacarcatttcattaccaagtcyctgtatagaaatttcatccaagtgctaaggtagttaccaccttactgggactgatccttcttggccatgaattgattaacctccctcaagatttgatttccacaattacagagtaaagctcctcttgaagctgtttcactcagtggttgcccacagacaatattgcacttgcacagtgagctcagagctgcagagctctggcagaaagggcagcctccactgtgtgcaaaatcatttcaattccagacgagtttcttctaagatacagtggtccatcttgg

SEQ ID NO: 5863 - DNA, 599 bp, Chicken  19866894109676_2
  misc_feature (1)..(236): n is any nucleotide
nnnnnnnnnnnnnnnnnnnnnnnnnnnnnnnnnnnnnnnnnnnnnnnnnnnnnnnnnnnnnnnnnnnnnnnnnnnnnnnnnnnnnnnnnnnnnnnnnnnnnnnnnnnnnnnnnnnnnnnnnnnnnnnnnnnnnnnnnnnnnnnnnnnnnnnnnnnnnnnnnnnnnnnnnnnnnnnnnnnnnnnnnnnnnnnnnnnnnnnnnnnnnnnnnnnnnnnnnnnnnnnnnnnnnnnnnnnnattagcaagggaatttctccctagcggagcatttcaatacaaacarcatttcattaccaagtcyctgtatagaaatttcatccaagtgctaaggtagttaccaccttactgggactgatccttcttggccatgaattgattaacctccctcaagatttgatttccacaattacagagtaaagctcctcttgaagctgtttcactcagtggttgcccacagacaatattgcacttgcacagtgagctcagagctgcagagctctggcagaaagggcagcctccactgtgtgcaaaatcatttcaattccagacgagtttcttctaagatacagtggtccatcttggcagtggtacagcttcatc

SEQ ID NO: 5864 - DNA, 600 bp, Chicken  19866894109680_1
agagcccatctcccccttccccactaatacagctggcctgttggccccgggtttgtcactaaaatgaggggtgtgatggtcctgctgcctgcctgctgctcactgggcaccacaagggtcagtgggggaggactttgtatggagcagccccaccatccccctcacttgaggctgtagtgtggttctggcactgcagtgccctggttggcagcacctggaaggggtgcagctctgccctaacactatgctggggtcctgcctggctggagcagggcccagcagatctctccacccttctcwgcccttaggaagcctgcatttccccaaggattgctcacagtgttgccccccccataaacttccagcgagctgtcaggacagcaggggctgccccactgctgcagtggccatgtgggggtgcacagccctctggaccctcacaaacccttccccaggagcctctccttgggggatgcaaatgatgcagtgtatttttccctttgaactcccagcctactgcaaaccgttgtggggctcacccagaccagcatcgggctgtgcagctgagagcggccgctttgcattcccaatgcgctgctt

SEQ ID NO: 5865 - DNA, 600 bp, Chicken  19866894109688_1
aagaggacatcacggtgagactgctccctggacaggaaatactaacaagtaaaacagaagaagaaaagtagaatttggttatcagtctttctggctgcatattaactgacattttaggttaagaggaaactacagctctagtaaactgaatcaatcttaagcagtaacactcagtgctcagaagatcctgacgtggtctgaggactgattgcatctcagatgttttctactgccatttggatgtaattgtggcttcttgtttccagccaaaacacagttttgtttcttatatttttattrattttttctcagattgtcaaactagctattctgaaactatttctaatagggtacttttatttctatgccttgccccccctttttttcctttcctggtgctcaatttgaaatatgtctctgtgtgttaagtgagattaaaagctttacttccgctaattttcacactttgagcagcttgaaagagctgtttagttctgatttcatggttctggctgttctgaagcaatctgccaggtacagcacaacccagcggccagtgtgagcacagcttctgcatgggcacgttcaatgggtggaaaa

SEQ ID NO: 5866 - DNA, 600 bp, Chicken  19866894109688_2
tattctgaaactatttctaatagggtacttttatttctatgccttgccccccctttttttcctttcctggtgctcaatttgaaatatgtctctgtgtgttaagtgagattaaaagctttacttccgctaattttcacactttgagcagcttgaaagagctgtttagttctgatttcatggttctggctgttctgaagcaatctgccaggtacagcacaacccagcggccagtgtgagcacagcttctgcatgggcacgttcaatgggtggaaaaaaacacattcaccaagcctaaaagtkgagtatgaaaagttcaacctgtagctcaaggatcattctgcttctgaaggagacagcctgggagkctctgcccacctctttgctcaatgcagcataaaagctgtgtcatggtagttatagctctgggtgggtgaactcaattgtgctggattggtgcaactggaaacattcttgatcaacatcagccacataactttttgctcctctgctacagctctgtgcagatggagttgaacattacgataacgaccaaaagtaaaagccatttcacaagttgattgtacaaacaaatttattgtt

SEQ ID NO: 5867 - DNA, 600 bp, Chicken  19866894109688_3
cctggtgctcaatttgaaatatgtctctgtgtgttaagtgagattaaaagctttacttccgctaattttcacactttgagcagcttgaaagagctgtttagttctgatttcatggttctggctgttctgaagcaatctgccaggtacagcacaacccagcggccagtgtgagcacagcttctgcatgggcacgttcaatgggtggaaaaaaacacattcaccaagcctaaaagtkgagtatgaaaagttcaacctgtagctcaaggatcattctgcttctgaaggagacagcctgggagkctctgcccacctctttgctcaatgcagcataaaagctgtgtcatggtagttatagctctgggtgggtgaactcaattgtgctggattggtgcaactggaaacattcttgatcaacatcagccacataactttttgctcctctgctacagctctgtgcagatggagttgaacattacgataacgaccaaaagtaaaagccatttcacaagttgattgtacaaacaaatttattgttaaaagaaaaaaaaamcagaaaagcatttttttccagactgaaatgctgttgtattttaagttgga

SEQ ID NO: 5868 - DNA, 557 bp, Chicken  19866894109688_4
aacctgtagctcaaggatcattctgcttctgaaggagacagcctgggagkctctgcccacctctttgctcaatgcagcataaaagctgtgtcatggtagttatagctctgggtgggtgaactcaattgtgctggattggtgcaactggaaacattcttgatcaacatcagccacataactttttgctcctctgctacagctctgtgcagatggagttgaacattacgataacgaccaaaagtaaaagccatttcacaagttgattgtacaaacaaatttattgttaaaagaaaaaaaaamcagaaaagcatttttttccagactgaaatgctgttgtattttaagttggatacttctaattcttgtaattcaaatcttcaaaaattcttgtattaatttagcatagtctgaaatacttggcttttccataactgaaggcacagcactgaaatgcagttctcagtctgaccatttgcagttattctgtggattcattgggatgtccagctccaagagaagctacatatattgacagcatctgatcgcagccatgctat

SEQ ID NO: 5869 - DNA, 600 bp, Chicken  19866894109692_1
taagtcaggtactcatgcaccctaggtgtgcagtagggctgtggtacttctggagagcccgtgtccatcctggggtgtctgggagatggtgtgtcacctctccttggtgtagaggaaggtacccttgatttttttggtacatacagcggtctcatatggtcagagagcacccctgcctcaaatgtctacagagcaggtttatgatgataccattccattcaggttcctcaaggggctgtctcagccaggaacaaagcacagaatggagtttgcataatacattgctaatttactcatctycaaaagactgtagtaacacagaggttactacagtaacattgtagtaactgtagtaactacagtacactgtagtaacactggggccataagcactatttggagagcagcaggcagctgcacagttacacactcaggcgaaatagtagaggggaggcagtatttctcttgagggtgttttcctgcttttccctgggtaaacctgttctgcctgagtgtgccaaaaactactcaccgttttggaataacctgggatttttgtgtgtgtgtgttttcccacctgctttaaaggggtgaatgtgc

SEQ ID NO: 5870 - DNA, 600 bp, Chicken  19866894109695_1
tgctgcacatctttggtattgcttagtttgctctcaccaggtacagtcccgaccttattttctttttttcctttcacttattcctctgtcagtgtatttgtgacttcagtgggtgctgctcttcagggatataaggggttgagtattgctgtgttggttttgtttcattaatattaggtcataaacaccttttaagcagagatctccactcactgagggctgacagctcaagtggtttagaatgaccggagtgtattactatggcccttttttatgcattggggtttaggcggatggatwcagaagtcagttgtgctgtgaaatgagagtatggatttggtagctgaaaaccattacacgggtgaaatggatctctgaggcgtttagcttgatgtttaggaaacatcactaatgggaaaatcaatatagctcctatgaaatgagtttaagaactgtctaattaatagcctctaatacaataataaatgaagaattacaatctaatgtacatcttcctatagggtatttgctgcattgatacctgctcatgttgtttaacatttcattaattgctcagcagaggccacaatataattgaca

SEQ ID NO: 5871 - DNA, 600 bp, Chicken  19866894109706_1
catagagaagaaagtcccggactctgggaggagggaaagtttgccggaggagagcgcacgcttggctgaggacggagctccccgcagggttttacagctgccctcacccaccgccgccatgaacatcttccgcatcctgggggacgtctcccacttgttggccatcatcatcctgctggtgaagatccacaggtccaagtcctgtgctggtgagtgctccctgggcaaggaggggatcctactcctgggctcttcggaggcatcaggctcctctttcttcctcccttgtgctgcctcccsgtttcttctccagcttctctcccttccctttttggtacgccttggtggttttttgccaaacccatcactgggctttgctgtggtttgcagaagactccacagcctggaggatggcttcctcgccaggagggaggaggatgtgctggaaggatgtgatgtggcatggcacacggtcacrtggcaggtgtctgggtgacagcgaagcagaggggagaagggtgataagatggaaagcaagcatgaggaggtttggtggcaccaaaagcaatgacctctggtgaaaagatgcggagagaatgc

SEQ ID NO: 5872 - DNA, 600 bp, Chicken  19866894109706_2
gtgaagatccacaggtccaagtcctgtgctggtgagtgctccctgggcaaggaggggatcctactcctgggctcttcggaggcatcaggctcctctttcttcctcccttgtgctgcctcccsgtttcttctccagcttctctcccttccctttttggtacgccttggtggttttttgccaaacccatcactgggctttgctgtggtttgcagaagactccacagcctggaggatggcttcctcgccaggagggaggaggatgtgctggaaggatgtgatgtggcatggcacacggtcacrtggcaggtgtctgggtgacagcgaagcagaggggagaagggtgataagatggaaagcaagcatgaggaggtttggtggcaccaaaagcaatgacctctggtgaaaagatgcggagagaatgctgcttcaggctagaggccctgtttgggcaaggaatgcagagcagttgcttcccacggagctggaggcttgcaggtagatgagaggatgggttcagctgtgttcacccatgtttgccgccccaccagtggtgacagcagcaccaacatccgtgggccagcccccagtcccacagcaatt

SEQ ID NO: 5873 - DNA, 600 bp, Chicken  19866894109709_1
ctgtagtcagaaaggtctatgaaggagcattaagctgagcataacggaaatattttagtgaggaaatcctggtggtaggtggacagtttggatgattttggaggacttttccaaccttggtgattctatgattctatgataatgatctcaatgatcctgtgactccctgcaggagagccctggtgtgtttgattcacttcactttctgcagtaatgcatgaggaaagctagcagcaagtacagttctgtcacaaactgaaaggcttcttcttttctatacactgaagtgcatcctggtcrcattttgtagtaaacatcacatttcgtatgtaatgactgggaagaattttaagcccgaaaaacgttaataggaacacagaaagttggagaaattttacagtatcacttttttaacattaatggagattttcaagatctaattaaaggataaaacttctctgtatattattaaagacatagtcaagattgttagaacattttcaattactttaatctcagggcttaataagcaacccatagccatcataggtagatatagcgaacacaaagcaggattaaataagaaaggaaagaaataaa

SEQ ID NO: 5874 - DNA, 600 bp, Chicken  19866894109709_2
ggccactagcatattcactttgatgatccaagaacatcttgagagatttcaagctccaaaggcactgactgaagcaagagtgagcacacagcttcatacagactgtttaaaagagaacagcacttctgctagttgaagattagcaagcaaattgttcaatgcttggagatctgttttacccacaactggcaaaacagccaactaacaaaaacaatataagcatatctgcctttggggcactcttcgtagcataactggcagagcagcagcactcaagacaatgtttttgctataccttarsaggcctacagcttttcagtcaattcacacrtggcattggatacttgcagcacagctgatagcaaggaaaatcacccttaaccatttcagcattcagtrtctggmacaaaagacagattgattcaaaagcttcactgcagggagataaaaatgacatgaaatgaagtggtctcagtaaaggtgcaaaamccacccaaccagcccaggtaggcaagcattagaagaataagcaagtcgttagcagcagtgatgtttctggcccctgtaactgcctgcgggtgctgccatccagtgctacaa

SEQ ID NO: 5875 - DNA, 600 bp, Chicken  19866894109709_3
gccactagcatattcactttgatgatccaagaacatcttgagagatttcaagctccaaaggcactgactgaagcaagagtgagcacacagcttcatacagactgtttaaaagagaacagcacttctgctagttgaagattagcaagcaaattgttcaatgcttggagatctgttttacccacaactggcaaaacagccaactaacaaaaacaatataagcatatctgcctttggggcactcttcgtagcataactggcagagcagcagcactcaagacaatgtttttgctataccttarsaggcctacagcttttcagtcaattcacacrtggcattggatacttgcagcacagctgatagcaaggaaaatcacccttaaccatttcagcattcagtrtctggmacaaaagacagattgattcaaaagcttcactgcagggagataaaaatgacatgaaatgaagtggtctcagtaaaggtgcaaaamccacccaaccagcccaggtaggcaagcattagaagaataagcaagtcgttagcagcagtgatgtttctggcccctgtaactgcctgcgggtgctgccatccagtgctacaag

SEQ ID NO: 5876 - DNA, 600 bp, Chicken  19866894109709_4
gaacatcttgagagatttcaagctccaaaggcactgactgaagcaagagtgagcacacagcttcatacagactgtttaaaagagaacagcacttctgctagttgaagattagcaagcaaattgttcaatgcttggagatctgttttacccacaactggcaaaacagccaactaacaaaaacaatataagcatatctgcctttggggcactcttcgtagcataactggcagagcagcagcactcaagacaatgtttttgctataccttarsaggcctacagcttttcagtcaattcacacrtggcattggatacttgcagcacagctgatagcaaggaaaatcacccttaaccatttcagcattcagtrtctggmacaaaagacagattgattcaaaagcttcactgcagggagataaaaatgacatgaaatgaagtggtctcagtaaaggtgcaaaamccacccaaccagcccaggtaggcaagcattagaagaataagcaagtcgttagcagcagtgatgtttctggcccctgtaactgcctgcgggtgctgccatccagtgctacaagatttgaacacaagcacatcttttcaccttg

SEQ ID NO: 5877 - DNA, 600 bp, Chicken  19866894109709_5
agactgtttaaaagagaacagcacttctgctagttgaagattagcaagcaaattgttcaatgcttggagatctgttttacccacaactggcaaaacagccaactaacaaaaacaatataagcatatctgcctttggggcactcttcgtagcataactggcagagcagcagcactcaagacaatgtttttgctataccttarsaggcctacagcttttcagtcaattcacacrtggcattggatacttgcagcacagctgatagcaaggaaaatcacccttaaccatttcagcattcagtrtctggmacaaaagacagattgattcaaaagcttcactgcagggagataaaaatgacatgaaatgaagtggtctcagtaaaggtgcaaaamccacccaaccagcccaggtaggcaagcattagaagaataagcaagtcgttagcagcagtgatgtttctggcccctgtaactgcctgcgggtgctgccatccagtgctacaagatttgaacacaagcacatcttttcaccttggcctggtccaaaaagtcccttagcagccctggcatttctccactaaaactgctctgcctttttgctcc

SEQ ID NO: 5878 - DNA, 600 bp, Chicken  19866894109709_6
tttaaaagagaacagcacttctgctagttgaagattagcaagcaaattgttcaatgcttggagatctgttttacccacaactggcaaaacagccaactaacaaaaacaatataagcatatctgcctttggggcactcttcgtagcataactggcagagcagcagcactcaagacaatgtttttgctataccttarsaggcctacagcttttcagtcaattcacacrtggcattggatacttgcagcacagctgatagcaaggaaaatcacccttaaccatttcagcattcagtrtctggmacaaaagacagattgattcaaaagcttcactgcagggagataaaaatgacatgaaatgaagtggtctcagtaaaggtgcaaaamccacccaaccagcccaggtaggcaagcattagaagaataagcaagtcgttagcagcagtgatgtttctggcccctgtaactgcctgcgggtgctgccatccagtgctacaagatttgaacacaagcacatcttttcaccttggcctggtccaaaaagtcccttagcagccctggcatttctccactaaaactgctctgcctttttgctcccagccc

SEQ ID NO: 5879 - DNA, 600 bp, Chicken  19866894109709_7
caaaacagccaactaacaaaaacaatataagcatatctgcctttggggcactcttcgtagcataactggcagagcagcagcactcaagacaatgtttttgctataccttarsaggcctacagcttttcagtcaattcacacrtggcattggatacttgcagcacagctgatagcaaggaaaatcacccttaaccatttcagcattcagtrtctggmacaaaagacagattgattcaaaagcttcactgcagggagataaaaatgacatgaaatgaagtggtctcagtaaaggtgcaaaamccacccaaccagcccaggtaggcaagcattagaagaataagcaagtcgttagcagcagtgatgtttctggcccctgtaactgcctgcgggtgctgccatccagtgctacaagatttgaacacaagcacatcttttcaccttggcctggtccaaaaagtcccttagcagccctggcatttctccactaaaactgctctgcctttttgctcccagccccaccccccgttctgcaataaatctcaaaccatccaaataactgtaacgtcaaaatctttgttctgtgcagaaagcgttactggg

SEQ ID NO: 5880 - DNA, 600 bp, Chicken  19866894109711_1
tggactctcttccttctggtgtagggaaacgcactgctttgcaagttcttcctgatcgacctgatctaacttgaaataagccatttatattcctgcaaaggaataccaggttatccacatggccttttgcccaggcttaacataattcctttaagacaaactgcaaatgaatagttgtgcagttttcctgtgcaggcaagcccttaatctaattggagcatggaaaacagcatctgagaaggcaaaacagtgtgtagacttggggaatgagagtgggaggtaatgtaacgtggtgtctaytggggctgatggagagatctgaaaagawaagctaaaagtgattaaggtttttaaaatccaaactagcaaggattacagggatatgaaaaacagaacctgagcctgaacttttccatgttccgagaactgccatcttccttcctcttgttttgaaacggacggggttctgccaacgctaaacctgcagcatacgggcagtgctgcctctcagtattagctatttcaaaatatagctctcccttaataaggagcgctagcaacattgggcattcctcagatagctgaggccatggctgctta

SEQ ID NO: 5881 - DNA, 600 bp, Chicken  19866894109711_2
acgcactgctttgcaagttcttcctgatcgacctgatctaacttgaaataagccatttatattcctgcaaaggaataccaggttatccacatggccttttgcccaggcttaacataattcctttaagacaaactgcaaatgaatagttgtgcagttttcctgtgcaggcaagcccttaatctaattggagcatggaaaacagcatctgagaaggcaaaacagtgtgtagacttggggaatgagagtgggaggtaatgtaacgtggtgtctaytggggctgatggagagatctgaaaagawaagctaaaagtgattaaggtttttaaaatccaaactagcaaggattacagggatatgaaaaacagaacctgagcctgaacttttccatgttccgagaactgccatcttccttcctcttgttttgaaacggacggggttctgccaacgctaaacctgcagcatacgggcagtgctgcctctcagtattagctatttcaaaatatagctctcccttaataaggagcgctagcaacattgggcattcctcagatagctgaggccatggctgcttaacgtgaacacttttggcagctgcattat

SEQ ID NO: 5882 - DNA, 600 bp, Chicken  19866894109714_1
cagtgcttgcgttggataaacccagtagtgtctgaattaacacccagcgtgcttgtcaccagtattttgcaacaagtgatgaaattctgctgagagcagatactgctgacttcagtgctttggcagatgcagatcacgtttaacatgtgatatagagctgcagtcacgtactcatgaagggttcgctaactgtgctgaaaacagatcactacagcctttcccttaacatactttcttctcttgggacatagatttccagtgagctgaagggagttaaaatgactgattttcaaataaacrgcttatttatttgctatccatgttgaaataacatttgatagtggtgggatcgtagttcattgcaacaagctttcatggagatctcggggcaaagtgttttctttctcaaaggagcaaacattttcttgtgtttaactcaaattaccatttgtaatctataaatacatgaaggagctaagagtgattgctatttacaggtagtgaaaatactaacttaatccaggatttcaccctgcctctcttatagggttgatcctgacagccctctgcatagtgatcttcaggtcttaaaagaaaaag

SEQ ID NO: 5883 - DNA, 600 bp, Chicken  19866894109725_1
ctagcattgggtagtatctcttgtgtacgctgtgtggttacttatggggtgtgcaaggcacagggacactagttcttggctgcactctgcactgtggagacaagatattctagggcaaagtacattcaatagagatagagctggtctcagaaattatgtaacacaaatacctagtacacccattgattttaaatgatctttcaaagttacattctttgtgtgttctgtactgttctaatgaacttgagaatgacttgtattggaagaaaagcatcttcagaatgaagtcatggaaggccrtgtaccacaaagaaatggtacccacagcatttcaagtttctcatagtaataattttattaaatcttttaatttgggcactattttacatactgtgctttacacattagtgttgacaggtagaaaagcaggcttatgttgcagtcacagaaagagaayttgaattatttacaaggggaaagttttttttagtctgggaatcatattcaaatraggaaaattaaaaatctgaactactgcacagagcaaaggctrtaaacctaagatcttccatccctattttttatgtggctaaaggacat

SEQ ID NO: 5884 - DNA, 600 bp, Chicken  19866894109725_2
gtaacacaaatacctagtacacccattgattttaaatgatctttcaaagttacattctttgtgtgttctgtactgttctaatgaacttgagaatgacttgtattggaagaaaagcatcttcagaatgaagtcatggaaggccrtgtaccacaaagaaatggtacccacagcatttcaagtttctcatagtaataattttattaaatcttttaatttgggcactattttacatactgtgctttacacattagtgttgacaggtagaaaagcaggcttatgttgcagtcacagaaagagaayttgaattatttacaaggggaaagttttttttagtctgggaatcatattcaaatraggaaaattaaaaatctgaactactgcacagagcaaaggctrtaaacctaagatcttccatccctattttttatgtggctaaaggacatttcttattcagtagatcacaaaaataattcctacacaagagcatgcaggaggacttgttttccctctgctttggctctcttagcattaatatacactaaatacatgttttgatacaaaaactttacttgctctatgaattagttatcactgtcctat

SEQ ID NO: 5885 - DNA, 600 bp, Chicken  19866894109725_3
ttctttgtgtgttctgtactgttctaatgaacttgagaatgacttgtattggaagaaaagcatcttcagaatgaagtcatggaaggccrtgtaccacaaagaaatggtacccacagcatttcaagtttctcatagtaataattttattaaatcttttaatttgggcactattttacatactgtgctttacacattagtgttgacaggtagaaaagcaggcttatgttgcagtcacagaaagagaayttgaattatttacaaggggaaagttttttttagtctgggaatcatattcaaatraggaaaattaaaaatctgaactactgcacagagcaaaggctrtaaacctaagatcttccatccctattttttatgtggctaaaggacatttcttattcagtagatcacaaaaataattcctacacaagagcatgcaggaggacttgttttccctctgctttggctctcttagcattaatatacactaaatacatgttttgatacaaaaactttacttgctctatgaattagttatcactgtcctatttttggcacataatagctttcatgcttctgctgcttgggtgcagtattactgca

SEQ ID NO: 5886 - DNA, 600 bp, Chicken  19866894109725_4
cttgtattggaagaaaagcatcttcagaatgaagtcatggaaggccrtgtaccacaaagaaatggtacccacagcatttcaagtttctcatagtaataattttattaaatcttttaatttgggcactattttacatactgtgctttacacattagtgttgacaggtagaaaagcaggcttatgttgcagtcacagaaagagaayttgaattatttacaaggggaaagttttttttagtctgggaatcatattcaaatraggaaaattaaaaatctgaactactgcacagagcaaaggctrtaaacctaagatcttccatccctattttttatgtggctaaaggacatttcttattcagtagatcacaaaaataattcctacacaagagcatgcaggaggacttgttttccctctgctttggctctcttagcattaatatacactaaatacatgttttgatacaaaaactttacttgctctatgaattagttatcactgtcctatttttggcacataatagctttcatgcttctgctgcttgggtgcagtattactgcacttctttagtcttcattttagagcttgcttcagcataaacta

SEQ ID NO: 5887 - DNA, 600 bp, Chicken  19866894109736_1
tttctgtggagatcccagttcagcttacagcataaacaagtgtttactaacccaccactaataacagcttcttcctaagtcagtgccttttgttctaacgctttctctttttagcagttagcataacctttggtctcaagaggaaccggatcaatagtaccaacatgaactaatccttgctgaagtgcttctttctattctgtactttgttaagctaagaaagcaagaattgcttcagctctcaatttatgtgcttaaaatgatacatcttaagttaaactaaaacattctctctctctytttttttttttttaaagctgagcaaactcagtgaacgaggaaacttttgggaccaatataaggatttctgtactcagaaactatgtgtacctagtttttgtaccagtaatagttcgctgactaaaatatctcaacaaaaccttctgatatcacttccgcagattgtaaaaattcaaaaactgagtatatgataacaggaatctaaattccctgaatttaatcctaatccagatttattattcagccactgtgtgtattaaaagcacaatggatacagaaaagatgcgtcaacttcttatt

SEQ ID NO: 5888 - DNA, 600 bp, Chicken  19866894109738_1
tacatttcagcttctttttatttgcctttcaaccttaagtcctttgaggcttttatgttcgagctttcaggcttctctttgcaatcactggggctaaaagcttcttctcgtttccttccaagcgcctcttactctaatcatgtgaatccaggaacttagattttatgggaaaataccaactgctgcaaatctcattatgaagttgcaagagtcgtaggaagtcagggcgctgtgctgcagtttgaaacgagagactgatctgctttgactgggaggagggggatacagccctctgatgcrtggggctgtatgcccgccagcagccccacagggagttggtgctgtcctggtggggacagaggtgctgctggggtgagcagagcagggggtccacrtggtgtctgtgcccatctgcgcacccagatgtgtggctttgcaggttgctggtctcactgttcacgtgtttgctctttgcttccttacaagcaagctgtgacaggcagagcatgtcttctcctgggaaaaataaccctctggctccttaacaacaacaaaaataaagaacaaagtgccaaagagagcaagtcctcagtctgtgtt

SEQ ID NO: 5889 - DNA, 600 bp, Chicken  19866894109738_2
aaaagcttcttctcgtttccttccaagcgcctcttactctaatcatgtgaatccaggaacttagattttatgggaaaataccaactgctgcaaatctcattatgaagttgcaagagtcgtaggaagtcagggcgctgtgctgcagtttgaaacgagagactgatctgctttgactgggaggagggggatacagccctctgatgcrtggggctgtatgcccgccagcagccccacagggagttggtgctgtcctggtggggacagaggtgctgctggggtgagcagagcagggggtccacrtggtgtctgtgcccatctgcgcacccagatgtgtggctttgcaggttgctggtctcactgttcacgtgtttgctctttgcttccttacaagcaagctgtgacaggcagagcatgtcttctcctgggaaaaataaccctctggctccttaacaacaacaaaaataaagaacaaagtgccaaagagagcaagtcctcagtctgtgtttgtctaaaactcttggcaggtgaaaaactcgacagactgagcaaccctcggagcatcaaacctgcaggaccgaagctgggcgctgccatgtccgg

SEQ ID NO: 5890 - DNA, 600 bp, Chicken  19866894109738_3
cgtgtaagtgctgctgtgtgcactgtgcagccaggtggtttcctgccagcaacacaagttagaagctgtagcggaatccttgagtaccttttttactcttggttttgttttgttgttttttttatgggggtgcttttttgctaagaggagggccactgaggtgggcagagggctgggacaccccatcccataaggaaaggttgagggaactgggcttgttcagcttggagaagagaaggctgcggggagacctcattgtggccttccagtacttaaagagagcatttaaacaggagggaraatggctgtttatgagggtgggtagtgataggacaaggrggaatggttttaaactgagacaggggaggtttaggttggatattaggaagaagtttttcacccagagggtggtgacgcactgaacaggttgcccaaggaggctgtggatgccccatccctgcaggcattcmaggccaggctggatgtggctctgggcagcctgggctgctggttggtgaccctgcacatagcagggggttggaactggatgagcattgcggtccttttcaacccaggccattgtatgattgtatgactaaa

SEQ ID NO: 5891 - DNA, 600 bp, Chicken  19866894109738_4
ttcctgccagcaacacaagttagaagctgtagcggaatccttgagtaccttttttactcttggttttgttttgttgttttttttatgggggtgcttttttgctaagaggagggccactgaggtgggcagagggctgggacaccccatcccataaggaaaggttgagggaactgggcttgttcagcttggagaagagaaggctgcggggagacctcattgtggccttccagtacttaaagagagcatttaaacaggagggaraatggctgtttatgagggtgggtagtgataggacaaggrggaatggttttaaactgagacaggggaggtttaggttggatattaggaagaagtttttcacccagagggtggtgacgcactgaacaggttgcccaaggaggctgtggatgccccatccctgcaggcattcmaggccaggctggatgtggctctgggcagcctgggctgctggttggtgaccctgcacatagcagggggttggaactggatgagcattgcggtccttttcaacccaggccattgtatgattgtatgactaaagctggatgtgaggacagtgaggactgccccttctaaggg

SEQ ID NO: 5892 - DNA, 600 bp, Chicken  19866894109738_5
ggctgggacaccccatcccataaggaaaggttgagggaactgggcttgttcagcttggagaagagaaggctgcggggagacctcattgtggccttccagtacttaaagagagcatttaaacaggagggaraatggctgtttatgagggtgggtagtgataggacaaggrggaatggttttaaactgagacaggggaggtttaggttggatattaggaagaagtttttcacccagagggtggtgacgcactgaacaggttgcccaaggaggctgtggatgccccatccctgcaggcattcmaggccaggctggatgtggctctgggcagcctgggctgctggttggtgaccctgcacatagcagggggttggaactggatgagcattgcggtccttttcaacccaggccattgtatgattgtatgactaaagctggatgtgaggacagtgaggactgccccttctaaggggatcttgcagccaaatgcaggtgatttcactgaacagccctgccctgcttatcacaggaatagcaccgtgctctggcaatccctcagtgcctcattgagggaggaccactgtcagggtcaagcagaagagc

SEQ ID NO: 5893 - DNA, 600 bp, Chicken  19866894109742_1
tgctttggcagaaggaggatatgatgaatcccactgagttttacgggagctttcaggctcacagaggaagccagaaatgttttaaagatctgcctactgcttttgtactcttggaggatgggtgctttatcatttaactgttttctttactcacttcagagcagacacacacacacacagctgcatttttctgtttccatctttcctgatagaggaccaacactttgctcttcctggccttctgccttccaaatccaaccagactaattggaatcagcattttgggaggccttcaggagrgctgtatggtcagcaatgctccatacagcagcttcactgcaggagtgaaagtcctgacagtgccttcatataccttttccattcttgaactccagctaggagaaaaaaacaattaatccagagtacttcttacatattgtgattttggattatggtacaagatttcagtactgacagttcaacaacagtttatttgatttaccaaaacattatatgctgaacattctctttcattcctaacatactacagcaggaaacctacagattctcatatctcttatatatatttaaagagraaaa

SEQ ID NO: 5894 - DNA, 533 bp, Chicken  19866894109742_2
gagrgctgtatggtcagcaatgctccatacagcagcttcactgcaggagtgaaagtcctgacagtgccttcatataccttttccattcttgaactccagctaggagaaaaaaacaattaatccagagtacttcttacatattgtgattttggattatggtacaagatttcagtactgacagttcaacaacagtttatttgatttaccaaaacattatatgctgaacattctctttcattcctaacatactacagcaggaaacctacagattctcatatctcttatatatatttaaagagraaaaggtgggaagcacctctagctgccagcgcacacagacaagtgcagacaaatgtatatatccagtcgcaaatatttttatatcctgaaaaatttcatgactgtgcatagttccatacattacagtgctcctgtaactgcattaatgaattactggcttttgtgttcttatcactgtatctccattaggttcattcattctgacactgtctcactgtattgtagctacacag

SEQ ID NO: 5895 - DNA, 600 bp, Chicken  19866894109745_1
agagttcagcagtgattaattccataccttttaatatttcccttactagtcaacagtaagtcaggcagatctctggctactgtaaattttcattttctgttctcatactcatattttttttttcctatgactttgtattaactcttaatggactttgctatcatccattttgccatctagttctgatagtaagatggctttcatcatgaatttgaaggaaaattaatgacattaacgagtgtgaaagtaatctttcaaaattattgttttaggatgtctggaaacttcagagaaacaatrcttggttaggatatgcctgccctgccctcacaaagctttccttgcaggcatgaggctagaaaatttgtgaggaacgttttattctgtataatttgaacactgtataaattgagcacgtcctgtggcttacctgaaacaatcagtgtgtttggccaggtgctgaacttggaactcttggtttggataagctaggacattgtaatctayttctyttctgcagatgcacacacartcctgttgttactgtggggcctaatttttcrggccgttctccagacttcaaattgcagtacataaacc

SEQ ID NO: 5896 - DNA, 600 bp, Chicken  19866894109745_2
gaatttgaaggaaaattaatgacattaacgagtgtgaaagtaatctttcaaaattattgttttaggatgtctggaaacttcagagaaacaatrcttggttaggatatgcctgccctgccctcacaaagctttccttgcaggcatgaggctagaaaatttgtgaggaacgttttattctgtataatttgaacactgtataaattgagcacgtcctgtggcttacctgaaacaatcagtgtgtttggccaggtgctgaacttggaactcttggtttggataagctaggacattgtaatctayttctyttctgcagatgcacacacartcctgttgttactgtggggcctaatttttcrggccgttctccagacttcaaattgcagtacataaaccgagggggcacaaaatcatcttggttgagaaataacactatatttgttagaatatactgcttagttagctattaatgctaacaaaaacctaattgctttggggtgatttttcagctgtactgaagaaaggaagaaaagttatggttacaaacagtttgacttgactttcactgggttttcatcatgtgaagttaatgactattttaat

SEQ ID NO: 5897 - DNA, 600 bp, Chicken  19866894109745_3
tgaaggaaaattaatgacattaacgagtgtgaaagtaatctttcaaaattattgttttaggatgtctggaaacttcagagaaacaatrcttggttaggatatgcctgccctgccctcacaaagctttccttgcaggcatgaggctagaaaatttgtgaggaacgttttattctgtataatttgaacactgtataaattgagcacgtcctgtggcttacctgaaacaatcagtgtgtttggccaggtgctgaacttggaactcttggtttggataagctaggacattgtaatctayttctyttctgcagatgcacacacartcctgttgttactgtggggcctaatttttcrggccgttctccagacttcaaattgcagtacataaaccgagggggcacaaaatcatcttggttgagaaataacactatatttgttagaatatactgcttagttagctattaatgctaacaaaaacctaattgctttggggtgatttttcagctgtactgaagaaaggaagaaaagttatggttacaaacagtttgacttgactttcactgggttttcatcatgtgaagttaatgactattttaattgaat

SEQ ID NO: 5898 - DNA, 600 bp, Chicken  19866894109745_4
taacgagtgtgaaagtaatctttcaaaattattgttttaggatgtctggaaacttcagagaaacaatrcttggttaggatatgcctgccctgccctcacaaagctttccttgcaggcatgaggctagaaaatttgtgaggaacgttttattctgtataatttgaacactgtataaattgagcacgtcctgtggcttacctgaaacaatcagtgtgtttggccaggtgctgaacttggaactcttggtttggataagctaggacattgtaatctayttctyttctgcagatgcacacacartcctgttgttactgtggggcctaatttttcrggccgttctccagacttcaaattgcagtacataaaccgagggggcacaaaatcatcttggttgagaaataacactatatttgttagaatatactgcttagttagctattaatgctaacaaaaacctaattgctttggggtgatttttcagctgtactgaagaaaggaagaaaagttatggttacaaacagtttgacttgactttcactgggttttcatcatgtgaagttaatgactattttaattgaatgtcccataatgtatatttca

SEQ ID NO: 5899 - DNA, 600 bp, Chicken  19866894109745_5
ttgttttaggatgtctggaaacttcagagaaacaatrcttggttaggatatgcctgccctgccctcacaaagctttccttgcaggcatgaggctagaaaatttgtgaggaacgttttattctgtataatttgaacactgtataaattgagcacgtcctgtggcttacctgaaacaatcagtgtgtttggccaggtgctgaacttggaactcttggtttggataagctaggacattgtaatctayttctyttctgcagatgcacacacartcctgttgttactgtggggcctaatttttcrggccgttctccagacttcaaattgcagtacataaaccgagggggcacaaaatcatcttggttgagaaataacactatatttgttagaatatactgcttagttagctattaatgctaacaaaaacctaattgctttggggtgatttttcagctgtactgaagaaaggaagaaaagttatggttacaaacagtttgacttgactttcactgggttttcatcatgtgaagttaatgactattttaattgaatgtcccataatgtatatttcagttgttatataagacttaatgtatattttct

SEQ ID NO: 5900 - DNA, 600 bp, Chicken  19866894109746_1
cccacaaacacggctgcaaggagaccttgggctcatttctctgttgcgctctttagctttttgcagctgtgaagagcaagtgaaatatgacaataaaggccagttctgagatgttttagatccagtgtaatacctttggagacctgggttctggcactacttctgctcctctcacctcctctccatgagcccctggcagtgctgacggtttgtaacgccgccattttgagagttgcgcagtcctccccaagtccctttcctaggcatttatagtatggattgctcagttacagttacacraatatactgggaagcactttaaatgcattttccaaagaaaactacctcttctttgttgcttggagctcactttttctctcagaagtttttcagtttctctgtgaaacaccagcttcctccgctcaggctgaggccttggcagctggcgcagggcacctcaggaggctgtttgtgctgcttgctctaacggacagctcgragcacagccacctgtgcaccggaaaatgccagtggtgctgcaaaactattgtcaagaaacaactagatctagaagtattttaagaatgaggaccaacagat

SEQ ID NO: 5901 - DNA, 446 bp, Chicken  19866894109746_2
tgctgacggtttgtaacgccgccattttgagagttgcgcagtcctccccaagtccctttcctaggcatttatagtatggattgctcagttacagttacacraatatactgggaagcactttaaatgcattttccaaagaaaactacctcttctttgttgcttggagctcactttttctctcagaagtttttcagtttctctgtgaaacaccagcttcctccgctcaggctgaggccttggcagctggcgcagggcacctcaggaggctgtttgtgctgcttgctctaacggacagctcgragcacagccacctgtgcaccggaaaatgccagtggtgctgcaaaactattgtcaagaaacaactagatctagaagtattttaagaatgaggaccaacagattctgacatcccaaaactaagagggctgtgagggaagatgtaggga

SEQ ID NO: 5902 - DNA, 600 bp, Chicken  19866894109747_1
tgctggtggaagggcacacactgtggagctgtaccacttggcacagtaaggtgaaggtgactcctttcctctgcaccctgctgccttcaggttatgccaacctcttccatgctgaggttaaagcgttggcatcttgctttgcccattgggcttcactccatgtgtttcaagaggttgccctttctcctttgctgtgcgttgcatctctgatcactgttgctactaattgagcagagtcctattggagtagtgtagttgagagctccctgtgattctgcatgtggctgaccagttcttcaygtctgtcttattcctgcttctccccctgctgtactgtctgccctgttctgcctgtacttccttgctggatgtccacgtgttacccagccatacggcctctctccctggccctgagctcctggcctgtgggtagttcctgttattttttctgcagactgctggtgaaccactactttctatggctttagcgggttctggcagcagcactctggttttctggcactgaagaagtgctaggaccatctgctgctctctgcagtcaggagctgatattgcctctttgatacaacagactcctgc

SEQ ID NO: 5903 - DNA, 600 bp, Chicken  19866894109751_1
ccagttggcagcccaacccctggagatgctcccatctgatgagcttcccttaagtgttctgcatcttgtcaggctgaatgcatgttacccatgctgcctctcagctgcctccagagggcatcagaacctgccacattgctgctacctgacagaccaagcacagctccttcctttgctgcaagaccctttacaaggtttttggagcaaggattttggactcccagcaatagccaggagccagcgtcatctgtgccacacatatcatgctggtctatttcaaaatggcaacaaaaatgagtktgtgggagtaargtgcaggtgagctcttccagcacagatgctactccacgactggatattgagggctcttcccttttggacctggtgcacaatgaccccatagcctgggaccgttccttgtgagaaagcccttaagctgggctggaagcgagtgccctctcatggattccactgaaatgacaactkacttttacaaacatcatgtaatttggcagctgccttgagtctgaaggaaggaagacagcagctacgcaataaagggcaggctctgagaggctgccagacagcagagactctctg

SEQ ID NO: 5904 - DNA, 600 bp, Chicken  19866894109751_2
ccaacccctggagatgctcccatctgatgagcttcccttaagtgttctgcatcttgtcaggctgaatgcatgttacccatgctgcctctcagctgcctccagagggcatcagaacctgccacattgctgctacctgacagaccaagcacagctccttcctttgctgcaagaccctttacaaggtttttggagcaaggattttggactcccagcaatagccaggagccagcgtcatctgtgccacacatatcatgctggtctatttcaaaatggcaacaaaaatgagtktgtgggagtaargtgcaggtgagctcttccagcacagatgctactccacgactggatattgagggctcttcccttttggacctggtgcacaatgaccccatagcctgggaccgttccttgtgagaaagcccttaagctgggctggaagcgagtgccctctcatggattccactgaaatgacaactkacttttacaaacatcatgtaatttggcagctgccttgagtctgaaggaaggaagacagcagctacgcaataaagggcaggctctgagaggctgccagacagcagagactctctggagccagcagag

SEQ ID NO: 5905 - DNA, 600 bp, Chicken  19866894109751_3
tttacaaggtttttggagcaaggattttggactcccagcaatagccaggagccagcgtcatctgtgccacacatatcatgctggtctatttcaaaatggcaacaaaaatgagtktgtgggagtaargtgcaggtgagctcttccagcacagatgctactccacgactggatattgagggctcttcccttttggacctggtgcacaatgaccccatagcctgggaccgttccttgtgagaaagcccttaagctgggctggaagcgagtgccctctcatggattccactgaaatgacaactkacttttacaaacatcatgtaatttggcagctgccttgagtctgaaggaaggaagacagcagctacgcaataaagggcaggctctgagaggctgccagacagcagagactctctggagccagcagagctgtctgttcattgagaattacagagccaaccttttgcattaaaaatcctcaaagcagaacaataaacaacaggtagccacaactttcctttgctttcaagtgataaaactacagaaggataaggatgatcgcaagcagcaggaaagagaagcaagagagttacccacgttgtc

SEQ ID NO: 5906 - DNA, 600 bp, Chicken  19866894109754_1
agttattatagttaaaaattttcaagaaatgaagtttcaagagcagtatttaagtataataaatacaccattccagctatcacgtagctagaattatgatgccagttttttcaagaaataaagttgaatgagaataaaattttaatctcgcatgaaattttgatgttttgatgtttgaaatgatcctgaatcaaggcaagaagtttaaattataagatttcctatggaagtaaaatttatctcacaatgttttatctcaaaacaaccttacaatgattttctgttctgtcctgtccttaygtgttttctcttttttattattattatttttggagtttgtttatttagttagtttttattttacatttgggaaggaaagaagacaagaaagaagagagggaaaacaggaagcatggtaacaagaataaacaaaaaagaggaaaaaaagaggaaagagagagagaagtaatgattattgtcattgtcatttgtggtttaaaccaagtaagcagctaatcaccrcacagcttacatactcctctaccctcagctggatgagggggaaggcagaacttagaaaacttgtagtttcaaataaag

SEQ ID NO: 5907 - DNA, 600 bp, Chicken  19866894109754_2
tatggaagtaaaatttatctcacaatgttttatctcaaaacaaccttacaatgattttctgttctgtcctgtccttaygtgttttctcttttttattattattatttttggagtttgtttatttagttagtttttattttacatttgggaaggaaagaagacaagaaagaagagagggaaaacaggaagcatggtaacaagaataaacaaaaaagaggaaaaaaagaggaaagagagagagaagtaatgattattgtcattgtcatttgtggtttaaaccaagtaagcagctaatcaccrcacagcttacatactcctctaccctcagctggatgagggggaaggcagaacttagaaaacttgtagtttcaaataaagacatttaaataaagaaaataaataaataagtacaaggaaatatggaaacaagtgatgcacagcacagttgctcactagtaatcagtgagtgcccagccagttgatcccacctggtcacctcctccagttttattgctgagcacaacatcaaatgatatgaaatagccctttagtcagtctgaaacagctggttttgtccccactgagcttcatgtgcctact

SEQ ID NO: 5908 - DNA, 600 bp, Chicken  19866894109760_1
tcctgcccctctcctgatcagaacaacacctctttaattataatccaacaaattcctctcttctttacctgaaaagaatgggatttggtcacaaggaacaaatgcaaagacgtaagtctcttcatgggaaaggaagtctgtagagtgtcctgctgggagccctgctttgcctaaactctagcataatgcagtaagaagttaaggtgattagtgagcaaacagcacaagagtgctattaagcatgtcttggggctttgtggtcaagtgctctgtgttactgctggcactatgcattgcacragaggatgcttgtggcctcgctgcggcattggcactctgcctggcacagggcattggcactgaggtgacagctggcccacacagcactgggcgacaggtggaccttgggacaatcatgggcctggaaaaagtgtgtgtcagctatcagttagctgacagcattagcgtctgtgtccatgtgtgtgcacctgtggactttaggcattgagccagagcccagtgggctaaaaaaagcacctcartgtgtgaaggtgcttagaagcctacagtgcaatagcgattggatactgttccttaact

SEQ ID NO: 5909 - DNA, 600 bp, Chicken  19866894109760_2
tgtcttggggctttgtggtcaagtgctctgtgttactgctggcactatgcattgcacragaggatgcttgtggcctcgctgcggcattggcactctgcctggcacagggcattggcactgaggtgacagctggcccacacagcactgggcgacaggtggaccttgggacaatcatgggcctggaaaaagtgtgtgtcagctatcagttagctgacagcattagcgtctgtgtccatgtgtgtgcacctgtggactttaggcattgagccagagcccagtgggctaaaaaaagcacctcartgtgtgaaggtgcttagaagcctacagtgcaatagcgattggatactgttccttaactagggtgttcattttccattaggctggaagaactcagaggctacagacacctcgtgctgggcaacgctttgctgtgcaggaatgtacaaacccggcccagttcatgatagccttaaataactgggagctgcttttggtagaaaactctggagccatttcaacagcagcagcataggagaaaaatctgtgcagctgtttggggaatggctgagctagggcataaagctaaccacatcaactcct

SEQ ID NO: 5910 - DNA, 600 bp, Chicken  19866894109761_1
agcctcgcctgaacaaagccgatccagcagcacttagaaaaaaaaggagcaactctggtggctaagggaaaatgcttcagccattcttcacgcctggtagtctttagggaggttaaaagaaacagcttttgtcgactgctgcaggcacttggttactgtgttccctttctgcatctagggaggagctgtaaaaattgtggtcaaatccatatattatataaaataaaggagagaaaaaaatctgaaaagccaagaatggctggaagggttatcatgatgtcatcaacttgatttttggtrtaggaaagctgttgtttcaygtgtgagtgcagtcttcatgtaacttatagagtaaatagagaagaagaaatgccatcatttatcacctatcaagaatcagttatraatgatgcccaattaatcagcatttaaagcagtattctttgaagtaggaactgatttcagtaccaaaatccaataacagaagaattttaaatgtagtgcacggtgccttatcttctctcctcatatgcacgtgcgccggaatgcacatrtaatattaagctaattcaggtgtaaagctttgctctcaaaacagct

SEQ ID NO: 5911 - DNA, 600 bp, Chicken  19866894109761_2
gatccagcagcacttagaaaaaaaaggagcaactctggtggctaagggaaaatgcttcagccattcttcacgcctggtagtctttagggaggttaaaagaaacagcttttgtcgactgctgcaggcacttggttactgtgttccctttctgcatctagggaggagctgtaaaaattgtggtcaaatccatatattatataaaataaaggagagaaaaaaatctgaaaagccaagaatggctggaagggttatcatgatgtcatcaacttgatttttggtrtaggaaagctgttgtttcaygtgtgagtgcagtcttcatgtaacttatagagtaaatagagaagaagaaatgccatcatttatcacctatcaagaatcagttatraatgatgcccaattaatcagcatttaaagcagtattctttgaagtaggaactgatttcagtaccaaaatccaataacagaagaattttaaatgtagtgcacggtgccttatcttctctcctcatatgcacgtgcgccggaatgcacatrtaatattaagctaattcaggtgtaaagctttgctctcaaaacagctgaagcttcatgtcattgctt

SEQ ID NO: 5912 - DNA, 600 bp, Chicken  19866894109761_3
agggaggttaaaagaaacagcttttgtcgactgctgcaggcacttggttactgtgttccctttctgcatctagggaggagctgtaaaaattgtggtcaaatccatatattatataaaataaaggagagaaaaaaatctgaaaagccaagaatggctggaagggttatcatgatgtcatcaacttgatttttggtrtaggaaagctgttgtttcaygtgtgagtgcagtcttcatgtaacttatagagtaaatagagaagaagaaatgccatcatttatcacctatcaagaatcagttatraatgatgcccaattaatcagcatttaaagcagtattctttgaagtaggaactgatttcagtaccaaaatccaataacagaagaattttaaatgtagtgcacggtgccttatcttctctcctcatatgcacgtgcgccggaatgcacatrtaatattaagctaattcaggtgtaaagctttgctctcaaaacagctgaagcttcatgtcattgcttatatgcacaaacacacatatttctccatatgctggcaccatattggtgttatcaccgtagcatttcctcctcttcagatgatctt

SEQ ID NO: 5913 - DNA, 600 bp, Chicken  19866894109761_4
aatggctggaagggttatcatgatgtcatcaacttgatttttggtrtaggaaagctgttgtttcaygtgtgagtgcagtcttcatgtaacttatagagtaaatagagaagaagaaatgccatcatttatcacctatcaagaatcagttatraatgatgcccaattaatcagcatttaaagcagtattctttgaagtaggaactgatttcagtaccaaaatccaataacagaagaattttaaatgtagtgcacggtgccttatcttctctcctcatatgcacgtgcgccggaatgcacatrtaatattaagctaattcaggtgtaaagctttgctctcaaaacagctgaagcttcatgtcattgcttatatgcacaaacacacatatttctccatatgctggcaccatattggtgttatcaccgtagcatttcctcctcttcagatgatcttttgttaaaacatttatttttgtgaggcaaataaactatagtaaatgtaaaccaattatttaaccaaattactttgatcatgggaaactgacaattagcgttacagcttctcagcagtgaaatccacacaacagaggagactgygatatt

SEQ ID NO: 5914 - DNA, 593 bp, Chicken  19866894109761_5
cacatrtaatattaagctaattcaggtgtaaagctttgctctcaaaacagctgaagcttcatgtcattgcttatatgcacaaacacacatatttctccatatgctggcaccatattggtgttatcaccgtagcatttcctcctcttcagatgatcttttgttaaaacatttatttttgtgaggcaaataaactatagtaaatgtaaaccaattatttaaccaaattactttgatcatgggaaactgacaattagcgttacagcttctcagcagtgaaatccacacaacagaggagactgygatattctgtactgccatgcaagtcgatgtggtgcatttattttgtgtagcaagctgtgagagaggaggaggaaagggcaggagatgagtgaagtccattttgatgaactattttttaatatctgtgctttgtgctgtacattgtttagtttttctaattcattgctaatatattttgacagctgttcgcagaagcattgatgactggtgtcaacatttaaaacacgtacacaaaggcaccacctgatcagctaatcaatgaatgtgctagaagcctgccaaactaccacgtg

SEQ ID NO: 5915 - DNA, 600 bp, Chicken  19866894109765_1
attgctaaagattgggctgacagaggtgcctcggggagccgtgcagtgattcatctccagtgagtggctgaggacgtggatcagacagagcagtcacaagagctcttgggagtcttgtcttacaggagggcactgcgtctcttgggcagctccagatgatgagaatcacacaaggaccccaaatcccgtcaattaaagcttggtgtgaggcttcaggaaagtcaacacaccccaagcctagatgctgccttgccttgatttctcaagcttttaaacaagccctgcaatatcccctttgtmgggctttttcattaacatcaaagtgatttgagatcctaggaggaacagctttaaaaagggcacctgatttgtttaaacactgccaaaggcacacagagaacggacagcttagcagggaatcctgtgccagctcttccgtttgtatctcctacttgcccaaatttttgtgtagacccagcaagttttgtcctcattaaattgttattcagayttggtggaaaggcagaagcctccactgtacacagaagatgacacagctgagtgtggtycaattgctgtttattgacctgctggtgagcc

SEQ ID NO: 5916 - DNA, 600 bp, Chicken  19866894109765_2
ttcaggaaagtcaacacaccccaagcctagatgctgccttgccttgatttctcaagcttttaaacaagccctgcaatatcccctttgtmgggctttttcattaacatcaaagtgatttgagatcctaggaggaacagctttaaaaagggcacctgatttgtttaaacactgccaaaggcacacagagaacggacagcttagcagggaatcctgtgccagctcttccgtttgtatctcctacttgcccaaatttttgtgtagacccagcaagttttgtcctcattaaattgttattcagayttggtggaaaggcagaagcctccactgtacacagaagatgacacagctgagtgtggtycaattgctgtttattgacctgctggtgagcccaggagaagccaggggatggcactgtgaccccracactcctcttacctgcrggcaggtggtttttctgaatgccaggctctgaaattttccagcagccagactcctcatcccagacggactcgcacttgatcttctccagattgctgtagttgcagtccygctggatgagggactgcacctgatccagcagctgctggaagagcatcacgt

SEQ ID NO: 5917 - DNA, 600 bp, Chicken  19866894109765_3
tttaaacaagccctgcaatatcccctttgtmgggctttttcattaacatcaaagtgatttgagatcctaggaggaacagctttaaaaagggcacctgatttgtttaaacactgccaaaggcacacagagaacggacagcttagcagggaatcctgtgccagctcttccgtttgtatctcctacttgcccaaatttttgtgtagacccagcaagttttgtcctcattaaattgttattcagayttggtggaaaggcagaagcctccactgtacacagaagatgacacagctgagtgtggtycaattgctgtttattgacctgctggtgagcccaggagaagccaggggatggcactgtgaccccracactcctcttacctgcrggcaggtggtttttctgaatgccaggctctgaaattttccagcagccagactcctcatcccagacggactcgcacttgatcttctccagattgctgtagttgcagtccygctggatgagggactgcacctgatccagcagctgctggaagagcatcacgtctcactccagactgtggttagtgctgagataaccgatcttttccagctcaaactgtct

SEQ ID NO: 5918 - DNA, 600 bp, Chicken  19866894109765_4
tcctaggaggaacagctttaaaaagggcacctgatttgtttaaacactgccaaaggcacacagagaacggacagcttagcagggaatcctgtgccagctcttccgtttgtatctcctacttgcccaaatttttgtgtagacccagcaagttttgtcctcattaaattgttattcagayttggtggaaaggcagaagcctccactgtacacagaagatgacacagctgagtgtggtycaattgctgtttattgacctgctggtgagcccaggagaagccaggggatggcactgtgaccccracactcctcttacctgcrggcaggtggtttttctgaatgccaggctctgaaattttccagcagccagactcctcatcccagacggactcgcacttgatcttctccagattgctgtagttgcagtccygctggatgagggactgcacctgatccagcagctgctggaagagcatcacgtctcactccagactgtggttagtgctgagataaccgatcttttccagctcaaactgtctgcagattttttatttctgtcttagcagctcacagctgggtcataaaaacaacaaaatggctagt

SEQ ID NO: 5919 - DNA, 600 bp, Chicken  19866894109765_5
taaaaagggcacctgatttgtttaaacactgccaaaggcacacagagaacggacagcttagcagggaatcctgtgccagctcttccgtttgtatctcctacttgcccaaatttttgtgtagacccagcaagttttgtcctcattaaattgttattcagayttggtggaaaggcagaagcctccactgtacacagaagatgacacagctgagtgtggtycaattgctgtttattgacctgctggtgagcccaggagaagccaggggatggcactgtgaccccracactcctcttacctgcrggcaggtggtttttctgaatgccaggctctgaaattttccagcagccagactcctcatcccagacggactcgcacttgatcttctccagattgctgtagttgcagtccygctggatgagggactgcacctgatccagcagctgctggaagagcatcacgtctcactccagactgtggttagtgctgagataaccgatcttttccagctcaaactgtctgcagattttttatttctgtcttagcagctcacagctgggtcataaaaacaacaaaatggctagttggggttatgacagagaa

SEQ ID NO: 5920 - DNA, 600 bp, Chicken  19866894109765_6
atttttgtgtagacccagcaagttttgtcctcattaaattgttattcagayttggtggaaaggcagaagcctccactgtacacagaagatgacacagctgagtgtggtycaattgctgtttattgacctgctggtgagcccaggagaagccaggggatggcactgtgaccccracactcctcttacctgcrggcaggtggtttttctgaatgccaggctctgaaattttccagcagccagactcctcatcccagacggactcgcacttgatcttctccagattgctgtagttgcagtccygctggatgagggactgcacctgatccagcagctgctggaagagcatcacgtctcactccagactgtggttagtgctgagataaccgatcttttccagctcaaactgtctgcagattttttatttctgtcttagcagctcacagctgggtcataaaaacaacaaaatggctagttggggttatgacagagaaagaaatgggagttactacaagcacagatgttggttatacacagaaatgggaattggccagatggtttacgcagaggtgtatgataaaaccaaagcttggcaaaagtaga

SEQ ID NO: 5921 - DNA, 600 bp, Chicken  19866894109771_1
gcattggttgttaagtaagttgatagaaagtaaacagaaaagcaaacatcaatcttgttacaattcacaaatgaagagacaaattagcagtcaatacagcgctcagctctaattgtggattattccacacggctgctttccagccaactttcaccaggtgccgttcactttccactgtcttcatattctgatccatagctactgtatttctgggacaaagtgagtagtgaagaaagcaaaaaaattcctaacaagcaaagctgttggttcatacagtatgagttttggtaataaactgaraatggtgatatttcactatcaaattgatactccaaaatttcaatagcaaaaaaaargtaaatttaagtaaatatattaacaagaaatacatgaaggttattacaaataactacatctgacctgaattacaaataattaacatcrtcagtaattaytgataattgattacccaaatgcctcttcccctgtcagtattgaagaggcatttggataatgtccacaataatatgcttaaactttttgttagcactgtggtcaaacagttggatttgatgatctttgaaagmcttttccaactga

SEQ ID NO: 5922 - DNA, 600 bp, Chicken  19866894109771_2
gttacaattcacaaatgaagagacaaattagcagtcaatacagcgctcagctctaattgtggattattccacacggctgctttccagccaactttcaccaggtgccgttcactttccactgtcttcatattctgatccatagctactgtatttctgggacaaagtgagtagtgaagaaagcaaaaaaattcctaacaagcaaagctgttggttcatacagtatgagttttggtaataaactgaraatggtgatatttcactatcaaattgatactccaaaatttcaatagcaaaaaaaargtaaatttaagtaaatatattaacaagaaatacatgaaggttattacaaataactacatctgacctgaattacaaataattaacatcrtcagtaattaytgataattgattacccaaatgcctcttcccctgtcagtattgaagaggcatttggataatgtccacaataatatgcttaaactttttgttagcactgtggtcaaacagttggatttgatgatctttgaaagmcttttccaactgaggtctatcctwtgtaaaagatcttayagttttaaaacacctcaagcaacttgtgtt

SEQ ID NO: 5923 - DNA, 600 bp, Chicken  19866894109771_3
caactttcaccaggtgccgttcactttccactgtcttcatattctgatccatagctactgtatttctgggacaaagtgagtagtgaagaaagcaaaaaaattcctaacaagcaaagctgttggttcatacagtatgagttttggtaataaactgaraatggtgatatttcactatcaaattgatactccaaaatttcaatagcaaaaaaaargtaaatttaagtaaatatattaacaagaaatacatgaaggttattacaaataactacatctgacctgaattacaaataattaacatcrtcagtaattaytgataattgattacccaaatgcctcttcccctgtcagtattgaagaggcatttggataatgtccacaataatatgcttaaactttttgttagcactgtggtcaaacagttggatttgatgatctttgaaagmcttttccaactgaggtctatcctwtgtaaaagatcttayagttttaaaacacctcaagcaacttgtgttctgtccgcaaggttgtggtggcggtgggtcaggggctgtggagaaaatagcttttcattcagaagcttactgatagggcaaaaccagt

SEQ ID NO: 5924 - DNA, 600 bp, Chicken  19866894109771_4
aggtgccgttcactttccactgtcttcatattctgatccatagctactgtatttctgggacaaagtgagtagtgaagaaagcaaaaaaattcctaacaagcaaagctgttggttcatacagtatgagttttggtaataaactgaraatggtgatatttcactatcaaattgatactccaaaatttcaatagcaaaaaaaargtaaatttaagtaaatatattaacaagaaatacatgaaggttattacaaataactacatctgacctgaattacaaataattaacatcrtcagtaattaytgataattgattacccaaatgcctcttcccctgtcagtattgaagaggcatttggataatgtccacaataatatgcttaaactttttgttagcactgtggtcaaacagttggatttgatgatctttgaaagmcttttccaactgaggtctatcctwtgtaaaagatcttayagttttaaaacacctcaagcaacttgtgttctgtccgcaaggttgtggtggcggtgggtcaggggctgtggagaaaatagcttttcattcagaagcttactgatagggcaaaaccagtttacctagaac

SEQ ID NO: 5925 - DNA, 600 bp, Chicken  19866894109771_5
gtaataaactgaraatggtgatatttcactatcaaattgatactccaaaatttcaatagcaaaaaaaargtaaatttaagtaaatatattaacaagaaatacatgaaggttattacaaataactacatctgacctgaattacaaataattaacatcrtcagtaattaytgataattgattacccaaatgcctcttcccctgtcagtattgaagaggcatttggataatgtccacaataatatgcttaaactttttgttagcactgtggtcaaacagttggatttgatgatctttgaaagmcttttccaactgaggtctatcctwtgtaaaagatcttayagttttaaaacacctcaagcaacttgtgttctgtccgcaaggttgtggtggcggtgggtcaggggctgtggagaaaatagcttttcattcagaagcttactgatagggcaaaaccagtttacctagaactacctttctcaacatttttttcagcctctgttgaagacaaagggtttacaaatcctacttagtccatactctctagacttgtcctgtctttgcctggactaaaartataactccctragcttcagtatactt

SEQ ID NO: 5926 - DNA, 600 bp, Chicken  19866894109771_6
ttcactatcaaattgatactccaaaatttcaatagcaaaaaaaargtaaatttaagtaaatatattaacaagaaatacatgaaggttattacaaataactacatctgacctgaattacaaataattaacatcrtcagtaattaytgataattgattacccaaatgcctcttcccctgtcagtattgaagaggcatttggataatgtccacaataatatgcttaaactttttgttagcactgtggtcaaacagttggatttgatgatctttgaaagmcttttccaactgaggtctatcctwtgtaaaagatcttayagttttaaaacacctcaagcaacttgtgttctgtccgcaaggttgtggtggcggtgggtcaggggctgtggagaaaatagcttttcattcagaagcttactgatagggcaaaaccagtttacctagaactacctttctcaacatttttttcagcctctgttgaagacaaagggtttacaaatcctacttagtccatactctctagacttgtcctgtctttgcctggactaaaartataactccctragcttcagtatactttgacagctgtttaaagcctgaaac

SEQ ID NO: 5927 - DNA, 600 bp, Chicken  19866894109771_7
atactccaaaatttcaatagcaaaaaaaargtaaatttaagtaaatatattaacaagaaatacatgaaggttattacaaataactacatctgacctgaattacaaataattaacatcrtcagtaattaytgataattgattacccaaatgcctcttcccctgtcagtattgaagaggcatttggataatgtccacaataatatgcttaaactttttgttagcactgtggtcaaacagttggatttgatgatctttgaaagmcttttccaactgaggtctatcctwtgtaaaagatcttayagttttaaaacacctcaagcaacttgtgttctgtccgcaaggttgtggtggcggtgggtcaggggctgtggagaaaatagcttttcattcagaagcttactgatagggcaaaaccagtttacctagaactacctttctcaacatttttttcagcctctgttgaagacaaagggtttacaaatcctacttagtccatactctctagacttgtcctgtctttgcctggactaaaartataactccctragcttcagtatactttgacagctgtttaaagcctgaaacaagaaacaataagag

SEQ ID NO: 5928 - DNA, 600 bp, Chicken  19866894109771_8
cagttggatttgatgatctttgaaagmcttttccaactgaggtctatcctwtgtaaaagatcttayagttttaaaacacctcaagcaacttgtgttctgtccgcaaggttgtggtggcggtgggtcaggggctgtggagaaaatagcttttcattcagaagcttactgatagggcaaaaccagtttacctagaactacctttctcaacatttttttcagcctctgttgaagacaaagggtttacaaatcctacttagtccatactctctagacttgtcctgtctttgcctggactaaaartataactccctragcttcagtatactttgacagctgtttaaagcctgaaacaagaaacaataagagttagtggaagctttcatttagaccatcattttaccttgttccagggtgattttttaagttaaagcatgtggggagatgattcacagaaaaagctgcagtccttcattcacagttaaaccaatcttgtcacctgcacatcttgtgcaagaaggtgacatttccaaaaaaccacaaaattaaaaagtttcattttcttttcctggccatttcatcgctactgatttgttcaacagg

SEQ ID NO: 5929 - DNA, 600 bp, Chicken  19866894109771_9
atgatctttgaaagmcttttccaactgaggtctatcctwtgtaaaagatcttayagttttaaaacacctcaagcaacttgtgttctgtccgcaaggttgtggtggcggtgggtcaggggctgtggagaaaatagcttttcattcagaagcttactgatagggcaaaaccagtttacctagaactacctttctcaacatttttttcagcctctgttgaagacaaagggtttacaaatcctacttagtccatactctctagacttgtcctgtctttgcctggactaaaartataactccctragcttcagtatactttgacagctgtttaaagcctgaaacaagaaacaataagagttagtggaagctttcatttagaccatcattttaccttgttccagggtgattttttaagttaaagcatgtggggagatgattcacagaaaaagctgcagtccttcattcacagttaaaccaatcttgtcacctgcacatcttgtgcaagaaggtgacatttccaaaaaaccacaaaattaaaaagtttcattttcttttcctggccatttcatcgctactgatttgttcaacaggctaatttactgg

SEQ ID NO: 5930 - DNA, 600 bp, Chicken  19866894109777_1
gaggctgcccatggaggtggcagagtcaccatccctggaggtgttaaagggtagatctgagagacatggttagtgggcatagtggggatgggttaacagttggactagatgatctaaagagatcttttccaactttaatgattctataatattatggccaagcttaacccaaaccttaggaagcacagaaacgttccacctgactgtcacacacaaatgggcactgctagtatgggtcctagcaggtgggtctgcaataacagaataaagatctggctgtcgtgaatgggattaaccacrtcagcacaagctccacttgtttccactacgatctgctggtcattaagagtgaagasaacttgtttttagtccctggtctgctttggcagatcctccctttcttaataatcttaacccgactggctactgagagaacatgaaatatttcattaagatgcagttaataggcacagctgtagagtttttatcatttccatgctaaagcttttcttacgtggttgttttactgatgtcctgaacgctctgcagcgggtccgtcgtgtcagggcagcggaggatacagggagcaaagacgatggc

SEQ ID NO: 5931 - DNA, 600 bp, Chicken  19866894109777_2
ctgagagacatggttagtgggcatagtggggatgggttaacagttggactagatgatctaaagagatcttttccaactttaatgattctataatattatggccaagcttaacccaaaccttaggaagcacagaaacgttccacctgactgtcacacacaaatgggcactgctagtatgggtcctagcaggtgggtctgcaataacagaataaagatctggctgtcgtgaatgggattaaccacrtcagcacaagctccacttgtttccactacgatctgctggtcattaagagtgaagasaacttgtttttagtccctggtctgctttggcagatcctccctttcttaataatcttaacccgactggctactgagagaacatgaaatatttcattaagatgcagttaataggcacagctgtagagtttttatcatttccatgctaaagcttttcttacgtggttgttttactgatgtcctgaacgctctgcagcgggtccgtcgtgtcagggcagcggaggatacagggagcaaagacgatggccaaggcgttagctgacattcggttggtctcttcttggagagcgatcctgaagaaaa

SEQ ID NO: 5932 - DNA, 436 bp, Chicken  19866894109777_3
cagctgtagagtttttatcatttccatgctaaagcttttcttacgtggttgttttactgatgtcctgaacgctctgcagcgggtccgtcgtgtcagggcagcggaggatacagggagcaaagacgatggccaaggcgttagctgacattcggttggtctcttcttggagagcgatcctgaagaaaaaaaagattactacagaagccaggggtgaaggcggctccctcacctcttccactgcccagccctatgtacctgaccaggtggaagatgaggcgctccaaggtgctgagatgggtrcgcgagagctggtcgatgaccgagtaaactcctcgcaccgtctccctcctctcctgcaggcctgcaaagaacacaccagtcctgttaggggcactgctggattctacctccgtttcctatttaaagtgatgcattt

SEQ ID NO: 5933 - DNA, 599 bp, Chicken  19866894109779_1
  misc_feature (1)..(52): n is any nucleotide
nnnnnnnnnnnnnnnnnnnnnnnnnnnnnnnnnnnnnnnnnnnnnnnnnnnnccttacgttttgcttagaatgataacatcacaaaatctgtgagagaaagtagatagggaaaaattgagtcctcaacaaactttgtcctgcttttgaattcaacaaactaatcctggtcaggtaaaacctatgattcaattaatgactccttgatcctctgcaccctcctggaacgtttttttcttatgtcattcaactccctcttaagcctcttccattttccatcaacacttgatttagcaatcacycttcaacagcttttactcaaaacccatagtaggggttttaaccttgcctcatgggcaaaatgttggaacaggaataatgattaaagttattcctaataagaagagctcatctctgccctgtggtgcccccttagaatacaatgctaatgttagaatgctgtttcacatgtgtctctctaactcgagtgttctgagatagtctcctgtttattttctgttttataaaatgctcatttctttttatatttttcttttctctctttataaatatttgcttctctgatagtatttcctcaggg

SEQ ID NO: 5934 - DNA, 600 bp, Chicken  19866894109782_1
tgcctggggttgttgtgaccaaaatgcaggacccgacacttggccttattgaaactcataccgttaaccttggcccatcgatccagtctatccaggtccctctgtagtgcttttctaccctctggcagatcaacactccctcccagcttggtgtcatcttcaaacttactgagggtgcactcaatcccctcatcaagatcatcaatgaagatgttaaacagaagcagccccagcagtgagcctttgggaacaccactcgtgaccagccgccaactggattcaactccattgaccacgacyctttgggcccggccatccagccagtgcttcacgcagcggagtgtacacccatccagaccatgggcagccagcttcttcacgagaatgttatgggggacagtgtgaaaggccttactgatgtccaggtagatcacatcgacagcctgaccctcatccactaagcaggtcaccttgtcatagaatgaaatcaggtttgtcagaaaggatctataggggaggtgctccagctccctcatgatcttcgtggcactcctctggaccctctccaacagctctctgtctttcttgtactgggggctt

SEQ ID NO: 5935 - DNA, 599 bp, Chicken  19866894109794_1
  misc_feature (1)..(14): n is any nucleotide
nnnnnnnnnnnnnnctgagccttgcattgggttgcaagatccatggctgtatccaactctgtctctgcagctgtgtgaattttcacaggacgagcagccgagctgtaatggagcgggtgacacactgtggggaagggaaaaaagataaatcaaagaggagatcgtctcttgaaggtgacaagtgctggggtagtggtgggaggttgtcagaagcaattaggcacgagagcagcagtgcgggcgcacgtggggatgcagggacggcgcgggcggaggtgacgctgtgttcctaaacccgaktgaggtaacgggggaaatcctcctcttkcacttagtcacttctcactgctgagacgtttccagaattacacrtccgattgccagcagcctccccagaactttgcaaaacgctattttaacgagcgctctccacccccgagctcccagcaaggctttgggagaagaccttgaaatggagcacagcatatgtttccctgcttacgccgcggacagggtgtatttctggcaccattcaaygtcaaaacaccctcagtatttttagtagaattcctcagtaggcacgagcttcttgcaaacca

SEQ ID NO: 5936 - DNA, 600 bp, Chicken  19866894109794_2
gggttgcaagatccatggctgtatccaactctgtctctgcagctgtgtgaattttcacaggacgagcagccgagctgtaatggagcgggtgacacactgtggggaagggaaaaaagataaatcaaagaggagatcgtctcttgaaggtgacaagtgctggggtagtggtgggaggttgtcagaagcaattaggcacgagagcagcagtgcgggcgcacgtggggatgcagggacggcgcgggcggaggtgacgctgtgttcctaaacccgaktgaggtaacgggggaaatcctcctcttkcacttagtcacttctcactgctgagacgtttccagaattacacrtccgattgccagcagcctccccagaactttgcaaaacgctattttaacgagcgctctccacccccgagctcccagcaaggctttgggagaagaccttgaaatggagcacagcatatgtttccctgcttacgccgcggacagggtgtatttctggcaccattcaaygtcaaaacaccctcagtatttttagtagaattcctcagtaggcacgagcttcttgcaaaccaaygagaaacagagctcccttgcaaatatt

SEQ ID NO: 5937 - DNA, 600 bp, Chicken  19866894109794_3
gtgtgaattttcacaggacgagcagccgagctgtaatggagcgggtgacacactgtggggaagggaaaaaagataaatcaaagaggagatcgtctcttgaaggtgacaagtgctggggtagtggtgggaggttgtcagaagcaattaggcacgagagcagcagtgcgggcgcacgtggggatgcagggacggcgcgggcggaggtgacgctgtgttcctaaacccgaktgaggtaacgggggaaatcctcctcttkcacttagtcacttctcactgctgagacgtttccagaattacacrtccgattgccagcagcctccccagaactttgcaaaacgctattttaacgagcgctctccacccccgagctcccagcaaggctttgggagaagaccttgaaatggagcacagcatatgtttccctgcttacgccgcggacagggtgtatttctggcaccattcaaygtcaaaacaccctcagtatttttagtagaattcctcagtaggcacgagcttcttgcaaaccaaygagaaacagagctcccttgcaaatattcctgggattcctggaaagggtatcgggctcttgctttcctccca

SEQ ID NO: 5938 - DNA, 600 bp, Chicken  19866894109794_4
cgggcgcacgtggggatgcagggacggcgcgggcggaggtgacgctgtgttcctaaacccgaktgaggtaacgggggaaatcctcctcttkcacttagtcacttctcactgctgagacgtttccagaattacacrtccgattgccagcagcctccccagaactttgcaaaacgctattttaacgagcgctctccacccccgagctcccagcaaggctttgggagaagaccttgaaatggagcacagcatatgtttccctgcttacgccgcggacagggtgtatttctggcaccattcaaygtcaaaacaccctcagtatttttagtagaattcctcagtaggcacgagcttcttgcaaaccaaygagaaacagagctcccttgcaaatattcctgggattcctggaaagggtatcgggctcttgctttcctcccactgcaatggcgcaatcccactttaattaaagaaatgacgaacgtmgaaaggcactgagagcagctgacccaggggcaggctctgccatagagcagagcaagttgcttcaccccatgggttttcgcgctcttgttgtgctctgtccattagccgtgtggcaccaca

SEQ ID NO: 5939 - DNA, 600 bp, Chicken  19866894109794_5
gaggtaacgggggaaatcctcctcttkcacttagtcacttctcactgctgagacgtttccagaattacacrtccgattgccagcagcctccccagaactttgcaaaacgctattttaacgagcgctctccacccccgagctcccagcaaggctttgggagaagaccttgaaatggagcacagcatatgtttccctgcttacgccgcggacagggtgtatttctggcaccattcaaygtcaaaacaccctcagtatttttagtagaattcctcagtaggcacgagcttcttgcaaaccaaygagaaacagagctcccttgcaaatattcctgggattcctggaaagggtatcgggctcttgctttcctcccactgcaatggcgcaatcccactttaattaaagaaatgacgaacgtmgaaaggcactgagagcagctgacccaggggcaggctctgccatagagcagagcaagttgcttcaccccatgggttttcgcgctcttgttgtgctctgtccattagccgtgtggcaccacagacaagtggctttgagtggcttcttagggttttctgcagccagacagatcttaaatgcaaagat

SEQ ID NO: 5940 - DNA, 600 bp, Chicken  19866894109794_6
aacgagcgctctccacccccgagctcccagcaaggctttgggagaagaccttgaaatggagcacagcatatgtttccctgcttacgccgcggacagggtgtatttctggcaccattcaaygtcaaaacaccctcagtatttttagtagaattcctcagtaggcacgagcttcttgcaaaccaaygagaaacagagctcccttgcaaatattcctgggattcctggaaagggtatcgggctcttgctttcctcccactgcaatggcgcaatcccactttaattaaagaaatgacgaacgtmgaaaggcactgagagcagctgacccaggggcaggctctgccatagagcagagcaagttgcttcaccccatgggttttcgcgctcttgttgtgctctgtccattagccgtgtggcaccacagacaagtggctttgagtggcttcttagggttttctgcagccagacagatcttaaatgcaaagatttcccatttgcatgtgaccgagaggtctggatgcctctgagctggaatgcaaatatttttcagttcaacctctgtatccagctggggaggaagagcaaacaaacaagtaaacagat

SEQ ID NO: 5941 - DNA, 600 bp, Chicken  19866894109796_1
ctatcttcctcatacttttccctgctccagtgtgggtcagtcctatgggttgcagtcagtccttcagaattaacctactccagcatggggtcatacagaggtagaagtgaggttatttactccgccaagaagcccctcttttgaccttagtattcccactgctcgttctcactgttttttgttccttcctcctccccctgtgcagtgtttttttaccctcccctccccatgctgttccccagctgccccagggtggctgttgggcctggccctgccagaacaggctgtgtctgacacagrgtagcctggcctctcttcaggctgtagcctcccaagtgtcagcacctggacagatagctgtatgctttcccatatttgtatttaaattggtgtgttaaatttatattctcaaactcatattcattgactaaatataagggctggcataaggttctgtaaaaaattgaatttgatgggtaattgagttgttaatcagaacatgttctattaatttattttttttttatgattgcagtatttttatgaatgtacaaatatagaagaaataattcccaatattctataggtattttggtttta

SEQ ID NO: 5942 - DNA, 599 bp, Chicken  19866894109807_1
  misc_feature (1)..(73): n is any nucleotide
nnnnnnnnnnnnnnnnnnnnnnnnnnnnnnnnnnnnnnnnnnnnnnnnnnnnnnnnnnnnnnnnnnnnnnnnntgctcccagatgctgctatggagggtgccctgctaagtagtttgagattattttggaaaacttgagctgctgctgctcacagcatgtctgagtctctcttctggcatgagattctcacgctgtgctttctcagagcagcgagcgctatttcattgggtttctaggtgtactttgtagacttgggaagcctttgaatacagagcatttctccaaagcacagagctttrtgagagaatctctgcaagggagtgaaatattaattccagaactttgaaatcattaaaatgatttttttattagtcagaaaaaagaggtgtccacaggccttttttcttccttcctgtcatcttcttccatttttttttttaattgcataccatctggcaaatgaaggtttctgtagactgagtgttctggtagggagcgtgaagtggttttcaagttttcgatttttttttygttagcttcctttatgtaaaaggttggataataaacttttttgcttctactgctgcagcaggctttc

SEQ ID NO: 5943 - DNA, 600 bp, Chicken  19866894109807_2
tctaggtgtactttgtagacttgggaagcctttgaatacagagcatttctccaaagcacagagctttrtgagagaatctctgcaagggagtgaaatattaattccagaactttgaaatcattaaaatgatttttttattagtcagaaaaaagaggtgtccacaggccttttttcttccttcctgtcatcttcttccatttttttttttaattgcataccatctggcaaatgaaggtttctgtagactgagtgttctggtagggagcgtgaagtggttttcaagttttcgatttttttttygttagcttcctttatgtaaaaggttggataataaacttttttgcttctactgctgcagcaggctttcattcctcaaagttaatggttgctgttttattttttccagttccaaatgctgcttcatttatacagaaggtctgttttctatttgagtcatcttagatggcttaggtttgtgtgcttgtggccgacagttggcaagagggggatgcattccacgagtccatccctgagctcactgttggtaaacaggccccttagcctccaccagcgcattgggaggtatgagaagatatgcat

SEQ ID NO: 5944 - DNA, 600 bp, Chicken  19866894109807_3
tctactgctgcagcaggctttcattcctcaaagttaatggttgctgttttattttttccagttccaaatgctgcttcatttatacagaaggtctgttttctatttgagtcatcttagatggcttaggtttgtgtgcttgtggccgacagttggcaagagggggatgcattccacgagtccatccctgagctcactgttggtaaacaggccccttagcctccaccagcgcattgggaggtatgagaagatatgcatctgctggtgcgttgtaaagtcgttaaaaactctctggctccttgytgatacagtgtttggcaggttaagccctttgaggatttcgccatgagttcttaagcagctgcagtgggaaggctgcagaagatgatgtttcttgctgtctagtgttttttatcaagagttcatcaaggcctggaatgcgtggatttcacgagttcacttgtttatgcttttcctaaaggacatacgagtaagacaaaacaggcattacaaatgaatgttgttttttcttgaacaaacaagcaattttctttgcaatgctctcatgtaccttaggttggatattgatttttgactgtcttt

SEQ ID NO: 5945 - DNA, 600 bp, Chicken  19866894109810_1
gggcagcctgtgccagggcctcaccaccttctgagtaaagaatttcttcttaacatctaaaacatgcctcctgtcttttagtttaaaaccattccccctctttctgtcactatcagactgtgtaaaatgtcagtcctcttcctgtttataagctcccttcaagtactggaatgccacaatgaggtctccccagagccttcctttctccaagctaaacaagcccaactctcagcctttcttcatagccaaggtgctccagccctctgatcatctttgtggacctactccaacagcttcacrtccctcttgtactgggggccccaggcctggattcagtactccaggtggggccttataagggcagaatagagggggacaatctcttctctctctctgctggccactattctttggatgcagcccaggattccattggtcttctgggctgcaagcacacactgctggctcatgttaagttttccatccaccatgacccaaagtccttcttgacagggctgctctcaaggagttatctcaggctgtatacaaatctgggattgcctcagctcaagtgcaggaccttgaacgtggccttgttca

SEQ ID NO: 5946 - DNA, 551 bp, Chicken  19866894109810_2
cagcccaggattccattggtcttctgggctgcaagcacacactgctggctcatgttaagttttccatccaccatgacccaaagtccttcttgacagggctgctctcaaggagttatctcaggctgtatacaaatctgggattgcctcagctcaagtgcaggaccttgaacgtggccttgttcatcctcattagattctcatgggctcacttcaagcttgtcttcccctttctctcctcataaaaatatccctgttcttgtccataccttattttcttgttttccatccaaccgttcttaycacttgctctggtgaagctgtcccaagtcccctgggatctccattatcctgagggtctgttgtgtcccctggcatgtagtcctatgatagactggctgctctgggctgcttgcttacttggggtctgttctttctagagaaactgtttatacaaggcaattacttggcggactgatctcactagtgctgatcctggcatgtagtactcagtggtcagtcatacgacgagtatagctactacaagagccaat

SEQ ID NO: 5947 - DNA, 600 bp, Chicken  19866894109816_1
gccccgtgcgggacgggagcggcgggaccgggtcgggaccgcggggcgtgcgcggctctgccgttcgggagagccagcgctcgcagagagacgggacaaagagtcccttgtcgtgagctacgtatgcagtggtttgggtcgattgggcttttttttttttttcggttttttttttttttcctcccgtcaagcacttgtttaccctggcctgggatttccttgcacttgagaaaggcttgcgaggtgtgttttcctagtcagcctgaatttatgcgagctgggaatcgaaacgccagcagygctgccctaggaaactttcgctcgtttggctccgtcccttctggctcgttcccccgtctcagttcagcaccaccgcagccagacccaggagcaaggcttgtgccagaggaaatgcagcaccaagaacaccgctgcagtgcgtttcatcagcccagatgctgtataaattcttctgcaaaatatatatttacaattcgtacttaattctgttgcctcagtaatataaaatggttatgatgaggcggggggacgtttttattgagtgtatgaacttttgattgcacagcattcagccttgga

SEQ ID NO: 5948 - DNA, 600 bp, Chicken  19866894109816_2
gaaactttcgctcgtttggctccgtcccttctggctcgttcccccgtctcagttcagcaccaccgcagccagacccaggagcaaggcttgtgccagaggaaatgcagcaccaagaacaccgctgcagtgcgtttcatcagcccagatgctgtataaattcttctgcaaaatatatatttacaattcgtacttaattctgttgcctcagtaatataaaatggttatgatgaggcggggggacgtttttattgagtgtatgaacttttgattgcacagcattcagccttggactgacagcgkttcccaccacatgtgctatgtgctcactgtcttttttccatcacacgcccttcgcatgttaggtcttaagggcaagggttgttctttgcagccgacaggaacgttggagtttgaacgacatgcttttgcttttagtgtaagcggttaaatccaagaaaatgactaccttacacactataccagtgattaatggtaagagttaggaaagaaaactgacggtattctcagtacagtttaaaaagcagataatggtagtgccccagaagtactaatcctgaaatttaagagttagwatttaca

SEQ ID NO: 5949 - DNA, 600 bp, Chicken  19866894109816_3
acagcgkttcccaccacatgtgctatgtgctcactgtcttttttccatcacacgcccttcgcatgttaggtcttaagggcaagggttgttctttgcagccgacaggaacgttggagtttgaacgacatgcttttgcttttagtgtaagcggttaaatccaagaaaatgactaccttacacactataccagtgattaatggtaagagttaggaaagaaaactgacggtattctcagtacagtttaaaaagcagataatggtagtgccccagaagtactaatcctgaaatttaagagttagwatttacactcattgcatgaaaactaatggggaaatttggcagagataacagcttcctacagtgttttctgataaagtcagtaacaacattcttgctagtttcactgataagagaacacgtgaagaaatagcaccaatttctcaaagaaaggcaaatgaaagttgtagagaatggtggaaattcctttcacagtttcaccactgacttctctggggagaaggagcaaggagatgattttactcttcttaactaacgaagaacctctggagatctgaagtattttttttttttttctgtgta

SEQ ID NO: 5950 - DNA, 600 bp, Chicken  19866894109817_1
ctaattggaaagtgttggcaaacgaccaaaccccaacctgagtccaagcaggacatcccccatgggtgaaactgagctggacagagctgcagcagcaaagtaaaccggcgactgcatccttaaccacatgagcatttttaccagaccagccatgaaaatgttaaataactcaaacagctgaaggcgggtctgggtgaaacactgcattgttagctaaagcataggatgtcttagcttagaaatagcttcttcttatgcttcacttgagcctttagtcctcttttttctctgatatctacrcttaygctagaggtacagtatagatgagctacagagctaaaagaaaaaaacatctgatgagttaagaactttatatatcattttacttgcaaagtcaaatgtagttggaccaaatgttagaccaagtgtagttagtttagggcccatattaattaaacaaaaatagacccattctcacccagacaaaggagtggaagggcggactgatctgttgggtacccatagcacyctcctttagtgggactgcagtgaacacgagtggtcggcgccattygaggcaaacagctgctctctgttttc

SEQ ID NO: 5951 - DNA, 600 bp, Chicken  19866894109817_2
tggaaagtgttggcaaacgaccaaaccccaacctgagtccaagcaggacatcccccatgggtgaaactgagctggacagagctgcagcagcaaagtaaaccggcgactgcatccttaaccacatgagcatttttaccagaccagccatgaaaatgttaaataactcaaacagctgaaggcgggtctgggtgaaacactgcattgttagctaaagcataggatgtcttagcttagaaatagcttcttcttatgcttcacttgagcctttagtcctcttttttctctgatatctacrcttaygctagaggtacagtatagatgagctacagagctaaaagaaaaaaacatctgatgagttaagaactttatatatcattttacttgcaaagtcaaatgtagttggaccaaatgttagaccaagtgtagttagtttagggcccatattaattaaacaaaaatagacccattctcacccagacaaaggagtggaagggcggactgatctgttgggtacccatagcacyctcctttagtgggactgcagtgaacacgagtggtcggcgccattygaggcaaacagctgctctctgttttcatgga

SEQ ID NO: 5952 - DNA, 600 bp, Chicken  19866894109817_3
cttagcttagaaatagcttcttcttatgcttcacttgagcctttagtcctcttttttctctgatatctacrcttaygctagaggtacagtatagatgagctacagagctaaaagaaaaaaacatctgatgagttaagaactttatatatcattttacttgcaaagtcaaatgtagttggaccaaatgttagaccaagtgtagttagtttagggcccatattaattaaacaaaaatagacccattctcacccagacaaaggagtggaagggcggactgatctgttgggtacccatagcacyctcctttagtgggactgcagtgaacacgagtggtcggcgccattygaggcaaacagctgctctctgttttcatggacaacagtgcaattgtttctccatgtgttcgactagctaaacagagccccagctttaatgcaacatgtttccctaatcatttgctaacagcaataaaggaagccagcttgtgtcatgaagaggaagaaaaaagcacggtgagaagggcaaggaagatgcctgcacaccacaaagcagccaggcaccaacactgcaatgggcacagtcagtgcaccatcagcgaag

SEQ ID NO: 5953 - DNA, 600 bp, Chicken  19866894109817_4
gtcctcttttttctctgatatctacrcttaygctagaggtacagtatagatgagctacagagctaaaagaaaaaaacatctgatgagttaagaactttatatatcattttacttgcaaagtcaaatgtagttggaccaaatgttagaccaagtgtagttagtttagggcccatattaattaaacaaaaatagacccattctcacccagacaaaggagtggaagggcggactgatctgttgggtacccatagcacyctcctttagtgggactgcagtgaacacgagtggtcggcgccattygaggcaaacagctgctctctgttttcatggacaacagtgcaattgtttctccatgtgttcgactagctaaacagagccccagctttaatgcaacatgtttccctaatcatttgctaacagcaataaaggaagccagcttgtgtcatgaagaggaagaaaaaagcacggtgagaagggcaaggaagatgcctgcacaccacaaagcagccaggcaccaacactgcaatgggcacagtcagtgcaccatcagcgaaggacctcttcaaggctccaacgggaatgggaattactctttactat

SEQ ID NO: 5954 - DNA, 600 bp, Chicken  19866894109817_5
aggagttaaaaaagccaacgttttgctgtactgagctcttattttatgtctttttatagacctatgaaaccttttctttcagaatttagccactctgcagacaccctgcagtactgggttaagttttcgagataagtccactcctcggagagccttggctacctaggagtgacatgcaagatcctaagaaggctccagcaagggtaagatcacagctgttctggctggcactaaatctcaccattaaatgggctatagaccctgctggaatttgaaagctgtatcaaaacacaagcacarcactgtttcactgtgcagctgaaaccaaggctgctttctctctgtctgaatggctacagctgtaagacttcagaaacaatcaagaaagcactttcatmaatgcatggtgttcagatatctggcttatcctgccataagactccacttactcaaaaaaagggttcttaaacctactttttattaatgtgactcaatttagaaaatacactgacctccaattatgagacaatacacaagtttttttttctgaattgtatttgctgttgatgaaaagaagccaatgtgcagatgcaaagtaca

SEQ ID NO: 5955 - DNA, 551 bp, Chicken  19866894109817_6
agacaccctgcagtactgggttaagttttcgagataagtccactcctcggagagccttggctacctaggagtgacatgcaagatcctaagaaggctccagcaagggtaagatcacagctgttctggctggcactaaatctcaccattaaatgggctatagaccctgctggaatttgaaagctgtatcaaaacacaagcacarcactgtttcactgtgcagctgaaaccaaggctgctttctctctgtctgaatggctacagctgtaagacttcagaaacaatcaagaaagcactttcatmaatgcatggtgttcagatatctggcttatcctgccataagactccacttactcaaaaaaagggttcttaaacctactttttattaatgtgactcaatttagaaaatacactgacctccaattatgagacaatacacaagtttttttttctgaattgtatttgctgttgatgaaaagaagccaatgtgcagatgcaaagtacagtaggtcacttgttgcccagcagaggtttaggtcaccagcctacgaaca

SEQ ID NO: 5956 - DNA, 600 bp, Chicken  19866894109820_1
tatcttcagtatactagtacttctcccctctttacttgagtaagagaattcatcatgcagggggaactacttcccacccttttcaacttacttctgtgattaagccagatctgtccataccagatcattgacatgggagtacaaacagggagcttgcaatgggcaagtgctgttactcagattttgagaggcatggtttgcctcagtaatgcttagggcatgctgcacagcaaactgtcatgtctcccatgctaaggcttcagatgagggtcctgtagtgacttaatgcatagggcgtayggataactgggagaaaaataagtggatgtaccagtgagacatagaaacctttatgaactgaatttacggtgggcacttttgaaaattcttgatgtctgaaaaacatttcacaaggttactggtgatttttttctttctgtgtaatctttttatcctggagaggttattttggacttttttttcttttctgcctggaaatgcaaatgtcttgtttcaacattaagattttgaagcctatgtccaaattatcctccgctaagtactcttcatgctttcagtcaggcatcttgccatattctt

SEQ ID NO: 5957 - DNA, 600 bp, Chicken  19866894109821_1
atcagatacacactttagaatggatggatacatccaacccactcaccaagttcatttatagaacctttattgaaatgaaaatgtgcaactgcaaatcatactctatagcaaggtgcctatcttttattgtaggagtgtttaaaaagtaaaattaaaaattacaacccaggccagcgatgccaggagatgaaattttaaagtaataatgtgaagggacatttctctgcatcttgggtttaaggttgttggtctgtctgaggaaataaaggcagtcatagagcaggcaaggagaaaggagcragggtatggccgtcctgcccatctcccagctgtagagatgttcagatttcagggggccgagaagagcgctggtcttttgtgagctaatttcctgatttcttaccccttgatgcctgaattaaggactttggtcacaagggaaatgaatttcaaatgatttggcattgtagagaagcctgcattaggcctgtctgccctgttccctttcctgtggagaagatactgtccatcttcttttttttttttaattttatttttcatatcaaaaatagaaatgaagagaaggtaacttttaaactt

SEQ ID NO: 5958 - DNA, 599 bp, Chicken  19866894109828_1
  misc_feature (1)..(134): n is any nucleotide
nnnnnnnnnnnnnnnnnnnnnnnnnnnnnnnnnnnnnnnnnnnnnnnnnnnnnnnnnnnnnnnnnnnnnnnnnnnnnnnnnnnnnnnnnnnnnnnnnnnnnnnnnnnnnnnnnnnnnnnnnnnnnnnnnnnnnntttttaatgactgcatctcacttggctaatcttggacactgaacacgttggtggtgcttgagttacataggagtaaagtgatgggaggcaaccacttacatggctgtgccccttgtccccttgaggatgacccccataggatccaaaggatctgttggatattagraaaaggtttctgccagaattcaagaagtgtttggacagcagtctycagaaagtggtttgagttttggttggtcctatgtggagccatgtgttggactcaatgatccttaggggtctcttcaagtcaggatattctatgggcagggcatcctggcctgcatcagaaataatgtggccagcatgaccagggaagagattgtcactttgtacatggtactggtgagactacatctcaagcattatgttcagttttgggacccttgctacaagaaggatcttgagttggttgagttgcttgag

SEQ ID NO: 5959 - DNA, 599 bp, Chicken  19866894109828_2
  misc_feature (1)..(89): n is any nucleotide
nnnnnnnnnnnnnnnnnnnnnnnnnnnnnnnnnnnnnnnnnnnnnnnnnnnnnnnnnnnnnnnnnnnnnnnnnnnnnnnnnnnnnnnnntttttaatgactgcatctcacttggctaatcttggacactgaacacgttggtggtgcttgagttacataggagtaaagtgatgggaggcaaccacttacatggctgtgccccttgtccccttgaggatgacccccataggatccaaaggatctgttggatattagraaaaggtttctgccagaattcaagaagtgtttggacagcagtctycagaaagtggtttgagttttggttggtcctatgtggagccatgtgttggactcaatgatccttaggggtctcttcaagtcaggatattctatgggcagggcatcctggcctgcatcagaaataatgtggccagcatgaccagggaagagattgtcactttgtacatggtactggtgagactacatctcaagcattatgttcagttttgggacccttgctacaagaaggatcttgagttggttgagttgcttgagcacgtgcagaaaagagcagtgtagctgataaaggaagtgggaaac

SEQ ID NO: 5960 - DNA, 554 bp, Chicken  19866894109828_3
atgtggagccatgtgttggactcaatgatccttaggggtctcttcaagtcaggatattctatgggcagggcatcctggcctgcatcagaaataatgtggccagcatgaccagggaagagattgtcactttgtacatggtactggtgagactacatctcaagcattatgttcagttttgggacccttgctacaagaaggatcttgagttggttgagttgcttgagcacgtgcagaaaagagcagtgtagctgataaaggaagtgggaaacaagtattacgtggaggaaatgaaggaaatgrgattggaaagaggggcatgagactcctcactcttgtggtatacctgaagggggattgcagcaaggaggctgctggtctctttttttgaggtgacaagtgataagatgtgaggctacagtctcagattgtgcaagaggaggtttaatcagactttgggaagaatttcttcattggtacggtggtcaagcattgggatgagctgcccagggcagtggtggagacctcactgctggaggcattcaagagatctgtgg

SEQ ID NO: 5961 - DNA, 600 bp, Chicken  19866894109832_1
ccaggggacaacatgcatcacagtcaggtgagccttatgaggaagagagcgtctctacctctcaactgtcagcaacatgatgcactgtgctgatctctgccaccaccacaataaacactgtctattaatactgctggcacaatcacccctactgcctagagtagctaaaactctaaagaaaaactaatattcacttttgcttgtaatcccagaaatgcagcaggaaacacactgaaagatatctgtcactgccacatgagggctcacgtttcactttgcacagccttgcagatgcactcragcttcactcagctgcaggaccctggactcccaccaccawccagcctcaaccctgccaaaatcacctctcaagggaggaaacagcctggatctacctgcttccatttgccaggagaagagacgtttcattttggcactgcacttctccttttaacactgaacctgactggagctgccaggaaggcatgcgccagcaaactttgccactgatcgtcttacttgcgagactgccccaggtctctagaccagcccagccgtggtcccgcagtagctcttgtccctcctcttttgaactccatt

SEQ ID NO: 5962 - DNA, 600 bp, Chicken  19866894109832_2
ggaagagagcgtctctacctctcaactgtcagcaacatgatgcactgtgctgatctctgccaccaccacaataaacactgtctattaatactgctggcacaatcacccctactgcctagagtagctaaaactctaaagaaaaactaatattcacttttgcttgtaatcccagaaatgcagcaggaaacacactgaaagatatctgtcactgccacatgagggctcacgtttcactttgcacagccttgcagatgcactcragcttcactcagctgcaggaccctggactcccaccaccawccagcctcaaccctgccaaaatcacctctcaagggaggaaacagcctggatctacctgcttccatttgccaggagaagagacgtttcattttggcactgcacttctccttttaacactgaacctgactggagctgccaggaaggcatgcgccagcaaactttgccactgatcgtcttacttgcgagactgccccaggtctctagaccagcccagccgtggtcccgcagtagctcttgtccctcctcttttgaactccatttcggacatgtcatctgggttgaaggtggtagactgacttc

SEQ ID NO: 5963 - DNA, 600 bp, Chicken  19866894109833_1
ctccttttgggagcccatcacagcagttaacccaaatttatgaccagtcagtcatgtcatttgtacctgaaaacatagatattgtttaagctccacaattaagtattaccagtacttgggattttttcctgatacaatgtaaacctagtctttagcatgtgttagcaagggtgttgctgactttatctgtctgaattgctccaagcattctgcctgtgtcactgcggaagagcatcctgccatgaattgcccattaaatacacgtgttactttgaaggcccatagtggtgggttttttawtttttttttttcccccagttgaccccaagataggcttcattttccagtgtggtaggtgcaggtgcagaaacactgcagtcacacgaatgcagtttttgcatagataaacattttaggagctgccttttcaactcagttattaaaatcaggcatgtagccagatttccttctgtagtcactcaagagaagtagattccatccaagaaaaagtattctactgattcttagacaccctaagcagcgtgaaccaaagatgcctacttgttttctctctgttgaagccaagtcactagctaagat

SEQ ID NO: 5964 - DNA, 600 bp, Chicken  19866894109836_1
caggtgttagaagtgtggaaacataaggagagactgaaagggagaggtaaatagacaaatagagaagcaggacaggatctaaacagctcacaaacttctggaaagtttggatttgcagctcagacccatctccaggaaaaaaaagttttactcagtccctgaatagttgttttccatctgtatgcacataaaatctgttatctggctcagtaaaacctaatgtatcgcacatatttctacatgcttaaaagacatactgaaaacacgacagcacttttgcaaaaaccaaacagaaaaggrgacttagaccagaaaataaaaagaaaaagaggtttgtggagaatctgagcatagaagagaaagacaacattctgaataaaaaaaacagagacattttaatgcatctacaactcacagttgtggtggtagtaatctcctccgttacaaccttcagcgtatcgaccactgagatatatcccagacgcctagcaatagctaaggcagtgttaccattctgaagagaaaaagagaagggaagagagagagagagaaatgagagggaggattgtgatgtgaaccaatgagatcactctcaacact

SEQ ID NO: 5965 - DNA, 600 bp, Chicken  19866894109841_1
gtgtatttataatagtatagattgatctttctgtattagaccatatcttgcgttctgatgagggtacccacgttaatccccaaacccactactatcacaacaaaatggccatctctccatatctgttctgcacattttctccaacacgggtagagttgtttttgtgggaagcacgtagctcaagaggataaggtgggtatagagaagttactttgtcaaattcaagccctctccctctctcccccaatgagctcagcttctactcttcttttctaatccccattttcaataaaaaaaaaraaaattgtccataatgtctaaattgtctcattaaaaaaaaaaaaaatagaagaagaagaagaaaaaagaaagaagcactcacataactgcaatcttcatagaaacatgcttttaatatcagggatttcatttttctctctgctttgtttacagctttccaggaaggctttaaaactaaaactttctgataaaagtatcccatttcttatgtgattccaaatgcaagaataattttttttttaagaactttaatgcgaaacagagctgtcattgatagtgtcttgaaactcaagttatatg

SEQ ID NO: 5966 - DNA, 600 bp, Chicken  19866894109841_2
gtccataatgtctaaattgtctcattaaaaaaaaaaaaaatagaagaagaagaagaaaaaagaaagaagcactcacataactgcaatcttcatagaaacatgcttttaatatcagggatttcatttttctctctgctttgtttacagctttccaggaaggctttaaaactaaaactttctgataaaagtatcccatttcttatgtgattccaaatgcaagaataattttttttttaagaactttaatgcgaaacagagctgtcattgatagtgtcttgaaactcaagttatatgtttttrtatgctacaccctcaggaaaagacagctggacattaatgcagtgatggcacatcggtatgataggctcagttatttccatgatgcaatagatagtatatattattagataattacgtatgtgcacacctagtagcctatgaggacaaaatacaagttctaggccttactgattaatctcaccctttttttcccccagacaaagtactaacaagctgtgttcttctaacagagcttcacccctcctcttcgattctctattcatttaacttcatttgattgctttcagttgttttgaattg

SEQ ID NO: 5967 - DNA, 600 bp, Chicken  19866894109853_1
ctagcacaactcgaaggtgcactgtgccgtgacattagccagggctgctagaaaacagaaatagattgagagtattttgaagattttgtatattatctcttggctgtagagtgctgtcaagaaagacgtcttctttcctaaatcagtgcgtaaacatagaccagatataacagggtgcagagtttgtgtgcaaaaatgcctgaatcccatgtgtgagtcggtttttgacaaagctactgctagctgacacaggatgcatttgcagcaaagctccagtcaccatacatctaccaagccccrgtaaatgtgtaggtgactactgaatggctcttggctacaggcagatatcccagttctcatacggccactattcacctttttccattaacaccatcattcacactccttattcacccaaccctctcgtaaacatcccaaaacctggagagtagcagaagaaagatgatgagtgtctccttcgcctggtggtatatttaggtattcccagtgttgcccatcagctttgctgaggctgtcactggagagaggcagtccactccccccatccaactactgggcttcaggcgccttccgattcgg

SEQ ID NO: 5968 - DNA, 599 bp, Chicken  19866894109857_1
  misc_feature (1)..(136): n is any nucleotide
nnnnnnnnnnnnnnnnnnnnnnnnnnnnnnnnnnnnnnnnnnnnnnnnnnnnnnnnnnnnnnnnnnnnnnnnnnnnnnnnnnnnnnnnnnnnnnnnnnnnnnnnnnnnnnnnnnnnnnnnnnnnnnnnnnnnnnnncaaggaaatgattatctcacctatatgttatttaggaggcaagtttccttatttacctttcccctaccctttttttccaggaccataatgaagcgtggcattgacccaggtaagtggagaagttccgtaattcaatctgtcattaaaatttcagcctgcagagraaaagcagccgtgcctgttcgtcaggtctgtgttgcaggacctccccaccctcactgcagagagccaacgagctgcamtggggtttgtcatgcttttgattacaactgtgttccatgcattttgttactcgtgagggtgagcccctgctctttggccattagaacgtgatcagtgtgatgtgaaatttagaaaacgtgcatgttctaaagaytgtagtaagtggatccacagctctcagctctcctccaagagagctgccttggaaaaccagagcccacggcagcagcctggcaaagct

SEQ ID NO: 5969 - DNA, 599 bp, Chicken  19866894109857_2
  misc_feature (1)..(58): n is any nucleotide
nnnnnnnnnnnnnnnnnnnnnnnnnnnnnnnnnnnnnnnnnnnnnnnnnnnnnnnnnncaaggaaatgattatctcacctatatgttatttaggaggcaagtttccttatttacctttcccctaccctttttttccaggaccataatgaagcgtggcattgacccaggtaagtggagaagttccgtaattcaatctgtcattaaaatttcagcctgcagagraaaagcagccgtgcctgttcgtcaggtctgtgttgcaggacctccccaccctcactgcagagagccaacgagctgcamtggggtttgtcatgcttttgattacaactgtgttccatgcattttgttactcgtgagggtgagcccctgctctttggccattagaacgtgatcagtgtgatgtgaaatttagaaaacgtgcatgttctaaagaytgtagtaagtggatccacagctctcagctctcctccaagagagctgccttggaaaaccagagcccacggcagcagcctggcaaagctaaaagcgagcattactactctccaataggaagcatggggtgctggcaagccatgagccacctccacccacagcaacag

SEQ ID NO: 5970 - DNA, 600 bp, Chicken  19866894109857_3
ccaggaccataatgaagcgtggcattgacccaggtaagtggagaagttccgtaattcaatctgtcattaaaatttcagcctgcagagraaaagcagccgtgcctgttcgtcaggtctgtgttgcaggacctccccaccctcactgcagagagccaacgagctgcamtggggtttgtcatgcttttgattacaactgtgttccatgcattttgttactcgtgagggtgagcccctgctctttggccattagaacgtgatcagtgtgatgtgaaatttagaaaacgtgcatgttctaaagaytgtagtaagtggatccacagctctcagctctcctccaagagagctgccttggaaaaccagagcccacggcagcagcctggcaaagctaaaagcgagcattactactctccaataggaagcatggggtgctggcaagccatgagccacctccacccacagcaacagcttccaagcagcacagagtgataagggattactgctttgtctctttgtttgcctcctgacataatttgctttatatagattttacttcagatcctgaaaaccgaatgatctaatcattttcaggaaattcatcta

SEQ ID NO: 5971 - DNA, 600 bp, Chicken  19866894109857_4
ctgaaaaccgaatgatctaatcattttcaggaaattcatctacctcaggcatcaacttttggaaacgcatcatctggctttctgggaaaccgcagcttgtcgcatggtgagaaaatataagtcataggatttcatgagtggttccccagtgcaggctgacataattgctgcaagtttattgggattcctattttccattattctacatcaagtcacaagcaaatccttcgagaagctgtatttcatggtctatgcatgcattactgcatataataataatcaccagaacaggttgcccarggaggctgtggatgccccatccctggaggcattcaaggccaggctggatgtggctctgggcagcctggtccggtggttggcgaccctgcacacagcaaggggttgaaaccagatggtcattgtggtccttttcaacccagcccattctgtgattctatgattccataatcttgagttcctacacgtatgtattatttggatctatttgcttacctaaaactgagagaacacattgtttaatgtgcttcctcctccatgttgcaccaactgctagttcttaatagaagacaaaggaatttt

SEQ ID NO: 5972 - DNA, 600 bp, Chicken  19866894109858_1
tttatgcaacactgagtcccactgcagatggttttgcactgcgcaaagaaaaccagagattctgaatgacaagacaaagtacacactaaagcacaagacaaagcttgttcagattgagaagcagacactacagctgcagtgcccgttgtttgccagatcctttaattaatctcccagtatccctaggatcctagaaccctccccacccccactccttggccttcacttgcaccagcagaaaatacattaaggttctttatcatctttaagatctctataaacaaagctgaaatggctacrctgtcactgctaggtttagttatgttacaaaatccttaggttcccatctcagcaccttcccttaaaacaaacaaacaccactttctacaccccactccccagaaaagaatatcagccttaactttcaagactagttaagtttggatataagcaatgggaaattatgtttttaacagaatgaaggaataaagttacctgatgaagtaaccatttttactctatatgctgacaagcagttaacagagcaaaacagttcagtttttcccgagttatttgtgctctctatcatctcagctgaag

SEQ ID NO: 5973 - DNA, 600 bp, Chicken  19866894109860_1
gatataaaaaattaaaagatctccagtgcaaaaagaaatgcaagggatgcatttccatgtggaatccaaaagatgaaaaaaagtaagaaaatagaattacattattttcatccaattaaataatgaaattatactgagcttccatatctgcttaatgtattattttctggtatactagtgcatgttaatactgcattgatattacttctataatattctatacaaaaatgttaagcagaaacagacatttaatcaaatgttaatgggtactgatgttccaagagattgataaatcatatmaaattatgtatcaccgtggcacaggagagctgagaatggttttcacaaatttgcttgtaacatgaatatatatgtgcttatagtacctataatgtagtatcaatggaaatttttaatgtttactgcttgaaatttattgcaagcaagatatgacaaatgtacttcacagtatacatatacatgaacatagcatattacaaagtaaaagtactcttgctctatttctactcaaaaggactgtgatgaatagaaaaaaattaatattttcctgccagattttctactattcttatatgtaac

SEQ ID NO: 5974 - DNA, 600 bp, Chicken  19866894109876_1
agttatttctacgaaaatatatggtctgttcttaaaaaaaaaaaaaaaaaaggaggaggacaggacacatcacatgaggccttggaaagccttgctttatagaaagccaaagttacagccagtcagggacttagaacatcttattaccattcccactcttgggaaagtacgctagctcccatgaacgagagctgaagcataaagataaatgaacttcatcctgccaagagcaacgtgcagccttctggggccagccctgccattgcagcttctccagctgccaaaaaggcagatgagcayacgagcccagctacaggagaaaggaggacctctcgcaattcccccmctactgctccaagccrcccaacacagcttgaactgcagcatacacaagattsttttctatctgctgcttgcctaacttgaaaattaaaagaagctattgatagcaatttatatgcaccaggagggctgagagaggaacttgagcatgctaaattgcaagtaatcattcactgttcggtgacagcttaacagaacttaatcacaaaatttaaaaaataagattgggaaagaggatgagaggacatcaggtccttc

SEQ ID NO: 5975 - DNA, 600 bp, Chicken  19866894109876_2
aaaaaggaggaggacaggacacatcacatgaggccttggaaagccttgctttatagaaagccaaagttacagccagtcagggacttagaacatcttattaccattcccactcttgggaaagtacgctagctcccatgaacgagagctgaagcataaagataaatgaacttcatcctgccaagagcaacgtgcagccttctggggccagccctgccattgcagcttctccagctgccaaaaaggcagatgagcayacgagcccagctacaggagaaaggaggacctctcgcaattcccccmctactgctccaagccrcccaacacagcttgaactgcagcatacacaagattsttttctatctgctgcttgcctaacttgaaaattaaaagaagctattgatagcaatttatatgcaccaggagggctgagagaggaacttgagcatgctaaattgcaagtaatcattcactgttcggtgacagcttaacagaacttaatcacaaaatttaaaaaataagattgggaaagaggatgagaggacatcaggtccttctctcagctcttctcacctagtttctatttataagctttccaataaa

SEQ ID NO: 5976 - DNA, 600 bp, Chicken  19866894109876_3
ggacacatcacatgaggccttggaaagccttgctttatagaaagccaaagttacagccagtcagggacttagaacatcttattaccattcccactcttgggaaagtacgctagctcccatgaacgagagctgaagcataaagataaatgaacttcatcctgccaagagcaacgtgcagccttctggggccagccctgccattgcagcttctccagctgccaaaaaggcagatgagcayacgagcccagctacaggagaaaggaggacctctcgcaattcccccmctactgctccaagccrcccaacacagcttgaactgcagcatacacaagattsttttctatctgctgcttgcctaacttgaaaattaaaagaagctattgatagcaatttatatgcaccaggagggctgagagaggaacttgagcatgctaaattgcaagtaatcattcactgttcggtgacagcttaacagaacttaatcacaaaatttaaaaaataagattgggaaagaggatgagaggacatcaggtccttctctcagctcttctcacctagtttctatttataagctttccaataaaatctctgtttagggac

SEQ ID NO: 5977 - DNA, 600 bp, Chicken  19866894109876_4
atagaaagccaaagttacagccagtcagggacttagaacatcttattaccattcccactcttgggaaagtacgctagctcccatgaacgagagctgaagcataaagataaatgaacttcatcctgccaagagcaacgtgcagccttctggggccagccctgccattgcagcttctccagctgccaaaaaggcagatgagcayacgagcccagctacaggagaaaggaggacctctcgcaattcccccmctactgctccaagccrcccaacacagcttgaactgcagcatacacaagattsttttctatctgctgcttgcctaacttgaaaattaaaagaagctattgatagcaatttatatgcaccaggagggctgagagaggaacttgagcatgctaaattgcaagtaatcattcactgttcggtgacagcttaacagaacttaatcacaaaatttaaaaaataagattgggaaagaggatgagaggacatcaggtccttctctcagctcttctcacctagtttctatttataagctttccaataaaatctctgtttagggactggaatttaaaggtgcctaagagactacggttagct

SEQ ID NO: 5978 - DNA, 600 bp, Chicken  19866894109877_1
caaaccatcaaaaacctcatcgtgcactgtgtactccattagagcttttcaccattagtgtaccctgaagctatctacccaaagtgttattgcccaataaaattgttacttcctaaattaacttcagtcaagaatagaactgtcaaatggccagagatgcacaagcactattttttgaggagtgttccaaacagcatttggctactcaagtatcctttaaacattaattattaagtaactcccacaacaccattaaaagccactttctgaggaacctataaaaccagaagtatcaagttmttttcaactgaggtatcactgaagatttatttgcaacgacaagctaccatcttcgctggcagaactgaaatacccccacagccagcagtgatgggatgaggagcttacagagcaccctcctgcttggtgccagcttctccttgctgattatctgccaactttcaaggccaggaagagctgatactgcaaagcttcaacatcatcaatatttaaatgcatttaagatggtcccaggccaacgtgaaatgagtaaaaattaactcataatgtgcttgtgaaaccasggaaaaaaatgtttca

SEQ ID NO: 5979 - DNA, 600 bp, Chicken  19866894109877_2
cagaagtatcaagttmttttcaactgaggtatcactgaagatttatttgcaacgacaagctaccatcttcgctggcagaactgaaatacccccacagccagcagtgatgggatgaggagcttacagagcaccctcctgcttggtgccagcttctccttgctgattatctgccaactttcaaggccaggaagagctgatactgcaaagcttcaacatcatcaatatttaaatgcatttaagatggtcccaggccaacgtgaaatgagtaaaaattaactcataatgtgcttgtgaaaccasggaaaaaaatgtttcatttcaggaagactagtaagaaattgagtaattttttttatctgaaatcagtaaaaaacaagcttattgttccatctatggtaaagtcatatgatatctcatccttgcacccacaaaggagcacaaacagaaaacaacaggtaggggagtccaaacaggccccagccccggctccttccaagccaattagaggacacctcaacccatcrcaagcctacctccacacacccagcagagcacaagtggcccagggcagggagtgtaggatgcacagtagggtacacc

SEQ ID NO: 5980 - DNA, 600 bp, Chicken  19866894109877_3
tttaaatgcatttaagatggtcccaggccaacgtgaaatgagtaaaaattaactcataatgtgcttgtgaaaccasggaaaaaaatgtttcatttcaggaagactagtaagaaattgagtaattttttttatctgaaatcagtaaaaaacaagcttattgttccatctatggtaaagtcatatgatatctcatccttgcacccacaaaggagcacaaacagaaaacaacaggtaggggagtccaaacaggccccagccccggctccttccaagccaattagaggacacctcaacccatcrcaagcctacctccacacacccagcagagcacaagtggcccagggcagggagtgtaggatgcacagtagggtacaccctgcctgggcctctcccagcaccacaccaagagtcttagccccagtttctgacataaaacacactaaaatagggcaacaggagcagctctcccaaatgcctttcaaatcaaggtggaggccactgtctaagaacacattatgggatgcaggggaaaagcattttgacaatgcttcacttactagggattatttaggggagaaaccaacacagaaaagaagtatg

SEQ ID NO: 5981 - DNA, 600 bp, Chicken  19866894109880_1
agttcaccagtattttaataagcttcctctagaattacaaaagatcttgagaatcaagtcgttgatactgactactgttatgctcattacagtttatatgaatttaggctgaattttagctgtaaatgttgtgtatttaagaatataactttatctctcactcttgtaacgtggtatttgaagcattaatgccaagaagtgaggaatcaatcaaaaagcctcagatccagcattcatgtattgtgaatccgtgtaataatttacaagaaagttacaactgcaactcatactagttgatawaaatactgaaaatactgtagtgaataaaaattaaacttgattgttacaaatttactgtttttatggacaaccacaagtactttggtatttaccactacattctcccttgccatcaaaatcaaataatgcctatcaaccacaacgctcattaccagtccatgctctgaatgtaggatatttccatctttctatttgtaaataaacttttaattaaatattaagtaaaacaatactagttgtatcatccacatcatcttatttctgtagtcaaactgatgaacagttcttctatacttgttg

SEQ ID NO: 5982 - DNA, 600 bp, Chicken  19866894109881_1
ctaacactccatatttgcctcttacaccaaccagataccaattctgaaatatagtcttctccacaagaaatgtaatatcaacaatcagacacatcctactccatcagaagtagaagataaatccctaaatatatttcttatgcaagtgctatgacagcctaatctgatatggggcaaaatactcaaagtgaaaagttacggtatggattttgtgaaatacctagataatactactttttaaatgccttgccaatagctgttcattttattaattggtggaggaagataatttcttcgttkttacaagcaaatatcaaactgatcaaatgaaaactctatgaacatatgaacagtttcagttttgataggcacagttttcctgagcaggaagaagactcctccatggccagttaacatttagtgactggagcttatgaaggggggaataagaaggattcaggctcttctcagtggtgcccaatgacaggacaaatggcactggaggttccataaggaaaaacaaaacactgaaagtggtcaaatcatgaaacacgtcatccaaaggctttctgtagtctccattcttgaaaatcttcagaa

SEQ ID NO: 5983 - DNA, 600 bp, Chicken  19866894109892_1
gttgcttgcaactaattagttgctagctactcacagcatctgtattacagatcccatgggactctaaggaatgtgaccttattttaatgttttcctgtgctttgagaatcactcctttgtatctggtactaggacgtgttttgttgctttaataacaataatgctcacactctttttagatttagatcccaaggacgtcgacaaaagtagacaaacactatctctcttaggaaagtgcagctcttactttggagctgggctctcagggctgtctgtcctgctgggtgctgcttgtgcagwgtaatgacaaactgtgctggacatgccattggtgggattctgccctgggtctcagctccagtgccttccctcatctccttttgctcctccwgtagctcttcctcatgccatgatggaacacaaagaatagtggagtgctgagctccagcagagcacacagcgggaaactgcatgtccagttatgtgctgtggatgacctgcaagagagatgaggttgaagtatctgttcaagcagggagagagaatagaaatgactgctttacttctaaacaaacgatgtgcattcctaggagtgtgtgt

SEQ ID NO: 5984 - DNA, 600 bp, Chicken  19866894109892_2
ttcctgtgctttgagaatcactcctttgtatctggtactaggacgtgttttgttgctttaataacaataatgctcacactctttttagatttagatcccaaggacgtcgacaaaagtagacaaacactatctctcttaggaaagtgcagctcttactttggagctgggctctcagggctgtctgtcctgctgggtgctgcttgtgcagwgtaatgacaaactgtgctggacatgccattggtgggattctgccctgggtctcagctccagtgccttccctcatctccttttgctcctccwgtagctcttcctcatgccatgatggaacacaaagaatagtggagtgctgagctccagcagagcacacagcgggaaactgcatgtccagttatgtgctgtggatgacctgcaagagagatgaggttgaagtatctgttcaagcagggagagagaatagaaatgactgctttacttctaaacaaacgatgtgcattcctaggagtgtgtgtgcagcaattacaccaggtcttggggctttgcacacgcttctaacaccagggctgaggagaagcttgagctcattgttacagatttatttcc

SEQ ID NO: 5985 - DNA, 600 bp, Chicken  19866894109897_1
tcagtttctgtcaccagacttacccaaagccatcatggggctcaacactagttgtactaaagcaatttccattcggatggtaacacagtcaaagatactgcatagagttagccaggtgaaacacaagtttacatgatcttgtgtcataagcaaaaaaactgacagcagtgtgtacacctgtggcctgacaaagcagcactagttattacacaagttttgctacagctaatacaaaagttcttctgattaccatgccaaaaaaaccacctagcttacgttacaggtgaagtctggcaccaygctaaaaacattcaacagcatgcaacaagaaatccgcctgcatttagagcatcacattacagcaaaagtcatcataattccaaaaccaattctgttactaccatcttttttttttcctgcgggctctacacaaggaacataatagataatttcaggcaacatgcttatcaatatacaggatcattcctccatttcagttcttctaaggtgcggacttacagtctgtagcattttggactgtcccggctgtgaattgcataaccttcactcagtcgtgtatcagaggcaacaatgcagaag

SEQ ID NO: 5986 - DNA, 600 bp, Chicken  19866894109897_2
cgcctgcatttagagcatcacattacagcaaaagtcatcataattccaaaaccaattctgttactaccatcttttttttttcctgcgggctctacacaaggaacataatagataatttcaggcaacatgcttatcaatatacaggatcattcctccatttcagttcttctaaggtgcggacttacagtctgtagcattttggactgtcccggctgtgaattgcataaccttcactcagtcgtgtatcagaggcaacaatgcagaagtcttctccagcaatggccaacacagtccttaaaraagagcattcatataatcacaatttttggcacaacttaggcaagcgatgaacagattgaagttctctatccacactcacactgtgccacgaatcttattacactccttgatgtttgtcactatgcatttccctatgcgtaaactcaagattggaagaaaaatgacactagacacactaaagagaacatacatgagtctctgctttgactgcaaatcttatggaagcttagcaaggacaagacacaatagactcccattttagatgtccaataaggaaaactggttggctctccaagcaaa

SEQ ID NO: 5987 - DNA, 600 bp, Chicken  19866894109901_1
ttttaaggacctttttaagacaacacacagcatttatagtattgaagttaaatggggtatttcagagcttattgactgtagcttcactgcagttaagcacaaccagcaactcgttggtttagtttgtctgacatatgcactgaaaaaagcagccgtgctgctttaactcctggattgcagtgcaacagaccaggttgcagcacactaacttctgcctcgagctgagcacaagagctgctcaggtgggcagctacacccacagaggttttggcctgagcctggaaccatccctgcagtgcyttctgagacacagccggccacaggcaagagcttgggtgctgaaacagactccggtcagctggctttgccttgtgtggttactgagtgcagcgttttgctggcagcaatgggaactcacctctacaaagatgtgtgctttgygaggcagccagatgcgttaaagttcctatcagaactatgctggaaatgaggcagagaggatttaaacagtgctttatcctccatgtgcaagcagtggctgtcagaaaaatgggaaatcagtcagaagatggagggacagcttcatttacaagcatttat

SEQ ID NO: 5988 - DNA, 600 bp, Chicken  19866894109901_2
gaaaaaagcagccgtgctgctttaactcctggattgcagtgcaacagaccaggttgcagcacactaacttctgcctcgagctgagcacaagagctgctcaggtgggcagctacacccacagaggttttggcctgagcctggaaccatccctgcagtgcyttctgagacacagccggccacaggcaagagcttgggtgctgaaacagactccggtcagctggctttgccttgtgtggttactgagtgcagcgttttgctggcagcaatgggaactcacctctacaaagatgtgtgctttgygaggcagccagatgcgttaaagttcctatcagaactatgctggaaatgaggcagagaggatttaaacagtgctttatcctccatgtgcaagcagtggctgtcagaaaaatgggaaatcagtcagaagatggagggacagcttcatttacaagcatttatgtgccaacaattattaactagagtagagcaggcaaacaataaaacctaccgcgctgacttaggaagtactgcactcgatgaataatgaaacaagcaacagtctatgattgaaaccagggtcaataactttgcttttaagcc

SEQ ID NO: 5989 - DNA, 600 bp, Chicken  19866894109912_1
tcttcacacaaaagaaacctcatctcgtaagtaaacaaacacataaggaagcagctacattaataaagtggaaactccatgaagtagagaaattatgatctcatcacttgttttttgggtatttgtgtttgttttttaaacattttctttctaaccagaccaagcttcatttaccaaaaaatttaaacagagtatcacagaggaaaacagcttggtgaagactacactactcatttttaatatgacaatgcaatttaatttgattcaaagcaaacacagaaacttggcaagagtagatgmaccagtattaaatgggcctttattcaaaaccagcaactgtagatgcactttgaagaaaaaagaatctctccagtctttggctaagtgcaatgtatgaagggttaaagttacagccataaagtaacactttttttgcaaaggcaaaaccttgtaaataaccctcaggcaaatcatcaacttccacattgctcagttttctgtccttgaatcatttctggcaaaaaaacaacctctgtgaggccccacggtgcagaaacacctaagtgcaggtgtgtctatggatatttatctattttcttt

SEQ ID NO: 5990 - DNA, 600 bp, Chicken  19866894109912_2
actacactactcatttttaatatgacaatgcaatttaatttgattcaaagcaaacacagaaacttggcaagagtagatgmaccagtattaaatgggcctttattcaaaaccagcaactgtagatgcactttgaagaaaaaagaatctctccagtctttggctaagtgcaatgtatgaagggttaaagttacagccataaagtaacactttttttgcaaaggcaaaaccttgtaaataaccctcaggcaaatcatcaacttccacattgctcagttttctgtccttgaatcatttctggcmaaaaaacaacctctgtgaggccccacggtgcagaaacacctaagtgcaggtgtgtctatggatatttatctattttctttcaacgtttccaccctgtagctgctccccttcactcattactctgctcattcttctactctgaagcaggagagaggagaacactcacacatttgtgtttatgcttagtagctatgctttgattcaacaaatttcaggaaagttagtgctgagaagaaatgcacaacttcccagccatgctactctgtaaggaaatgagctgtgctctttagggaaagagaa

SEQ ID NO: 5991 - DNA, 600 bp, Chicken  19866894109915_1
cattgagtcccactttgagctccacagaggaccacccaaaaatcagaccctatggctgagcacgttgtccaaacccttcttgaactctgtcaatgtggggctgtgaccgctgccctggcatcgtgttccagtgcctgaccacctggtggtgaagagcctttgcctgatatccagcctgaagctttaaatactgacccagcatggcagggcagctgcaaccctcagggccattcctgagctcagggaactcgggttctcagtctggagctatctttgcagtagaccttgagacctatggargagctttggtttatgamaccaaagtagggtgaacactgtaaaagacaacaaacaaagacaaaaggagaaacagccacrgacagaactcacagagattccatttagctctgttacatacactgtaaactgcagtagtccccttcctaacacatgtgcatgtgatcctctgcacaggcacagaaatcaataataaacagtgaatgaatagagagaggcctgtcaaaagctctcttgtttaattgtgggtttcttttccaacctaatktcaagtgtttaagggagaacaacaccaggagcacc

SEQ ID NO: 5992 - DNA, 600 bp, Chicken  19866894109915_2
agctccacagaggaccacccaaaaatcagaccctatggctgagcacgttgtccaaacccttcttgaactctgtcaatgtggggctgtgaccgctgccctggcatcgtgttccagtgcctgaccacctggtggtgaagagcctttgcctgatatccagcctgaagctttaaatactgacccagcatggcagggcagctgcaaccctcagggccattcctgagctcagggaactcgggttctcagtctggagctatctttgcagtagaccttgagacctatggargagctttggtttatgamaccaaagtagggtgaacactgtaaaagacaacaaacaaagacaaaaggagaaacagccacrgacagaactcacagagattccatttagctctgttacatacactgtaaactgcagtagtccccttcctaacacatgtgcatgtgatcctctgcacaggcacagaaatcaataataaacagtgaatgaatagagagaggcctgtcaaaagctctcttgtttaattgtgggtttcttttccaacctaatktcaagtgtttaagggagaacaacaccaggagcaccgtggcttcatgaggcac

SEQ ID NO: 5993 - DNA, 600 bp, Chicken  19866894109915_3
cttgaactctgtcaatgtggggctgtgaccgctgccctggcatcgtgttccagtgcctgaccacctggtggtgaagagcctttgcctgatatccagcctgaagctttaaatactgacccagcatggcagggcagctgcaaccctcagggccattcctgagctcagggaactcgggttctcagtctggagctatctttgcagtagaccttgagacctatggargagctttggtttatgamaccaaagtagggtgaacactgtaaaagacaacaaacaaagacaaaaggagaaacagccacrgacagaactcacagagattccatttagctctgttacatacactgtaaactgcagtagtccccttcctaacacatgtgcatgtgatcctctgcacaggcacagaaatcaataataaacagtgaatgaatagagagaggcctgtcaaaagctctcttgtttaattgtgggtttcttttccaacctaatktcaagtgtttaagggagaacaacaccaggagcaccgtggcttcatgaggcacttctccccaagtgctctctctgcagagatggctgtggtgcctggagcccatggctgagccc

SEQ ID NO: 5994 - DNA, 600 bp, Chicken  19866894109915_4
agctatctttgcagtagaccttgagacctatggargagctttggtttatgamaccaaagtagggtgaacactgtaaaagacaacaaacaaagacaaaaggagaaacagccacrgacagaactcacagagattccatttagctctgttacatacactgtaaactgcagtagtccccttcctaacacatgtgcatgtgatcctctgcacaggcacagaaatcaataataaacagtgaatgaatagagagaggcctgtcaaaagctctcttgtttaattgtgggtttcttttccaacctaatktcaagtgtttaagggagaacaacaccaggagcaccgtggcttcatgaggcacttctccccaagtgctctctctgcagagatggctgtggtgcctggagcccatggctgagccctytgggacctctccttgyacaaggtgggatggaagatcagctgtgtgttaaagtggaggagttggcagtaatgtgtcttgtgcaggatggtccctgctgctccttggacgtgtctttatttgcagagggaagctgcaccctgcagccttgttgcaccagctgtacctgagcccaccccttggctcct

SEQ ID NO: 5995 - DNA, 563 bp, Chicken  19866894109915_5
cagaactcacagagattccatttagctctgttacatacactgtaaactgcagtagtccccttcctaacacatgtgcatgtgatcctctgcacaggcacagaaatcaataataaacagtgaatgaatagagagaggcctgtcaaaagctctcttgtttaattgtgggtttcttttccaacctaatktcaagtgtttaagggagaacaacaccaggagcaccgtggcttcatgaggcacttctccccaagtgctctctctgcagagatggctgtggtgcctggagcccatggctgagccctytgggacctctccttgyacaaggtgggatggaagatcagctgtgtgttaaagtggaggagttggcagtaatgtgtcttgtgcaggatggtccctgctgctccttggacgtgtctttatttgcagagggaagctgcaccctgcagccttgttgcaccagctgtacctgagcccaccccttggctcctggataaccaagggctttgttctctccctttccccctccctccttagatttttatcagactctgatctttgaggtataa

SEQ ID NO: 5996 - DNA, 547 bp, Chicken  19866894109915_6
tccatttagctctgttacatacactgtaaactgcagtagtccccttcctaacacatgtgcatgtgatcctctgcacaggcacagaaatcaataataaacagtgaatgaatagagagaggcctgtcaaaagctctcttgtttaattgtgggtttcttttccaacctaatktcaagtgtttaagggagaacaacaccaggagcaccgtggcttcatgaggcacttctccccaagtgctctctctgcagagatggctgtggtgcctggagcccatggctgagccctytgggacctctccttgyacaaggtgggatggaagatcagctgtgtgttaaagtggaggagttggcagtaatgtgtcttgtgcaggatggtccctgctgctccttggacgtgtctttatttgcagagggaagctgcaccctgcagccttgttgcaccagctgtacctgagcccaccccttggctcctggataaccaagggctttgttctctccctttccccctccctccttagatttttatcagactctgatctttgaggtataa

SEQ ID NO: 5997 - DNA, 600 bp, Chicken  19866894109917_1
gcaagcataatttttgagtttgtttctgaaaaaagaaatttcccagtacaaaaataggatatgttaaatacatataaaatagaagaaagaaagcaaaatatacagaattgctttgctagcaaaaggagtctaggtttacagtaaatttactttctgtcatagtttgagaatggtgttaaataaaaaaattaagttagatagagaggaataaatttaataaaaacactgttagatagaataacttggatttaggagactgcagcagctactcccaaagcaaagctgttgttatttaccaaraagcagtaacactcattgttcaaaattcccaagacttaaaaaaaaaaaacaaaaaaaaaacccaacacagtaacaacaaagctttgctaaattattatactatttattgttgtagattaatttgttgcaatgaattaatgtaatggtttttatattgctgtaattcatgtagaaaataccagaagagatgtatttcaaactgtgttttactgtacaaggaaatgctaaaaataagaaaacattacatatgtgtaagcaagaagaggtgatgatgttaaagaaagtggtcactcccactgt

SEQ ID NO: 5998 - DNA, 600 bp, Chicken  19866894109919_1
gctttggctgacaactggagtccactgcagatgttgatatgctttagcaggaaacctaacagtgcgtccatgggaggtgcgcacagagtaacccagaagtagagcaagaaactgctggggttttttttctccccccagaaagaggagtctgagagcagggatgtgctctgccagtcagaaggatccaaatctgatgggggttcagtgcagcgggcatttctgtaagcacttggatgggagacacgagggagcttatggggtatgattgatgggtgatttacagtcctcgctagaaaagcragagaggactaaaaacaatgaataagtcttcctggaattcaaacttcccaccgaatgcatttatcttttccatttgctataaatgggccgggagcaggatagcattatttctccattgctggaaagaggagggcagccttcacaccacccaccgccgcgataaacaatgttctcatgagcccattgctatttatagaagcaatcctatttctcacatatttgcctctcggttactgagcaagggcactttcacggccctgatggatctgagcacattcagacgctaatcccgggggaggg

SEQ ID NO: 5999 - DNA, 600 bp, Chicken  19866894109922_1
cacacgattaactgcataaaattaatcaacacactccaaaagtttaaaatcaggcacaactattggaatgtgtgtgatgttatcaagtactagtaagcccaaatgagaaaatcaatgtttgacaagcaaaaccagatcttaactccatggtttaataatacattgtgtgtaacttacttgtcctttcatctctccacacccaggttgtgtaatcctgttaattccttagagaacccaattttaagcatgtgagatctggaatttgagtgtgggttttctagctcaggagcaccctaactrgggaatcagyttagagctcagaggtgaacamcagcactaccttcagcctggtttcgccatgtggagtagatcctgtcactctccctcctttaccaaggctagtaataaaattgaggactcaagttggaaatttagatcccctactttctaaagaactgcattttggagtgtgtttgtgcctgtcttcttatacatccagcatgcaacagcagaaagcatttgaacagaacgcttgtacaaatctctatatccataatttccctgctccccaagtgctttggtgactatttaactggaatt

SEQ ID NO: 6000 - DNA, 600 bp, Chicken  19866894109922_2
actgcataaaattaatcaacacactccaaaagtttaaaatcaggcacaactattggaatgtgtgtgatgttatcaagtactagtaagcccaaatgagaaaatcaatgtttgacaagcaaaaccagatcttaactccatggtttaataatacattgtgtgtaacttacttgtcctttcatctctccacacccaggttgtgtaatcctgttaattccttagagaacccaattttaagcatgtgagatctggaatttgagtgtgggttttctagctcaggagcaccctaactrgggaatcagyttagagctcagaggtgaacamcagcactaccttcagcctggtttcgccatgtggagtagatcctgtcactctccctcctttaccaaggctagtaataaaattgaggactcaagttggaaatttagatcccctactttctaaagaactgcattttggagtgtgtttgtgcctgtcttcttatacatccagcatgcaacagcagaaagcatttgaacagaacgcttgtacaaatctctatatccataatttccctgctccccaagtgctttggtgactatttaactggaattggcatagatc

SEQ ID NO: 6001 - DNA, 600 bp, Chicken  19866894109922_3
cactccaaaagtttaaaatcaggcacaactattggaatgtgtgtgatgttatcaagtactagtaagcccaaatgagaaaatcaatgtttgacaagcaaaaccagatcttaactccatggtttaataatacattgtgtgtaacttacttgtcctttcatctctccacacccaggttgtgtaatcctgttaattccttagagaacccaattttaagcatgtgagatctggaatttgagtgtgggttttctagctcaggagcaccctaactrgggaatcagyttagagctcagaggtgaacamcagcactaccttcagcctggtttcgccatgtggagtagatcctgtcactctccctcctttaccaaggctagtaataaaattgaggactcaagttggaaatttagatcccctactttctaaagaactgcattttggagtgtgtttgtgcctgtcttcttatacatccagcatgcaacagcagaaagcatttgaacagaacgcttgtacaaatctctatatccataatttccctgctccccaagtgctttggtgactatttaactggaattggcatagatctagacaaattaaagtaatttc

SEQ ID NO: 6002 - DNA, 599 bp, Chicken  19866894109924_1
  misc_feature (1)..(203): n is any nucleotide
nnnnnnnnnnnnnnnnnnnnnnnnnnnnnnnnnnnnnnnnnnnnnnnnnnnnnnnnnnnnnnnnnnnnnnnnnnnnnnnnnnnnnnnnnnnnnnnnnnnnnnnnnnnnnnnnnnnnnnnnnnnnnnnnnnnnnnnnnnnnnnnnnnnnnnnnnnnnnnnnnnnnnnnnnnnnnnnnnnnnnnnnnnnnnnnnnnnnnnnnnnnctttgttaaaagatagcatagtatgctaagctgtactctctatcattatctgtacagtaatttatgtagtcatttgtttccctgacctttcatcctrattgctttcgtagagcagtttaaaacaccgctgtgccccatgattccaaacaacccttccagttcagtattttgatcsttgcacagtcaggaatgaagatgaggcagacttagaggttgcaagattgtatttatgtattgaaattttgaaaaacagagaaaaacaacaagcaagctaaaaataaaatgccaaatttatattatgcaaacagtctcatctgttaaatcattctctctttgaataaaaagctctcttttaaagtatgaagccastgaggattaataactgtcagaatggcc

SEQ ID NO: 6003 - DNA, 599 bp, Chicken  19866894109924_2
  misc_feature (1)..(125): n is any nucleotide
nnnnnnnnnnnnnnnnnnnnnnnnnnnnnnnnnnnnnnnnnnnnnnnnnnnnnnnnnnnnnnnnnnnnnnnnnnnnnnnnnnnnnnnnnnnnnnnnnnnnnnnnnnnnnnnnnnnnnnnnnnnnnctttgttaaaagatagcatagtatgctaagctgtactctctatcattatctgtacagtaatttatgtagtcatttgtttccctgacctttcatcctrattgctttcgtagagcagtttaaaacaccgctgtgccccatgattccaaacaacccttccagttcagtattttgatcsttgcacagtcaggaatgaagatgaggcagacttagaggttgcaagattgtatttatgtattgaaattttgaaaaacagagaaaaacaacaagcaagctaaaaataaaatgccaaatttatattatgcaaacagtctcatctgttaaatcattctctctttgaataaaaagctctcttttaaagtatgaagccastgaggattaataactgtcagaatggcctctttcttgtaattgtcttcctgctgttggcaggcatggctgtagattttgggaacaaatttctattgttatagactg

SEQ ID NO: 6004 - DNA, 600 bp, Chicken  19866894109924_3
tcatttgtttccctgacctttcatcctrattgctttcgtagagcagtttaaaacaccgctgtgccccatgattccaaacaacccttccagttcagtattttgatcsttgcacagtcaggaatgaagatgaggcagacttagaggttgcaagattgtatttatgtattgaaattttgaaaaacagagaaaaacaacaagcaagctaaaaataaaatgccaaatttatattatgcaaacagtctcatctgttaaatcattctctctttgaataaaaagctctcttttaaagtatgaagccastgaggattaataactgtcagaatggcctctttcttgtaattgtcttcctgctgttggcaggcatggctgtagattttgggaacaaatttctattgttatagactgcatgtacctctaggagagcctgtaaatagattagataaactactggcaaaaggaaatagcatctgcaactagtgactgtttgagattatgttgaggctgtgctgacatttcgtgttcacagttagaggagaactgaggaggaagagcacacattgtcttcttgcttatgttcccttatgtttcgtgtggagttca

SEQ ID NO: 6005 - DNA, 600 bp, Chicken  19866894109930_1
agtggggttttgctggatctggtggtgacgaggtgcagctaaaaccatgaatcagcccttgccctgaggctggcaatgggggatggtggggtgggcaacagcaccagagtgggtctctgtcgtggtgagagctcacgcctctatctgtcctttgcatacagtttccagctccaggagccacgggtttatttaaataacaacaaacaaattgatttctgatgtgactgagggagctgggaaagcaagctctgaataacacacaaggttgttatcaaatgtcaccatcatcaaaacagaccwaaagcaggaaaagcccaggacaattaaatccccttgtggagatgagagagcctggttcgcagagcccattgctctgtgtgtatgttgttttgggctgaatactcagagatacagtcattttccaaagctggacatcagctgcttgacactctttagcactaatgaaaatcatacagagcaagcctgggttccagccagcaactcattcccrctgtcatcttagggaagcagccagagcagagtccgagatggagaactttacacctgtgccaattttaaacaaagccacaccattgtgaa

SEQ ID NO: 6006 - DNA, 600 bp, Chicken  19866894109930_2
atttctgatgtgactgagggagctgggaaagcaagctctgaataacacacaaggttgttatcaaatgtcaccatcatcaaaacagaccwaaagcaggaaaagcccaggacaattaaatccccttgtggagatgagagagcctggttcgcagagcccattgctctgtgtgtatgttgttttgggctgaatactcagagatacagtcattttccaaagctggacatcagctgcttgacactctttagcactaatgaaaatcatacagagcaagcctgggttccagccagcaactcattcccrctgtcatcttagggaagcagccagagcagagtccgagatggagaactttacacctgtgccaattttaaacaaagccacaccattgtgaagtatgcagggaggccatcaagctgcctttgaattttattcagccrcataggaagggacaatagcacctgacttcttaaaagtctcaatacaaatcaaagtgcagaagtctccaccgggctcctatgtaattgctttgggatgtggaatacaggaacttctgcacagggagaggtctcatcccaccacatgcccaggggtctcctgtggtgg

SEQ ID NO: 6007 - DNA, 600 bp, Chicken  19866894109930_3
gagagcctggttcgcagagcccattgctctgtgtgtatgttgttttgggctgaatactcagagatacagtcattttccaaagctggacatcagctgcttgacactctttagcactaatgaaaatcatacagagcaagcctgggttccagccagcaactcattcccrctgtcatcttagggaagcagccagagcagagtccgagatggagaactttacacctgtgccaattttaaacaaagccacaccattgtgaagtatgcagggaggccatcaagctgcctttgaattttattcagccrcataggaagggacaatagcacctgacttcttaaaagtctcaatacaaatcaaagtgcagaagtctccaccgggctcctatgtaattgctttgggatgtggaatacaggaacttctgcacagggagaggtctcatcccaccacatgcccaggggtctcctgtggtggtgaaggcacaccatccccacgctgccctaaagctttccacccataaagtcccctttaaaccatgactcaagcctttccgccctcttatctgctgcaggcaagaagccaagctatggttttgttggtcaggagtg

SEQ ID NO: 6008 - DNA, 600 bp, Chicken  19866894109932_1
tttctttttctggactaggatcagattttcctgtctgtccagaactctggctgattcaaagttgtattcttaagtcaaaactgcatcttgagctattgcaagttttccaagctacatatagttagacacatttttcctcagagagatttttgtatttcctttccaaacaactgctctatgacttagcacttttactcttccagaaaaacctgaataggtactacctgctgtattttagataatgcttaggattttatttcatttcttgaaagtattgtttttcagtgtgctaatcctagwgtataccaatgctatgctatgtcaagctgtactgtgctccatggatttcaakcaatggcacaagaaaggcctttcagtttttttatatgtgcattatgcagtaatatacagtcattcaataaacctagactgattgcctctaacaaaaaaaaattagttatttctcagtcattaccattagccaagaatgcatcatctttatgacggtgcttataactggagagaatttgctgaatttgttactgtaactctaaaatgactaagccaagaggaaatacttttttgtttttcatttctgtt

SEQ ID NO: 6009 - DNA, 600 bp, Chicken  19866894109932_2
gattcaaagttgtattcttaagtcaaaactgcatcttgagctattgcaagttttccaagctacatatagttagacacatttttcctcagagagatttttgtatttcctttccaaacaactgctctatgacttagcacttttactcttccagaaaaacctgaataggtactacctgctgtattttagataatgcttaggattttatttcatttcttgaaagtattgtttttcagtgtgctaatcctagwgtataccaatgctatgctatgtcaagctgtactgtgctccatggatttcaakcaatggcacaagaaaggcctttcagtttttttatatgtgcattatgcagtaatatacagtcattcaataaacctagactgattgcctctaacaaaaaaaaattagttatttctcagtcattaccattagccaagaatgcatcatctttatgacggtgcttataactggagagaatttgctgaatttgttactgtaactctaaaatgactaagccaagaggaaatacttttttgtttttcatttctgtttcttaacattctgatttattatacaaatacatcttctttaccgatcttcgga

SEQ ID NO: 6010 - DNA, 600 bp, Chicken  19866894109932_3
gcgtaaatttacattatacactcgagggcaatgacaataacctcatcaataggctttggaacaggcttaaagtaagtctttaaaaagaaatgtagtcttagccctcaggtcaaagcgttttcaatgcccacagttacttgaggaaagaggtcatagtactaaataccacctgtgctactaaaggaaacaaacaaacaaacacgaagcccaccccttccactcacaaaactaaaagaagcattcagcctaggaatccagttctataatctgcatgtcatgataaaagagttcaaacagtarggacaggggttaaaaaatacatggttatttctagagacttcttcaagtttgggcactctaatcaagatacaaaatatctggctttcacccttggttcccatacatattgccatagcataagttattgacaggatgtagagaagtacctattaaggatgtttcacactttccggcatagaatcccacttgcagctacttacagtcctatactttaactctctggatcaaacttctctgtgagaagtatgtggtcacaagctaaatttgtttcttgcaaacttcagctatttccaaggagaa

SEQ ID NO: 6011 - DNA, 600 bp, Chicken  19866894109958_1
ctaatgcaattcaaactacatcactatacccccagtttttaccaacttttttccctctagaatttctcaaatgtaaactagctagtggaagcagttctgtacataaggttgtaattttagtagaaataagttctgtgtgtagttgctcatgtgtttgtaaaatgctgcaaagaatacaatcaaaatgctaatatggttcttctgtagtactaggataaatctctctgaaaacatcagatcagaaaggttagagatatgaaatgtatgtatttctgcttgctagtcagtatgttttagcakagatgtgggcaggtgcatacaggaaatgattaggtttatggatgctgaaagaaataaagggaaagagacttttttttttttyccccaaagaatgaacaaatgactgtgtcaatgactgtacaatgttaaaagaagaggtgttttgcaagtcatgttttatgcattttgaagacaggtgaaatgacatttttgtagaaatacactagaatgctgagtgggatggaagcagtttctctagttgggggcatcttggacacagaaccagaaaatctggaaatgtttggaatattttatgtggtt

SEQ ID NO: 6012 - DNA, 600 bp, Chicken  19866894109958_2
tagtggaagcagttctgtacataaggttgtaattttagtagaaataagttctgtgtgtagttgctcatgtgtttgtaaaatgctgcaaagaatacaatcaaaatgctaatatggttcttctgtagtactaggataaatctctctgaaaacatcagatcagaaaggttagagatatgaaatgtatgtatttctgcttgctagtcagtatgttttagcakagatgtgggcaggtgcatacaggaaatgattaggtttatggatgctgaaagaaataaagggaaagagacttttttttttttyccccaaagaatgaacaaatgactgtgtcaatgactgtacaatgttaaaagaagaggtgttttgcaagtcatgttttatgcattttgaagacaggtgaaatgacatttttgtagaaatacactagaatgctgagtgggatggaagcagtttctctagttgggggcatcttggacacagaaccagaaaatctggaaatgtttggaatattttatgtggtttgaggttttgcagacacaatgctgtagtggatgctactctggggaaccagaaatgtgcctgcaggttgcagagagaaagaaa

SEQ ID NO: 6013 - DNA, 600 bp, Chicken  19866894109959_1
tatcagcgtaaccgagagtgaaattcagttcacagttgtaaggtaacaaaaggctactgaaaatgaatttgtcctgtgacaaaaatggaacttggaacacaccagattagctgcaaagagaaccaaagattattttgatgaatactgtatttctcaagtcaaagcataaatgatagcttgcatacggcatgtcggaagatgtgtttgtcctacgtgaacagagtgatggatagtctgtactagagattcttctgctcagaatgtaagctggattttgagccaaaatttgatgaaattttygtgctttgaaataccctaagacagaagtttttagaagaaaaacaatggatttagatcatttatgtttgtgttgtgtctttttgtccattaataataacctttcaacagaaaaatatctaaagcaatacagcttcacaaaaatcccaaagaagaacaggcccagtaatattatgactatttatgggatattttatatccaccagggaccagtccctttaattcactataatttttattacatagttcaggaaatgtcatactcatataacatctattacaagatatcatggctgaaaggcc

SEQ ID NO: 6014 - DNA, 410 bp, Chicken  19866894109959_2
atgtttgtgttgtgtctttttgtccattaataataacctttcaacagaaaaatatctaaagcaatacagcttcacaaaaatcccaaagaagaacaggcccagtaatattatgactatttatgggatattttatatccaccagggaccagtccctttaattcactataatttttattacatagttcaggaaatgtcatactcatataacatctattacaagatatcatggctgaaaggccaaaaccacatgttaggaagtgctgaagcaggacagccctgcaacttcagaacttccagcayttctattgtgaacgctgactttctaattttcccataagatttttttctaatattgctatatatataagtattttacaagccatactttcatatttacaacgtctctgcaa

SEQ ID NO: 6015 - DNA, 588 bp, Chicken  19866894109961_1
aaacaatttacttgggctgctgcttctacagtaatagcaattgacttttcatccccattttatcagtactgtcagggggaaatgaaatcaacacctcatggtaattccaaataggaaagaacaaataagctcagtctcttattatttttttttcttcctgactaaaatattctagtttattgttctcgtagacaacagtgatctgcccttgtttttagcatggcgctctggtcatccatggtgccctgggaatcccggctggtcagcacggtaaggcacacagctcactgggcagccccragagcccagtgctatccaaaaggctttgttttctacaacacrtgtaygagctgccagaacagctggagaaactctgacaatagtaggagtagaatgcttggtttttttttcttttattctgcgttttcatcaacctcgctaagaaaagctgacaggtatgaacaatggttttacagctcacaatagctgctacatcagaataagtcttccaaaaaacccccaattaacaacatcctggagcggaccccccttcagaaggctatctaaacagtgtaaaggcagttttaa

SEQ ID NO: 6016 - DNA, 546 bp, Chicken  19866894109961_2
gacttttcatccccattttatcagtactgtcagggggaaatgaaatcaacacctcatggtaattccaaataggaaagaacaaataagctcagtctcttattatttttttttcttcctgactaaaatattctagtttattgttctcgtagacaacagtgatctgcccttgtttttagcatggcgctctggtcatccatggtgccctgggaatcccggctggtcagcacggtaaggcacacagctcactgggcagccccragagcccagtgctatccaaaaggctttgttttctacaacacrtgtaygagctgccagaacagctggagaaactctgacaatagtaggagtagaatgcttggtttttttttcttttattctgcgttttcatcaacctcgctaagaaaagctgacaggtatgaacaatggttttacagctcacaatagctgctacatcagaataagtcttccaaaaaacccccaattaacaacatcctggagcggaccccccttcagaaggctatctaaacagtgtaaaggcagttttaa

SEQ ID NO: 6017 - DNA, 541 bp, Chicken  19866894109961_3
ttcatccccattttatcagtactgtcagggggaaatgaaatcaacacctcatggtaattccaaataggaaagaacaaataagctcagtctcttattatttttttttcttcctgactaaaatattctagtttattgttctcgtagacaacagtgatctgcccttgtttttagcatggcgctctggtcatccatggtgccctgggaatcccggctggtcagcacggtaaggcacacagctcactgggcagccccragagcccagtgctatccaaaaggctttgttttctacaacacrtgtaygagctgccagaacagctggagaaactctgacaatagtaggagtagaatgcttggtttttttttcttttattctgcgttttcatcaacctcgctaagaaaagctgacaggtatgaacaatggttttacagctcacaatagctgctacatcagaataagtcttccaaaaaacccccaattaacaacatcctggagcggaccccccttcagaaggctatctaaacagtgtaaaggcagttttaa

SEQ ID NO: 6018 - DNA, 599 bp, Chicken  19866894109966_1
  misc_feature (1)..(14): n is any nucleotide
nnnnnnnnnnnnnntttgtactgtccgggacttggatggaagcgatgcacttgagctgtagaggatatgagttgcatactcttggtttgggagtgcaaagagagaagggtttgaggtgatctgggcttaagactgggagaaaacggagctgagatctttggggtttggcagctcctgggcagcaaatagaaagagtgagaggaggaagctctggaggccaggcagccaggagcagaacgggctcttatctctgcagggctttatctgttctcagctcattgctcattgtcagccgtggcrgttttttgctcggggaaagcgtgtcaccccatcactgcgctctgcaaggatgagagatccccgagcagaatgggaaggcattgttagagctgccgtgtgctgggcaaggccygttgtgctgttggggctctgagatggaaatcgcaccaggtgtagaggtgtgagacaagtggagagatgctgccctgctctgcctgggagatagcatcagcagggaccaggacatatcgcggggtgacgatttgcagctgcttgataawggccacgtggagtagagatgctgactttcagagccagag

SEQ ID NO: 6019 - DNA, 600 bp, Chicken  19866894109966_2
gaggtgatctgggcttaagactgggagaaaacggagctgagatctttggggtttggcagctcctgggcagcaaatagaaagagtgagaggaggaagctctggaggccaggcagccaggagcagaacgggctcttatctctgcagggctttatctgttctcagctcattgctcattgtcagccgtggcrgttttttgctcggggaaagcgtgtcaccccatcactgcgctctgcaaggatgagagatccccgagcagaatgggaaggcattgttagagctgccgtgtgctgggcaaggccygttgtgctgttggggctctgagatggaaatcgcaccaggtgtagaggtgtgagacaagtggagagatgctgccctgctctgcctgggagatagcatcagcagggaccaggacatatcgcggggtgacgatttgcagctgcttgataawggccacgtggagtagagatgctgactttcagagccagagccgttgatctatgatcacactgctccgtccttcccccttcgctgctcttcatcccaattttggaggaggcacaggtcagcaccagtgctcggtagaggagtttctgcacttca

SEQ ID NO: 6020 - DNA, 600 bp, Chicken  19866894109966_3
ttatctgttctcagctcattgctcattgtcagccgtggcrgttttttgctcggggaaagcgtgtcaccccatcactgcgctctgcaaggatgagagatccccgagcagaatgggaaggcattgttagagctgccgtgtgctgggcaaggccygttgtgctgttggggctctgagatggaaatcgcaccaggtgtagaggtgtgagacaagtggagagatgctgccctgctctgcctgggagatagcatcagcagggaccaggacatatcgcggggtgacgatttgcagctgcttgataawggccacgtggagtagagatgctgactttcagagccagagccgttgatctatgatcacactgctccgtccttcccccttcgctgctcttcatcccaattttggaggaggcacaggtcagcaccagtgctcggtagaggagtttctgcacttcaggcagtagaggagcacccaacccagcgagcagagcccacaaagtgcccagaattcagcgctggtcagcaagcattctgtaattgatcctctgccgtgctcagctaattacatctcctagaaatgccttcactgctcagccccgcaaat

SEQ ID NO: 6021 - DNA, 600 bp, Chicken  19866894109971_1
agcaagaaatacaaacaaaaatattatttttttttccttaattggtgttaatcagacacagagtaagaaatttagtttgctatttcccaaaatacagtaggaatgaaatgttaaggtaactcatccttttccctaacaatttttttttttcttgttcattgtttctactatgggaggatcttggcctagctcttcccccttttttccttcagccaaaatttccttcagccaaaataggtggaaacacctatgtttccaatgacgtagctgcagtggaaaagctaagaagagcacatgtgwaagggagcaaaattagcagccttttttgttctcacttccatgaagtaaatacccttgtttggtagaccacaggaggaagttcagcccgcacgaaacactttcacccaatctcttgttcaaaagcattaacctagttagcagcactgaagtcattctgccagaacactgtgtacctttggcattcccagataatcagacacagaatatattcctgtaggtataattgaattctgaaataagtacttactgtagtataaaatacacttgggcagcattttcattacagcacttaatccagaa

SEQ ID NO: 6022 - DNA, 448 bp, Chicken  19866894109972_1
gtgaggtccatctaccttgtttataagaacctctcaaggtccagctgaggttagataagctcagacatgaaataagatgccgtttcctaggaacaggaatgactgaacacttgagttgcctctttgggagaatattggacttccatgactgtacatcttttataatatttctcaacaaaataaaatagaatgaaatatatattctttagctattgggaagaatacttaaacttggatgagtgcaaaaggaaatccttgctgctagtcttgggagctgactgctttcctccttcagggtcrtgggatgactgggattactgacatggtcagtgctgtatttgcagcttctggagtactagactgttcaaaataattataggttcatgcttctgtgctttagacttttctacacatgatcaagcagtttccttctcttccaagaaatttg

SEQ ID NO: 6023 - DNA, 599 bp, Chicken  19866894109976_1
  misc_feature (1)..(101): n is any nucleotide
nnnnnnnnnnnnnnnnnnnnnnnnnnnnnnnnnnnnnnnnnnnnnnnnnnnnnnnnnnnnnnnnnnnnnnnnnnnnnnnnnnnnnnnnnnnnnnnnnnnnnatacttcttcacaaaattactgttaaacataaattctctgtgaagtattcaagtgtatccaataactaagcagcatgtttttcagtatcttaaataagggcttgactgcttagcacatccctatttatttttctaaagcaggaagctttgtcttgactaattttgatttgatattaagttgaaaaggggagacctggartaatatgactagagtgttccrttacttttcctttccattttagctgacttgcaatttatgaagaacaacctgacagatgaaaagtacttttattttttttctgaaacttcttttcagagtttatactgaattagctttgtaacaaataaaatagaatcatagaatccttagagttggaagggacctctgaargccctctagtccaactctcgtgcaatgtgtgggacatccacagctagatcaggttgcccagggccctgccttgaaagtttcaagggatggggcatcaaccayataac

SEQ ID NO: 6024 - DNA, 599 bp, Chicken  19866894109976_2
  misc_feature (1)..(80): n is any nucleotide
nnnnnnnnnnnnnnnnnnnnnnnnnnnnnnnnnnnnnnnnnnnnnnnnnnnnnnnnnnnnnnnnnnnnnnnnnnnnnnnnatacttcttcacaaaattactgttaaacataaattctctgtgaagtattcaagtgtatccaataactaagcagcatgtttttcagtatcttaaataagggcttgactgcttagcacatccctatttatttttctaaagcaggaagctttgtcttgactaattttgatttgatattaagttgaaaaggggagacctggartaatatgactagagtgttccrttacttttcctttccattttagctgacttgcaatttatgaagaacaacctgacagatgaaaagtacttttattttttttctgaaacttcttttcagagtttatactgaattagctttgtaacaaataaaatagaatcatagaatccttagagttggaagggacctctgaargccctctagtccaactctcgtgcaatgtgtgggacatccacagctagatcaggttgcccagggccctgccttgaaagtttcaagggatggggcatcaaccayataactgggcaaccagtctctgctaa

SEQ ID NO: 6025 - DNA, 600 bp, Chicken  19866894109976_3
aaataagggcttgactgcttagcacatccctatttatttttctaaagcaggaagctttgtcttgactaattttgatttgatattaagttgaaaaggggagacctggartaatatgactagagtgttccrttacttttcctttccattttagctgacttgcaatttatgaagaacaacctgacagatgaaaagtacttttattttttttctgaaacttcttttcagagtttatactgaattagctttgtaacaaataaaatagaatcatagaatccttagagttggaagggacctctgaargccctctagtccaactctcgtgcaatgtgtgggacatccacagctagatcaggttgcccagggccctgccttgaaagtttcaagggatggggcatcaaccayataactgggcaaccagtctctgctaaagagtctgtgcccttctttcctgtagctcccctttagatattgaaaggccactatcaggtcacctcacatccttctccagactgaagagtgtcagctctctcagcctgtcctcataggagaggtgttccattccatggatcatttttgtggccctcctctggacacactcca

SEQ ID NO: 6026 - DNA, 600 bp, Chicken  19866894109976_4
ctggartaatatgactagagtgttccrttacttttcctttccattttagctgacttgcaatttatgaagaacaacctgacagatgaaaagtacttttattttttttctgaaacttcttttcagagtttatactgaattagctttgtaacaaataaaatagaatcatagaatccttagagttggaagggacctctgaargccctctagtccaactctcgtgcaatgtgtgggacatccacagctagatcaggttgcccagggccctgccttgaaagtttcaagggatggggcatcaaccayataactgggcaaccagtctctgctaaagagtctgtgcccttctttcctgtagctcccctttagatattgaaaggccactatcaggtcacctcacatccttctccagactgaagagtgtcagctctctcagcctgtcctcataggagaggtgttccattccatggatcatttttgtggccctcctctggacacactccaactggtccatgtctctcttatactgagaactccacatctggatgcagtaytccaggtgaggcggtgaggcctcaccagcacagaatagaggggcaggatcac

SEQ ID NO: 6027 - DNA, 600 bp, Chicken  19866894109976_5
aggttgcccagggccctgccttgaaagtttcaagggatggggcatcaaccayataactgggcaaccagtctctgctaaagagtctgtgcccttctttcctgtagctcccctttagatattgaaaggccactatcaggtcacctcacatccttctccagactgaagagtgtcagctctctcagcctgtcctcataggagaggtgttccattccatggatcatttttgtggccctcctctggacacactccaactggtccatgtctctcttatactgagaactccacatctggatgcagtaytccaggtgaggcggtgaggcctcaccagcacagaatagaggggcaggatcacctccctmgatctgctggtcatgctttttttgatgcagcccgggatacagttggctttctgggctgtaagggcacattgctggctcgtgtccagcttgccrtctaccggtgccctaaggtcttttttggcagggctgctctcaatcctttcgtcccccagtttgtattggaaatgggagttgccttgacccaggtacaataccttgcacttggacttgttgaacttcatgaggttcacctggacccact

SEQ ID NO: 6028 - DNA, 600 bp, Chicken  19866894109976_6
ggcaaccagtctctgctaaagagtctgtgcccttctttcctgtagctcccctttagatattgaaaggccactatcaggtcacctcacatccttctccagactgaagagtgtcagctctctcagcctgtcctcataggagaggtgttccattccatggatcatttttgtggccctcctctggacacactccaactggtccatgtctctcttatactgagaactccacatctggatgcagtaytccaggtgaggcggtgaggcctcaccagcacagaatagaggggcaggatcacctccctmgatctgctggtcatgctttttttgatgcagcccgggatacagttggctttctgggctgtaagggcacattgctggctcgtgtccagcttgccrtctaccggtgccctaaggtcttttttggcagggctgctctcaatcctttcgtcccccagtttgtattggaaatgggagttgccttgacccaggtacaataccttgcacttggacttgttgaacttcatgaggttcacctggacccactgctcaaggctgtctagggctctctggatggcatcctgtccctcttgcggtgttgactgc

SEQ ID NO: 6029 - DNA, 600 bp, Chicken  19866894109976_7
ctccagactgaagagtgtcagctctctcagcctgtcctcataggagaggtgttccattccatggatcatttttgtggccctcctctggacacactccaactggtccatgtctctcttatactgagaactccacatctggatgcagtaytccaggtgaggcggtgaggcctcaccagcacagaatagaggggcaggatcacctccctmgatctgctggtcatgctttttttgatgcagcccgggatacagttggctttctgggctgtaagggcacattgctggctcgtgtccagcttgccrtctaccggtgccctaaggtcttttttggcagggctgctctcaatcctttcgtcccccagtttgtattggaaatgggagttgccttgacccaggtacaataccttgcacttggacttgttgaacttcatgaggttcacctggacccactgctcaaggctgtctagggctctctggatggcatcctgtccctcttgcggtgttgactgcaccccacagctttggtgtcatcagcaaacttgctgaggatgcactcacccccgctggttgctgtcattgatggaagatgttaaagagtatcag

SEQ ID NO: 6030 - DNA, 600 bp, Chicken  19866894109978_1
tcggagtctgttttttttaaaatcacttgggttatttttgaaccaggaaaggataacagccagaccagacattggtatcagctgggatgcaacaattaacaactaaacaggggtgtaagaattagccaaaaattatgcctcatcccctgctaactgtacaaaataacagcatagctctcacctagactggggctaaggcccaggccaagcatgcaaggtgcacacagccttgaaccattccttactgcttccttcttttcctctgaagcaccagttaaactaaggagatcttacagcatyggattatgattaacttatgatcagctccgtgtaaatatcggagagctacagagaagctcaaatgttatcatggctgttctcttggatcacttcagagaggcagggtgtgtgggaggaggagagcaaagctgtgtgccagaggaggcaaaatggcaaggggacaacaaggccgggtcacctggagccgtctggtgtgactgcaacgagtgggaaaggagtgcctgacagagcagaggatgagcagaacaaggtgacaccagtgataacattctcaagattattctatcaagaaagaccgga

SEQ ID NO: 6031 - DNA, 600 bp, Chicken  19866894109978_2
gtttctgtgataacagctagactacagatgagaagcaatagatatgtgggggtttgtagcattcctgcttctttcttgtttatagctctaattattttacactgtgctgaaacagacctcgaaaaacactgtgcttgacttagagaacagtttagttgatcagtcaacaatttggcaaagtaaataacaagaagctacacaaaaagaagtcagtgaggaattctacaattaaagcagtcagaatttatgtgagtaaacttttctttctctatctttatatctgtagaaattattcatctyatttaaagactcgctgtgacattttctgtgtcagactcagaaaaactctgtatgtactggttcattcaattgtcttttgtcacccacaacatgttaattattctgctttttcaccagctggctwttagcaaggtttcagtgataataacactggaaagaatgcattgctaaagttggatcctgtgtaactgacaggatcccttcaggccctcagtgactcaaggaaggtgatccaacaaaatcataatcacaagacctctaaaagtcatgattatgttaaaacttctgagatttagatca

SEQ ID NO: 6032 - DNA, 600 bp, Chicken  19866894109978_3
aacactgtgcttgacttagagaacagtttagttgatcagtcaacaatttggcaaagtaaataacaagaagctacacaaaaagaagtcagtgaggaattctacaattaaagcagtcagaatttatgtgagtaaacttttctttctctatctttatatctgtagaaattattcatctyatttaaagactcgctgtgacattttctgtgtcagactcagaaaaactctgtatgtactggttcattcaattgtcttttgtcacccacaacatgttaattattctgctttttcaccagctggctwttagcaaggtttcagtgataataacactggaaagaatgcattgctaaagttggatcctgtgtaactgacaggatcccttcaggccctcagtgactcaaggaaggtgatccaacaaaatcataatcacaagacctctaaaagtcatgattatgttaaaacttctgagatttagatcaggaaactcttttctttttaattcaccttctaattttggggtcctcataagaaagccagtccaggatcaaagcacaactttaaatgcacgtgcaaaaatgtgaagtttatcactggtacctaaaa

SEQ ID NO: 6033 - DNA, 600 bp, Chicken  19866894109983_1
atatatttgcaattcatgtgtgtgagccttcataagtgacactcttttgtatgacaaagaattttgtagaattcaaagacatttatttattgttcatttcttaaagctgtttacgagggaagtaaactgtctcttgctgtgttaaaataatttcccacctgaatgtcaagtaaactggtatgtaaccaatagttttccctttcatggcagctttggtttctatactctagtggatctgtgcataaagtgtagtttaaatagataagcgttgtcaagatgaagtgaagcctagaagagccytccttggaaacattcccatgtaagtctcatcttctgggttccagtgatcctttttgcttggaatttattgcatgtctttaacttcatgctgtatattggtagtgctgcaactttatccttttcagctatggtatcaatctattgaaaagctgtgtacttaacaaaagtgcattgcaatgtagaggaagagagaaaaataatcataatggatttctaatgaaaagtggagaagaaatacacttctaccatgcagtgagatcaatattttgatgaattttatgtcaagttatgttctgtata

SEQ ID NO: 6034 - DNA, 599 bp, Chicken  19866894109985_1
  misc_feature (1)..(150): n is any nucleotide
nnnnnnnnnnnnnnnnnnnnnnnnnnnnnnnnnnnnnnnnnnnnnnnnnnnnnnnnnnnnnnnnnnnnnnnnnnnnnnnnnnnnnnnnnnnnnnnnnnnnnnnnnnnnnnnnnnnnnnnnnnnnnnnnnnnnnnnnnnnnnnnnnnnnnnaaatgaagatatgcagattgaaatgtggaaactttccctttagttttaaaaaaaaaaaaaaagaattccaagtataagcaaattgtaaatttattgatctccctctccatttcctggtttaatgaaattcatttaataaataagtaaatkartaaaaccccttctattacatgcttttcctgtttctaaatctgtaagaatttaatctgtaagattttaaagcaagggaaacaaacaaaaacaaaaacaaaaaaagagagagagagatttttccagaatgaaaaatagtattgatcaaatgtgttgatatttttagttttctgtaacttttattttcttccaaattcaaccctggttttagctgctaygaatacaaatatgtygataaataaataaacaaataaataaataaaattgtattattagtaagtttattccagataactgaa

SEQ ID NO: 6035 - DNA, 599 bp, Chicken  19866894109985_2
  misc_feature (1)..(148): n is any nucleotide
nnnnnnnnnnnnnnnnnnnnnnnnnnnnnnnnnnnnnnnnnnnnnnnnnnnnnnnnnnnnnnnnnnnnnnnnnnnnnnnnnnnnnnnnnnnnnnnnnnnnnnnnnnnnnnnnnnnnnnnnnnnnnnnnnnnnnnnnnnnnnnnnnnnnaaatgaagatatgcagattgaaatgtggaaactttccctttagttttaaaaaaaaaaaaaaagaattccaagtataagcaaattgtaaatttattgatctccctctccatttcctggtttaatgaaattcatttaataaataagtaaatkartaaaaccccttctattacatgcttttcctgtttctaaatctgtaagaatttaatctgtaagattttaaagcaagggaaacaaacaaaaacaaaaacaaaaaaagagagagagagatttttccagaatgaaaaatagtattgatcaaatgtgttgatatttttagttttctgtaacttttattttcttccaaattcaaccctggttttagctgctaygaatacaaatatgtygataaataaataaacaaataaataaataaaattgtattattagtaagtttattccagataactgaaag

SEQ ID NO: 6036 - DNA, 599 bp, Chicken  19866894109985_3
  misc_feature (1)..(44): n is any nucleotide
nnnnnnnnnnnnnnnnnnnnnnnnnnnnnnnnnnnnnnnnnnnnaaatgaagatatgcagattgaaatgtggaaactttccctttagttttaaaaaaaaaaaaaaagaattccaagtataagcaaattgtaaatttattgatctccctctccatttcctggtttaatgaaattcatttaataaataagtaaatkartaaaaccccttctattacatgcttttcctgtttctaaatctgtaagaatttaatctgtaagattttaaagcaagggaaacaaacaaaaacaaaaacaaaaaaaragagagagagatttttccagaatgaaaaatagtattgatcaaatgtgttgatatttttagttttctgtaacttttattttcttccaaattcaaccctggttttagctgctaygaatacaaatatgtygataaataaataaacaaataaataaataaaattgtattattagtaagtttattccagataactgaaagcttagaatgcattgaagaggggacaagcatgtagggcctaaaagtagtcataacaaatactttatatgatatttctgttacttgacgctactggcactgtatgt

SEQ ID NO: 6037 - DNA, 600 bp, Chicken  19866894109985_4
caagtataagcaaattgtaaatttattgatctccctctccatttcctggtttaatgaaattcatttaataaataagtaaatkartaaaaccccttctattacatgcttttcctgtttctaaatctgtaagaatttaatctgtaagattttaaagcaagggaaacaaacaaaaacaaaaacaaaaaaagagagagagagatttttccagaatgaaaaatagtattgatcaaatgtgttgatatttttagttttctgtaacttttattttcttccaaattcaaccctggttttagctgctaygaatacaaatatgtygataaataaataaacaaataaataaataaaattgtattattagtaagtttattccagataactgaaagcttagaatgcattgaagaggggacaagcatgtagggcctaaaagtagtcataacaaatactttatatgatatttctgttacttgacgctactggcactgtatgtgatttaaatgaaaagttgtgaatgtcccagttcattgcaggggagttggactggatgaccctcggaggacccttccaactctgaggattccatgattctataaaaagtgatta

SEQ ID NO: 6038 - DNA, 600 bp, Chicken  19866894109985_5
tgtaaatttattgatctccctctccatttcctggtttaatgaaattcatttaataaataagtaaatkartaaaaccccttctattacatgcttttcctgtttctaaatctgtaagaatttaatctgtaagattttaaagcaagggaaacaaacaaaaacaaaaacaaaaaaagagagagagagatttttccagaatgaaaaatagtattgatcaaatgtgttgatatttttagttttctgtaacttttattttcttccaaattcaaccctggttttagctgctaygaatacaaatatgtygataaataaataaacaaataaataaataaaattgtattattagtaagtttattccagataactgaaagcttagaatgcattgaagaggggacaagcatgtagggcctaaaagtagtcataacaaatactttatatgatatttctgttacttgacgctactggcactgtatgtgatttaaatgaaaagttgtgaatgtcccagttcattgcaggggagttggactggatgaccctcggaggacccttccaactctgaggattccatgattctataaaaagtgattaaaataatacaattga

SEQ ID NO: 6039 - DNA, 600 bp, Chicken  19866894109988_1
aggaaaaagcacctgcttcaaggaatagataaatgactgaaatacattaacagagaaaactgtttcttgcagcaccatgctattactgaaaaatctgatttctctgtgcttgaaacacttgtgttattcaatagagtttgcgggaatccaaccagagagagttagaatcatagaatcatagaatggtttgagttggaagggacctttaaaggccatctggtccaactccctgcactgaacagggatgcccatcaggtgctcagagccctgtccagtgtgatctttggtgtctcctgagayggggcactcatcacctctccaggcaatctcaacctggcagttctcaagccagaaatcctgcagacamaacaaacacctgaatttgcatcacgatgtggatcatactttatctgaccacttctgatgccaaatccatggtggcaaccaggtgaaggaagagaagagcaatcctgagccccggagattgggctgacgcatgtggagagagaaaagaatagagcagtcccaaggggagagtgatgtcagggtggtgatggaaacagttactcactggatgtgagaattaatcattaattaatg

SEQ ID NO: 6040 - DNA, 600 bp, Chicken  19866894109988_2
tgcagcaccatgctattactgaaaaatctgatttctctgtgcttgaaacacttgtgttattcaatagagtttgcgggaatccaaccagagagagttagaatcatagaatcatagaatggtttgagttggaagggacctttaaaggccatctggtccaactccctgcactgaacagggatgcccatcaggtgctcagagccctgtccagtgtgatctttggtgtctcctgagayggggcactcatcacctctccaggcaatctcaacctggcagttctcaagccagaaatcctgcagacamaacaaacacctgaatttgcatcacgatgtggatcatactttatctgaccacttctgatgccaaatccatggtggcaaccaggtgaaggaagagaagagcaatcctgagccccggagattgggctgacgcatgtggagagagaaaagaatagagcagtcccaaggggagagtgatgtcagggtggtgatggaaacagttactcactggatgtgagaattaatcattaattaatgacactctgaaaaaggagaaaaccccgggtggatttacaaggtcgctcctctgttgtttaaacgtgcg

SEQ ID NO: 6041 - DNA, 600 bp, Chicken  19866894109991_1
tgcatctagctgctaatcatgcaggttagaaaagggagaggaaatgtggccacaaaagttgagctgagaactggtgaccagctttacatttctaacgcctctccctttctcaatctaacttttgcaaacagctgtcaggatttgagctgtgtgaaacagagtcttccatcaaaagaaaagtcagtaagaagaacttcagccaagtctgtatgttggcttacattgcccccgagaacctgatggacgtctattacccatacaagaggccctgtgagatatacaggtatgtctgccccacargccytcctgggtgtgatgccagtgggcagatgtcaagctgtcaagctgtggatggaggccaggtttaatcagacattattatcaggcatagccccatccctctccattagaaaggaggacgatgtggtgggatgaacactgagaaactcttgcttgtctttttccagctttgggatcgtgctgtgggagattgcaacctccaaaatcccatttgaaggtgagtcagaagttgtctatggccctgtgtaaaagctcacctgctggagcatcccatagcatgtgrgtcccagtacttgggtc

SEQ ID NO: 6042 - DNA, 600 bp, Chicken  19866894109991_2
tctagctgctaatcatgcaggttagaaaagggagaggaaatgtggccacaaaagttgagctgagaactggtgaccagctttacatttctaacgcctctccctttctcaatctaacttttgcaaacagctgtcaggatttgagctgtgtgaaacagagtcttccatcaaaagaaaagtcagtaagaagaacttcagccaagtctgtatgttggcttacattgcccccgagaacctgatggacgtctattacccatacaagaggccctgtgagatatacaggtatgtctgccccacargccytcctgggtgtgatgccagtgggcagatgtcaagctgtcaagctgtggatggaggccaggtttaatcagacattattatcaggcatagccccatccctctccattagaaaggaggacgatgtggtgggatgaacactgagaaactcttgcttgtctttttccagctttgggatcgtgctgtgggagattgcaacctccaaaatcccatttgaaggtgagtcagaagttgtctatggccctgtgtaaaagctcacctgctggagcatcccatagcatgtgrgtcccagtacttgggtctgca

SEQ ID NO: 6043 - DNA, 600 bp, Chicken  19866894109991_3
gtatgtctgccccacargccytcctgggtgtgatgccagtgggcagatgtcaagctgtcaagctgtggatggaggccaggtttaatcagacattattatcaggcatagccccatccctctccattagaaaggaggacgatgtggtgggatgaacactgagaaactcttgcttgtctttttccagctttgggatcgtgctgtgggagattgcaacctccaaaatcccatttgaaggtgagtcagaagttgtctatggccctgtgtaaaagctcacctgctggagcatcccatagcatgtgrgtcccagtacttgggtctgcatgacgtcttcacagcttctgcacacggttaaaccacaagaatgcaagaaacgtctctattcgttgtttctatgcattgaagcgttaagacatcctgtttcgatgggacccagtggtgtcacagcaaagatgggggggagttcattgcagacacagtttgggtggcccctctgctggcttctccatggaggaggctgcaggatggctttggtgggcctccacacctcctgatgtccctgtttcacttaggctgccctctccaggagatcagggacaaaat

SEQ ID NO: 6044 - DNA, 600 bp, Chicken  19866894109996_1
tttcctgaatttgcacaagggtttacctagaatctcagagattctactgaaaaagactgatttttccattacaattaaatacatttttccttccatgtattccattggatttttttttaataagcccaaactgctcactactctcttgtccaattaaatctccagcatttgaactaaaagttggctctttacaaggagtctttacaggggctttcacctgagttacctattggcaaacaaatgtaaaaagccattgcaactgtatataaattcttctacctgctcttttcactgaaattytgcctgatgatgaacaggtccctaaaagcagcttcagaccatggttygtaatttygtgggtgaggagcaccatcccagtgtgcatccagacttctacagactacattacagtgtctttctagagccacaaaatcaggctttcagacatgcaggggctcataagtactctgatatgcttaygcacatcaagtgtatctgtgggaatttttatctacctatctatataatctatcatctgtctgtctgtctatgtatttgggcaggcttgttcataccctattttattcctatgtctatata

SEQ ID NO: 6045 - DNA, 600 bp, Chicken  19866894109996_2
tgaaaaagactgatttttccattacaattaaatacatttttccttccatgtattccattggatttttttttaataagcccaaactgctcactactctcttgtccaattaaatctccagcatttgaactaaaagttggctctttacaaggagtctttacaggggctttcacctgagttacctattggcaaacaaatgtaaaaagccattgcaactgtatataaattcttctacctgctcttttcactgaaattytgcctgatgatgaacaggtccctaaaagcagcttcagaccatggttygtaatttygtgggtgaggagcaccatcccagtgtgcatccagacttctacagactacattacagtgtctttctagagccacaaaatcaggctttcagacatgcaggggctcataagtactctgatatgcttaygcacatcaagtgtatctgtgggaatttttatctacctatctatataatctatcatctgtctgtctgtctatgtatttgggcaggcttgttcataccctattttattcctatgtctatatagaaatactgctgccactgaattttcctgccacgatctactaacctag

SEQ ID NO: 6046 - DNA, 600 bp, Chicken  19866894109996_3
actgatttttccattacaattaaatacatttttccttccatgtattccattggatttttttttaataagcccaaactgctcactactctcttgtccaattaaatctccagcatttgaactaaaagttggctctttacaaggagtctttacaggggctttcacctgagttacctattggcaaacaaatgtaaaaagccattgcaactgtatataaattcttctacctgctcttttcactgaaattytgcctgatgatgaacaggtccctaaaagcagcttcagaccatggttygtaatttygtgggtgaggagcaccatcccagtgtgcatccagacttctacagactacattacagtgtctttctagagccacaaaatcaggctttcagacatgcaggggctcataagtactctgatatgcttaygcacatcaagtgtatctgtgggaatttttatctacctatctatataatctatcatctgtctgtctgtctatgtatttgggcaggcttgttcataccctattttattcctatgtctatatagaaatactgctgccactgaattttcctgccacgatctactaacctagtttttgac

SEQ ID NO: 6047 - DNA, 600 bp, Chicken  19866894109996_4
ttggctctttacaaggagtctttacaggggctttcacctgagttacctattggcaaacaaatgtaaaaagccattgcaactgtatataaattcttctacctgctcttttcactgaaattytgcctgatgatgaacaggtccctaaaagcagcttcagaccatggttygtaatttygtgggtgaggagcaccatcccagtgtgcatccagacttctacagactacattacagtgtctttctagagccacaaaatcaggctttcagacatgcaggggctcataagtactctgatatgcttaygcacatcaagtgtatctgtgggaatttttatctacctatctatataatctatcatctgtctgtctgtctatgtatttgggcaggcttgttcataccctattttattcctatgtctatatagaaatactgctgccactgaattttcctgccacgatctactaacctagtttttgacctaacctcatgaaaggataccatattcaaaactgtaaagaccttggggagtcagtagaagtaattaagggaaattaccarcattttggatgcagaaactgtagcgttcagtagatgaccttgcta

SEQ ID NO: 6048 - DNA, 600 bp, Chicken  19866894109996_5
ggctttcagacatgcaggggctcataagtactctgatatgcttaygcacatcaagtgtatctgtgggaatttttatctacctatctatataatctatcatctgtctgtctgtctatgtatttgggcaggcttgttcataccctattttattcctatgtctatatagaaatactgctgccactgaattttcctgccacgatctactaacctagtttttgacctaacctcatgaaaggataccatattcaaaactgtaaagaccttggggagtcagtagaagtaattaagggaaattaccarcattttggatgcagaaactgtagcgttcagtagatgaccttgctagttagctgaactctgacagtacgcatctgtacgtggcaggggactatgagctcaagagcagagactgtggcacagtggcttttatccaaactgcagggtgaaacctctgaaagacacccatgaccttcctatttactgactactttcattgaaatttgttgtaaaccaaaggtgaaaattaactgaactcaaaaataaaccagatataaattaccaatcagagtcttacccactgcctctctccttttccagatc

SEQ ID NO: 6049 - DNA, 595 bp, Chicken  19866894109998_1
ggcttaaattcttgtatatttagagcaaagcagtgggtgtgaggaactatgtctaaccttcctgcttccgtctccatgcctagtttctctctcatggatattgtagagcctttagaaagaggcttgagtgggagtttgggatttttcagtatgtgagaacgagctggtggcagtgttgactaaaccacaactgcaactcactgattcctttggacgatgagacacgggtgatgagcatggtgggaaaaatacagcagtactcagtagcaacaggacttttccttcaaccatggagcttcycctcagccagattacagtggggagttggcatagggccaagcgggcatcagggatggggccgcttgtgggtacagaaccactggggtggaagtgaygtgagagggaccagcgatgtgtcttggtgagcaggaggacatcccttggaagccacagcacacaaaatatgcatgggcatatagaggagaaacttgggtttgagccaatgtttcatcagcctcgattccaagacatggtcccaaatcaggacagcttcccatgtgctacatgtgtcaagcattaaggagatctgaggctg

SEQ ID NO: 6050 - DNA, 500 bp, Chicken  19866894109998_2
ggatattgtagagcctttagaaagaggcttgagtgggagtttgggatttttcagtatgtgagaacgagctggtggcagtgttgactaaaccacaactgcaactcactgattcctttggacgatgagacacgggtgatgagcatggtgggaaaaatacagcagtactcagtagcaacaggacttttccttcaaccatggagcttcycctcagccagattacagtggggagttggcatagggccaagcgggcatcagggatggggccgcttgtgggtacagaaccactggggtggaagtgaygtgagagggaccagcgatgtgtcttggtgagcaggaggacatcccttggaagccacagcacacaaaatatgcatgggcatatagaggagaaacttgggtttgagccaatgtttcatcagcctcgattccaagacatggtcccaaatcaggacagcttcccatgtgctacatgtgtcaagcattaaggagatctgaggctg

SEQ ID NO: 6051 - DNA, 600 bp, Chicken  19866894110011_1
ctcgtatgtgaaacaatacataattttaaaattctctccaattcttttaaggagatttttgagttaagtcctactaatacattaaataactaaaccacgttacagcaaaaactttttaatgaggtctgcttagaatttcctttatgatgtttaagtacaaaacctaaagtaactttggaaatggaaataataatggctttatcagagattttctgtgacataaaggcaggtggtattttttttccctacacaacaataaagaaatgaaaagaaaacccagaaaacacggatgttagcatraaacacctgatctaacttcaaagttagcctttgctttgaacaggaggtttgactaaatgacatccagagctcccttccaaacttcataattctgtgatyctactttttgcttagagtagattcagaacttgttcatcatgtggtgattggaaaagaactggcactgtgagatttatgagtacaagtcctgaacttgcaggctgcgcagccagcaataacccttgcctctgcacaaagcttcaaggaattcagcctgaaggaccatacttagaagccaaaaaactgatgatgaggaataaa

SEQ ID NO: 6052 - DNA, 600 bp, Chicken  19866894110011_2
ttacagcaaaaactttttaatgaggtctgcttagaatttcctttatgatgtttaagtacaaaacctaaagtaactttggaaatggaaataataatggctttatcagagattttctgtgacataaaggcaggtggtattttttttccctacacaacaataaagaaatgaaaagaaaacccagaaaacacggatgttagcatraaacacctgatctaacttcaaagttagcctttgctttgaacaggaggtttgactaaatgacatccagagctcccttccaaacttcataattctgtgatyctactttttgcttagagtagattcagaacttgttcatcatgtggtgattggaaaagaactggcactgtgagatttatgagtacaagtcctgaacttgcaggctgcgcagccagcaataacccttgcctctgcacaaagcttcaaggaattcagcctgaaggaccatacttagaagccaaaaaactgatgatgaggaataaaacaacacaacaacaacaattacaaaccagaaaacccaagacttgtattagagtaatctacgtgttgtctgctgattctttgtccagcacactatctcaa

SEQ ID NO: 6053 - DNA, 600 bp, Chicken  19866894110011_3
ctttgtccagcacactatctcaattaacttcttctcatttgagggaaacagctttgtataccttaagaacctctctgctgagcttccagttaacagactcggcattcctgataagcttgaagttgaaacaaagcaaatgaccacaataaccataagcaaatcctccccacaattcccttccttccacctgctatcttttcaccttactccgaaacaaaagcaaatctcaacttccaagatttttctatgtattttacacacgtagatgtgtacacaactatatatccgttaaaagatatmattgattattttaacaaaacacttacctgaagctactggtatatcacaaccagcagccttcagggcgttaacagcatcggtgactcttgcaggatatacacaaaccgctgcgacagtaatacctgccagagacacaattcatttttttcatatgcagacttacacttctctagtgcacaccatataacaaacacaagtatgttatttgtacctctctctcacttttgtattctcacaagaaccttaagcacatgcaacaaggatattcgtataagggcttctccatattttacctccctc

SEQ ID NO: 6054 - DNA, 406 bp, Chicken  19866894110012_1
tccaacctgcacttaaatgtctccagagttggagctacttttggcagcctgtgccagagcctcaccactctgagtagaaaatttcttcctaacatctaacatacatctccccttttttagcctacagccattctccctcatcctgtcaattctgcacacttgtttgtttcatactaacaaagaattttcaagtcttaggtgacgataatcttgttttcttaatcaacaaatatgagttaatgtcaaactagcattttacatatgcatagaatacccagtaatgcatcttctaacataaasaagcccttcatgccccgaaacagggaaaggaaatggaagacacacctatcgctactgagagtagttaatggtggcacactatttataagggtgaaaatataagata

SEQ ID NO: 6055 - DNA, 600 bp, Chicken  19866894110013_1
cccatcagggatacattcaggagtgtgttacacataataaatgaatgtgagttgctcctccatccagaacacaatgtagggtgtggcatcaggaatcgcatctgcagttggcattgctgtaatgccattggcagctagtggagatccttaataatgaaacgtttaccctggtgttttattagtaattactaacaatgccatgtggctcaaggtttcttattgcctgttttattcctttctggcacctgtggtggagtctcagggtgagaagataccgggcactttcatagaatcgtagarttgtttgagttagaatggacatgtaaaggttatgtggtgatcagggacagccacagctccatcagttgctcagagcccctccagggtgacactgaatgtctccagggatggggcaccaccacctctcttggcaacctgtgccagtgcctcaccacccttatcataaaatttattttctttatatccaatccaaatctcccctcgtctagtttgaaaacatttccccttgtcctatcccaacagaccctacttargagtctaccaccttctttcttacagccccccattagatactgaaag

SEQ ID NO: 6056 - DNA, 600 bp, Chicken  19866894110013_2
agtctcagggtgagaagataccgggcactttcatagaatcgtagarttgtttgagttagaatggacatgtaaaggttatgtggtgatcagggacagccacagctccatcagttgctcagagcccctccagggtgacactgaatgtctccagggatggggcaccaccacctctcttggcaacctgtgccagtgcctcaccacccttatcataaaatttattttctttatatccaatccaaatctcccctcgtctagtttgaaaacatttccccttgtcctatcccaacagaccctacttargagtctaccaccttctttcttacagccccccattagatactgaaaggttcttccttccttcccagccatacctgatagttgattcagatatattcagtggcacagccatggctttgctaaaaacytgaattcagactttctctagaaaaaaaaaagcaaacccactgtgtgaggtttgcatgctcactgcctggaagaatggagaaacaaggtctkctcgatcacctccaggcaccccttagtgaccccaatctcccaccttgagagcacctcgaaggtgggccaccgcgttaattgaag

SEQ ID NO: 6057 - DNA, 600 bp, Chicken  19866894110013_3
tccagggtgacactgaatgtctccagggatggggcaccaccacctctcttggcaacctgtgccagtgcctcaccacccttatcataaaatttattttctttatatccaatccaaatctcccctcgtctagtttgaaaacatttccccttgtcctatcccaacagaccctacttargagtctaccaccttctttcttacagccccccattagatactgaaaggttcttccttccttcccagccatacctgatagttgattcagatatattcagtggcacagccatggctttgctaaaaacytgaattcagactttctctagaaaaaaaaaagcaaacccactgtgtgaggtttgcatgctcactgcctggaagaatggagaaacaaggtctkctcgatcacctccaggcaccccttagtgaccccaatctcccaccttgagagcacctcgaaggtgggccaccgcgttaattgaagcctttttagttcttacaggcaagatttaatcaccttaaattatggtaaatggatggggagttatcctgtgatctcgaagccacacaggtcagctttaatttccttttccttccatcattaatact

SEQ ID NO: 6058 - DNA, 600 bp, Chicken  19866894110013_4
tccagggatggggcaccaccacctctcttggcaacctgtgccagtgcctcaccacccttatcataaaatttattttctttatatccaatccaaatctcccctcgtctagtttgaaaacatttccccttgtcctatcccaacagaccctacttargagtctaccaccttctttcttacagccccccattagatactgaaaggttcttccttccttcccagccatacctgatagttgattcagatatattcagtggcacagccatggctttgctaaaaacytgaattcagactttctctagyaaaaaaaaagcaaacccactgtgtgaggtttgcatgctcactgcctggaagaatggagaaacaaggtctkctcgatcacctccaggcaccccttagtgaccccaatctcccaccttgagagcacctcgaaggtgggccaccgcgttaattgaagcctttttagttcttacaggcaagatttaatcaccttaaattatggtaaatggatggggagttatcctgtgatctcgaagccacacaggtcagctttaatttccttttccttccatcattaatactggcggatgggtgtttgattta

SEQ ID NO: 6059 - DNA, 600 bp, Chicken  19866894110013_5
tattttctttatatccaatccaaatctcccctcgtctagtttgaaaacatttccccttgtcctatcccaacagaccctacttargagtctaccaccttctttcttacagccccccattagatactgaaaggttcttccttccttcccagccatacctgatagttgattcagatatattcagtggcacagccatggctttgctaaaaacytgaattcagactttctctagaaaaaaaaaagcaaacccactgtgtgaggtttgcatgctcactgcctggaagaatggagaaacaaggtctkctcgatcacctccaggcaccccttagtgaccccaatctcccaccttgagagcacctcgaaggtgggccaccgcgttaattgaagcctttttagttcttacaggcaagatttaatcaccttaaattatggtaaatggatggggagttatcctgtgatctcgaagccacacaggtcagctttaatttccttttccttccatcattaatactggcggatgggtgtttgatttattaagcactgaataataaggctttcatgtggagtgttgtcagaaggagaaacaggctcctttgaagcagg

SEQ ID NO: 6060 - DNA, 600 bp, Chicken  19866894110013_6
atgaaatatttggatttggagctattgttttaacccttccaatttgaaaataaatgtcacttcgagctgaaaaaatccaaacataattatgaaacactaaaatgaattgtttcaggggctggtgttgttgaggggtatttggtgttttttttttgtatgttttccccaagtaaataagtttgcagaattagaatcatagaatatttagggttggaaaagacccctaagattatctagcccaactgtccacctaccaccaatattgcccactaaaccatgtccctaactaccacatctacrcttttcttgagcacctccagggtcggtgactccaccagctccttgggcagcctgtgccagtgctcgaccactctttcaaagaagaattttttcctaatatccagtctgagattaataaaatacttgttaacacatctgtccttccaaggtttcacctgaaaaccaccacccatccatgcgctttagccttaaagctggtggtggcagaagaggaaaacaggatgtaggtgatgaaatgggcttgttgggagcaacctgaatcatagaatcatagaacatcccaagtctgaagagacccat

SEQ ID NO: 6061 - DNA, 600 bp, Chicken  19866894110013_7
ctccttgggcagcctgtgccagtgctcgaccactctttcaaagaagaattttttcctaatatccagtctgagattaataaaatacttgttaacacatctgtccttccaaggtttcacctgaaaaccaccacccatccatgcgctttagccttaaagctggtggtggcagaagaggaaaacaggatgtaggtgatgaaatgggcttgttgggagcaacctgaatcatagaatcatagaacatcccaagtctgaagagacccataaggatcatcgagtcctcctcctggctctacacaggaycacccaaagaagacctgcagggaacggggccatcgcccttctgagcttaaaattgcatcagtatctagaaaccttctccttgttggcatccatagaggtgaaacccaacgtaagggttctatactgagtcacataaattttatatggagagacttaaacccaggtcagcacatggcttagtgccttctccccattccttctcatcctactctgcaagccccactcrgtgatttccctctttgctgtttatacctttcaaatatttgcggactgttaagttgccgggtccctgctaagctg

SEQ ID NO: 6062 - DNA, 600 bp, Chicken  19866894110013_8
agaatcatagaacatcccaagtctgaagagacccataaggatcatcgagtcctcctcctggctctacacaggaycacccaaagaagacctgcagggaacggggccatcgcccttctgagcttaaaattgcatcagtatctagaaaccttctccttgttggcatccatagaggtgaaacccaacgtaagggttctatactgagtcacataaattttatatggagagacttaaacccaggtcagcacatggcttagtgccttctccccattccttctcatcctactctgcaagccccactcrgtgatttccctctttgctgtttatacctttcaaatatttgcggactgttaagttgccgggtccctgctaagctgccattaagccaagctaaacacattatctcaaaaagtcagtctttctgacttcgtaataatattttgctttgctcttctctgaatttcctctggtttattgacattttcctgggattgtggcacttggccctgctggtgatttgggcagtgtcatctttgcagataattgagcagcgggtagagaatccatgtacttgtggcatattagaatggatattagaaaaaa

SEQ ID NO: 6063 - DNA, 600 bp, Chicken  19866894110015_1
tacctcgagctgcagagagtgtaagagccaaagggcatttaccctttgcatcagctgtctggcaaacccctggagctcgcaattgggagcagcaggaaggcacagcaatgaatgctgctgcttgggctcgtgcccagcgtgctgggaggtgtgtcctggctgttgggagggaggaaatctcctccaggtggacaggaggttctgagcctgtcccctaacttgggcctggggagggaaggaagggaaggagccacgtgcatccaggagtcccctttgttataggaaaagggttgggaaacrcttctgtccctttgcagaccaggtgtggagccccctgtcctcactgcagctgatccctctgtgctggaaggaagcacatgtgggacttgaggccgtggggtctgtgaggtgtgtggggttggggttgttgctattacatccttgtttgttttccatcctcagcctccagcggttgcataaacgggagcaaattgaagggttacatcagtgctgtttgcagcggtgtggggagaagtgctggtatgaagttaggtgagccagccttgcggggcagcaggatgtgctcccatctccctgctt

SEQ ID NO: 6064 - DNA, 600 bp, Chicken  19866894110015_2
agttaggtgagccagccttgcggggcagcaggatgtgctcccatctccctgctttggtgtcccccgatggggctcggaggtcttcaggagcctcatccatctgaatgaaatcctcatgctaacgttggattgcacgtgtgcatttagaacagcgtgtttggaggaggaaagagaaaaacccaacatttctgaacagcaagccatgcaaagcagccccagtgccaggctgggaaggaagcccacagctgtggggtgggaagcgggcactcacttgccaaaacatctgctctcctgctccartgaggtgcacttatggcaccaacagcggagcaaagtcctcgggtgccccaaagcctgttgctgggcaggtctgcagcctctgctgggcatcagccygggctgctgctgctgcagagcagaagtgcagcacttctgtggctgcggaggaggaggggagaaagccttcctctctgctggctgcctgggaaaccgatggcagctcttggtttgcatccattccggtgcgtgatgtgygctgagatccctcatggagagaacggcgagcagtgctttatgctgcttttagaagtgttagctttt

SEQ ID NO: 6065 - DNA, 600 bp, Chicken  19866894110015_3
ccatctgaatgaaatcctcatgctaacgttggattgcacgtgtgcatttagaacagcgtgtttggaggaggaaagagaaaaacccaacatttctgaacagcaagccatgcaaagcagccccagtgccaggctgggaaggaagcccacagctgtggggtgggaagcgggcactcacttgccaaaacatctgctctcctgctccartgaggtgcacttatggcaccaacagcggagcaaagtcctcgggtgccccaaagcctgttgctgggcaggtctgcagcctctgctgggcatcagccygggctgctgctgctgcagagcagaagtgcagcacttctgtggctgcggaggaggaggggagaaagccttcctctctgctggctgcctgggaaaccgatggcagctcttggtttgcatccattccggtgcgtgatgtgygctgagatccctcatggagagaacggcgagcagtgctttatgctgcttttagaagtgttagcttttgaggacatgggagtattcagggacagggctggggaagcagcgtgctggcagagatggtcttaaccttattgcaggctgcagtggcacaggggaggt

SEQ ID NO: 6066 - DNA, 584 bp, Chicken  19866894110015_4
gaagcccacagctgtggggtgggaagcgggcactcacttgccaaaacatctgctctcctgctccartgaggtgcacttatggcaccaacagcggagcaaagtcctcgggtgccccaaagcctgttgctgggcaggtctgcagcctctgctgggcatcagccygggctgctgctgctgcagagcagaagtgcagcacttctgtggctgcggaggaggaggggagaaagccttcctctctgctggctgcctgggaaaccgatggcagctcttggtttgcatccattccggtgcgtgatgtgygctgagatccctcatggagagaacggcgagcagtgctttatgctgcttttagaagtgttagcttttgaggacatgggagtattcagggacagggctggggaagcagcgtgctggcagagatggtcttaaccttattgcaggctgcagtggcacaggggaggtgtttcggcctcagaagtgagctgtgaaatggaagcggctgttccacgctgctggtgaggatcacccattggtgtggaaacctccacgtcacctctgcccggtgagtgctgcgggctgagagc

SEQ ID NO: 6067 - DNA, 600 bp, Chicken  19866894110021_1
cctccctttccagtttgggatttttgaaagggagccatgcgaaaccaactgctcattgtttactgcaaagcctgcggctgcgttgtagcaattccgcttgcagtcaccccaaggatcaggtggaaagttaacgagcaccgcatcacggcacggcgctcgtggggctctccagcgtctgtgcgcactgcccttgggggcatcacctgcatggcaaacccagagctcgggcaggaggaccacataaccatgcgagtcggaggggacccctaaaggccatctggtccatctcccctgcaatgracagggacacctacagctccatcaggagctcagagccccgtccagcccttcctgtyacactgtgcagacctccgggagcatttgtgtgcctcgttgccgaagatatcattaactgtagcacagctcaggctgagcactcagtgatgcctttccgctgacagcgacactgagcggctccgacatcgtctttcccactgaactctgttgatatcactcctgctcgagtcaaacaccgcctaaatcattgcttttgcaagtattccctttcatgatgttatgagcaacaccaaatgagctcat

SEQ ID NO: 6068 - DNA, 600 bp, Chicken  19866894110021_2
tgtttactgcaaagcctgcggctgcgttgtagcaattccgcttgcagtcaccccaaggatcaggtggaaagttaacgagcaccgcatcacggcacggcgctcgtggggctctccagcgtctgtgcgcactgcccttgggggcatcacctgcatggcaaacccagagctcgggcaggaggaccacataaccatgcgagtcggaggggacccctaaaggccatctggtccatctcccctgcaatgracagggacacctacagctccatcaggagctcagagccccgtccagcccttcctgtyacactgtgcagacctccgggagcatttgtgtgcctcgttgccgaagatatcattaactgtagcacagctcaggctgagcactcagtgatgcctttccgctgacagcgacactgagcggctccgacatcgtctttcccactgaactctgttgatatcactcctgctcgagtcaaacaccgcctaaatcattgcttttgcaagtattccctttcatgatgttatgagcaacaccaaatgagctcattatgacccattttccataatgatcccgctgactggagtgaataacacctcccttca

SEQ ID NO: 6069 - DNA, 600 bp, Chicken  19866894110034_1
agcacaaattaagatgacagctgagggggaaatgcttttttaatgaccatatgtaactcagtttcaggagaaaactcaatgaagccaaattcaggagttgagtcttcacagaagctggaacttcagtggcagtcaggtagacagcgcagagcaaacaggagtcatcttcagtcacaagaaccaggagaagcttatttctaaacagaaaaacatgaatacttttcaagttacagctccatgctttttcaacgtagcccttaaaagggttgctctggagttccagttagaagcatggagacrtacctgcatgttaagtaattcttcgatcttattttggatctgcccatatacctcattaaacagttcctccttggattttgttccattcaagtgcactctaaaataagaatggaaaatgagagctataatagaattatgcttctctagccctgtcagattctaattagaagagcatgcatttgccttactggaaaaaaaaacatactccaaccaactaaatatatatatatatcctagacttaaaaaactttttctttaacagccctatagaagtgcttctgttattaaggacttacccac

SEQ ID NO: 6070 - DNA, 600 bp, Chicken  19866894110035_1
cagcatctatttactatgaatggcaagaatttaacccaggcaggaagggaatattcttatgttttttcttgttgtttctatgtttctttttgctttcttttatttttttttcctactctttgagaaaaaattaattctacggtgttgccattatacattcatataaaattacaccttaaaatagtggtgcattttccagcttcaagtgtgtgaagatatttagcttctagtttgcagatgaattgcatttctcacttttgttgcatggtgccaaaattgtgacagctcagtcaaaacaargcctttagttactgcacctttgcaatgataggttattagtgtccccaaagttcttgacagattacatgagaaattcagtagaataaaaagtttaatcaacactaaaatgtgaatgaaatggattcaaaatttgacggacttgtcattggaaaaaagttattaacttgatttttatagcttttgcttgtccttatgttctcactgtactagtgacaaatgtatgtcgtgtactgactactgttgtacagtgataaatgggggagaagtaaagcttgaagtctattcctttttgctggttca

SEQ ID NO: 6071 - DNA, 600 bp, Chicken  19866894110040_1
aataaaagaagcaccatataaatgcaaagcataattattattcaacagatattggaaaaattactgcagtttgtatttgtttttctgtatttgtgggatttatgttgtttcaacactcgaacagattttgataatgacaccatctgttaattctcacccctcactaaattagaacaagtggcagaattgttagatcgcagctttacagatcccagcttaacaaatcagagcccagggtcagtatgagggattaccagtggtgggacacagcacccagcaaggcaccacttccaaccacasctcagggaagagcaggggatcagcaggagcagcaccactcccacagaaccctctggaaaagatctttgggaagtgacatcctctgtcctgttctcactatgtgaagttcactaccttaggttctgttcagactggtggccagsagcaggtgagtatttcagatttgatttatctacatgatgggatggacacctgggtgcaagttaaaggcttgctagttaaaaccagcttcaggtgtgtctgcatgaggcaactgtacccctagctagatgactccttaaatcaacagtgctagattag

SEQ ID NO: 6072 - DNA, 600 bp, Chicken  19866894110040_2
ctgttaattctcacccctcactaaattagaacaagtggcagaattgttagatcgcagctttacagatcccagcttaacaaatcagagcccagggtcagtatgagggattaccagtggtgggacacagcacccagcaaggcaccacttccaaccacasctcagggaagagcaggggatcagcaggagcagcaccactcccacagaaccctctggaaaagatctttgggaagtgacatcctctgtcctgttctcactatgtgaagttcactaccttaggttctgttcagactggtggccagsagcaggtgagtatttcagatttgatttatctacatgatgggatggacacctgggtgcaagttaaaggcttgctagttaaaaccagcttcaggtgtgtctgcatgaggcaactgtacccctagctagatgactccttaaatcaacagtgctagattagggtccaagatggtgtaagttatgactattccatacccagaacaaatgaactgcctgcaaaaaaaaatatataaaaaaaaatatgcctgttgagccagatgaccacaagcatatattaataatacatattcaagtaaaatataa

SEQ ID NO: 6073 - DNA, 600 bp, Chicken  19866894110041_1
aggatcgctccagtcgggatctgtgctcatacacaactgggaagcagaaaaaggcagagcatgagacaaaccctgacacttcttcccagacattattctgcaggtcatgcacacagggatacacctggacctcgagtcctcccacagagcgggccagcaagcgcccgaacaattagacatgagcaataaggcctctcttgtttccaatgggcttcacagctcttccagtctctgcactcaggtttcacttaggaacccaagctgtgagctggatacagtggccagtggctgaactatgcrtttatgggccaagtccartactaggcttaagataaccagagactgccaagttttctgctctgcaccagcagcatgcaagagagatgttttctccccttttccatcccaaccattaactggccctcgaggacaytaaggaagagtgtgccagcagctctcccattagacacaaaagagcatctgtgctctgcacagaggagcaagaagatagaaggacgaggctgctttgtgcatcagccacatgacaaatggaagtgccagagaaacctcctgatggatgatgattttaatgcactctga

SEQ ID NO: 6074 - DNA, 600 bp, Chicken  19866894110041_2
atctgtgctcatacacaactgggaagcagaaaaaggcagagcatgagacaaaccctgacacttcttcccagacattattctgcaggtcatgcacacagggatacacctggacctcgagtcctcccacagagcgggccagcaagcgcccgaacaattagacatgagcaataaggcctctcttgtttccaatgggcttcacagctcttccagtctctgcactcaggtttcacttaggaacccaagctgtgagctggatacagtggccagtggctgaactatgcrtttatgggccaagtccartactaggcttaagataaccagagactgccaagttttctgctctgcaccagcagcatgcaagagagatgttttctccccttttccatcccaaccattaactggccctcgaggacaytaaggaagagtgtgccagcagctctcccattagacacaaaagagcatctgtgctctgcacagaggagcaagaagatagaaggacgaggctgctttgtgcatcagccacatgacaaatggaagtgccagagaaacctcctgatggatgatgattttaatgcactctgatgcctgaatgctaacaaa

SEQ ID NO: 6075 - DNA, 600 bp, Chicken  19866894110041_3
gagtcctcccacagagcgggccagcaagcgcccgaacaattagacatgagcaataaggcctctcttgtttccaatgggcttcacagctcttccagtctctgcactcaggtttcacttaggaacccaagctgtgagctggatacagtggccagtggctgaactatgcrtttatgggccaagtccartactaggcttaagataaccagagactgccaagttttctgctctgcaccagcagcatgcaagagagatgttttctccccttttccatcccaaccattaactggccctcgaggacaytaaggaagagtgtgccagcagctctcccattagacacaaaagagcatctgtgctctgcacagaggagcaagaagatagaaggacgaggctgctttgtgcatcagccacatgacaaatggaagtgccagagaaacctcctgatggatgatgattttaatgcactctgatgcctgaatgctaacaaagagcaatccctgagccacagcactcagctgcaaccagaagctgctccatcccctctgtgcagagactgccacataacagcatggggcttcaggcaactcagacagcagggcaata

SEQ ID NO: 6076 - DNA, 600 bp, Chicken  19866894110041_4
gtgagttggctgtttctcactttaaataactgccaagccttcagcaaacctgcaggcagagcaaggagagagcagagactgatcacagcacagcagcaggagcaccgggtgcacaaatccaacacggcatcgaatgaagtggtggaaagaaatactcttcagtatctcgcacgcagacttgcctctctcacagcctgtgctcccacaccacttccttctagaactttggggagctgctgttttgagtgttccattggatcacagaagatccaagtctggtggctttactaaggagactcrcaatgagtgatgttttccttcccagctggaagtgcctcttgtgcccagaaagagaaaccccagctggtttaactcaatgacttttaaactaaatcatgacactggctgggatctttgcaatactctggtttaccagcaacagatccgttgctatttacagtcacctccagcaacaattgagagtctgagcaaattagggaaagagaagagggataattcaagccaggaataataaggggttgagacctaatgatgttggtgatggtgattcggtagttcagttctttcccaagccagctg

SEQ ID NO: 6077 - DNA, 600 bp, Chicken  19866894110041_5
atctttgcaatactctggtttaccagcaacagatccgttgctatttacagtcacctccagcaacaattgagagtctgagcaaattagggaaagagaagagggataattcaagccaggaataataaggggttgagacctaatgatgttggtgatggtgattcggtagttcagttctttcccaagccagctggaggcaaaacccagccagttagggtagcagctgacacactgagggcccagcttcaaagcacaagctgaatccaaatacctcagcatcctaccgtaccctgtggagcaacstcagtacttccaggtggtgacttctcctggactgaaatcaagcatcagcagtacaagacagaccagctgactcttcctggagtacacttcttttagacgctgcagggatgaggactgtttttcaggcttgccagctcgggctcgtggcaagacaaactcagttcaactccagagtgaggagccattccccagacaatcacacccaagtagttgcccctgaggtaatctccaatgagcagacaagaagctgtcatctcccccactatatcaccaggtccgcacaaaccagaggagttggac

SEQ ID NO: 6078 - DNA, 600 bp, Chicken  19866894110041_6
tgacttctcctggactgaaatcaagcatcagcagtacaagacagaccagctgactcttcctggagtacacttcttttagacgctgcagggatgaggactgtttttcaggcttgccagctcgggctcgtggcaagacaaactcagttcaactccagagtgaggagccattccccagacaatcacacccaagtagttgcccctgaggtaatctccaatgagcagacaagaagctgtcatctcccccactatatcaccaggtccgcacaaaccagaggagttggactgagctttgcagagctmagcagctgctgcataaagctgtcttcctgctcacctctgtagtgggacccagccacagctcagcatgccaaaatggcacttacagcttcagcagacaggaagccaggaagtctttaacaatttgcaatcatamgagggaatggagggtgatcggtgcctaaaactaggctggaatccagccagaactcagcactaaggcactgtcacctgctgacaaatgagctaaaaatgcagaacttgaactgctgaaacaatgaaatcccacgcagtgtcctgcctttgggaaaggagaacaggcca

SEQ ID NO: 6079 - DNA, 600 bp, Chicken  19866894110041_7
gacaaactcagttcaactccagagtgaggagccattccccagacaatcacacccaagtagttgcccctgaggtaatctccaatgagcagacaagaagctgtcatctcccccactatatcaccaggtccgcacaaaccagaggagttggactgagctttgcagagctmagcagctgctgcataaagctgtcttcctgctcacctctgtagtgggacccagccacagctcagcatgccaaaatggcacttacagcttcagcagacaggaagccaggaagtctttaacaatttgcaatcatamgagggaatggagggtgatcggtgcctaaaactaggctggaatccagccagaactcagcactaaggcactgtcacctgctgacaaatgagctaaaaatgcagaacttgaactgctgaaacaatgaaatcccacgcagtgtcctgcctttgggaaaggagaacaggccaggccttccacagacatgttctcattttaggagatctcagagcgctgggtgactctgtgaaggggttgttatctcagctgtgctgagataaacatctgccagggagagtttaggagatccatggcaggaggaga

SEQ ID NO: 6080 - DNA, 600 bp, Chicken  19866894110041_8
acaggccaggccttccacagacatgttctcattttaggagatctcagagcgctgggtgactctgtgaaggggttgttatctcagctgtgctgagataaacatctgccagggagagtttaggagatccatggcaggaggagagtgattccagctttgcaggcagttccagctaatcacccagagaaagctctcttctcagttactctccttgctgtaggcaccaaatactccatcccatcccagctgacaacccacagcaccaatcactgagcagcagccatactccagaatcatccagarcacagagtcctccatgtccaagcacttccagcagtgcccaggacctggcaaggagcctccacatggtctcaggcacacccccaccctcatccagtaggaacactgragatagagggacagaaaagcccagtagattgctccttgttgccatccagatcacactcagaagggagcaggtttctttttgcatgctgtgttttacactacagcaagatcagtagctttgctcttatttcgagcaggagatgaggcccattccccaggctgtacatgggacaggcatggctggttcaagacagc

SEQ ID NO: 6081 - DNA, 600 bp, Chicken  19866894110041_9
cagggagagtttaggagatccatggcaggaggagagtgattccagctttgcaggcagttccagctaatcacccagagaaagctctcttctcagttactctccttgctgtaggcaccaaatactccatcccatcccagctgacaacccacagcaccaatcactgagcagcagccatactccagaatcatccagarcacagagtcctccatgtccaagcacttccagcagtgcccaggacctggcaaggagcctccacatggtctcaggcacacccccaccctcatccagtaggaacactgragatagagggacagaaaagcccagtagattgctccttgttgccatccagatcacactcagaagggagcaggtttctttttgcatgctgtgttttacactacagcaagatcagtagctttgctcttatttcgagcaggagatgaggcccattccccaggctgtacatgggacaggcatggctggttcaagacagctccagacattcagttctgctccctcttccactcgcttttcttttccctttcagccaccatcagcccatgccctttccagctttatttacagaagcagaagcattaa

SEQ ID NO: 6082 - DNA, 600 bp, Chicken  19866894110046_1
cacgtggaagagcccagcatttagctcaggtctagttcagtgttacaatttcactaaaacatttgctcaaaacagcagtgagaggtaagtgctgacatttgtgcttttgcctcaaaattgagttctattgttattagtaagaaagattatatagtttcaggaagtacatacatgccacctggcacctcactatgaaatcaaattatttataaccagattcacttttgaaacacttcttggagacagagtgaaaaaaaatgttatcatctctttcatgtgaaatgctgtaaagtatttcaycaaaatccaggattctgtatttgtattgtcacatacactaagagagtggtgaggtgctagagcaggttgcccagataggctatgaatgtcttgtccctggaggtgttcaaggccaggttgggtgaagccctgggcaatctgatatagtacttatctagctgttagcaatcctgactgtgtcagggggataggaagctgatgatccctaaggtcccttccaaccaagtcattctgtgatacacaaccttcaatcaaaaaaaggaaaacaacaaagctgccttacaactcatatatatagat

SEQ ID NO: 6083 - DNA, 600 bp, Chicken  19866894110048_1
tatcaatctttacggtcgcctgaaacaaccccatgaaacttctgaattttaactgacatattttgtctggttgattggaagatgacacatggagtggctccctcaggaacttcattctgtggtcaacaaattaatcttcaatatctgctgcattgatgtcacggatcaatagccagtcttatgattgacacttctataaattacatgaacacaaggaggtatgctatcaagagcagaattaatgtcgcctaacatgaatgttagatatgtagtgtaaaagctagtggtatggtctaattstatgatctaaataattaccttggcttcttttattgatggctgagagacaaacatggcttcagaaagtacyccaatgtatctgtcttaggcaatgtgatccagcatctatgcatttgtaatcggtccattatgcaaggatttctgaacccaaaattctayagaaaaaaagacaaataaaatgggccggggtagaaataggatcagagtttaaattagtcatgagctgtagtaataaaaaccctatactgcatcataccctgttaagcatggaaatctgaattcttattttaaactgctatt

SEQ ID NO: 6084 - DNA, 600 bp, Chicken  19866894110048_2
ttgattggaagatgacacatggagtggctccctcaggaacttcattctgtggtcaacaaattaatcttcaatatctgctgcattgatgtcacggatcaatagccagtcttatgattgacacttctataaattacatgaacacaaggaggtatgctatcaagagcagaattaatgtcgcctaacatgaatgttagatatgtagtgtaaaagctagtggtatggtctaattstatgatctaaataattaccttggcttcttttattgatggctgagagacaaacatggcttcagaaagtacyccaatgtatctgtcttaggcaatgtgatccagcatctatgcatttgtaatcggtccattatgcaaggatttctgaacccaaaattctayagaaaaaaagacaaataaaatgggccggggtagaaataggatcagagtttaaattagtcatgagctgtagtaataaaaaccctatactgcatcataccctgttaagcatggaaatctgaattcttattttaaactgctattattttcaagtgttttaaaagacccttcccagcaacccaagtcctatatcagagccaatatgtctttagaa

SEQ ID NO: 6085 - DNA, 600 bp, Chicken  19866894110048_3
cacggatcaatagccagtcttatgattgacacttctataaattacatgaacacaaggaggtatgctatcaagagcagaattaatgtcgcctaacatgaatgttagatatgtagtgtaaaagctagtggtatggtctaattstatgatctaaataattaccttggcttcttttattgatggctgagagacaaacatggcttcagaaagtacyccaatgtatctgtcttaggcaatgtgatccagcatctatgcatttgtaatcggtccattatgcaaggatttctgaacccaaaattctayagaaaaaaagacaaataaaatgggccggggtagaaataggatcagagtttaaattagtcatgagctgtagtaataaaaaccctatactgcatcataccctgttaagcatggaaatctgaattcttattttaaactgctattattttcaagtgttttaaaagacccttcccagcaacccaagtcctatatcagagccaatatgtctttagaactctaaatcttaaacttgtttctgcttcacaaagcacacatgctaaggttttcctttttcctgcagattttatcctgtaatagcagaat

SEQ ID NO: 6086 - DNA, 600 bp, Chicken  19866894110055_1
aagcagaagagcaccttacatcatggaaggactcagttatggctctgttcaggggttcaaagcatctgaggatgaagagttttaaacagcctgtctgtacctgcatggcagcatctgcacccctaagccataaacctacaaggtgctaattgcttccctggggactgcccagcatttaacatattccgtgtcatgttctcctctccccttgcgcctgtaattgctgctttctctggcaagggagaagcttagcaaagttcagttcaacatgtttttgttcgtctggggaaacttgagcgytttstgccatatgtgaataaatcaccactttccttcaccccactgttcccataagacagcagtaaagccatggtgctccatggggaaagagctcacccagcaaggctgcagmcccacgtctccccaggaggtctctgagatggggagggcagcacatggcccctgcaaattcacagaaccatggaataccccaagttggaaaggacccacaaggatcatcgagtccaactcctggctctacacatgaccacccaaaaatcagaccatgtgtctgagagcactgtccaggcactccttgag

SEQ ID NO: 6087 - DNA, 600 bp, Chicken  19866894110055_2
agaagagcaccttacatcatggaaggactcagttatggctctgttcaggggttcaaagcatctgaggatgaagagttttaaacagcctgtctgtacctgcatggcagcatctgcacccctaagccataaacctacaaggtgctaattgcttccctggggactgcccagcatttaacatattccgtgtcatgttctcctctccccttgcgcctgtaattgctgctttctctggcaagggagaagcttagcaaagttcagttcaacatgtttttgttcgtctggggaaacttgagcgytttstgccatatgtgaataaatcaccactttccttcaccccactgttcccataagacagcagtaaagccatggtgctccatggggaaagagctcacccagcaaggctgcagmcccacgtctccccaggaggtctctgagatggggagggcagcacatggcccctgcaaattcacagaaccatggaataccccaagttggaaaggacccacaaggatcatcgagtccaactcctggctctacacatgaccacccaaaaatcagaccatgtgtctgagagcactgtccaggcactccttgagctcc

SEQ ID NO: 6088 - DNA, 600 bp, Chicken  19866894110055_3
atctgcacccctaagccataaacctacaaggtgctaattgcttccctggggactgcccagcatttaacatattccgtgtcatgttctcctctccccttgcgcctgtaattgctgctttctctggcaagggagaagcttagcaaagttcagttcaacatgtttttgttcgtctggggaaacttgagcgytttstgccatatgtgaataaatcaccactttccttcaccccactgttcccataagacagcagtaaagccatggtgctccatggggaaagagctcacccagcaaggctgcagmcccacgtctccccaggaggtctctgagatggggagggcagcacatggcccctgcaaattcacagaaccatggaataccccaagttggaaaggacccacaaggatcatcgagtccaactcctggctctacacatgaccacccaaaaatcagaccatgtgtctgagagcactgtccaggcactccttgagctccagcagctcagcgccatgcccacttccccagggaacctgttccatgcccactgccctctcttcctgaaatccaacctgaaaggtgaagttcccctgcaaccagagtcct

SEQ ID NO: 6089 - DNA, 600 bp, Chicken  19866894110055_4
aggtgctaattgcttccctggggactgcccagcatttaacatattccgtgtcatgttctcctctccccttgcgcctgtaattgctgctttctctggcaagggagaagcttagcaaagttcagttcaacatgtttttgttcgtctggggaaacttgagcgytttstgccatatgtgaataaatcaccactttccttcaccccactgttcccataagacagcagtaaagccatggtgctccatggggaaagagctcacccagcaaggctgcagmcccacgtctccccaggaggtctctgagmtggggagggcagcacatggcccctgcaaattcacagaaccatggaataccccaagttggaaaggacccacaaggatcatcgagtccaactcctggctctacacatgaccacccaaaaatcagaccatgtgtctgagagcactgtccaggcactccttgagctccagcagctcagcgccatgcccacttccccagggaacctgttccatgcccactgccctctcttcctgaaatccaacctgaaaggtgaagttcccctgcaaccagagtcctctcagctgccattgcacacatccatgct

SEQ ID NO: 6090 - DNA, 599 bp, Chicken  19866894110057_1
  misc_feature (1)..(224): n is any nucleotide
nnnnnnnnnnnnnnnnnnnnnnnnnnnnnnnnnnnnnnnnnnnnnnnnnnnnnnnnnnnnnnnnnnnnnnnnnnnnnnnnnnnnnnnnnnnnnnnnnnnnnnnnnnnnnnnnnnnnnnnnnnnnnnnnnnnnnnnnnnnnnnnnnnnnnnnnnnnnnnnnnnnnnnnnnnnnnnnnnnnnnnnnnnnnnnnnnnnnnnnnnnnnnnnnnnnnnnnnnnnnnnnncgcatgaagagaagctgcagtcaccccctgcctccctccacaacctcacaccgagccgaggctgccttttatcccyctgtgtgacgacagccaggacagaggcagacggtgcaccagcgtagcaacacagccctgcagagcagactgggcctgtctgccccaagggagctctgctgcccctccacgcacagccctgaaggtttcttcacttcatatttattttcccacaaagactgtacaaaatccttataaaactctggtgtgaggatgggctatgacagcgatccaaaaaaataaggcccatgcagtcccaccagtttcataacttacacggaaacagagaagctacagagagctgcaaggcctgggttctgt

SEQ ID NO: 6091 - DNA, 600 bp, Chicken  19866894110066_1
aaaatggaagctgaactgatttcctaatattcagaccggaagatatttgcgttggtgaaaggtgctttgtttggtgtactccctgcacaaccaaagccaagcctggagatggtcacacaataggtaccaccacctcctccagctgaccttgggactgctcaattccagaggatatctgggcaggttgagctctttttctctgatcagcacatgaaaggacacgctgtcacgtggagctgctctacggtgtgatcagggcaatccatcactcgtgtgtggtttgggaagtgctgctctgcygtttggtcacctcggtctgaccttggatatctcctgctgataggacacggcacgaagtggctgccattggagcatctcagttaggtggtcaacacagaaacacaaggttttctgatgggtgaattgtaatcactttttttttgttttgctttaatcagcaacggaaaagtggaggaaaatcccctgcgttgtgttggatcaattcaaaacccctcaagctgaatgatattgagaaacttcatctaatacctgcatatttaaatttaaatttgacttaagctggaaatagtttttccaaat

SEQ ID NO: 6092 - DNA, 600 bp, Chicken  19866894110072_1
gggtctctctaatacttttgtttgactctgttctctattcagtatataatcaaatgaccttgccatcgtcaatcctgataatgtctgtaagctttgttaaatcatttctttatagcaacaaaatacattgctgcttctctatttcaagtgaagtatataatctcacaacaaggcagtgcaagatttttgcaatattatttgaacagagtatttttaatacaaactataatacagaaattactgaatgaagagaaaagctagttttaaaaagaaaatcagtgtcatatacatgcactgttyttttttatatatagacttcttgaagctccatctcttatgaaaaattctcaattgttccatttcctccattctttataaaaagcatttagcatttctagttttcactaagagttccataaatgtgcttaatttacccattctgccatagacttctcatgtgacctagcatacgacatttagaagaatcccctaaaagtgacatttccagcttctctgtgttccatggaaggaaagartctttcaattctaccgttatgtgtgaggctggaagtatcatcctgtccttgctacactgagcac

SEQ ID NO: 6093 - DNA, 600 bp, Chicken  19866894110072_2
attactgaatgaagagaaaagctagttttaaaaagaaaatcagtgtcatatacatgcactgttyttttttatatatagacttcttgaagctccatctcttatgaaaaattctcaattgttccatttcctccattctttataaaaagcatttagcatttctagttttcactaagagttccataaatgtgcttaatttacccattctgccatagacttctcatgtgacctagcatacgacatttagaagaatcccctaaaagtgacatttccagcttctctgtgttccatggaaggaaagartctttcaattctaccgttatgtgtgaggctggaagtatcatcctgtccttgctacactgagcacataggggactgagcgtcttagagttttcacaaagctaaagttatttgaaatgaatccttgcttctctgagatgcaaactgcctatttcaccttctaagttgacatttaaatggatcaagttttccatgtttaaatggtctcatctgactttttctcagtatgttaatttcaattcagcagcaaccacaaaaagttacaatctctcatccaaaaacatggatgaaggacatgacact

SEQ ID NO: 6094 - DNA, 599 bp, Chicken  19866894110074_1
  misc_feature (1)..(35): n is any nucleotide
nnnnnnnnnnnnnnnnnnnnnnnnnnnnnnnnnnnctattctggctcatccattatgttttggtatcccatcacacttttctccccacaacagagtagaatgtggagtcaaaccttccccatcagcactgcaagaggcatttgatactcttcccagagatctctctcctttctcagtcctcccatttcctactggcctcatctccgcctggcagtaggcctacttattttcagtatgtgtgggtagaagctactgtcacttggcagttaaatcctgtgattagtgatgagttggaatcamcttgctgattttccccaaattactgcttttagtggctggtgggttttcagttttccttgagggtatagatatgctatagagtctatttgagaactgctttttccaggatataagggggaggacattgttgtgtctcttactggttagaaattaactttgtgaaaatgacagtgacgtgtttgkttttttttcttttccgtagccctttggccgtggagcaatgcgagaatgtttcagaacgtaagtgtttgccagctttatctttattgcagtattttcttctgggtgactggagtttc

SEQ ID NO: 6095 - DNA, 578 bp, Chicken  19866894110074_2
atttcctactggcctcatctccgcctggcagtaggcctacttattttcagtatgtgtgggtagaagctactgtcacttggcagttaaatcctgtgattagtgatgagttggaatcamcttgctgattttccccaaattactgcttttagtggctggtgggttttcagttttccttgagggtatagatatgctatagagtctatttgagaactgctttttccaggatataagggggaggacattgttgtgtctcttactggttagaaattaactttgtgaaaatgacagtgacgtgtttgkttttttttcttttccgtagccctttggccgtggagcaatgcgagaatgtttcagaacgtaagtgtttgccagctttatctttattgcagtattttcttctgggtgactggagtttctcacagatgtggcatctatgtgaagtgtagctccccattggctccctgctttgcatttctaaaaggtgtagctgagaggtttactcctgtttatgcaactccaaccacagcacagggagtgggattcagaaagcagatcattctcttaaggaaaatgcaagt

SEQ ID NO: 6096 - DNA, 600 bp, Chicken  19866894110077_1
aagtgggtggtcaactacacttaggctcaagtatctcagaaaagttcaaaacatttcttcagtaaaactcatgaatgttatccagcacttcaggatcctcagaggcttgatcccaaaacacgcttaactgcctgtattaaaaggataacaatttaacctttcatctaaacactttcatccaaaaatttctaaatcagagttcagtcaaaagccttcataagtcaccaagctggaacccatgaaggatcaacagatatggtgttattgtttgcccaaacaaaccaagaattaatctggaayaatgatcctaaaaagatgaagaggacactgttactaaaacagtacacatatacgaaataactgtcaggtgaaagtaagaacaagcaggctttcagaagactgtatttaatcaaaatatatggatcaaatgttacagcagcttattggcatctataaatggaaccacagcttttttttttttttccagacaaatttctgctctggaggatagagaaagctttaaagaaaagggaaaggaattgctttaacagctgcattataataatgaaacgttagagcagacgatttctccagtcatcg

SEQ ID NO: 6097 - DNA, 600 bp, Chicken  19866894110079_1
gactttggtgtctggctgtatatggaaagagttaagttctgctggccccgcgtgaaacagacattaaggacacaagttttaacacatggaagctgagttcactacaagtatgtaaacaggttttttttctctctctttattctgctattgcaagaacataaaaatatatgtcctcttccccattcataactccacatttgctttccctcccctctccctcccccagaaaagaagttcctctgccacagagcagctatggaaaagtactgatggaagaaagcagctgccctcacttagggraaaaaaaaaaacaactttcaaagcagaacacacctatagcaaggagaaaaaaatgaaatatgcacaggattcatacaacttttccactacactttcagagcgtaacgaggttcaatggaacgcccggcgcagcctgagcctcgcgttcggcgcgtgggctgatcagaagaccgattcagcacggacgtgttggggctctggctgctcggcgtcacacggcgggctctsaagacygtttgcacctgaagggccgaccacaaagaagcgggatttgccctgttaaaatctgaccaaattctt

SEQ ID NO: 6098 - DNA, 600 bp, Chicken  19866894110079_10
agacagcggtagcagcccgggtttgtgagaacggacaggcagcgcgttaaaaccctygagcgrtctctcacttccccaccgactcccagccccgcttcaataaaaacaggcttcgcgttgcacgctgtgttttggtgtctttgatttctctttcaccccgctttccaagcggcgtcagtgagtaacgcttcccggcccactgcacgacttcgtgaccacacagagtcrccmaggggtggctgaaggcgyctcctcaagtctgacgaggggcggcgtttaccacagaaccacttggagggrgggggggaagaaaagaaagaagcaaaaaccgcctcgatcgcattgtaaatactgaacggaacactgcaaatagccctgcagttcacatctccgaactaacctttacctcctacggtcaggtcgagcattaagacgcagcaagctaaaactcaaggtgactattacaaataaagattggcttccgtgaatagctacacaaacagatggattcctttgaacagatagaaacagcacagtctaatttagactcccgtacagcatcagcagttcaaacttaaaaagatgttgaacaaatccttc

SEQ ID NO: 6099 - DNA, 600 bp, Chicken  19866894110079_2
aagaagttcctctgccacagagcagctatggaaaagtactgatggaagaaagcagctgccctcacttagggraaaaaaaaaaacaactttcaaagcagaacacacctatagcaaggagaaaaaaatgaaatatgcacaggattcatacaacttttccactacactttcagagcgtaacgaggttcaatggaacgcccggcgcagcctgagcctcgcgttcggcgcgtgggctgatcagaagaccgattcagcacggacgtgttggggctctggctgctcggcgtcacacggcgggctctsaagacygtttgcacctgaagggccgaccacaaagaagcgggatttgccctgttaaaatctgaccaaattctttaagtaacccggagagaaggtggcaaaactttgacaaacacaagaacgagcgttctttttccatcagtccgacaggtacaacttaaaacttcagacctacctcttgcaggcttacaggaagtacacatcattaacacagacagcggtagcagcccgggtttgtgagaacggacaggcagcgcgttaaaaccctygagcgrtctctcacttccccaccgactcccagcc

SEQ ID NO: 6100 - DNA, 600 bp, Chicken  19866894110079_3
ttcctctgccacagagcagctatggaaaagtactgatggaagaaagcagctgccctcacttagggraaaaaaaaaaacaactttcaaagcagaacacacctatagcaaggagaaaaaaatgaaatatgcacaggattcatacaacttttccactacactttcagagcgtaacgaggttcaatggaacgcccggcgcagcctgagcctcgcgttcggcgcgtgggctgatcagaagaccgattcagcacggacgtgttggggctctggctgctcggcgtcacacggcgggctctsaagacygtttgcacctgaagggccgaccacaaagaagcgggatttgccctgttaaaatctgaccaaattctttaagtaacccggagagaaggtggcaaaactttgacaaacacaagaacgagcgttctttttccatcagtccgacaggtacaacttaaaacttcagacctacctcttgcaggcttacaggaagtacacatcattaacacagacagcggtagcagcccgggtttgtgagaacggacaggcagcgcgttaaaaccctygagcgrtctctcacttccccaccgactcccagccccgctt

SEQ ID NO: 6101 - DNA, 600 bp, Chicken  19866894110079_4
gctctggctgctcggcgtcacacggcgggctctsaagacygtttgcacctgaagggccgaccacaaagaagcgggatttgccctgttaaaatctgaccaaattctttaagtaacccggagagaaggtggcaaaactttgacaaacacaagaacgagcgttctttttccatcagtccgacaggtacaacttaaaacttcagacctacctcttgcaggcttacaggaagtacacatcattaacacagacagcggtagcagcccgggtttgtgagaacggacaggcagcgcgttaaaaccctygagcgrtctctcacttccccaccgactcccagccccgcttcaataaaaacaggcttcgcgttgcacgctgtgttttggtgtctttgatttctctttcaccccgctttccaagcggcgtcagtgagtaacgcttcccggcccactgcacgacttcgtgaccacacagagtcrccmaggggtggctgaaggcgyctcctcaagtctgacgaggggcggcgtttaccacagaaccacttggagggrgggggggaagaaaagaaagaagcaaaaaccgcctcgatcgcattgtaaatactgaac

SEQ ID NO: 6102 - DNA, 600 bp, Chicken  19866894110079_5
gctgctcggcgtcacacggcgggctctsaagacygtttgcacctgaagggccgaccacaaagaagcgggatttgccctgttaaaatctgaccaaattctttaagtaacccggagagaaggtggcaaaactttgacaaacacaagaacgagcgttctttttccatcagtccgacaggtacaacttaaaacttcagacctacctcttgcaggcttacaggaagtacacatcattaacacagacagcggtagcagcccgggtttgtgagaacggacaggcagcgcgttaaaaccctygagcgrtctctcacttccccaccgactcccagccccgcttcaataaaaacaggcttcgcgttgcacgctgtgttttggtgtctttgatttctctttcaccccgctttccaagcggcgtcagtgagtaacgcttcccggcccactgcacgacttcgtgaccacacagagtcrccmaggggtggctgaaggcgyctcctcaagtctgacgaggggcggcgtttaccacagaaccacttggagggrgggggggaagaaaagaaagaagcaaaaaccgcctcgatcgcattgtaaatactgaacggaaca

SEQ ID NO: 6103 - DNA, 600 bp, Chicken  19866894110079_6
agtccgacaggtacaacttaaaacttcagacctacctcttgcaggcttacaggaagtacacatcattaacacagacagcggtagcagcccgggtttgtgagaacggacaggcagcgcgttaaaaccctygagcgrtctctcacttccccaccgactcccagccccgcttcaataaaaacaggcttcgcgttgcacgctgtgttttggtgtctttgatttctctttcaccccgctttccaagcggcgtcagtgagtaacgcttcccggcccactgcacgacttcgtgaccacacagagtcrccmaggggtggctgaaggcgyctcctcaagtctgacgaggggcggcgtttaccacagaaccacttggagggrgggggggaagaaaagaaagaagcaaaaaccgcctcgatcgcattgtaaatactgaacggaacactgcaaatagccctgcagttcacatctccgaactaacctttacctcctacggtcaggtcgagcattaagacgcagcaagctaaaactcaaggtgactattacaaataaagattggcttccgtgaatagctacacaaacagatggattcctttgaacagatagaaa

SEQ ID NO: 6104 - DNA, 600 bp, Chicken  19866894110079_7
ccgacaggtacaacttaaaacttcagacctacctcttgcaggcttacaggaagtacacatcattaacacagacagcggtagcagcccgggtttgtgagaacggacaggcagcgcgttaaaaccctygagcgrtctctcacttccccaccgactcccagccccgcttcaataaaaacaggcttcgcgttgcacgctgtgttttggtgtctttgatttctctttcaccccgctttccaagcggcgtcagtgagtaacgcttcccggcccactgcacgacttcgtgaccacacagagtcrccmaggggtggctgaaggcgyctcctcaagtctgacgaggggcggcgtttaccacagaaccacttggagggrgggggggaagaaaagaaagaagcaaaaaccgcctcgatcgcattgtaaatactgaacggaacactgcaaatagccctgcagttcacatctccgaactaacctttacctcctacggtcaggtcgagcattaagacgcagcaagctaaaactcaaggtgactattacaaataaagattggcttccgtgaatagctacacaaacagatggattcctttgaacagatagaaacag

SEQ ID NO: 6105 - DNA, 600 bp, Chicken  19866894110079_8
aacttcagacctacctcttgcaggcttacaggaagtacacatcattaacacagacagcggtagcagcccgggtttgtgagaacggacaggcagcgcgttaaaaccctygagcgrtctctcacttccccaccgactcccagccccgcttcaataaaaacaggcttcgcgttgcacgctgtgttttggtgtctttgatttctctttcaccccgctttccaagcggcgtcagtgagtaacgcttcccggcccactgcacgacttcgtgaccacacagagtcrccmaggggtggctgaaggcgyctcctcaagtctgacgaggggcggcgtttaccacagaaccacttggagggrgggggggaagaaaagaaagaagcaaaaaccgcctcgatcgcattgtaaatactgaacggaacactgcaaatagccctgcagttcacatctccgaactaacctttacctcctacggtcaggtcgagcattaagacgcagcaagctaaaactcaaggtgactattacaaataaagattggcttccgtgaatagctacacaaacagatggattcctttgaacagatagaaacagcacagtctaatttagact

SEQ ID NO: 6106 - DNA, 600 bp, Chicken  19866894110079_9
cacagacagcggtagcagcccgggtttgtgagaacggacaggcagcgcgttaaaaccctygagcgrtctctcacttccccaccgactcccagccccgcttcaataaaaacaggcttcgcgttgcacgctgtgttttggtgtctttgatttctctttcaccccgctttccaagcggcgtcagtgagtaacgcttcccggcccactgcacgacttcgtgaccacacagagtcrccmaggggtggctgaaggcgyctcctcaagtctgacgaggggcggcgtttaccacagaaccacttggayggrgggggggaagaaaagaaagaagcaaaaaccgcctcgatcgcattgtaaatactgaacggaacactgcaaatagccctgcagttcacatctccgaactaacctttacctcctacggtcaggtcgagcattaagacgcagcaagctaaaactcaaggtgactattacaaataaagattggcttccgtgaatagctacacaaacagatggattcctttgaacagatagaaacagcacagtctaatttagactcccgtacagcatcagcagttcaaacttaaaaagatgttgaacaaatcc

SEQ ID NO: 6107 - DNA, 600 bp, Chicken  19866894110082_1
cactcacatccaaactgcaagtctatgtatttgctggcagacacttgtgctattctctctgaagcagaacacagcggaggaaagccttctgaccccaaacgggcacgacttcacatcgcatcatagtaagctgcagatcagtatgtttggcataagttctttgttaaaagccttgactatccacttttaatatattaagggcacggtgcagattaccaaggatatctatctattcagaaatacttgtattatttagtttcctgctttaagagaaaaatctccttgatctgtaactggaaraatacaaaatgttaagctaatctattaatacttgaatgagagtcaatatatacagcagtagaatctcacacttatcttcaaacaactatgcacacagacaagtattctcaaccgtgtccatctccacacacatcagaaggaatttaacagcctcggatcagaaaggcctgcaggagatgaaaaaaaacttactgctctattatatcagttccagattttattccagaaaaacacgacagaggtcctaactagctgttatcttcagcatcatgtcagcaatacatttttactgcacatttt

SEQ ID NO: 6108 - DNA, 600 bp, Chicken  19866894110082_2
ccttgtgctacttaaactgtgctttctgttttgatttattccactgcttaccactgtaacactatgagcacctttctaactatgtatgtccatatggattcacccaagttttgaaactcgacatactcttcttggttgatgctatttttctagtctccagaacctttagctattaaactcttaacactgcatacagataaacaactttgcatcacagctaaaatacactaaggatgctgatcacacactaaaaagcagcagcatacttttgtgatgaagatgaggtctatcagttgatcrgggcaaaacattgccagtgctccaagagcaacacagaaaggaacacttccatcactaaggaggaatgctgcaaaattagtatcaagaatgatctgctcctagaaaaatatttccagtctttctgggatgcattgaaatgggtcacayattaaaayastagcaataggaaacacaaaagacataacattttatcaaatcatgattctgcatggtactctgtgcaactctgagtgcagtacatacacctgatttctacaattcagaagtaagaaacactaagtgtatacaagaagtgttaca

SEQ ID NO: 6109 - DNA, 600 bp, Chicken  19866894110082_3
ttctagtctccagaacctttagctattaaactcttaacactgcatacagataaacaactttgcatcacagctaaaatacactaaggatgctgatcacacactaaaaagcagcagcatacttttgtgatgaagatgaggtctatcagttgatcrgggcaaaacattgccagtgctccaagagcaacacagaaaggaacacttccatcactaaggaggaatgctgcaaaattagtatcaagaatgatctgctcctagaaaaatatttccagtctttctgggatgcattgaaatgggtcacayattaaaayastagcaataggaaacacaaaagacataacattttatcaaatcatgattctgcatggtactctgtgcaactctgagtgcagtacatacacctgatttctacaattcagaagtaagaaacactaagtgtatacaagaagtgttacagggaatagcggatctctgattatcacacatggggtgtgcaacatgagagcagtaatgatagagacgtgcctcaacctgaaggatttatttagtttgtatgtttgtatataatctacttacaaaagattatgatagatgtttctcatt

SEQ ID NO: 6110 - DNA, 600 bp, Chicken  19866894110082_4
tccagaacctttagctattaaactcttaacactgcatacagataaacaactttgcatcacagctaaaatacactaaggatgctgatcacacactaaaaagcagcagcatacttttgtgatgaagatgaggtctatcagttgatcrgggcaaaacattgccagtgctccaagagcaacacagaaaggaacacttccatcactaaggaggaatgctgcaaaattagtatcaagaatgatctgctcctagaaaaatatttccagtctttctgggatgcattgaaatgggtcacayattaaaayastagcaataggaaacacaaaagacataacattttatcaaatcatgattctgcatggtactctgtgcaactctgagtgcagtacatacacctgatttctacaattcagaagtaagaaacactaagtgtatacaagaagtgttacagggaatagcggatctctgattatcacacatggggtgtgcaacatgagagcagtaatgatagagacgtgcctcaacctgaaggatttatttagtttgtatgtttgtatataatctacttacaaaagattatgatagatgtttctcattagaatatc

SEQ ID NO: 6111 - DNA, 600 bp, Chicken  19866894110082_5
cagaacctttagctattaaactcttaacactgcatacagataaacaactttgcatcacagctaaaatacactaaggatgctgatcacacactaaaaagcagcagcatacttttgtgatgaagatgaggtctatcagttgatcrgggcaaaacattgccagtgctccaagagcaacacagaaaggaacacttccatcactaaggaggaatgctgcaaaattagtatcaagaatgatctgctcctagaaaaatatttccagtctttctgggatgcattgaaatgggtcacayattaaaayastagcaataggaaacacaaaagacataacattttatcaaatcatgattctgcatggtactctgtgcaactctgagtgcagtacatacacctgatttctacaattcagaagtaagaaacactaagtgtatacaagaagtgttacagggaatagcggatctctgattatcacacatggggtgtgcaacatgagagcagtaatgatagagacgtgcctcaacctgaaggatttatttagtttgtatgtttgtatataatctacttacaaaagattatgatagatgtttctcattagaatatcct

SEQ ID NO: 6112 - DNA, 600 bp, Chicken  19866894110082_6
atgagagcagtaatgatagagacgtgcctcaacctgaaggatttatttagtttgtatgtttgtatataatctacttacaaaagattatgatagatgtttctcattagaatatcctacattgcttagcaagaattttactgacttttctgcaaaaatctaagatttaatattattctaactttcaaatttctgtcaccagtacttaagaactacagataaaggtaacaagaaaataagtgatcttacctacaagtacagccccctaacaaactacattctagtatctgtaagaatcccccrcagctgcagagcttgagcaatacagcagagtgcttactgactccctgaagccagaggatctaatgcagttgcatgttgcgtgagttcaaggatgaaggactttctctaacatctgctgggagcacattcattgtgtcactacaagtcacacagcgaaaggtcagaattattctcctgatgaacaaaaagaatgccaagatgtgaaagaaacgttcagtgaaaaaagccagcctaattcagttcagctaaacgcagtggaaagaacataggagtgcagagattgtgatcttgtgtctcatc

SEQ ID NO: 6113 - DNA, 600 bp, Chicken  19866894110086_1
cctgtgcatgctgcttcactcgtgttccttgcatcacaggcacaggtagctgcagagggacacccacctccagcaccctgtgcaggggctgtgctgggccatgcttttctttcccgatccacgtgcactggtaggatagcagctggaggcagcaatacccactaatcctgtttgctttgctcctgtctagcttgtgatttatgtgggcaaatgattgcatataaaacccttgccctcatctgcagcgtttgctgtatggccgctgtgatgtaaactgatttgagaaagttcctctctttstggtgaactttgtgatgctggaatttttcttccaaagctggcactgtaattactgcagtcctattgccagatgctaagacagagagaagtcaattccccaaacaacccacagtagctctagaaaaacaaaagtcggtgctctcatctccgtgtgtggctgagatgctcctttctttcccaataacttcccaataaagctctcatttagtgctgtcaggttgctgcagcgcagccattagttctgtccctattcaggatgaagcccggctggtttaaacgtgctgagcttcactctgatca

SEQ ID NO: 6114 - DNA, 462 bp, Chicken  19866894110090_1
attctacttcatttgatatctttggtaggactggctgccagagctatcccaagatggttttaacatcaaactatgtctgagtcaaaaagccttattctccttcacctcagactctgctttacttttacctgctttttgctacaagaatccactgctaacaataaatgtagctgacccagtactaacataatttcactgaatatgcagacaagggcaaagcaaagttcttccgaggttcaggctctgctatgcacttgaggaagggaacttctcctactaagtatgtgggagtgatcaggktcaagttatccctagtctgggatatttgtgacatttagctatctgcttagatgggagtctgtaggattggcagtaggtgagtagaagaatcttatattggttcctttgtgatttttggtttataagagaggttgctgtcatgtgcagaggaataatgagagt

SEQ ID NO: 6115 - DNA, 600 bp, Chicken  19866894110098_1
ctgcctgcatttagccacggtccaaccagcatatggagacaggaaacacagcagtgccatttcagttcactggacaatctgagaagtgatgtcaaatcactgccaaatggacttgcagtagatttggagactgtttctcccttcacattctttgacaaaaccaatcaaattaagcaaactggaaaatgtaatgcactgcattctgaagatgtcaagggaaactgcttctattgtctgaaatgaaatatatatatacatatatgagtatatatatagggaggtgggtggagtcaacccccrgaaagggtaggtgtagtactcagrgacatggttagtgggcagtggtggtggtaggtggacgattggaccaggtgactttagaggtcttttccaaccttaatgaccatggttctatgatgacagagcacattgtctcaaccccagcttctytyataccctyggatgactgccgaagctgttcccacatagaagggcctaatcctgctcctgctgatgaagcagcacatgccattagcagtgtgtgagtggctcacaagctggggatgttgcctgctgagctcacccttctcaggaaggact

SEQ ID NO: 6116 - DNA, 600 bp, Chicken  19866894110098_2
accagcatatggagacaggaaacacagcagtgccatttcagttcactggacaatctgagaagtgatgtcaaatcactgccaaatggacttgcagtagatttggagactgtttctcccttcacattctttgacaaaaccaatcaaattaagcaaactggaaaatgtaatgcactgcattctgaagatgtcaagggaaactgcttctattgtctgaaatgaaatatatatatacatatatgagtatatatatagggaggtgggtggagtcaacccccrgaaagggtaggtgtagtactcagrgacatggttagtgggcagtggtggtggtaggtggacgattggaccaggtgactttagaggtcttttccaaccttaatgaccatggttctatgatgacagagcacattgtctcaaccccagcttctytyataccctyggatgactgccgaagctgttcccacatagaagggcctaatcctgctcctgctgatgaagcagcacatgccattagcagtgtgtgagtggctcacaagctggggatgttgcctgctgagctcacccttctcaggaaggactgggctgggttgtgccctgatacag

SEQ ID NO: 6117 - DNA, 559 bp, Chicken  19866894110098_3
tttgacaaaaccaatcaaattaagcaaactggaaaatgtaatgcactgcattctgaagatgtcaagggaaactgcttctattgtctgaaatgaaatatatatatacatatatgagtatatatatagggaggtgggtggagtcaacccccrgaaagggtaggtgtagtactcagrgacatggttagtgggcagtggtggtggtaggtggacgattggaccaggtgactttagaggtcttttccaaccttaatgaccatggttctatgatgacagagcacattgtctcaaccccagcttctytyataccctyggatgactgccgaagctgttcccacatagaagggcctaatcctgctcctgctgatgaagcagcacatgccattagcagtgtgtgagtggctcacaagctggggatgttgcctgctgagctcacccttctcaggaaggactgggctgggttgtgccctgatacagggaccactgtgctgtgattgcatccccaaagtctccaagtcttcgtaccacaatgtggaacagccccatctatttactgctctga

SEQ ID NO: 6118 - DNA, 557 bp, Chicken  19866894110098_4
tgacaaaaccaatcaaattaagcaaactggaaaatgtaatgcactgcattctgaagatgtcaagggaaactgcttctattgtctgaaatgaaatatatatatacatatatgagtatatatatagggaggtgggtggagtcaacccccrgaaagggtaggtgtagtactcagrgacatggttagtgggcagtggtggtggtaggtggacgattggaccaggtgactttagaggtcttttccaaccttaatgaccatggttctatgatgacagagcacattgtctcaaccccagcttctytyataccctyggatgactgccgaagctgttcccacatagaagggcctaatcctgctcctgctgatgaagcagcacatgccattagcagtgtgtgagtggctcacaagctggggatgttgcctgctgagctcacccttctcaggaaggactgggctgggttgtgccctgatacagggaccactgtgctgtgattgcatccccaaagtctccaagtcttcgtaccacaatgtggaacagccccatctatttactgctctga

SEQ ID NO: 6119 - DNA, 549 bp, Chicken  19866894110098_5
ccaatcaaattaagcaaactggaaaatgtaatgcactgcattctgaagatgtcaagggaaactgcttctattgtctgaaatgaaatatatatatacatatatgagtatatatatagggaggtgggtggagtcaacccccrgaaagggtaggtgtagtactcagrgacatggttagtgggcagtggtggtggtaggtggacgattggaccaggtgactttagaggtcttttccaaccttaatgaccatggttctatgatgacagagcacattgtctcaaccccagcttctytyataccctyggatgactgccgaagctgttcccacatagaagggcctaatcctgctcctgctgatgaagcagcacatgccattagcagtgtgtgagtggctcacaagctggggatgttgcctgctgagctcacccttctcaggaaggactgggctgggttgtgccctgatacagggaccactgtgctgtgattgcatccccaaagtctccaagtcttcgtaccacaatgtggaacagccccatctatttactgctctga

SEQ ID NO: 6120 - DNA, 600 bp, Chicken  19866894110099_1
ggaaaaaaatgtagttcatgaccaaatgcaaaatgaatattagtctaatttttttcccttgagacaccttgatttgttttgcttcttttctctataggcactgaagtataagttcatagagagtaaaatcaaaaggttatggtttatcctactttacatataactggtgcgtgacttaagctgttggattggcttaatgtatactttgaacattatgaccatggggggaaaaaaggtaatattggtttaaaagtggatatggaaaatttaatgtgctcaagtgggaacaatgacatattyaaaaaaaaaaaaaaattcatgacacagatctaataattcacttcccctgtaggaatggagtatcggctctgatgccgcttggtagtttatttttatatacacccccggtccctgctgtatatccttcgtatgggttccagagaaaagaaagaaaataacctgtagggaaatcagcttagaaacctttcattaaatacattgtgtttcatatcatgtcgttcacaaaatctccaagatagaaagtgttatctgactgcatgtgtaaaatactatatttgaatactataatttgctgtaaga

SEQ ID NO: 6121 - DNA, 599 bp, Chicken  19866894110101_1
  misc_feature (1)..(129): n is any nucleotide
nnnnnnnnnnnnnnnnnnnnnnnnnnnnnnnnnnnnnnnnnnnnnnnnnnnnnnnnnnnnnnnnnnnnnnnnnnnnnnnnnnnnnnnnnnnnnnnnnnnnnnnnnnnnnnnnnnnnnnnnnnnnnnnnnttgctttatgctttcttcccctgaagtgctggtgatgtgaaaagtaaatgacaaagtacaatagaatgaactccgtgtttaattgttaccaaatttttactttccaagaagctgacagaccgtcatttttaaaattttcctttgtggacaaaacccatttataatacaatytcttgaccatgttttttcattgttttctgggatccagttaagcaatgacatcatgggtatcactgtttggtctttggcgtacagtcaatgggggcagaggttttccataaaaatctgtataaaaaaatgccagagaagaaaaacacattaaatagatgtttaccatctcctttgcttaatgaactgcttaaataaggacaaacattgtttccatattgaaagctagatagcttacatgtttagagctaattcctacaaagcaacattcaagcatagtgataacagctgacggtgtaatg

SEQ ID NO: 6122 - DNA, 599 bp, Chicken  19866894110101_2
  misc_feature (1)..(8): n is any nucleotide
nnnnnnnnttgctttatgctttcttcccctgaagtgctggtgatgtgaaaagtaaatgacaaagtacaatagaatgaactccgtgtttaattgttaccaaatttttactttccaagaagctgacagaccgtcatttttaaaattttcctttgtggacaaaacccatttataatacaatytcttgaccatgttttttcattgttttctgggatccagttaagcaatgacatcatgggtatcactgtttggtctttggcgtacagtcaatgggggcagaggttttccataaaaatctgtatyaaaaaatgccagagaagaaaaacacattaaatagatgtttaccatctcctttgcttaatgaactgcttaaataaggacaaacattgtttccatattgaaagctagatagcttacatgtttagagctaattcctacaaagcaacattcaagcatagtgataacagctgacggtgtaatgtccaaaaaacacatttaattacattttgttaaacatggatcagcacttggaagatcatgtccagaagtaatctacaaacatcccgtaaagaactgtttacgagggtggatagtgatagaac

SEQ ID NO: 6123 - DNA, 600 bp, Chicken  19866894110101_3
atctatgagtgtagcaattttttgaggcactttaattgcctcagaagccaccccaatacccttatattaagacttgggcattactggtttttgctgaaaagggcaagagcatgtctcagtggtgcaaggcactgaactctcccactcaggagagatttcctacaagtatttccccagatcacactcagacatttgaataataagctgaaaaaataattctgccttaactctcacatccacttcaatcacattctcatattgaatcttgggttgccaaggtttccagtttatattgagctytttcaaaacctataatgggtttgctttcctcctgcatttcccacctagggaataatcacaccctaggctccttgcagatataaggaaatcaatcttttcttaacatttgaaaaaggcaaagttggagtgtcttctgtatctattgagtagaaagcctatgagaagcaaaagattacaacatgtctggacctgaacatttgcaaaaggatgaacatgttgcttgaaaaactgagcagagattgttgcaaggaatacacaggatttcagaaaatgactataattattattatcattatttta

SEQ ID NO: 6124 - DNA, 600 bp, Chicken  19866894110101_4
agaagcaaaagattacaacatgtctggacctgaacatttgcaaaaggatgaacatgttgcttgaaaaactgagcagagattgttgcaaggaatacacaggatttcagaaaatgactataattattattatcattattttaaaaaaatacaatacaacacaatactgttcaggtactgcctgcagcaaaatgataacattcttaaaataattggcatgttcaagttcccagtcttcttcagatgtaggaatcttacacatgtacaagatttttttcttagcatccttactgaaaatccacragggaagaaagctagaaaagagaaccctcttttctaatagaaggagaatataccttctggctctgaccaaacagtgtaaattttttggttgcctgtaagtatcttaatttaatgcamttaatcagcagtatagatggatttctacaaaaacatttgccctttgcacaactattaagccacattaaaaattcaaacaaaactacctgttgttctctgtgcaagaacaagaaaacctaaagcattcatcatcttcacaccgatgggcagataacaacccctcagcacaacagacagttgttt

SEQ ID NO: 6125 - DNA, 572 bp, Chicken  19866894110101_5
taattattattatcattattttaaaaaaatacaatacaacacaatactgttcaggtactgcctgcagcaaaatgataacattcttaaaataattggcatgttcaagttcccagtcttcttcagatgtaggaatcttacacatgtacaagatttttttcttagcatccttactgaaaatccacragggaagaaagctagaaaagagaaccctcttttctaatagaaggagaatataccttctggctctgaccaaacagtgtaaattttttggttgcctgtaagtatcttaatttaatgcamttaatcagcagtatagatggatttctacaaaaacatttgccctttgcacaactattaagccacattaaaaattcaaacaaaactacctgttgttctctgtgcaagaacaagaaaacctaaagcattcatcatcttcacaccgatgggcagataacaacccctcagcacaacagacagttgttttatgcccaaattacaaggattcttcaccctgtgtaacaagccctgaaaaccatgtgctgaattatctgctgatgaaagactgctgactt

SEQ ID NO: 6126 - DNA, 600 bp, Chicken  19866894110107_1
gtaaaagaagcctccaccgcacaccttgcagacccacatgtggaagcggtgcgctgctcacctgctgtatgacatcctgcgcggtgctgaagcgcggtgccttgatgacagtgcgtggttgctcgggggagacatcgtgtacctgaacgaagaaactgtcatcctccgaggtgatggctgcatcttcttttgcttcttgaaagacatttctctcatttaaattctgaagaaaagagagccaaattcagctactgcagagtgtaactcaaagtggtggtcatagaaagtttccaacacttrgaaatcaggcactgttktgatyctatttcattaaatgcaattgctccgtataaaacagttttgatgagccartatttcttacaacgtatatacccgcrttactaaaatccgtgtatctataatacctttccaattacagctcatgctgtgctgtacagagcatcacagggcaaagccacagcatggcttccatccacactaagacagattttcacctatgttttccaaaggaatgcagctcagcagtgacacgtttgtagtcgcacacactcacaaagtgctgcagtcagctgaatgaag

SEQ ID NO: 6127 - DNA, 600 bp, Chicken  19866894110107_2
cgcacaccttgcagacccacatgtggaagcggtgcgctgctcacctgctgtatgacatcctgcgcggtgctgaagcgcggtgccttgatgacagtgcgtggttgctcgggggagacatcgtgtacctgaacgaagaaactgtcatcctccgaggtgatggctgcatcttcttttgcttcttgaaagacatttctctcatttaaattctgaagaaaagagagccaaattcagctactgcagagtgtaactcaaagtggtggtcatagaaagtttccaacacttrgaaatcaggcactgttktgatyctatttcattaaatgcaattgctccgtataaaacagttttgatgagccartatttcttacaacgtatatacccgcrttactaaaatccgtgtatctataatacctttccaattacagctcatgctgtgctgtacagagcatcacagggcaaagccacagcatggcttccatccacactaagacagattttcacctatgttttccaaaggaatgcagctcagcagtgacacgtttgtagtcgcacacactcacaaagtgctgcagtcagctgaatgaaggaggttgctaattgcac

SEQ ID NO: 6128 - DNA, 600 bp, Chicken  19866894110107_3
accttgcagacccacatgtggaagcggtgcgctgctcacctgctgtatgacatcctgcgcggtgctgaagcgcggtgccttgatgacagtgcgtggttgctcgggggagacatcgtgtacctgaacgaagaaactgtcatcctccgaggtgatggctgcatcttcttttgcttcttgaaagacatttctctcatttaaattctgaagaaaagagagccaaattcagctactgcagagtgtaactcaaagtggtggtcatagaaagtttccaacacttrgaaatcaggcactgttktgatyctatttcattaaatgcaattgctccgtataaaacagttttgatgagccartatttcttacaacgtatatacccgcrttactaaaatccgtgtatctataatacctttccaattacagctcatgctgtgctgtacagagcatcacagggcaaagccacagcatggcttccatccacactaagacagattttcacctatgttttccaaaggaatgcagctcagcagtgacacgtttgtagtcgcacacactcacaaagtgctgcagtcagctgaatgaaggaggttgctaattgcacaaact

SEQ ID NO: 6129 - DNA, 600 bp, Chicken  19866894110107_4
catcctgcgcggtgctgaagcgcggtgccttgatgacagtgcgtggttgctcgggggagacatcgtgtacctgaacgaagaaactgtcatcctccgaggtgatggctgcatcttcttttgcttcttgaaagacatttctctcatttaaattctgaagaaaagagagccaaattcagctactgcagagtgtaactcaaagtggtggtcatagaaagtttccaacacttrgaaatcaggcactgttktgatyctatttcattaaatgcaattgctccgtataaaacagttttgatgagccartatttcttacaacgtatatacccgcrttactaaaatccgtgtatctataatacctttccaattacagctcatgctgtgctgtacagagcatcacagggcaaagccacagcatggcttccatccacactaagacagattttcacctatgttttccaaaggaatgcagctcagcagtgacacgtttgtagtcgcacacactcacaaagtgctgcagtcagctgaatgaaggaggttgctaattgcacaaacttctactccaaatattagaaacaaagaaaaacaaaataccaacttgtgtaa

SEQ ID NO: 6130 - DNA, 600 bp, Chicken  19866894110107_5
gccttgatgacagtgcgtggttgctcgggggagacatcgtgtacctgaacgaagaaactgtcatcctccgaggtgatggctgcatcttcttttgcttcttgaaagacatttctctcatttaaattctgaagaaaagagagccaaattcagctactgcagagtgtaactcaaagtggtggtcatagaaagtttccaacacttrgaaatcaggcactgttktgatyctatttcattaaatgcaattgctccgtataaaacagttttgatgagccartatttcttacaacgtatatacccgcrttactaaaatccgtgtatctataatacctttccaattacagctcatgctgtgctgtacagagcatcacagggcaaagccacagcatggcttccatccacactaagacagattttcacctatgttttccaaaggaatgcagctcagcagtgacacgtttgtagtcgcacacactcacaaagtgctgcagtcagctgaatgaaggaggttgctaattgcacaaacttctactccaaatattagaaacaaagaaaaacaaaataccaacttgtgtaatataaaacactattatacatgcccca

SEQ ID NO: 6131 - DNA, 599 bp, Chicken  19866894110108_1
  misc_feature (1)..(133): n is any nucleotide
nnnnnnnnnnnnnnnnnnnnnnnnnnnnnnnnnnnnnnnnnnnnnnnnnnnnnnnnnnnnnnnnnnnnnnnnnnnnnnnnnnnnnnnnnnnnnnnnnnnnnnnnnnnnnnnnnnnnnnnnnnnnnnnnnnnnntgcgtagcctcagccccaaagcatcttaagcaaacaatgatactccagaaagcagaggtgttactgctgggactaaggggtgcagccgaggatgggggcaccctcctgtttggtggtagggaatttggagctacactgctgcattccacctcactggatagtctgtkctgcctttgttgtggcctggctggaggcagcacagccacagcagttgctgataggaaagtgtggagaaaggaactgagggcttcgtgggaaggaggctgtcactgctggtttgatacttgcttttctgaagagcaggtgtttgttgtttaaaagggagtgaacttgtaccagtaatgcagagtttgattctgtgtttstttcttgtaggtatagaacgggatgcagttagtacttttaccaaatatatttctccagatgctgctaaaccaatacctattacagaagcgatgagaaatga

SEQ ID NO: 6132 - DNA, 600 bp, Chicken  19866894110108_2
gctgggactaaggggtgcagccgaggatgggggcaccctcctgtttggtggtagggaatttggagctacactgctgcattccacctcactggatagtctgtkctgcctttgttgtggcctggctggaggcagcacagccacagcagttgctgataggaaagtgtggagaaaggaactgagggcttcgtgggaaggaggctgtcactgctggtttgatacttgcttttctgaagagcaggtgtttgttgtttaaaagggagtgaacttgtaccagtaatgcagagtttgattctgtgtttstttcttgtaggtatagaacgggatgcagttagtacttttaccaaatatatttctccagatgctgctaaaccaatacctattacagaagcgatgagaaatgacatagttggtaagaatgctttctgcatattaattttagagctttcccatagtgatctatttctggaatcttcagaaagtagtgccagtgtctcttgaaaggctyttctgcacagtcaggaccagctgatgctagcaggtttgaagtgcagtatttcatgagctggtcattgcctgtctttcaacccagtaaaccaactg

SEQ ID NO: 6133 - DNA, 600 bp, Chicken  19866894110108_3
tgctggtttgatacttgcttttctgaagagcaggtgtttgttgtttaaaagggagtgaacttgtaccagtaatgcagagtttgattctgtgtttstttcttgtaggtatagaacgggatgcagttagtacttttaccaaatatatttctccagatgctgctaaaccaatacctattacagaagcgatgagaaatgacatagttggtaagaatgctttctgcatattaattttagagctttcccatagtgatctatttctggaatcttcagaaagtagtgccagtgtctcttgaaaggctyttctgcacagtcaggaccagctgatgctagcaggtttgaagtgcagtatttcatgagctggtcattgcctgtctttcaacccagtaaaccaactgtgyattacaactaagctgttctttctttacagcaaaaatttgtggggaagatggacaagtggatccgaactgctttgttacagcacagtccatagtgtttaatgcaatggaacaagagtaagtggcgcgtgttgtccttctgcaaaaggtgttcccaygaataatgcttatgaagacataaagcattgtatggttgtcttctgca

SEQ ID NO: 6134 - DNA, 600 bp, Chicken  19866894110108_4
cttgtaggtatagaacgggatgcagttagtacttttaccaaatatatttctccagatgctgctaaaccaatacctattacagaagcgatgagaaatgacatagttggtaagaatgctttctgcatattaattttagagctttcccatagtgatctatttctggaatcttcagaaagtagtgccagtgtctcttgaaaggctyttctgcacagtcaggaccagctgatgctagcaggtttgaagtgcagtatttcatgagctggtcattgcctgtctttcaacccagtaaaccaactgtgyattacaactaagctgttctttctttacagcaaaaatttgtggggaagatggacaagtggatccgaactgctttgttacagcacagtccatagtgtttaatgcaatggaacaagagtaagtggcgcgtgttgtccttctgcaaaaggtgttcccaygaataatgcttatgaagacataaagcattgtatggttgtcttctgcacttgtgactgtgttcagatctctgcctccaaatctgttcttgtgactgcttactgaagttgtrtttgcatgatrttactgtgttctttgtactgttct

SEQ ID NO: 6135 - DNA, 600 bp, Chicken  19866894110108_5
atttctggaatcttcagaaagtagtgccagtgtctcttgaaaggctyttctgcacagtcaggaccagctgatgctagcaggtttgaagtgcagtatttcatgagctggtcattgcctgtctttcaacccagtaaaccaactgtgyattacaactaagctgttctttctttacagcaaaaatttgtggggaagatggacaagtggatccgaactgctttgttacagcacagtccatagtgtttaatgcaatggaacaagagtaagtggcgcgtgttgtccttctgcaaaaggtgttcccaygaataatgcttatgaagacataaagcattgtatggttgtcttctgcacttgtgactgtgttcagatctctgcctccaaatctgttcttgtgactgcttactgaagttgtrtttgcatgatrttactgtgttctttgtactgttctcatgttgtttgtgtaccccgtgctgtttatggacagttttacttttgtctgactgaaggcttctggggcaagaacaaactggctcataaggtgcatttaatgctgctcacccttaataaccaattgttgctctgtgtgcaggcactttagtgagt

SEQ ID NO: 6136 - DNA, 600 bp, Chicken  19866894110108_6
attgcctgtctttcaacccagtaaaccaactgtgyattacaactaagctgttctttctttacagcaaaaatttgtggggaagatggacaagtggatccgaactgctttgttacagcacagtccatagtgtttaatgcaatggaacaagagtaagtggcgcgtgttgtccttctgcaaaaggtgttcccaygaataatgcttatgaagacataaagcattgtatggttgtcttctgcacttgtgactgtgttcagatctctgcctccaaatctgttcttgtgactgcttactgaagttgtrtttgcatgatrttactgtgttctttgtactgttctcatgttgtttgtgtaccccgtgctgtttatggacagttttacttttgtctgactgaaggcttctggggcaagaacaaactggctcataaggtgcatttaatgctgctcacccttaataaccaattgttgctctgtgtgcaggcactttagtgagtttctgcgaagtcatcatttctgtaaataccagatcgaggtgctgaccagtgggactgtttatctggctgacatacttttctgtgaatcagctctgttctacttctctgag

SEQ ID NO: 6137 - DNA, 600 bp, Chicken  19866894110108_7
ttcaacccagtaaaccaactgtgyattacaactaagctgttctttctttacagcaaaaatttgtggggaagatggacaagtggatccgaactgctttgttacagcacagtccatagtgtttaatgcaatggaacaagagtaagtggcgcgtgttgtccttctgcaaaaggtgttcccaygaataatgcttatgaagacataaagcattgtatggttgtcttctgcacttgtgactgtgttcagatctctgcctccaaatctgttcttgtgactgcttactgaagttgtrtttgcatgatrttactgtgttctttgtactgttctcatgttgtttgtgtaccccgtgctgtttatggacagttttacttttgtctgactgaaggcttctggggcaagaacaaactggctcataaggtgcatttaatgctgctcacccttaataaccaattgttgctctgtgtgcaggcactttagtgagtttctgcgaagtcatcatttctgtaaataccagatcgaggtgctgaccagtgggactgtttatctggctgacatacttttctgtgaatcagctctgttctacttctctgaggtgagcgttag

SEQ ID NO: 6138 - DNA, 600 bp, Chicken  19866894110109_1
aagatgtttctgtgcagcactcgcataaagaaaacagaagttagagtaatcagtatgtttttgttcccagtatctgcaggtttggggcaagctctaactgcattctgatcttgtactcatttatttctacatctgtctaccacattatatgtcagagttttgatgaaataacgtaaccaggaggctttactgaggaggaagagtacaaggattagaaatgcaccctctgttttgagcagaaaatgccctattgtttttacttcagggatacgtgtttgtttgtcactgatgtaatgcccraaacagccataagttcccttgctattcttgcagtctacaaaagctgatgtgtctgtytggttgctgcagctaactgagtgcatcacaatgcgtaaaagtagatgttctagctactgtaaatgatagaacaatgtttacttgtttgttttcattttgaatttaaaattagcggttaagagtggctgtgttggggagagctgcatttggtcacaagtgaaatgcctgtcatgatttcaacttaatctttaactgacattagtccacagttcaaaaaaatatttggcacaagggagaacctct

SEQ ID NO: 6139 - DNA, 600 bp, Chicken  19866894110109_2
tttttgttcccagtatctgcaggtttggggcaagctctaactgcattctgatcttgtactcatttatttctacatctgtctaccacattatatgtcagagttttgatgaaataacgtaaccaggaggctttactgaggaggaagagtacaaggattagaaatgcaccctctgttttgagcagaaaatgccctattgtttttacttcagggatacgtgtttgtttgtcactgatgtaatgcccraaacagccataagttcccttgctattcttgcagtctacaaaagctgatgtgtctgtytggttgctgcagctaactgagtgcatcacaatgcgtaaaagtagatgttctagctactgtaaatgatagaacaatgtttacttgtttgttttcattttgaatttaaaattagcggttaagagtggctgtgttggggagagctgcatttggtcacaagtgaaatgcctgtcatgatttcaacttaatctttaactgacattagtccacagttcaaaaaaatatttggcacaagggagaacctctgaggagaatccttagaaaaacagagggtgttccaggtatggatgaaggtttgttggc

SEQ ID NO: 6140 - DNA, 600 bp, Chicken  19866894110110_1
ggggaacttcaaataaagataataaaatcttgctttcatggggagagcggccttcgcaataggcagctggcatccttgggctgctggagtgggaaccaggagcaggcgggtgggctgcgagtcgctgcctttgtctctcccagtacgtccaagctgtgccagcaccattgtcctggtggaagtaaattacgtctccaaaaggagtctgcatgaacgttccctcaggcagcgaaagtagaaacaataactacttcattcctaacttgaaactttcttttctcaaactgggtgccttcgtaygaaggaatgcaatttggaatgttgctgtggagctgcttaatgatttcttctttaattccttacagcgttctcatcctcttccctaaatggctttatcgtgttataaaactttgcagctttgtgttacgctttgtgtgctgtaaaatggagcgatctcccagtgaggaagtgagcttcatagtgggatgttgtctgctggtcccgacctactgacagcactgctggaagcagcagccaccagtgcctgcaggtaaagaggagcgggagcgctgcggctggttcctgctgctggccttggca

SEQ ID NO: 6141 - DNA, 600 bp, Chicken  19866894110110_2
gctggttcctgctgctggccttggcactgcatgtgttggaggtttgtctggattgccgcccaactttaagcaagtccagctgacatgtttaaagttggattagtctggttagattacttgctgctatttatggttccagacttaaatactcactcggctgccttgttcgtttggttgaaatagcgtgatagggaagattggtgtgaaaagataaggttaaatcagtctagaatgtttgtgaagctggggtgtgtacgcttcagagaaactcatttaaggtttgagtgcagagaatattaraaaaggttgtaaaaaaaagagactgttctatcagccagtgatttctgtgagtgagcaaggagacctttccttgatggttttttccctctcccaaactgataaaaatgttactgtgataaggaccggattccataatatcattgaaagcttttatctgtattagtgctttgataatttgcatttgggaaccaaacaccgatgctgagttatgctcccgaagtgaaacaaagttgtattgccacgacactgaacacggtttgttcttccctgtaccgtgagttgctttgggtgggcaaacgt

SEQ ID NO: 6142 - DNA, 600 bp, Chicken  19866894110110_3
gtgagcaaggagacctttccttgatggttttttccctctcccaaactgataaaaatgttactgtgataaggaccggattccataatatcattgaaagcttttatctgtattagtgctttgataatttgcatttgggaaccaaacaccgatgctgagttatgctcccgaagtgaaacaaagttgtattgccacgacactgaacacggtttgttcttccctgtaccgtgagttgctttgggtgggcaaacgtgtcagggagatgtgaagtctcaggatacttgctgactgccactgtgccayttctcctgctgtgacctgttcaggcattagggtacgtgctgaggtctccagtgtagcccttgctgctctggccaacagcagagcatcaatggtgagagcagcactacagctgaccgactcccagcagttttacctcgattccatctccccttcttcagcatgcacattggaaagcctgcagttagccatgcagctggttcatgcaagcactcaggttactgctggtagtggggaagttgtgctgctttcggataatgatggttcaggtgcttacagatgagttcctgcaggcactgctgc

SEQ ID NO: 6143 - DNA, 600 bp, Chicken  19866894110110_4
tcctttgccaggaatttgtcactcactgcagggaactggtggaggaaaacctgaagatgaattgtgagcacatctgtgcaacttcagctgatgaaattgagtctttatcaagaatttgtactgagaggctggactttgaaaagctggggtatgagcgtgtgatgtctaatggtgggaacagttgagcttggaagagaaaagcggaagaaagagagagcagtgatttcctaagccctgcagcaagctttgctggaggtatttattggtatatacccatctgtaaaatatttaccttcatayttatgtgactgcaggagaaacatgcctgttggctggctatagatgcgctagtgggcgggtgacaggttaagatgttacactgcttataaactttgtttcacggctcttggaagggaaatcttgcagttttgaaggggatccctgggcacgttcctctccatttccatctgtcatccttgtggaagtcgtaaaatgcaatgagaggaaagtgggaaagcgttggaagtttttctttcaaatattctcttatgaactggcaactacatggggaatatttggggatcctggagccggatgata

SEQ ID NO: 6144 - DNA, 600 bp, Chicken  19866894110112_1
agtgttgaataagcaaagaattcaagtattttaagaaatgattctgaagctcccattgaaacatgcctcccaaaataagacaaaaataaactctctttctgctcaccaagttggcagccagcattccagaatggctgaggattgtagttgctagagtctacacggtaagaagatgggtagatgcgggataactgatgttggttgaaacgtagatactgtgctggcttttgctgcagtatctggtgggcttttgtttcactgaaagatgaaacctgccagctggaagagactgcaaagaasagaagtgattagaggcctaatctccttatttatttattatctaaataaaacattcaaaaaaagatagcattaattacttataacaatctatcataatttgagtacattctactttgagggaacaattattttcttatattacagcagaatgtaatgagtggcctgaatcctcattaagaaaaattacattacaaaagttctctaagattttttcactttgctgaaagaaagtataatttctggcaagcaattctctctgacatttttaactaaattttgactcttgtgaaaatcagatgc

SEQ ID NO: 6145 - DNA, 600 bp, Chicken  19866894110112_2
aaataaaacattcaaaaaaagatagcattaattacttataacaatctatcataatttgagtacattctactttgagggaacaattattttcttatattacagcagaatgtaatgagtggcctgaatcctcattaagaaaaattacattacaaaagttctctaagattttttcactttgctgaaagaaagtataatttctggcaagcaattctctctgacatttttaactaaattttgactcttgtgaaaatcagatgctgaaaatgtagaaagtttactgaaatattctaggaatttaayggggatggttcaccagctttgaagtaaaatctaagctttggagaaactcttgatttgaaatgctcttcagaccattcttccccagaaaatatgccctctgttatatccagtgatgtaaatggtctgtagcaacatttataaaagctaccaaaaattacatgtgtcactgctacctggaatagctttacctcttttacagaagctgccacataactctagagtcattttgtagcttctgaatagcaagtggtcagccactttggaacagcacagctttactgcgcgcagctcttctgataa

SEQ ID NO: 6146 - DNA, 600 bp, Chicken  19866894110113_1
cttaaccactttgttctcatccgttaccaaagtcacttctctctagaaaagcaaaaaccttcagatcggccactgtaactgatgacactgtgagcacaaaatatgtatctctgcctgatggcttaaattaatgcgccagattggcatacggtggatgaagcatgggaagcattccgttttgctgcaggaatgggggccttcagcagaagggcagggcaaacaccagatacacatgtggctttggaagcagcagtcgtgctccaagtgcatgctgaaaagagtttgtacagccaggataaygtgaagtaacctggctgcatgtctggatgccagctttctacacagatgtaaggtatccacaggagtcataaaaacactcaagctgagagcctggcgaacagtgcacagtaaattaaattacttgacttaaaactcttgcaagagacaatttcagaaaagaaaaccttttcccatcatttcccagctgtaagaatcacaaacagcgtatgggatgcatcaaaggagaagcaagttttcaaaaaaacaaaacaaagactttaatccattaccaagaatgtgctctgctgagctggtggctgc

SEQ ID NO: 6147 - DNA, 600 bp, Chicken  19866894110120_1
gcgatagatgaggtgagatggtgcagcaagagagaactgctcttccctgggcagcagcagcactctcctgccagccaaggcttttctgctagatacgacaagcagaaaattggatcctccgtgaatacactgagactcttttcctttgaatgtactggggctgaacaaaatacttaggggctaccctgcaagcattgcatgcagcagccaaattaattacctttgttttccacagtgactttcagaggcaaaatataatgacaaatagtcagctactggtattttcagctacatctgaaractgtggagtagtttaactggatgctagagtatctgagcaaaattatgctcaccagtcactgctctgagaccaactgcactgggcttcagcttgcactgggagttcctgtaatacatctgacatttttcaagcctatgtttaaactcctaggaaatcactcacttgacacactcttggatggtggccttgagccttctgttgtgcatctgagattccagacagcttttgtcagatcacagctgtaagcagaaggcacccaaggctgccttcctatgcaccagtgtgtggaaggaaccagc

SEQ ID NO: 6148 - DNA, 600 bp, Chicken  19866894110125_1
gacaataaattgtttcaattttgcttatgaaagatttagatgaaatattctaagcattctctaataatacacatagtaatattttcatgttattttctagaccgtttttaaacacgtgaggcactcttggaaattcaaaactgacccttgtcctgttgctcgtacttttagctattgatatggaaatttgtaattcatgcgttgcattacccaggtatcattcctctaagtcttctgggctgtatattgcttatttcagtttttcttttaactcaggtttgggaacacagtctgtggacygtatgcagtgactgrgtaaagcttggtgctggtgtaaccagagagaaaattccagctgacttgagctgaatcaggacgcttccctctctccttgtccctcatacagtggagtcttaaatagggcctgacactaagtctcttaaagtcaattcagaggctgacattgacttgagtatgctttccatcagaccaataatggactgtttgttttaggcactttctctccttcgtgcaggcatcactataaatggatttttttctatatttagaagtattacctgcctgatatgcttttccctt

SEQ ID NO: 6149 - DNA, 600 bp, Chicken  19866894110125_2
caattttgcttatgaaagatttagatgaaatattctaagcattctctaataatacacatagtaatattttcatgttattttctagaccgtttttaaacacgtgaggcactcttggaaattcaaaactgacccttgtcctgttgctcgtacttttagctattgatatggaaatttgtaattcatgcgttgcattacccaggtatcattcctctaagtcttctgggctgtatattgcttatttcagtttttcttttaactcaggtttgggaacacagtctgtggacygtatgcagtgactgrgtaaagcttggtgctggtgtaaccagagagaaaattccagctgacttgagctgaatcaggacgcttccctctctccttgtccctcatacagtggagtcttaaatagggcctgacactaagtctcttaaagtcaattcagaggctgacattgacttgagtatgctttccatcagaccaataatggactgtttgttttaggcactttctctccttcgtgcaggcatcactataaatggatttttttctatatttagaagtattacctgcctgatatgcttttcccttgtagtttgacagccc

SEQ ID NO: 6150 - DNA, 599 bp, Chicken  19866894110127_1
  misc_feature (1)..(18): n is any nucleotide
nnnnnnnnnnnnnnnnnnaattggaaaaaatagatctgttaatagctttcaaagtggaggttttgcaactgacgtagtttcttggtgtttatctttgatcacacattctcgcattctttcctaagtataagaaggactcagaggggccttccagaactagagacacacctcaaaaaagccaatgagaatttcagaactaaatgcaagatattttttgaaaatctaagatttccacgctatttactgctttgaataatccttctgcaaagtaagatttctttgaaaaaatgagattcccawgttataatacagagaattctttctgaaatctgtcctctagttctagcatgtatttaagaaaagattgatatctatcactttcacartgtccaaagagagttaattatttaaagccagcactttgcgttatgcccaaacgcaagatttctgttatctttcgctgtgagaaaacactgaagaacctgcatccctccactagtgagaatatttcaaaaatcattaaaaaatgtctggcagatggcaaaatctgttaaaaagcttatttaraagtaaatgttagatcaatataattaagagag

SEQ ID NO: 6151 - DNA, 600 bp, Chicken  19866894110127_2
gtttatctttgatcacacattctcgcattctttcctaagtataagaaggactcagaggggccttccagaactagagacacacctcaaaaaagccaatgagaatttcagaactaaatgcaagatattttttgaaaatctaagatttccacgctatttactgctttgaataatccttctgcaaagtaagatttctttgaaaaaatgagattcccawgttataatacagagaattctttctgaaatctgtcctctagttctagcatgtatttaagaaaagattgatatctatcactttcacartgtccaaagagagttaattatttaaagccagcactttgcgttatgcccaaacgcaagatttctgttatctttcgctgtgagaaaacactgaagaacctgcatccctccactagtgagaatatttcaaaaatcattaaaaaatgtctggcagatggcaaaatctgttaaaaagcttatttaraagtaaatgttagatcaatataattaagagagttagtagcaaatgaatccttacaactttttttaattaaacattaccattatcagaattgatgtacagtttggacataaataaggagt

SEQ ID NO: 6152 - DNA, 600 bp, Chicken  19866894110127_3
agtaagatttctttgaaaaaatgagattcccawgttataatacagagaattctttctgaaatctgtcctctagttctagcatgtatttaagaaaagattgatatctatcactttcacartgtccaaagagagttaattatttaaagccagcactttgcgttatgcccaaacgcaagatttctgttatctttcgctgtgagaaaacactgaagaacctgcatccctccactagtgagaatatttcaaaaatcattaaaaaatgtctggcagatggcaaaatctgttaaaaagcttatttaraagtaaatgttagatcaatataattaagagagttagtagcaaatgaatccttacaactttttttaattaaacattaccattatcagaattgatgtacagtttggacataaataaggagtctgaatcacactgcttgcaatgcaatggacagtatcatcacggaaaacacaccatgacaatataactagcatatcataacatgtaataacatagaagtcaagttttgttttcttttttgtagttttataatcctgttattctggggccttgcatttaacaaagataaagatccacctggat

SEQ ID NO: 6153 - DNA, 600 bp, Chicken  19866894110131_1
agtgtggtggaaatcagcattatatactcacaaaataatttagattagaaggaacttctgaaagttatgtggtccatcccttactcctcacctttacatctcctttcaatttaaaggaggaatgatgtcaaagataagtctgtcttcaagatcaagttgccctgggccttgtctcagtcaagttttgaatatctcttaacatggagatgcatcagtaatctgctctgatgtttgagtaccttcactgtgtagaaaattttccttcgcctaattggaatttcccatattgtcagttgtgtstacaatccgttactattgagatatggactttcgaggtgtctggctcgtcttctttgtcaccttctattgcagacagcaaaagaattccctatttgctttttcttcttcagtctgaacaattcagctctcctctgtgcatgtcatatgctccaaccccctatcctgtaattggaagtttttacagaaacaccttcttcccatgccagcagaaacagcactcaaagagtagattgatagtaggagagagaacgcatttggtggaacaagtgaaataaagcatgagttcctcaaaattcagtg

SEQ ID NO: 6154 - DNA, 600 bp, Chicken  19866894110154_1
agggcagagaaagactcaacaactgaaagaagacctgtagtacagaactatcaatgtaacctcactttgctgaatctgtgagaaactaaagaatagctacgcactgtcctgattggccacactccattagggacacagaatcagaatcgtttgagttggaagggaccctcaaaagccatctagttcaactcccctgcaatgaacagagacacctacagctcgatcagggtgctcagagccccgtccagcctgaccttgaatgtctccagggacgaggcttctaccacctctctgggcagyctgtgccagtgcctcaccacccttattgtaaaaactttcttcatatccaatgtaaatctcccctcttgtactttgaaaccacttccccttgttccatcacaacagaccctactaaagagtctgtctgcttcttgtagcccccctttacatactgaaattctgctataaggactccttctgctgctccttcttccagagcatcccttcttttctagcttcgtacaagtctcagcagcagccaataggaaccacagattaaagtcagtgcagacagtagtgggtatctgcatgtgaaattgt

SEQ ID NO: 6155 - DNA, 599 bp, Chicken  19866894110158_1
  misc_feature (1)..(9): n is any nucleotide
nnnnnnnnntccggtgaggtcaatccatctggtacggtgcatcttttgcagcagtatactgtgatgttcaaacagcagttagcagttgtagctgtgctattataaatagcttcatctagtagtcaaaatgttaagatcaaaagttatcattaaaataacttctgtgaatgtttaaaggtttcactgaaagtacacgttaagactgcaaacacatatactggctcacataccatgtgtcttacaagtgtaacacagattcacagtagccaagaagactttaagacagactacggatgaacracaagaggtaaaaccagatgttggtgacaacaaaagcttcaagtgcttctactcttgtcagcttgttggtcagtgtcagggcctgaggggctggcccacctcatctaccatgttaaggatgtaagtagcgatatcatcctctgtaggtgcatctgaaaccacccaagaatcacctgccccagttacttggcgacggcagacaggacagctcctgtgacgatcactcctgtcagaaagccagagaaatgagcatttttcatttgtgatctctttccggccaaaaaaaagcccccacttaa

SEQ ID NO: 6156 - DNA, 600 bp, Chicken  19866894110159_1
ataaccaagaagcatggcttgtgttctcttgctcctcactgatgaggtacaagtaaaatgctgtgaggtgcaaaatttggagtactgtgtggggcaaactattaaaaactatcaaaaagagactttgtggataaataatcttggaaatcattctaactcctcaaaccatgttgtacaaacataatagaagtgtttgatggaagagtatcctggttaattttagggtttctttgttgatttctgtcccctagaggcttttgagaaagtatttgaggaaagtattcaagcagggaaagagargttaagaagaaaaatccttgaatggataaatcaataattaacacatgagaaacataggacgggaactagtatcagttcccaaagtcatcagtagagttccaaagatatttgttcaagatcttgtgccatccaacataagtatcatggtgtaaatgttgagtaaaaatggttgctgatggctgtaaatgaaggtagtgaagttaataaccatcactgaagatttggagaagaatcttatgcaattcaatagtgtcataatgaaatggcagacaaactctggtgtaggtaaagataaaatta

SEQ ID NO: 6157 - DNA, 600 bp, Chicken  19866894110162_1
gttaatacaatcagttctgaatacctaacaaatctatttaagagtatctccacaatacttaaaggacttaacatctctgttttaagcaatcagaaaatattaatatctgtttttctgagtaacaaatccattaatattacatatggaaacatatgggtgcagaaattaaattctgaagtgaagcttacgaagtgttgcactgaattgagtcaagatcatttccaactgtctacagtaacttgttttatatagtattagaggtcccttccagcccctacaattctgtgatagtattcacartcaaactcatttcagtccaggacttgaacatwtccttaagaccaaactagattgtttgacacagtcagaaaaaaaaaaaaaaattactgtgtcatgtttgagttctacagtatttgttttataaaaaaacagtgagttagttataaatatttctcagtatatttaattatattttggggcagaaatattctataaacttgagatgtgtcaagcaaaattcagtaccaatgatttaaatctatgggacaaacatgcagaactcaaggttcagagtatgtcttcttccacactaagcaagaa

SEQ ID NO: 6158 - DNA, 600 bp, Chicken  19866894110162_2
tctatttaagagtatctccacaatacttaaaggacttaacatctctgttttaagcaatcagaaaatattaatatctgtttttctgagtaacaaatccattaatattacatatggaaacatatgggtgcagaaattaaattctgaagtgaagcttacgaagtgttgcactgaattgagtcaagatcatttccaactgtctacagtaacttgttttatatagtattagaggtcccttccagcccctacaattctgtgatagtattcacartcaaactcatttcagtccaggacttgaacatwtccttaagaccaaactagattgtttgacacagtcagaaaaaaaaaaaaaaattactgtgtcatgtttgagttctacagtatttgttttataaaaaaacagtgagttagttataaatatttctcagtatatttaattatattttggggcagaaatattctataaacttgagatgtgtcaagcaaaattcagtaccaatgatttaaatctatgggacaaacatgcagaactcaaggttcagagtatgtcttcttccacactaagcaagaagcagtgaatgtggaagcttctaaggatgaact

SEQ ID NO: 6159 - DNA, 599 bp, Chicken  19866894110164_1
  misc_feature (1)..(10): n is any nucleotide
nnnnnnnnnnataaatgcagccagaagctgacaggtcttgcagcttggaacgaaatacaggataactaatgtgggcttttattgggaagctggtgcagatttaacaggcggttgtgcaaggagtgaaaaccccccagtggtggttaggatggtggtggagaggaaaggccgagtgctcgcattgctgctgagctgtggctttgctgtttcccttgtttcccacctcagttccttagttccagaactgctgaaggcatacagcactttcttattttttttcctacttttttttttctcccmagcacagagtgagctcgtgccttcccgcagcctacactgtaggtcttaagaaatgaatgtgtaaatattttgtctctcacagcagcccaaggtcatctttctggaacagcaaacaggcacagaatccaaagaagatcagtccgtcatgtgagtaaggttagcatctgcacttacaaatgacaaaggctattaatcctcatgctgtaatccccaagctgtttgccagctggcagcaggaagatgttcctgctcagcccacacagctatccatgttttttcacctttatgaagcagatata

SEQ ID NO: 6160 - DNA, 600 bp, Chicken  19866894110172_1
aattgtgaacaggaaacctgagagagattgcacgagtggttttctgaaggcaccactgagtacgtgtttgtgatacaaagaggttctctgaacgtgtggagctctttccaagaatattggaggaaatatgcctcattgactggggacatctatggttctgctgaaagacagaaaaatgactaaacggagtaatatctttaaacaaacaaagttgggggaaaaaaacaacaacacccctttctcccagctgccagaatgctttaattctttctttgcactttataagtaggccttctaatytctggatccaactagagaggcaagtaggtgttgcccttgttgcttgtgttattggcttttctcttccaagttctgtagcccctgtatggttccctggaaatgtgaaacttgttcttgatacaaattgattgcagtcagttgctcttgagcagggcttgggctcatatctgatagagaacatcactgcgctctatgtgacaaggaaatgagtagggtcatctttatatctcatctaggagtttggcagatgattgttgttcatgcctgtttcttttgcacttagacatgaggatgacgttc

SEQ ID NO: 6161 - DNA, 600 bp, Chicken  19866894110176_1
atgacagataaaatcatcatgtattgaaaaatatattaaagatttgattcagaggccataattttgaatgagcacaccaaccccctttctctattaccgtagtagtagaagaaaatattttcaattcacccatctaattttcttgagaaatgaatccattcatatctctgcatgatatatgttagaatccagtttctaatcttagttgcaacctcataaatcttgaatagaatttgtagacaccagggggcttaggccaccaaagccaattacactgatgtaaaatccatgtctgtgtartattcgggacaaaggaagatgagaaagaaaagggaaaggctattcagaccaggaccggaaatgaaggcagttttgtagtcactccaaacctggtttctagcagttctctgtgcctttatcaacacttccttccattaacatagaaagctttttcttacgaagaacctattttgcacatgactgttttcttaacaaagaatttttcagtgaaagtacgtttgaatgactgaggttcttggaattgcgctgcctgtcctggactttaatttactagaagttagaaatatttataagaaagtc

SEQ ID NO: 6162 - DNA, 600 bp, Chicken  19866894110182_1
aaggccacacaaccccctgtttaatacataattctagaaagtaatttataccgaatgaactgtagttctaatggatgtgcattaaaatgtacagctgtttaagttttccattaatgtgctggtcaagttctgacccttatgttggtctaatgtaattttagtgttttacagagtatattactaatggatttgcaagtagatatcttgagtaaatgttttcaaacaggtgatgcagggaaataattacaactctaacctggctttattcttaatttgcagaaagtcgatcattttcacagygcttgctaaagaaaagtgagcaattagtcttgctctcgtatttaaaagtgtgattcaaaccataatgtatgctgtgaggttagtaattagtattgtaacatgtaacaaatgtatgtcatttatgaagaggtagatcaacagctaagttatctggaagttagactggaaaaaaagaaaaagtaggtgtttcttctactacatatgtttatgatrgatcattaattatcaccacatgaaattttagaaagcttagaatactgatgtcactacaggccaagaacaagcatgagggactatctt

SEQ ID NO: 6163 - DNA, 595 bp, Chicken  19866894110182_2
tgttttcaaacaggtgatgcagggaaataattacaactctaacctggctttattcttaatttgcagaaagtcgatcattttcacagygcttgctaaagaaaagtgagcaattagtcttgctctcgtatttaaaagtgtgattcaaaccataatgtatgctgtgaggttagtaattagtattgtaacatgtaacaaatgtatgtcatttatgaagaggtagatcaacagctaagttatctggaagttagactggaaaaaaagaaaaagtaggtgtttcttctactacatatgtttatgatrgatcattaattatcaccacatgaaattttagaaagcttagaatactgatgtcactacaggccaagaacaagcatgagggactatcttactgttgcaccaagaacagaaaacrtaaattctatcacagttttgttgtggtttttttgtcaatcacagttgatgtgaaatatcagttttacagcctaatttttgtacgtcaacagtgctggtattccattgtttacaatatatcaaatactaaaggaatttttgggattctgatgtatgcataatccattttaagctaaaattaatt

SEQ ID NO: 6164 - DNA, 483 bp, Chicken  19866894110182_3
agtcttgctctcgtatttaaaagtgtgattcaaaccataatgtatgctgtgaggttagtaattagtattgtaacatgtaacaaatgtatgtcatttatgaagaggtagatcaacagctaagttatctggaagttagactggaaaaaaagaaaaagtaggtgtttcttctactacatatgtttatgatrgatcattaattatcaccacatgaaattttagaaagcttagaatactgatgtcactacaggccaagaacaagcatgagggactatcttactgttgcaccaagaacagaaaacrtaaattctatcacagttttgttgtggtttttttgtcaatcacagttgatgtgaaatatcagttttacagcctaatttttgtacgtcaacagtgctggtattccattgtttacaatatatcaaatactaaaggaatttttgggattctgatgtatgcataatccattttaagctaaaattaatt

SEQ ID NO: 6165 - DNA, 599 bp, Chicken  19866894110191_1
  misc_feature (1)..(118): n is any nucleotide
nnnnnnnnnnnnnnnnnnnnnnnnnnnnnnnnnnnnnnnnnnnnnnnnnnnnnnnnnnnnnnnnnnnnnnnnnnnnnnnnnnnnnnnnnnnnnnnnnnnnnnnnnnnnnnnnnnnnnncataggattaggagcccaggaacaaaaataatcaagcttccacaagcttagtatgttggcatttgtgagagccaccattcaactggagaagtggcctaagctttgtagagggagtaggtgtatgctcaccaggcatggtgatttggaaatgggcacaagcttcctggatcaggcaatctttmccacccacagagacatggcaaakcctttgggccactgctttacacactgcagccctaactgtctaagcatgctctattgctcctggattttgacttctgaatgtgtccrttctaaatacgtttccttctaagacaccccaacaktccaataacccacaatgtgcttagactcttttaccacctcgtgcatttcttctgttaagattattggcaagatattcagcaaggagtttacatgctcaactaaatttcaatgaagacacatgaccacatttgccaaaagcagatccatggtgcag

SEQ ID NO: 6166 - DNA, 599 bp, Chicken  19866894110191_2
  misc_feature (1)..(95): n is any nucleotide
nnnnnnnnnnnnnnnnnnnnnnnnnnnnnnnnnnnnnnnnnnnnnnnnnnnnnnnnnnnnnnnnnnnnnnnnnnnnnnnnnnnnnnnnnnnnnnncataggattaggagcccaggaacaaaaataatcaagcttccacaagcttagtatgttggcatttgtgagagccaccattcaactggagaagtggcctaagctttgtagagggagtaggtgtatgctcaccaggcatggtgatttggaaatgggcacaagcttcctggatcaggcaatctttmccacccacagagacatggcaaakcctttgggccactgctttacacactgcagccctaactgtctaagcatgctctattgctcctggattttgacttctgaatgtgtccrttctaaatacgtttccttctaagacaccccaacaktccaataacccacaatgtgcttagactcttttaccacctcgtgcatttcttctgttaagattattggcaagatattcagcaaggagtttacatgctcaactaaatttcaatgaagacacatgaccacatttgccaaaagcagatccatggtgcaggctccagttgtcaacatggaacc

SEQ ID NO: 6167 - DNA, 599 bp, Chicken  19866894110191_3
  misc_feature (1)..(9): n is any nucleotide
nnnnnnnnncataggattaggagcccaggaacaaaaataatcaagcttccacaagcttagtatgttggcatttgtgagagccaccattcaactggagaagtggcctaagctttgtagagggagtaggtgtatgctcaccaggcatggtgatttggaaatgggcacaagcttcctggatcaggcaatctttmccacccacagagacatggcaaakcctttgggccactgctttacacactgcagccctaactgtctaagcatgctctattgctcctggattttgacttctgaatgtgtccrttctaaatacgtttccttctaagacaccccaacaktccaataacccacaatgtgcttagactcttttaccacctcgtgcatttcttctgttaagattattggcaagatattcagcaaggagtttacatgctcaactaaatttcaatgaagacacatgaccacatttgccaaaagcagatccatggtgcaggctccagttgtcaacatggaacctcacaccttggttaactagaagcaaaggacccaaagggtcacacacccacactcaagcatcagcataagcagtggctctgcagatg

SEQ ID NO: 6168 - DNA, 600 bp, Chicken  19866894110191_4
aataatcaagcttccacaagcttagtatgttggcatttgtgagagccaccattcaactggagaagtggcctaagctttgtagagggagtaggtgtatgctcaccaggcatggtgatttggaaatgggcacaagcttcctggatcaggcaatctttmccacccacagagacatggcaaakcctttgggccactgctttacacactgcagccctaactgtctaagcatgctctattgctcctggattttgacttctgaatgtgtccrttctaaatacgtttccttctaagacaccccaacaktccaataacccacaatgtgcttagactcttttaccacctcgtgcatttcttctgttaagattattggcaagatattcagcaaggagtttacatgctcaactaaatttcaatgaagacacatgaccacatttgccaaaagcagatccatggtgcaggctccagttgtcaacatggaacctcacaccttggttaactagaagcaaaggacccaaagggtcacacacccacactcaagcatcagcataagcagtggctctgcagatgaggaaatgatatcacctgatcaaaaaatgacagaga

SEQ ID NO: 6169 - DNA, 600 bp, Chicken  19866894110194_1
aatgcactctctggtgcctggatcaaaggtttatctctcagaaagtgcttatccactgttagtcatcacaatcagcactacacaccttgaaaatcacattttctggtgtgtttgtcatcctgagatgtcatggaagggaactattaaactataaatagctactgaatgtccaggtaggaaattcatgatgggaaaacatatatagaatatcctttttgtccttaaacacaaacacactaagaatgtcattgcaatccctgttagtgagggacactcagacgcagtatttactgctctctyacccctcctccccataagcaaatgatcctgttaaacactgcagtttgtatcacagttaatatttacccttacctacctgtcttgaagcagtgtcgactgacgttatgaatgaataatgcaacaaacttaaaactgcaccctctggcaaaacaaaacaaaacaaaaacccccacaaacaacagcaacaaaaaatccctttccaaggctggtaggatgaatcatagataaaaatgttttaaatatttaaaagtatgcctgaaaccaccccctgcataagcttactttagcaaatcgaaacct

SEQ ID NO: 6170 - DNA, 600 bp, Chicken  19866894110199_1
taaacataacattaaatcctctgtgcaggtccacattttgggaccttccccagcacctcaagaagcacaaaaacacaacaggtcgaggtccaacaagaactccccacactcaaatgggatgctgcacacagacagctcctccagatcctcccagccctgcagtgacatacagcaagaagggcagccacaataattaaacgtacctcaacgtgttgtagcaagactggattcctacggtccaatagtagttaattttctaaaggtcaaattttacatgtttattttcactggtgccctgcmcaatacaaagacacagctatattaatagcttagaaattaaacacccagctcgttctaggaaactatacagagtttcgctccgcttcacccaaagattgacatttcatcccagcaaaggccagggcagcgtcccagcccagaacatctggttggcagcacaatggagcacagcacctgcgaacacgctcagtgtttgctttgcaactatttgtcccccatcgatgtaaaaatacgttcttgggctgtttaagttcactccctgccagaggagtctggtgtgataatgtagcctgtttgtct

SEQ ID NO: 6171 - DNA, 338 bp, Chicken  19866894110202_1
cataaaattgataagtaaaaaatcttaaagttatagagctctaggttcaaggaggacttgtgatagtggagagagtggaatgtattcagggaaaaatgaagtagaaagctaaaaagaaaaatagaagaattttcagaagaagtgacaacataaaagaaaaccataaagactaggggtcaaagccaagatatgtatgaccttgatcagatggggtgtgcagtttgttggataattctagttcttagtttttccactacaaaataatttccttggggtaacttgctagaaaagatgccttcyaaaatcccagcaactcaaggtgggaatggaatgaaagg

SEQ ID NO: 6172 - DNA, 600 bp, Chicken  19866894110203_1
atggggacaggaacaatcctgagcatgtaaagaatctatgtctgttgtgcatgggtgagcttaataaggcaaactcgttgatgagggaaaacactgagctgatttcaggaacaattaggaaatagagcaaacaaataagccttggtgatctgaatgactcaggtgatccacgtgattcacatggtaatcagcagcttttcctaagttacagactggctgctatctcactgatcgggagcaaaagctttcagacaatcactgccattcaatcatttgaggaagtattagcgtcgatgcacrtaggactgtagggtgatgtggaccaacgttattgaaatggccagagagagtttggaggctcattgggaatcatcctaacggagcctggctgcttccataaaatgccaaggtcttatgctctgaaaagcagctactgtctataaaggtgcacgctgatactgcgagtgtatttcaaaaatcctggccatgtggttttgctgataggtaatgtttgtgtggaacttctcagctttctccaaaagttctcccagctctttttgggttattgctgcattaggtgccatcagagcctcggcagga

SEQ ID NO: 6173 - DNA, 600 bp, Chicken  19866894110204_1
ggtgtctgcagggatggggaaccactgcctctctgggcatcctgtgccactgcctcactgcccttactgtaaaaacccttttccttatatcccatataaatatcccctaacatgggatggaggtaagatggagtttcatcctcttgttcatcctttatgatcagttctcctttgctttctcattagggaattgtactaccagacactagcagggttttatgtatgtgtggaggtatgcatatatataaatatcactgtgtgtgtatatgtacacatgtataggtatttatacagaactgrtagtcttcatattaattagctagagttctcctcktaaagatgcagaaggaagcagaaaacccaactgtttctctcaggacttgcttctcgtgtaccctgtgtaccacacagctggctgaaggatttattcaaggccacacacttatgccagatgcacagagtgaaatcactgatctccataataacccgttcagagcagtgacgctgttccttgctgtggagcttgctgcctaaacattgatcagcctctgcagttctggtcttggagagctcctgcagccgtgcccaacccagctgtgt

SEQ ID NO: 6174 - DNA, 600 bp, Chicken  19866894110204_2
gggcatcctgtgccactgcctcactgcccttactgtaaaaacccttttccttatatcccatataaatatcccctaacatgggatggaggtaagatggagtttcatcctcttgttcatcctttatgatcagttctcctttgctttctcattagggaattgtactaccagacactagcagggttttatgtatgtgtggaggtatgcatatatataaatatcactgtgtgtgtatatgtacacatgtataggtatttatacagaactgrtagtcttcatattaattagctagagttctcctcktaaagatgcagaaggaagcagaaaacccaactgtttctctcaggacttgcttctcgtgtaccctgtgtaccacacagctggctgaaggatttattcaaggccacacacttatgccagatgcacagagtgaaatcactgatctccataataacccgttcagagcagtgacgctgttccttgctgtggagcttgctgcctaaacattgatcagcctctgcagttctggtcttggagagctcctgcagccgtgcccaacccagctgtgtgcccaacagcagccttcagcaaagcagcagaact

SEQ ID NO: 6175 - DNA, 600 bp, Chicken  19866894110206_1
aaaattccaggtctgtttactgtggtctcacagtttggaatatgagaataaatcctaggagaagtggattgctgattagtatgctggaaggaagctgcttaatgtaagagaaatcaatgtgttgtgtagtatgcatatggcgtgttctgagctcagggggaaaaatactttggggacgtggaaaaaggattggtttttataaaggtgtgagtggaaagtaaggagttttgtaggtaaaggtgccctattttcaaggttctcatggtctgaaatacatttgttgtggtatctttgctttaytttctggcacctcagcgtgcattgctatctcagtgatgttaaacgattggttagatttacagaatgaagyatcttcaaaaataagcagggaaaactgtgtcagccaacctcccttatgtcttcccatgtgctacatttaatctgatgcagatatttgttactctaattgtatttatccccccttgtccaaaccatatctcataaccataactgttaactgaaagtaaaccagaacacaagtcattctgcactaatttaaaatagccatatgtgtactaacagctgcatcctgacaaaagt

SEQ ID NO: 6176 - DNA, 600 bp, Chicken  19866894110206_2
gctgattagtatgctggaaggaagctgcttaatgtaagagaaatcaatgtgttgtgtagtatgcatatggcgtgttctgagctcagggggaaaaatactttggggacgtggaaaaaggattggtttttataaaggtgtgagtggaaagtaaggagttttgtaggtaaaggtgccctattttcaaggttctcatggtctgaaatacatttgttgtggtatctttgctttaytttctggcacctcagcgtgcattgctatctcagtgatgttaaacgattggttagatttacagaatgaagyatcttcaaaaataagcagggaaaactgtgtcagccaacctcccttatgtcttcccatgtgctacatttaatctgatgcagatatttgttactctaattgtatttatccccccttgtccaaaccatatctcataaccataactgttaactgaaagtaaaccagaacacaagtcattctgcactaatttaaaatagccatatgtgtactaacagctgcatcctgacaaaagtactgttccgcctgctaaccccttgctgcttcttctgttttcattaatttccttcttatctttgtagtaat

SEQ ID NO: 6177 - DNA, 600 bp, Chicken  19866894110206_3
tcccactgctttggtgggaaatattggagatagctggatggttgggttggatgatcctagaggtcttttccaaccttggtgattcgaattccatcacctagatccactgtctttttctggaatgtgttttaaaattgcctttctgttaagaaagctaagggaagtcttactgtattggttccagctaagcaaataggaggaaaacatcttaaggtgcctttgtgcactgttatttcttctgtccccagtacgtgtgtgtgctgctgttccaagctgttcggtgctgtaactgaatgctcygtgtatctccttgctttcagctgcagcttcctctgcttgcaattgcctgaagttttcctawaattttctggaaataaaaaaggtccagaaataattgcttgcattttaattgttgctgtaacttaaaggcaggacattaaaatgcgatcactttacaggtatctccctcttaatttggagtttgaaattgtctctgaaaagttacagccttattgaaatttgtaataccaaacttacgacagatcacacaattagataagctgctctggcattttgatactataaaaagccataaagaaa

SEQ ID NO: 6178 - DNA, 600 bp, Chicken  19866894110206_4
ggtcttttccaaccttggtgattcgaattccatcacctagatccactgtctttttctggaatgtgttttaaaattgcctttctgttaagaaagctaagggaagtcttactgtattggttccagctaagcaaataggaggaaaacatcttaaggtgcctttgtgcactgttatttcttctgtccccagtacgtgtgtgtgctgctgttccaagctgttcggtgctgtaactgaatgctcygtgtatctccttgctttcagctgcagcttcctctgcttgcaattgcctgaagttttcctawaattttctggaaataaaaaaggtccagaaataattgcttgcattttaattgttgctgtaacttaaaggcaggacattaaaatgcgatcactttacaggtatctccctcttaatttggagtttgaaattgtctctgaaaagttacagccttattgaaatttgtaataccaaacttacgacagatcacacaattagataagctgctctggcattttgatactataaaaagccataaagaaatcaaaacatcaaaagatgtgttctcattcttctttgggagggaggatgatgcagtgcagrg

SEQ ID NO: 6179 - DNA, 600 bp, Chicken  19866894110206_5
waattttctggaaataaaaaaggtccagaaataattgcttgcattttaattgttgctgtaacttaaaggcaggacattaaaatgcgatcactttacaggtatctccctcttaatttggagtttgaaattgtctctgaaaagttacagccttattgaaatttgtaataccaaacttacgacagatcacacaattagataagctgctctggcattttgatactataaaaagccataaagaaatcaaaacatcaaaagatgtgttctcattcttctttgggagggaggatgatgcagtgcagrgatattagagaagccctactttttcctgtccttaactttaataagttttgtggtaaacagtaaatgggctcagaactatttggttgctcatctaaagtacrctyggcttttgaagtttaacactaagagatgcctttattgtagagaaacakgcatccaaggacacattgttttttatcttctcaaaatgattccactgatctaatggcaccagttcagggtgtttgccatttcagcttgcctaagaaatcattgataagttaggaaaacgagacgatcaccagttggtcagtcagcagc

SEQ ID NO: 6180 - DNA, 600 bp, Chicken  19866894110206_6
tctccctcttaatttggagtttgaaattgtctctgaaaagttacagccttattgaaatttgtaataccaaacttacgacagatcacacaattagataagctgctctggcattttgatactataaaaagccataaagaaatcaaaacatcaaaagatgtgttctcattcttctttgggagggaggatgatgcagtgcagrgatattagagaagccctactttttcctgtccttaactttaataagttttgtggtaaacagtaaatgggctcagaactatttggttgctcatctaaagtacrctyggcttttgaagtttaacactaagagatgcctttattgtagagaaacakgcatccaaggacacattgttttttatcttctcaaaatgattccactgatctaatggcaccagttcagggtgtttgccatttcagcttgcctaagaaatcattgataagttaggaaaacgagacgatcaccagttggtcagtcagcagccagctgctgtggtggacaggtgcagactgggaaccccgctatcctgtgtgacagaatcagcactgagggcggtcagtggctcttaaatcacggggaggctg

SEQ ID NO: 6181 - DNA, 600 bp, Chicken  19866894110206_7
ccctcttaatttggagtttgaaattgtctctgaaaagttacagccttattgaaatttgtaataccaaacttacgacagatcacacaattagataagctgctctggcattttgatactataaaaagccataaagaaatcaaaacatcaaaagatgtgttctcattcttctttgggagggaggatgatgcagtgcagrgatattagagaagccctactttttcctgtccttaactttaataagttttgtggtaaacagtaaatgggctcagaactatttggttgctcatctaaagtacrctyggcttttgaagtttaacactaagagatgcctttattgtagagaaacakgcatccaaggacacattgttttttatcttctcaaaatgattccactgatctaatggcaccagttcagggtgtttgccatttcagcttgcctaagaaatcattgataagttaggaaaacgagacgatcaccagttggtcagtcagcagccagctgctgtggtggacaggtgcagactgggaaccccgctatcctgtgtgacagaatcagcactgagggcggtcagtggctcttaaatcacggggaggctgcag

SEQ ID NO: 6182 - DNA, 600 bp, Chicken  19866894110206_8
ttgaaatttgtaataccaaacttacgacagatcacacaattagataagctgctctggcattttgatactataaaaagccataaagaaatcaaaacatcaaaagatgtgttctcattcttctttgggagggaggatgatgcagtgcagrgatattagagaagccctactttttcctgtccttaactttaataagttttgtggtaaacagtaaatgggctcagaactatttggttgctcatctaaagtacrctyggcttttgaagtttaacactaagagatgcctttattgtagagaaacakgcatccaaggacacattgttttttatcttctcaaaatgattccactgatctaatggcaccagttcagggtgtttgccatttcagcttgcctaagaaatcattgataagttaggaaaacgagacgatcaccagttggtcagtcagcagccagctgctgtggtggacaggtgcagactgggaaccccgctatcctgtgtgacagaatcagcactgagggcggtcagtggctcttaaatcacggggaggctgcagtgcagcttcaacgtactgcacataaaaactggggggtgatcttgggcc

SEQ ID NO: 6183 - DNA, 600 bp, Chicken  19866894110214_1
aaagaatgaatgaagatttcattttacaaccttctgaaacaaaaaccaaccaaccaaacaaaacacccaggcaacaaaaactgtacactttgtagatttgctgtttcccactcaaggtaggttgtcttgtaaaacttactccaacaaaattggagtgattggtgaccctgcacatagcaggggggttgaaactcgatgatcattgtggtccttttcaacccaggccattctatgattctatgattcaatgaaatttatttcaaagcatctctttcattgtgattctcaaaatcaccattyggtaaattttagcataaaatcaacattagaaggaatttctttctggtttccctagaaagagaaacagaatctattctgtattgtcttaataacccaaagtagttactgaattgcaagtagagaactgcttataactgacaaaaaaaggtgcttctactagaccatttctatgccagacacaatttctggtaagacactttacttaatgtgcaaatacagtgcttttggcatgacacagctacctttgatctctgtaaatgactgacagtaaattatgtatgtcagaaactgaccggcagg

SEQ ID NO: 6184 - DNA, 600 bp, Chicken  19866894110217_1
acagggaacaaaaaagtcatcagaatggattaactttgcaacaaaatctcattttgtgtccgtaaggaaatgaaatacaaactaccgccatgcagctactcaagttggcaaaggacaaggaaaccattcagaagctattcagaatgtttttaaatgtcagacacatcctgcaggaacattaaggtagccttaaaacgtgggagacttcttttggaaaagcacagcagatgtctgcttgtatacacagctgtcctgctttaatgtcctgtcagggcgatgcatcacattgagagctcgacragctctttttaattcaaggctggtgaaaagaagctgttcccctacaaaatgaaggcaactttgtatagcactgaaaaattattccattaatctctgattccagatgcttcaattaagacaaaatcttaaatctcacgatttcactgtttaagaatattagtccttaactctttttttgtgtcattaaactgtgaaataataaaaatcaatctttcacttaccttaatttcctttatttcttcttttttatctttcagcttggcctgcttctgtcattgtttgcactacatcagacatctt

SEQ ID NO: 6185 - DNA, 600 bp, Chicken  19866894110217_2
taattcaaggctggtgaaaagaagctgttcccctacaaaatgaaggcaactttgtatagcactgaaaaattattccattaatctctgattccagatgcttcaattaagacaaaatcttaaatctcacgatttcactgtttaagaatattagtccttaactctttttttgtgtcattaaactgtgaaataataaaaatcaatctttcacttaccttaatttcctttatttcttcttttttatctttcagcttggcctgcttctgtcattgtttgcactacatcagacatcttctggagacrttatttgttcacaagttttctggagggcacactcccctgaaaaatatgataaaggtaactgtgtatatcattttgtgtaagagagactatcctcacattgaggcagaccttggaagaagataggagaataaaaaataatttattttctagctcaatacattatgattagtcaaaacataaatatagaaaaaaatctcagggccatatccccagraacatgaactgaaatcaatgtccatttcagctactgcgtgtcagtgtccactttgactcatccacccaaggggctggttgtcatgt

SEQ ID NO: 6186 - DNA, 568 bp, Chicken  19866894110217_3
taatttcctttatttcttcttttttatctttcagcttggcctgcttctgtcattgtttgcactacatcagacatcttctggagacrttatttgttcacaagttttctggagggcacactcccctgaaaaatatgataaaggtaactgtgtatatcattttgtgtaagagagactatcctcacattgaggcagaccttggaagaagataggagaataaaaaataatttattttctagctcaatacattatgattagtcaaaacataaatatagaaaaaaatctcagggccatatccccagraacatgaactgaaatcaatgtccatttcagctactgcgtgtcagtgtccactttgactcatccacccaaggggctggttgtcatgtcaggatatttttcagattgaatgctattttattatgagatacggtgctgcaacaatgaacaacgctgacagaatcacactccacttccttggtgcaatataaacacagagtaagagacagcctttgcattaggaagttaaaatcaagttacaaataaattataaatatatcccttattctat

SEQ ID NO: 6187 - DNA, 600 bp, Chicken  19866894110221_1
aaatgagctttaaaaatgtaagatgtgtagaacacaaacacattttccagatttttttctgaaacgggagaaggatataggctcacagaagaaggagataatgtaaaacataatgtacatgacatggtttagggcagtgagtatttggagtcagagcagtgtaatgagatttgaaagaagtttgaaggtttgtcatttctacccttgaaaattattctcttttattaattgtaatcaaaaagcccaaaagatgagctgttgaatacttttccctaaatttttagaatcttcactatttaraagtgaggagcgatgctgattttaatcagaaaacattccagagtattgcaaaatatgaacacagtcttgcaagctgttcctcgtgaaatttcacgcgaagttcagaatactcacaatattaagggctgctaatctgagcaggatgtcacaagattaagttattcaatccatccgtaacattcacctgcttggttttagtttagtatatgactcttcrgtggccatttcccaactgcccctgaattgaagatgcaaaatttgttaaattttgtgttgaaattgtgttgaaatggaatttgg

SEQ ID NO: 6188 - DNA, 600 bp, Chicken  19866894110221_2
tcttttattaattgtaatcaaaaagcccaaaagatgagctgttgaatacttttccctaaatttttagaatcttcactatttaraagtgaggagcgatgctgattttaatcagaaaacattccagagtattgcaaaatatgaacacagtcttgcaagctgttcctcgtgaaatttcacgcgaagttcagaatactcacaatattaagggctgctaatctgagcaggatgtcacaagattaagttattcaatccatccgtaacattcacctgcttggttttagtttagtatatgactcttcrgtggccatttcccaactgcccctgaattgaagatgcaaaatttgttaaattttgtgttgaaattgtgttgaaatggaatttggaattgaggttaaaaaaaagrgggaagcagatatagaaggtttgacttggaatatacttctactgttttttgactcgttttataaagaagaatattttaatgcaaccctgaagtccaggccatgtagattttatttttttcatctcctgcatgaaattcccagcaactgttaattagaactataaagagttaagaagcattttaaggacaagcttaat

SEQ ID NO: 6189 - DNA, 600 bp, Chicken  19866894110221_3
tttaatcagaaaacattccagagtattgcaaaatatgaacacagtcttgcaagctgttcctcgtgaaatttcacgcgaagttcagaatactcacaatattaagggctgctaatctgagcaggatgtcacaagattaagttattcaatccatccgtaacattcacctgcttggttttagtttagtatatgactcttcrgtggccatttcccaactgcccctgaattgaagatgcaaaatttgttaaattttgtgttgaaattgtgttgaaatggaatttggaattgaggttaaaaaaaagrgggaagcagatatagaaggtttgacttggaatatacttctactgttttttgactcgttttataaagaagaatattttaatgcaaccctgaagtccaggccatgtagattttatttttttcatctcctgcatgaaattcccagcaactgttaattagaactataaagagttaagaagcattttaaggacaagcttaatggtaaagcagaaaaaggtaagcaaacttctaggccacattaaggggatcattaagaggagacctaggtttggaacttccagtggaaaaatttcaaagactgtt

SEQ ID NO: 6190 - DNA, 600 bp, Chicken  19866894110226_1
tgcctttcatattctggaagatagtttgaatgtttattgtttcttaaacacataattatccagagcatggacaggtcaagagcggcttctgcatcctatccaggccttcagacagctcttccttaacaaaggcatggttttccattcagacactaccctagtgctggaaggcatctgctttcttaagagaaggaaagataaaggcttacctacttcccagaagagtactacacgtggagatggagagagggaaaagagttacggacctcattccgctgacatgctagaagtgtctgactktggtcggtacaagtaaaatcccctgtcgtttcctttacctgaaattaacaaaatgcttgctatctaaagacatctgctagcacattacctatttcagcagagtccagagagatgacacctactctaatccttctgtactgaaagccagttatccacaactgtttccagttcaggttagcacagtgtattcttggcaactgtcaccttttcaatttactcccattcatccttcaaaatacacattcccagatcatgtaactttactaagtttagccctatgaagaattttatctcagaagc

SEQ ID NO: 6191 - DNA, 449 bp, Chicken  19866894110226_2
tagcacagtgtattcttggcaactgtcaccttttcaatttactcccattcatccttcaaaatacacattcccagatcatgtaactttactaagtttagccctatgaagaattttatctcagaagccacacagagaaatacagaactcaagttattttattcaggtgtcacgcatcgcacagcacagggtatatctgcactcctcacacggaggaccagtcagatacatatcctgggtgagcagaacctggttcttatttgtctgtttttcttttgtccctttggtgtggtacatagaacygcaacaatgctttccgacttaaagcccataaaaagcagctttccaaatgtagtatggcacaacagaactttggggaaatgttgtaattatttgactgtcgctaccatttaatgcataaattaaaggtttcacttctttcagggatacaa

SEQ ID NO: 6192 - DNA, 600 bp, Chicken  19866894110228_1
cagaatgtgtcccactatggctgggagcccttcagtgacatgcaatttctccctttccctcctggcctccccagcttggccttgggatgtgctgcttagcattcttcaagaacaggacaagaaaaagaatcatttggctgaataatggcctttaggaagattttatgaaaaactattggctttttaaatgcatttctcctttttttttgatttttcagtgacatcctctatcagtcttttttactacagagtgcaatgtaaactaggcattggtttctctgccagattttttcttttgtyaagatacttctaaaatcaaaatactatcaaaataattcatctacagaatatttacttttgagaagatgaggtatgcattttttctgaaggcaaacgcacggagaactgaatatttcagtgtgcagaggtacaagacatactgctccatagcatgccccatccacgctttgcccagacatttattttcctacaccaggtgctgaggtatcccatgttctcttctctcaccagacagattccttgttcttactctgcttatgactatctaatgcagctggtacaggagctgcagcttgatta

SEQ ID NO: 6193 - DNA, 599 bp, Chicken  19866894110240_1
  misc_feature (1)..(193): n is any nucleotide
nnnnnnnnnnnnnnnnnnnnnnnnnnnnnnnnnnnnnnnnnnnnnnnnnnnnnnnnnnnnnnnnnnnnnnnnnnnnnnnnnnnnnnnnnnnnnnnnnnnnnnnnnnnnnnnnnnnnnnnnnnnnnnnnnnnnnnnnnnnnnnnnnnnnnnnnnnnnnnnnnnnnnnnnnnnnnnnnnnnnnnnnnnnnnnnnnctgaatttgttccttgaagatcacttctgaaccctttctaatatgctggtcacactgtaatagttacctcactatgctttcttgatttctctacttgcacacccatrggtgctgttatcttatggtggtgcaaaacaaggcagtgttttcacagatctgaacatagctagaagaggttgrtgtttccattcyaataactaaatcacaaggctttaattrttttgctataaccacatgattaaagttatyacagtcattcacatgcttaaacatctgcaatayctggtccttagctctgctctcctctggagaatatrgctttgtagtatttcaaataccatactatttatcctttaagttctgttcttgtttctagctgtattcttttccacttttagccataaat

SEQ ID NO: 6194 - DNA, 599 bp, Chicken  19866894110240_2
  misc_feature (1)..(120): n is any nucleotide
nnnnnnnnnnnnnnnnnnnnnnnnnnnnnnnnnnnnnnnnnnnnnnnnnnnnnnnnnnnnnnnnnnnnnnnnnnnnnnnnnnnnnnnnnnnnnnnnnnnnnnnnnnnnnnnnnnnnnnnnctgaatttgttccttgaagatcacttctgaaccctttctaatatgctggtcacactgtaatagttacctcactatgctttcttgatttctctacttgcacacccatrggtgctgttatcttatggtggtgcaaaacaaggcagtgttttcacagatctgaacatagctagaagaggttgrtgtttccattcyaataactaaatcacaaggctttaattrttttgctataaccacatgattaaagttatyacagtcattcacatgcttaaacatctgcaatayctggtccttagctctgctctcctctggagaatatrgctttgtagtatttcaaataccatactatttatcctttaagttctgttcttgtttctagctgtattcttttccacttttagccataaatctcttttcccggattctccttgaccctcagtgtttttcacttatagtctttctagtttctccttgactaatca

SEQ ID NO: 6195 - DNA, 599 bp, Chicken  19866894110240_3
  misc_feature (1)..(108): n is any nucleotide
nnnnnnnnnnnnnnnnnnnnnnnnnnnnnnnnnnnnnnnnnnnnnnnnnnnnnnnnnnnnnnnnnnnnnnnnnnnnnnnnnnnnnnnnnnnnnnnnnnnnnnnnnnnnctgaatttgttccttgaagatcacttctgaaccctttctaatatgctggtcacactgtaatagttacctcactatgctttcttgatttctctacttgcacacccatrggtgctgttatcttatggtggtgcaaaacaaggcagtgttttcacagatctgaacatagctagaagaggttgrtgtttccattcyaataactaaatcacaaggctttaattrttttgctataaccacatgattaaagttatyacagtcattcacatgcttaaacatctgcaatayctggtccttagctctgctctcctctggagaatatrgctttgtagtatttcaaataccatactatttatcctttaagttctgttcttgtttctagctgtattcttttccacttttagccataaatctcttttcccggattctccttgaccctcagtgtttttcacttatagtctttctagtttctccttgactaatcatcttgtattttt

SEQ ID NO: 6196 - DNA, 599 bp, Chicken  19866894110240_4
  misc_feature (1)..(81): n is any nucleotide
nnnnnnnnnnnnnnnnnnnnnnnnnnnnnnnnnnnnnnnnnnnnnnnnnnnnnnnnnnnnnnnnnnnnnnnnnnnnnnnnnctgaatttgttccttgaagatcacttctgaaccctttctaatatgctggtcacactgtaatagttacctcactatgctttcttgatttctctacttgcacacccatrggtgctgttatcttatggtggtgcaaaacaaggcagtgttttcacagatctgaacatagctagaagaggttgrtgtttccattcyaataactaaatcacaaggctttaattrttttgctataaccacatgattaaagttatyacagtcattcacatgcttaaacatctgcaatayctggtccttagctctgctctcctctggagaatatrgctttgtagtatttcaaataccatactatttatcctttaagttctgttcttgtttctagctgtattcttttccacttttagccataaatctcttttcccggattctccttgaccctcagtgtttttcacttatagtctttctagtttctccttgactaatcatcttgtatttttttttaattgactgaagaactttagcca

SEQ ID NO: 6197 - DNA, 599 bp, Chicken  19866894110240_5
  misc_feature (1)..(51): n is any nucleotide
nnnnnnnnnnnnnnnnnnnnnnnnnnnnnnnnnnnnnnnnnnnnnnnnnnnctgaatttgttccttgaagatcacttctgaaccctttctaatatgctggtcacactgtaatagttacctcactatgctttcttgatttctctacttgcacacccatrggtgctgttatcttatggtggtgcaaaacaaggcagtgttttcacagatctgaacatagctagaagaggttgrtgtttccattcyaataactaaatcacaaggctttaattrttttgctataaccacatgattaaagttatyacagtcattcacatgcttaaacatctgcaatayctggtccttagctctgctctcctctggagaatatrgctttgtagtatttcaaataccatactatttatcctttaagttctgttcttgtttctagctgtattcttttccacttttagccataaatctcttttcccggattctccttgaccctcagtgtttttcacttatagtctttctagtttctccttgactaatcatcttgtatttttttttaattgactgaagaactttagccaaaatgcccccttttaatctcattttctgtt

SEQ ID NO: 6198 - DNA, 599 bp, Chicken  19866894110240_6
  misc_feature (1)..(18): n is any nucleotide
nnnnnnnnnnnnnnnnnnctgaatttgttccttgaagatcacttctgaaccctttctaatatgctggtcacactgtaatagttacctcactatgctttcttgatttctctacttgcacacccatrggtgctgttatcttatggtggtgcaaaacaaggcagtgttttcacagatctgaacatagctagaagaggttgrtgtttccattcyaataactaaatcacaaggctttaattrttttgctataaccacatgattaaagttatyacagtcattcacatgcttaaacatctgcaatayctggtccttagctctgctctcctctggagaatatrgctttgtagtatttcaaataccatactatttatcctttaagttctgttcttgtttctagctgtattcttttccacttttagccataaatctcttttcccggattctccttgaccctcagtgtttttcacttatagtctttctagtttctccttgactaatcatcttgtatttttttttaattgactgaagaactttagccaaaatgcccccttttaatctcattttctgtttccagcatgcattttagtaatcctcttttctta

SEQ ID NO: 6199 - DNA, 600 bp, Chicken  19866894110240_7
agatcacttctgaaccctttctaatatgctggtcacactgtaatagttacctcactatgctttcttgatttctctacttgcacacccatrggtgctgttatcttatggtggtgcaaaacaaggcagtgttttcacagatctgaacatagctagaagaggttgrtgtttccattcyaataactaaatcacaaggctttaattrttttgctataaccacatgattaaagttatyacagtcattcacatgcttaaacatctgcaatayctggtccttagctctgctctcctctggagaatatrgctttgtagtatttcaaataccatactatttatcctttaagttctgttcttgtttctagctgtattcttttccacttttagccataaatctcttttcccggattctccttgaccctcagtgtttttcacttatagtctttctagtttctccttgactaatcatcttgtatttttttttaattgactgaagaactttagccaaaatgcccccttttaatctcattttctgtttccagcatgcattttagtaatcctcttttcttatactacttgtaattaatgtatcccattagggtccca

SEQ ID NO: 6200 - DNA, 599 bp, Chicken  19866894110247_1
  misc_feature (1)..(109): n is any nucleotide
nnnnnnnnnnnnnnnnnnnnnnnnnnnnnnnnnnnnnnnnnnnnnnnnnnnnnnnnnnnnnnnnnnnnnnnnnnnnnnnnnnnnnnnnnnnnnnnnnnnnnnnnnnnnnggaagcagggctgtgagaagcatacatgtacctgaggtatcacatcattttaaagaggagaacattctcacatcagagaatgtaattcctctggctgtctagactttgaaaagctttgagggccttggaaatatcatgagccactttttaatgcaagaatccattgggaaaaacccatagtgtaggccagmataagaaagaagggtcacatttaccctcatcatctcctggcactatgcccaatatatgagagggctcataacaaatactcagtaccaaacactcacgttcctacttgtgttccytccacagaaatccaaacaaaaatccacccaattatgtttgaataagaaaaacatctcctcagcctctctccagaacgttatttatggaacagtgcagattttataggatgcctgttattctgatctaatcacaactctgcaacagtgctgctctgggactccacagcaacrcatccacatgtcca

SEQ ID NO: 6201 - DNA, 600 bp, Chicken  19866894110247_2
cagggctgtgagaagcatacatgtacctgaggtatcacatcattttaaagaggagaacattctcacatcagagaatgtaattcctctggctgtctagactttgaaaagctttgagggccttggaaatatcatgagccactttttaatgcaagaatccattgggaaaaacccatagtgtaggccagmataagaaagaagggtcacatttaccctcatcatctcctggcactatgcccaatatatgagagggctcataacaaatactcagtaccaaacactcacgttcctacttgtgttccytccacagaaatccaaacaaaaatccacccaattatgtttgaataagaaaaacatctcctcagcctctctccagaacgttatttatggaacagtgcagattttataggatgcctgttattctgatctaatcacaactctgcaacagtgctgctctgggactccacagcaacrcatccacatgtccaggacacgccacaggacacacagcagcaggctgggacctttggcagtcgacaccagagaacattctgggacctacctggctcccccaccaccaaggaccagggcaatggcatttcc

SEQ ID NO: 6202 - DNA, 600 bp, Chicken  19866894110247_3
atagtgtaggccagmataagaaagaagggtcacatttaccctcatcatctcctggcactatgcccaatatatgagagggctcataacaaatactcagtaccaaacactcacgttcctacttgtgttccytccacagaaatccaaacaaaaatccacccaattatgtttgaataagaaaaacatctcctcagcctctctccagaacgttatttatggaacagtgcagattttataggatgcctgttattctgatctaatcacaactctgcaacagtgctgctctgggactccacagcaacrcatccacatgtccaggacacgccacaggacacacagcagcaggctgggacctttggcagtcgacaccagagaacattctgggacctacctggctcccccaccaccaaggaccagggcaatggcatttccagtcaggacacgagccaggcgagagaagtccgagtggcggtctggtggcttctggaacacacgttcatacatctctatctgcagaagggaggaatacaatgatcattctcaaagcatgaatgtcttatagcccatgttaacaacagaccaaaaaaaaggggtcataaacta

SEQ ID NO: 6203 - DNA, 509 bp, Chicken  19866894110247_4
cttctggaacacacgttcatacatctctatctgcagaagggaggaatacaatgatcattctcaaagcatgaatgtcttatagcccatgttaacaacagaccaaaaaaaaggggtcataaactattcaagcaggcctagtaatcaacttcatctcccatatttttgcttaagttggaagaactccacagtagtgccgtattttctgtaaagatatttctctttcttgatcaaggatttaaaattactgataaacattgaaagccagatagatttaagaacacggcagcaatgtaatactcrgttgcaaataagaacatcctgtaacaacatcacgtcagattacatttgaaacatggattacaagtaaagtactgcagctaagagcccaaccaccaaatcaggcatctcaccagctttggcaagcttcttttggaaaacactcttcgtggacagtggagatgaagatgagcagaacaccagctcctcatattgagccattccacagttcg

SEQ ID NO: 6204 - DNA, 469 bp, Chicken  19866894110248_1
aacatccaggaaaggtttcagagaagctttaacaagcactttgcttcacccaccatcttgacaacacacagactttgttcctgtcaaaaccctcccgtgactgaggaggcaagcaaaacattttattaggagagtttttctctccagggactgctggagctgctggtccatactttgcaatcttgggtagcgttcccttgctcccactctatcctccccggggatttcaagcccttctcctgctgggacagttaggcaaataaacaacgtgcagctattttatgacttccctcagttttygcagtgagacattcctatgtagcagctaatgaaagcagtacagcatygcatcgtcaactgctggttggagtgctctagtgcttgcagctgggcattgcgcattccctaatgtgtgctgacttaaatatgaacttctctggcttttgattgattgattactggctttaaa

SEQ ID NO: 6205 - DNA, 422 bp, Chicken  19866894110248_2
acccaccatcttgacaacacacagactttgttcctgtcaaaaccctcccgtgactgaggaggcaagcaaaacattttattaggagagtttttctctccagggactgctggagctgctggtccatactttgcaatcttgggtagcgttcccttgctcccactctatcctccccggggatttcaagcccttctcctgctgggacagttaggcaaataaacaacgtgcagctattttatgacttccctcagttttygcagtgagacattcctatgtagcagctaatgaaagcagtacagcatygcatcgtcaactgctggttggagtgctctagtgcttgcagctgggcattgcgcattccctaatgtgtgctgacttaaatatgaacttctctggcttttgattgattgattactggctttaaa

SEQ ID NO: 6206 - DNA, 600 bp, Chicken  19866894110250_1
atgcgcagtgacacagctgtccagaagctctcgcaaggcaacgggcactgcgtgaatggagtgggtgggcagcttcatggcttttacagcctgccaaaacccagccgacacaactcagagttcagggacagcgcgtacgacctcccacgctctttcggttcctacacacaccccaagttgagcctcaccagttccgaaacggataatgaggaagtctacacctacaagactcccagcaatgccttatgcaaggaatttggggagctctccacggactcctacgatattcccgccaccccrctctctgtctaccagatccccaggacatttacactagacaagaaccacaatgctctggctgtggccgccagtgactcgccyaccatgccacccccacggcctccaaaacctggacagatggagccacgatggggcagcccaccccagcgaccccaacccggtgaaagcttagggttggctcccatggcagccaccattccccggagaaacacactgccagcagtggagaacagcaggctgcaccgaggtgaatttggggactgggagcaggggttggctttctcttatctagaaaccttg

SEQ ID NO: 6207 - DNA, 525 bp, Chicken  19866894110250_2
ttttacagcctgccaaaacccagccgacacaactcagagttcagggacagcgcgtacgacctcccacgctctttcggttcctacacacaccccaagttgagcctcaccagttccgaaacggataatgaggaagtctacacctacaagactcccagcaatgccttatgcaaggaatttggggagctctccacggactcctacgatattcccgccaccccrctctctgtctaccagatccccaggacatttacactagacaagaaccacaatgctctggctgtggccgccagtgactcgccyaccatgccacccccacggcctccaaaacctggacagatggagccacgatggggcagcccaccccagcgaccccaacccggtgaaagcttagggttggctcccatggcagccaccattccccggagaaacacactgccagcagtggagaacagcaggctgcaccgaggtgaatttggggactgggagcaggggttggctttctcttatctagaaaccttggacagg

SEQ ID NO: 6208 - DNA, 600 bp, Chicken  19866894110253_1
tagttgtcctacagtggctgtcctgttggcaacctcctgtccatgggactgtgtaccttgggctgaagttgccatataaacatagacagagttcggagtagagggactggagcactggctcctcttgcctctgcccagcccacagccaagagcttaccaggatgcagagtctggctccctcttgtgctctgtccttttaatgaattaatttgggaaatatgaagcagtggaatatttttagcgagtggcctgtcagcgcctctagcacaggattggggccctcatgcacactgtgaactygaaacacttcaggtaagcaactcagcttcctgttcatttgcataagcatgcttttaggtagaaaaaaaaataaaaataaaaggaatttgaataggaatgctgaaaaggttgtaacatttctaacatttttacaaaagccttccctttttcactgagctgcagcttgcagccggccaacctggggcacatttgtaccacctggtagcaaagccacttctctgtagagacaactgcttcagagcgtacatcggcagctctctgccagaatccaggtcaggaatttccgaggcagaagccaga

SEQ ID NO: 6209 - DNA, 600 bp, Chicken  19866894110254_1
gcctactgaaatataccacacctaccatgatataccatacctaccacaatataccacatgccatagagatcagatgaactcacttgcaaactctgctagtttttatgagggatggccaaaagaaagggggaaggaggcatcccatagcgatgcatgagcagaaatagcaccagcagttgtactttgggatgctgataaaagttacagcagtatcagcacccctgcactacaaagtttccagtgccagtgctttattgcatggacaatttgtccagtttgctcagcagaaaagcactgtcraatgaggaaaaacagaaaggagaaggtttggggtggtggaagaggtccccaggcatgttcctccctcccaaaatatgtttgatgctgccactgcctgtctgagctttcaccacggggtctgccagcagattacttatgatgggtatttcaaagggaccgggtgcaggagattgagcacggaatgcatctcgctcctcattcttgcttcctgctgggctccccagggtctggggctcagacagcgggaacccacgggagagcagagccataatcctgcaaattagcttttcacaaaagcca

SEQ ID NO: 6210 - DNA, 599 bp, Chicken  19866894110257_1
  misc_feature (1)..(111): n is any nucleotide
nnnnnnnnnnnnnnnnnnnnnnnnnnnnnnnnnnnnnnnnnnnnnnnnnnnnnnnnnnnnnnnnnnnnnnnnnnnnnnnnnnnnnnnnnnnnnnnnnnnnnnnnnnnnnnnaaatccttctaccccagcctgacttatggacctcatctgggtgctcaggtgtgctctgccacagcctcaaaagctcccagcacccctcctgcaccgctttagaactacagatacgctactgagctaccagcaggatgcactgccagaggggtacccgcactacagctcgtttcaagtttccctgctgcygttgctggctgttccatacagcatcccgctctagctcatggcagctsagcattttgtttgttgtcctgcgactacaaaagtatctgcaaggtaagacacttgaccaccctctccccagacgtcaagtcacgctaatgctctactattctgcttcattgattatatttccatagctgctcattctcttctcatcccttgcctacaaggaagcacaacatgaaagaagcattatgaaagacaaagcaagctaagaaagccctgtacgtacccaagtgttatctatctacacatttgtctgg

SEQ ID NO: 6211 - DNA, 599 bp, Chicken  19866894110257_2
  misc_feature (1)..(64): n is any nucleotide
nnnnnnnnnnnnnnnnnnnnnnnnnnnnnnnnnnnnnnnnnnnnnnnnnnnnnnnnnnnnnnnnaaatccttctaccccagcctgacttatggacctcatctgggtgctcaggtgtgctctgccacagcctcaaaagctcccagcacccctcctgcaccgctttagaactacagatacgctactgagctaccagcaggatgcactgccagaggggtacccgcactacagctcgtttcaagtttccctgctgcygttgctggctgttccatacagcatcccgctctagctcatggcagctsagcattttgtttgttgtcctgcgactacaaaagtatctgcaaggtaagacacttgaccaccctctccccagacgtcaagtcacgctaatgctctactattctgcttcattgattatatttccatagctgctcattctcttctcatcccttgcctacaaggaagcacaacatgaaagaagcattatgaaagacaaagcaagctaagaaagccctgtacgtacccaagtgttatctatctacacatttgtctggcctttgacaacgtccgacagctgcacatttggctgcctgttattcag

SEQ ID NO: 6212 - DNA, 600 bp, Chicken  19866894110257_3
accggcagcactgcggatttgtgctagacgaaaaaggaagcagcaactgcagccaaagcctgaggaatctgccttgcagttaaagacacttgtaaatttgtactgaagaagaggacagcgaagcctgactgcaaatgtggagagagggtaatctaattcttacataaatattttgaaacagagaattattttaaagtcatttccagtgtgagtatgttttagctctctgtgagcctacttctgctgggtcttttttcacctgatttgactaaataatcaaggatggtatttgctcacggygagcttactgcagaggtgagccatgcatcccaaggacgggtgtttgcacattcttccaggagcactcagtgtttggcagaagcatcagagcacagaaccctgcccgatggtscctatagacgttctgatgtaagtacacyacacgcaagccaccaatgaacttactttcatatcaaaacttgatccartacaagctggacgcagtgaaataaacagcagtttaccggtctgaatcagaccccaaacatctcaaagaggacatggtcagaaaatacacataaataacatctgcgtgaccca

SEQ ID NO: 6213 - DNA, 585 bp, Chicken  19866894110257_4
ggacagcgaagcctgactgcaaatgtggagagagggtaatctaattcttacataaatattttgaaacagagaattattttaaagtcatttccagtgtgagtatgttttagctctctgtgagcctacttctgctgggtcttttttcacctgatttgactaaataatcaaggatggtatttgctcacggygagcttactgcagaggtgagccatgcatcccaaggacgggtgtttgcacattcttccaggagcactcagtgtttggcagaagcatcagagcacagaaccctgcccgatggtscctatagacgttctgatgtaagtacacyacacgcaagccaccaatgaacttactttcatatcaaaacttgatccartacaagctggacgcagtgaaataaacagcagtttaccggtctgaatcagaccccaaacatctcaaagaggacatggtcagaaaatacacataaataacatctgcgtgacccacagacacaaagcgggagctatcagcttcccactggggcagcagaaagcacgcagagatgggtaccttcacctcagcgctgcagctctgaactcagtc

SEQ ID NO: 6214 - DNA, 557 bp, Chicken  19866894110257_5
agagagggtaatctaattcttacataaatattttgaaacagagaattattttaaagtcatttccagtgtgagtatgttttagctctctgtgagcctacttctgctgggtcttttttcacctgatttgactaaataatcaaggatggtatttgctcacggygagcttactgcagaggtgagccatgcatcccaaggacgggtgtttgcacattcttccaggagcactcagtgtttggcagaagcatcagagcacagaaccctgcccgatggtscctatagacgttctgatgtaagtacacyacacgcaagccaccaatgaacttactttcatatcaaaacttgatccartacaagctggacgcagtgaaataaacagcagtttaccggtctgaatcagaccccaaacatctcaaagaggacatggtcagaaaatacacataaataacatctgcgtgacccacagacacaaagcgggagctatcagcttcccactggggcagcagaaagcacgcagagatgggtaccttcacctcagcgctgcagctctgaactcagtc

SEQ ID NO: 6215 - DNA, 509 bp, Chicken  19866894110257_6
ttttaaagtcatttccagtgtgagtatgttttagctctctgtgagcctacttctgctgggtcttttttcacctgatttgactaaataatcaaggatggtatttgctcacggygagcttactgcagaggtgagccatgcatcccaaggacgggtgtttgcacattcttccaggagcactcagtgtttggcagaagcatcagagcacagaaccctgcccgatggtscctatagacgttctgatgtaagtacacyacacgcaagccaccaatgaacttactttcatatcaaaacttgatccartacaagctggacgcagtgaaataaacagcagtttaccggtctgaatcagaccccaaacatctcaaagaggacatggtcagaaaatacacataaataacatctgcgtgacccacagacacaaagcgggagctatcagcttcccactggggcagcagaaagcacgcagagatgggtaccttcacctcagcgctgcagctctgaactcagtc

SEQ ID NO: 6216 - DNA, 600 bp, Chicken  19866894110258_1
gaaccttcccacctatatcctgttacatcttgttgccatgtgacaggtggcagcagaggggcagtctcacaaaatgacttctgacatggaagtgagcacgaagcaaacatgtgtcactgaattcctccatgtggaaataatggcattcgttgacattcatcaacactcgctgaatgtctactgttgagtctacagagaccaaagagtggatgtgagcacagtgaggcagtgggtggtgcatttcagctatgtgaaagacaggccatgctccagacagccatgcagatttttattgagagyggtatgcaggctcttgttcatcactggcaaaaaatgcatagctaatggtggtgactatgttgaaaaatagcgttttgtagctgaaaatacactccatcgaatagtattatagtgctctttgtatctttgtagtttccatggaaataaataagaggcattaattttggagcaatttatgtataagtaattgcacacacaacagaagaccttgcttctagagcagggaatgggcaagagccatgtattgctctatatgtaataaaggattctgttaccaggctcttacattacaatgtcaac

SEQ ID NO: 6217 - DNA, 600 bp, Chicken  19866894110262_1
tacagcttgaaatccgttacaatattctgctgtattaatgcattactatcatgaagatgctgctgattacagccagatcacagcactgtaagcaatatctgtccacttaggagttaagtatttaacacaataaatgcttatataacaggaagaagagcaggatagacactgccaggcttaagttaggatttataaagccagtatgttcttccaacggtaactgagaaagtgccacttaaaaacccaaaacaatggcttaacaatctgttttgctttgtttctttttctggaaaggagagwtttccagaggactgatgaggttcaggtatgttccagttgttttccataagctactacaactgattgaaaatacaacaggggaaaactaagtttttatttctaaacgatggcgttgttcaaatcaaagctattcctgataatactggaaatctgagcaaggcacaaaggtcagatctggatctgaactccgttctgcatctgcacttcattctgctcatttgttcaggtctctctctaattattaggctcatcatccttgccccttcccagctgccatgtagtaggggtgtgatgttcctg

SEQ ID NO: 6218 - DNA, 600 bp, Chicken  19866894110266_1
gggaaaagaagggctggaggggtttgtaacggagcatcacggaatgcaaatggaagtgcaggtgtccaaaagagccgctagaaaggggatgggaggagcgaggtgcagcgacagctgaggacaggatggaggtgagccaacgtgctgcagtgtgcaccagggccagggcacggggggttagggacaggcaggtggcaccaggacagcgtgtcacacgcatctcctcccgtgctctgggtgagaggacagatggtgtgtgccaggatggccaagcgctgcgggcagcagcgtcacctgagygctgagactcagcgggtcccgaggcagaaggtcatcccctgcagtaagtgctgggctcctccgaggtgtaaaaatctgtctgtttggggagtgtgtgtactggggagtgggagcagacagcaagcatggccacatcacagcacagaaacgttacatttaaaggkttgggggtggaaaagggcggcggtgcaccggcgtgggctgcccagggagcgaggagatcacctggaggtgccccagaaccgtggggaggtggactgagggagctgggagtgggcatggtggggatctgagaggtca

SEQ ID NO: 6219 - DNA, 600 bp, Chicken  19866894110266_2
agggcacggggggttagggacaggcaggtggcaccaggacagcgtgtcacacgcatctcctcccgtgctctgggtgagaggacagatggtgtgtgccaggatggccaagcgctgcgggcagcagcgtcacctgagygctgagactcagcgggtcccgaggcagaaggtcatcccctgcagtaagtgctgggctcctccgaggtgtaaaaatctgtctgtttggggagtgtgtgtactggggagtgggagcagacagcaagcatggccacatcacagcacagaaacgttacatttaaaggkttgggggtggaaaagggcggcggtgcaccggcgtgggctgcccagggagcgaggagatcacctggaggtgccccagaaccgtggggaggtggactgagggagctgggagtgggcatggtggggatctgagaggtcatttccagcytcagaggaagcctcagctgacctctctgccagatgaggtcagcagggatgcacagtggtgcagcaggttgctctgcaagatgcccgtggaaagcaatcccaggggttgtctcaagggaggatgcacgattctatggtcctgacaaagcacctgag

SEQ ID NO: 6220 - DNA, 526 bp, Chicken  19866894110266_3
cagcgggtcccgaggcagaaggtcatcccctgcagtaagtgctgggctcctccgaggtgtaaaaatctgtctgtttggggagtgtgtgtactggggagtgggagcagacagcaagcatggccacatcacagcacagaaacgttacatttaaaggkttgggggtggaaaagggcggcggtgcaccggcgtgggctgcccagggagcgaggagatcacctggaggtgccccagaaccgtggggaggtggactgagggagctgggagtgggcatggtggggatctgagaggtcatttccagcytcagaggaagcctcagctgacctctctgccagatgaggtcagcagggatgcacagtggtgcagcaggttgctctgcaagatgcccgtggaaagcaatcccaggggttgtctcaagggaggatgcacgattctatggtcctgacaaagcacctgagccctggagtcacgggatcatgaatcctagaataccccaagctgcttgctttcctcttgctggataagtggt

SEQ ID NO: 6221 - DNA, 600 bp, Chicken  19866894110267_1
agaagcagttccccttcggtaacacttcctcttctcttacagatgatctctctggaggcatctcgagtttttcgccgctttgcttcctgctcagctttttccttctcttgctgcactgatttaactacatcctgcatccaggcaggacagaaccaagcacatcagctgaggcatgagatatattcattaaaacattaaaaatcctcaagctaagatgaaacataaagcaactaccagtcaaaataccttcaaattctcctcccaaaagcccgctctgtaaggaagagctctgctacagarggaactcttcctttacaacactccttatgggaaacataacccttggggctcgtgctgctggctgatccctcaacaggatcccgtgcagaacatgatgtttcacatagccttctagaagatatcaaacttttgctattgaactatcctcaccatatgcaaaataaattgtgtagctgcaactgttctaaattactggagtggaaacatcccacagctgcgctgcattcccaccgccatttgttcaggcataaaatatacaaaaaaaaaaaaagraggaggtaagcgacgctgatttcccca

SEQ ID NO: 6222 - DNA, 566 bp, Chicken  19866894110267_2
tctgtaaggaagagctctgctacagarggaactcttcctttacaacactccttatgggaaacataacccttggggctcgtgctgctggctgatccctcaacaggatcccgtgcagaacatgatgtttcacatagccttctagaagatatcaaacttttgctattgaactatcctcaccatatgcaaaataaattgtgtagctgcaactgttctaaattactggagtggaaacatcccacagctgcgctgcattcccaccgccatttgttcaggcataaaatatacaaaaaaaaaaaaagraggaggtaagcgacgctgatttccccacctgtcttctaattagcaagcaggaggtttaaagtaaaccacacggaaacacttttcacctagagcaaaattcatctgtgaacctcgttgccgcagggtactgcaaaggctgactatggaactggggtgagatggttgtaccagacgggaccagcagcagctcctgcacaggacggtctcccagccagtggacgatgaggaactggagggactccacagccacaatgttttttttttat

SEQ ID NO: 6223 - DNA, 600 bp, Chicken  19866894110268_1
gacacttgtcttgtctccagtgctaaaggattaaattattcccatactttgttacagttctaaaatttttgtctggtctgatgtaaattctcattaagcaattctggttcgttcttttatatgttggtatacatttatgtttactctaaaaaaacccaaactattgagattgacagatagagttgtttgacaacatcttcaacataatatacttaagcttacattaccataggatgtaatttttatactattgtatcctccattcttcttaatcttacatgttcggtacagtgcaagatrcaatctatgatgtggatacctgctgcgattatgtgcaagaaaaactcaacagtattttattttttctaactgctgattagaggatgtccaacatattagaaatattcaaatttttaaagcaatttcttgggtaatacagtatttttatgactttatttctgtaaaaawatatatatatatatttatctgaattttactttatctatagcatatgcataatataaaataatcaaataaaaattgaattcgaaatgaaaaatgcatgaccaacattcaagttattggagtatttttccattt

SEQ ID NO: 6224 - DNA, 600 bp, Chicken  19866894110268_2
attgacagatagagttgtttgacaacatcttcaacataatatacttaagcttacattaccataggatgtaatttttatactattgtatcctccattcttcttaatcttacatgttcggtacagtgcaagatrcaatctatgatgtggatacctgctgcgattatgtgcaagaaaaactcaacagtattttattttttctaactgctgattagaggatgtccaacatattagaaatattcaaatttttaaagcaatttcttgggtaatacagtatttttatgactttatttctgtaaaaawatatatatatatatttatctgaattttactttatctatagcatatgcataatataaaataatcaaataaaaattgaattcgaaatgaaaaatgcatgaccaacattcaagttattggagtatttttccatttttccaattcttatttgacaaaatcgaaaggatttcacaatgtatctttatcttgatggaaccagatttttcagtgaagatttgttgatattttctgatatgttttatttagggaagcaattaaaatgaaaaaccatttgttttcattgttagttgttagggaatttgc

SEQ ID NO: 6225 - DNA, 600 bp, Chicken  19866894110276_1
agaaggctgttgatggtaatactgggactccttccccactgtatggtgctgccagctgaattagagctgttagtatggccacagggtttctttaccctactgtctgatttgtaaatatttgcagcaacatcacaggctccttcctggaggatttcagagcagcactaatagtcacagaagaagttgtagctgctttaattgtaaagtgttattttggtcattaaggtgctaattgctgatgttcggttaatagaagctgctgatggttttctgtgctttttcttcctaactctgcacaargtggtctctttggcatttttcactaaatgcaactaygaggttatgatttttgtttcamatcttttttttgttcaagaacagtctgatgacgaygttgacatctgttttgttatgtcttgacccatggaatccacacttctcatggtctgcattttatgtagtgacagcttcttcaaggggtgccagcattgttctcctaaagcttggagccctaaagcagcaagacagagacttagtcatgactgtttggatcatttgccaagtttttggtgatcgtgtgtcagtgttctcccatggtct

SEQ ID NO: 6226 - DNA, 600 bp, Chicken  19866894110276_2
cactgtatggtgctgccagctgaattagagctgttagtatggccacagggtttctttaccctactgtctgatttgtaaatatttgcagcaacatcacaggctccttcctggaggatttcagagcagcactaatagtcacagaagaagttgtagctgctttaattgtaaagtgttattttggtcattaaggtgctaattgctgatgttcggttaatagaagctgctgatggttttctgtgctttttcttcctaactctgcacaargtggtctctttggcatttttcactaaatgcaactaygaggttatgatttttgtttcamatcttttttttgttcaagaacagtctgatgacgaygttgacatctgttttgttatgtcttgacccatggaatccacacttctcatggtctgcattttatgtagtgacagcttcttcaaggggtgccagcattgttctcctaaagcttggagccctaaagcagcaagacagagacttagtcatgactgtttggatcatttgccaagtttttggtgatcgtgtgtcagtgttctcccatggtctggagaggctgctgttaccaaagccatgtaggaggat

SEQ ID NO: 6227 - DNA, 600 bp, Chicken  19866894110276_3
aattagagctgttagtatggccacagggtttctttaccctactgtctgatttgtaaatatttgcagcaacatcacaggctccttcctggaggatttcagagcagcactaatagtcacagaagaagttgtagctgctttaattgtaaagtgttattttggtcattaaggtgctaattgctgatgttcggttaatagaagctgctgatggttttctgtgctttttcttcctaactctgcacaargtggtctctttggcatttttcactaaatgcaactaygaggttatgatttttgtttcamatcttttttttgttcaagaacagtctgatgacgaygttgacatctgttttgttatgtcttgacccatggaatccacacttctcatggtctgcattttatgtagtgacagcttcttcaaggggtgccagcattgttctcctaaagcttggagccctaaagcagcaagacagagacttagtcatgactgtttggatcatttgccaagtttttggtgatcgtgtgtcagtgttctcccatggtctggagaggctgctgttaccaaagccatgtaggaggatataagctgacccttatgtgggg

SEQ ID NO: 6228 - DNA, 600 bp, Chicken  19866894110276_4
accctactgtctgatttgtaaatatttgcagcaacatcacaggctccttcctggaggatttcagagcagcactaatagtcacagaagaagttgtagctgctttaattgtaaagtgttattttggtcattaaggtgctaattgctgatgttcggttaatagaagctgctgatggttttctgtgctttttcttcctaactctgcacaargtggtctctttggcatttttcactaaatgcaactaygaggttatgatttttgtttcamatcttttttttgttcaagaacagtctgatgacgaygttgacatctgttttgttatgtcttgacccatggaatccacacttctcatggtctgcattttatgtagtgacagcttcttcaaggggtgccagcattgttctcctaaagcttggagccctaaagcagcaagacagagacttagtcatgactgtttggatcatttgccaagtttttggtgatcgtgtgtcagtgttctcccatggtctggagaggctgctgttaccaaagccatgtaggaggatataagctgacccttatgtggggaaagacagcaaacttatctgttttttccattcaag

SEQ ID NO: 6229 - DNA, 600 bp, Chicken  19866894110277_1
gtttcagaagagcattttccaggaaacaaagggctgttaacacccaacatttctaacacaataactattcacaaaatcaaaatacatacatccttacttctctgtccccctttagccactgttaggcagccaaagaactacacaggaaaaaagacctcccacatattcaccctttatgctgttgcctgaagaaccacagtctttactgagtatatttctctttgcattcttagaatgggactttttcatgtagagaaatggactttgatggcatcttggatcataatgacatacacaccrattaccacagagaaggcagtatttgacatcctgtttgcagatagcctaacactaaattcccttcacttctcataaagccaagggaatttggcacacaaaaacgcctacagaacacaatcagcggttagctcatctgagatgacatgatacgcctgacactgctgtgtgttgaattggtgtcctgaacagccctcctaccttcaccatcaactgaacagcagattaactgtgtgctcccgtccatcctgtaatctccctccaccactcctgcaatcgaggaagcaaagttgtccttaaaga

SEQ ID NO: 6230 - DNA, 600 bp, Chicken  19866894110277_2
atacgcctgacactgctgtgtgttgaattggtgtcctgaacagccctcctaccttcaccatcaactgaacagcagattaactgtgtgctcccgtccatcctgtaatctccctccaccactcctgcaatcgaggaagcaaagttgtccttaaagatgacctcccccagttcggtcactgcgcgcatcaacctggagcagcacagagagaagggacgtggcatgaacagagcagccagctccaaaacacacgacgtggtggtgctcaccactcgtggagctgcagttctgctgagcacaggrccacagatggaaggtacattatcaggaagcgacctctcccacgggctcagccaaaaggaactgctsttcagagatgcctccctaagttacaaacagcaggaaggaagaaaaggcractgcaaggctacgcagggaargctgtgcacatgtggatgcagcgatgatggaagcaaactggacgtctccttaatgcagtacatacagctttttggctgagctgccatcctggactgatgaacaatctttgattatctttgtagggaggaggacgcagcagtgctggttccaagagctgggggc

SEQ ID NO: 6231 - DNA, 600 bp, Chicken  19866894110277_3
gaacagcagattaactgtgtgctcccgtccatcctgtaatctccctccaccactcctgcaatcgaggaagcaaagttgtccttaaagatgacctcccccagttcggtcactgcgcgcatcaacctggagcagcacagagagaagggacgtggcatgaacagagcagccagctccaaaacacacgacgtggtggtgctcaccactcgtggagctgcagttctgctgagcacaggrccacagatggaaggtacattatcaggaagcgacctctcccacgggctcagccaaaaggaactgctsttcagagatgcctccctaagttacaaacagcaggaaggaagaaaaggcractgcaaggctacgcagggaargctgtgcacatgtggatgcagcgatgatggaagcaaactggacgtctccttaatgcagtacatacagctttttggctgagctgccatcctggactgatgaacaatctttgattatctttgtagggaggaggacgcagcagtgctggttccaagagctgggggctgcttcagggcagcaggtggggtagggcctgcagctgaaagagcaaaaggcccacagcgaggaggg

SEQ ID NO: 6232 - DNA, 600 bp, Chicken  19866894110277_4
ccactcctgcaatcgaggaagcaaagttgtccttaaagatgacctcccccagttcggtcactgcgcgcatcaacctggagcagcacagagagaagggacgtggcatgaacagagcagccagctccaaaacacacgacgtggtggtgctcaccactcgtggagctgcagttctgctgagcacaggrccacagatggaaggtacattatcaggaagcgacctctcccacgggctcagccaaaaggaactgctsttcagagatgcctccctaagttacaaacagcaggaaggaagaaaaggcractgcaaggctacgcagggaargctgtgcacatgtggatgcagcgatgatggaagcaaactggacgtctccttaatgcagtacatacagctttttggctgagctgccatcctggactgatgaacaatctttgattatctttgtagggaggaggacgcagcagtgctggttccaagagctgggggctgcttcagggcagcaggtggggtagggcctgcagctgaaagagcaaaaggcccacagcgaggaggggtgctcactttaaccatgttatacacctaatccaacagaagttacaaca

SEQ ID NO: 6233 - DNA, 600 bp, Chicken  19866894110277_5
aaagttgtccttaaagatgacctcccccagttcggtcactgcgcgcatcaacctggagcagcacagagagaagggacgtggcatgaacagagcagccagctccaaaacacacgacgtggtggtgctcaccactcgtggagctgcagttctgctgagcacaggrccacagatggaaggtacattatcaggaagcgacctctcccacgggctcagccaaaaggaactgctsttcagagatgcctccctaagttacaaacagcaggaaggaagaaaaggcractgcaaggctacgcagggaargctgtgcacatgtggatgcagcgatgatggaagcaaactggacgtctccttaatgcagtacatacagctttttggctgagctgccatcctggactgatgaacaatctttgattatctttgtagggaggaggacgcagcagtgctggttccaagagctgggggctgcttcagggcagcaggtggggtagggcctgcagctgaaagagcaaaaggcccacagcgaggaggggtgctcactttaaccatgttatacacctaatccaacagaagttacaacatatctgggctctaggctgccag

SEQ ID NO: 6234 - DNA, 600 bp, Chicken  19866894110280_1
acatgctgataaacctctcaaccacttgacaagttccagcctcctatcagttttatttaactcctcttttggaagatgaatcttaaattaacctcttgaataacattcaaaattgggttttgaaatgtgaagctttatagactgtgtataatttccctccaaagattaccagagtcagagaaaccatttccactgaggctgtaattgaatttagaaatgcattcacctaatttgataagcaaggagtgcattggtagctcatcagtctaaactgtattcaaggtaagaaagttgaggtcyctccaaaatcatgatgtgacaaccgtgttttcatgactcaggaacaagaataataagtttcactgagcaatttattcattggatatcgctcctttccttcagttgtgatttcttggtgtgcaaataaatgggaattcccttcagcatgttccattcctgaagagtcctcacaaattgtttctgcaattgatttttttggtccagcctcattcggctcaactttgttgaagattctagaattcctgtgcaaaccacaccatttatttttattctccgatcgtggtgagaaggattttcaaa

SEQ ID NO: 6235 - DNA, 599 bp, Chicken  19866894110281_1
  misc_feature (1)..(163): n is any nucleotide
nnnnnnnnnnnnnnnnnnnnnnnnnnnnnnnnnnnnnnnnnnnnnnnnnnnnnnnnnnnnnnnnnnnnnnnnnnnnnnnnnnnnnnnnnnnnnnnnnnnnnnnnnnnnnnnnnnnnnnnnnnnnnnnnnnnnnnnnnnnnnnnnnnnnnnnnnnnnnnnnnnnagaagggaatttggctaatgtaattttttttttttatttctttgtgaagtacagagaaacaatggaaaatgctggtttcaacagagttctgccttcttttgaactcttagcttcatttaaatgttgcttaactgctytctcttgccttttcctgcatgtgaagagagcttaatcctgtctgcctttacctcagaggggctgtgaggacagagttttgaaaaaagaagttgccatctatgcaaagaatccacgagtggcygcayggtaaagaaaagaaaccagyccaacaaaccagacctaccattgggaaagtccagcaccagtcaacagttttctggaagtggagtgtcctgttacataaacatccttgaagctttgcagaaggggtgacattcacatcacatatgtggggcctgactaattgggttttgtgtgt

SEQ ID NO: 6236 - DNA, 599 bp, Chicken  19866894110281_2
  misc_feature (1)..(41): n is any nucleotide
nnnnnnnnnnnnnnnnnnnnnnnnnnnnnnnnnnnnnnnnnagaagggaatttggctaatgtaattttttttttttatttctttgtgaagtacagagaaacaatggaaaatgctggtttcaacagagttctgccttcttttgaactcttagcttcatttaaatgttgcttaactgctytctcttgccttttcctgcatgtgaagagagcttaatcctgtctgcctttacctcagaggggctgtgaggacagagttttgaaaaaagaagttgccatctatgcaaagaatccacgagtggcygcayggtaaagaaaagaaaccagyccaacaaaccagacctaccattgggaaagtccagcaccagtcaacagttttctggaagtggagtgtcctgttacataaacatccttgaagctttgcagaaggggtgacattcacatcacatatgtggggcctgactaattgggttttgtgtgtgaagaatggggatggcaagggataaggaagtgaaatccccaaggtgcaagcagggcctccttcttcccatggcctatactgttgcttacgtgttgtagggggtctcggagccttctgtgcca

SEQ ID NO: 6237 - DNA, 599 bp, Chicken  19866894110281_3
  misc_feature (1)..(37): n is any nucleotide
nnnnnnnnnnnnnnnnnnnnnnnnnnnnnnnnnnnnnagaagggaatttggctaatgtaattttttttttttatttctttgtgaagtacagagaaacaatggaaaatgctggtttcaacagagttctgccttcttttgaactcttagcttcatttaaatgttgcttaactgctytctcttgccttttcctgcatgtgaagagagcttaatcctgtctgcctttacctcagaggggctgtgaggacagagttttgaaaaaagaagttgccatctatgcaaagaatccacgagtggcygcayggtaaagaaaagaaaccagyccaacaaaccagacctaccattgggaaagtccagcaccagtcaacagttttctggaagtggagtgtcctgttacataaacatccttgaagctttgcagaaggggtgacattcacatcacatatgtggggcctgactaattgggttttgtgtgtgaagaatggggatggcaagggataaggaagtgaaatccccaaggtgcaagcagggcctccttcttcccatggcctatactgttgcttacgtgttgtagggggtctcggagccttctgtgccactga

SEQ ID NO: 6238 - DNA, 599 bp, Chicken  19866894110281_4
  misc_feature (1)..(17): n is any nucleotide
nnnnnnnnnnnnnnnnnagaagggaatttggctaatgtaattttttttttttatttctttgtgaagtacagagaaacaatggaaaatgctggtttcaacagagttctgccttcttttgaactcttagcttcatttaaatgttgcttaactgctytctcttgccttttcctgcatgtgaagagagcttaatcctgtctgcctttacctcagaggggctgtgaggacagagttttgaaaaaagaagttgccatctatgcaaagaatccacgagtggcygcayggtaaagaaaagaaaccagyccaacaaaccagacctaccattgggaaagtccagcaccagtcaacagttttctggaagtggagtgtcctgttacataaacatccttgaagctttgcagaaggggtgacattcacatcacatatgtggggcctgactaattgggttttgtgtgtgaagaatggggatggcaagggataaggaagtgaaatccccaaggtgcaagcagggcctccttcttcccatggcctatactgttgcttacgtgttgtagggggtctcggagccttctgtgccactgagcccacgactgggaactcag

SEQ ID NO: 6239 - DNA, 600 bp, Chicken  19866894110281_5
tccgtgttaactctgtggtgctggtcagttcaagcacaagtagcatgcagaatgtgcagctctgcacacagggagaagggacgtggcaacctgagctccgagttgccctctgcaggaggctgcatctttcctctgatcttggcaggaaccaaagtcccatcgttgttgctttgacgcctgaagtgtgacagtgctggcagccctccatccaaaattcatccctgacccagagcctggttctccacagccctgctccttgtgctgtcagggcaggagctcagtctccgctttgctctgtaygcactttgtsaggctttgtcmccagtcctgggcaaagaaaacaaagtttcctccctcatcccttcagagaatactgtttgcatagcagcacgtaattaacagaacccactaaaaaacccaaatgcatattttccatattgtatgacaagcacaggataatggcttgctgctttgtcacgctgcagagcagctcccagggcagcagctcagatgtagccattgaggtggcagtgaaagggggcaaatccagaggtgaaggagccactgctgagctggggaggaaagagtaaaatccgagtt

SEQ ID NO: 6240 - DNA, 600 bp, Chicken  19866894110281_6
ctctgtggtgctggtcagttcaagcacaagtagcatgcagaatgtgcagctctgcacacagggagaagggacgtggcaacctgagctccgagttgccctctgcaggaggctgcatctttcctctgatcttggcaggaaccaaagtcccatcgttgttgctttgacgcctgaagtgtgacagtgctggcagccctccatccaaaattcatccctgacccagagcctggttctccacagccctgctccttgtgctgtcagggcaggagctcagtctccgctttgctctgtaygcactttgtsaggctttgtcmccagtcctgggcaaagaaaacaaagtttcctccctcatcccttcagagaatactgtttgcatagcagcacgtaattaacagaacccactaaaaaacccaaatgcatattttccatattgtatgacaagcacaggataatggcttgctgctttgtcacgctgcagagcagctcccagggcagcagctcagatgtagccattgaggtggcagtgaaagggggcaaatccagaggtgaaggagccactgctgagctggggaggaaagagtaaaatccgagttcccaaatctt

SEQ ID NO: 6241 - DNA, 600 bp, Chicken  19866894110281_7
tggtcagttcaagcacaagtagcatgcagaatgtgcagctctgcacacagggagaagggacgtggcaacctgagctccgagttgccctctgcaggaggctgcatctttcctctgatcttggcaggaaccaaagtcccatcgttgttgctttgacgcctgaagtgtgacagtgctggcagccctccatccaaaattcatccctgacccagagcctggttctccacagccctgctccttgtgctgtcagggcaggagctcagtctccgctttgctctgtaygcactttgtsaggctttgtcmccagtcctgggcaaagaaaacaaagtttcctccctcatcccttcagagaatactgtttgcatagcagcacgtaattaacagaacccactaaaaaacccaaatgcatattttccatattgtatgacaagcacaggataatggcttgctgctttgtcacgctgcagagcagctcccagggcagcagctcagatgtagccattgaggtggcagtgaaagggggcaaatccagaggtgaaggagccactgctgagctggggaggaaagagtaaaatccgagttcccaaatctttttcttttcac

SEQ ID NO: 6242 - DNA, 600 bp, Chicken  19866894110284_1
ttcaacagacactgttctgtcaaatgatttgcactgtagaagaggaagaagaaagttatctgcagctgcaggctgacagtctgcatagacaggcctagataccccggcatgtttttgcggcagtatgtactgactgaaggaaatgagaaaaactgataaaagaacataatatgattttatttgctattttaaatccagtaatttaagcctgtgtacactttggtacatttggttttataggaatttgcagtatgagcattcattatgttccatgatgggatcccagccgagccagagcamtgaaataggacttggtattttccttattgtaaggacaccaagagacaccagagagctttttatatttaatgacattttactacaacatagtgtatacagtgtaacttwttgattaaagaaaaaatgkttttgctatgtagatgcaggttatgaacacttcttcactctactatttcggccctataatctgtaatcagacaagtagctttcaaacttsctctcatttataaagtgtcaagggattcctaggtcatagtttggctcagggctgctctcctgycaccttaggaaatttttgtc

SEQ ID NO: 6243 - DNA, 600 bp, Chicken  19866894110284_2
atgtttttgcggcagtatgtactgactgaaggaaatgagaaaaactgataaaagaacataatatgattttatttgctattttaaatccagtaatttaagcctgtgtacactttggtacatttggttttataggaatttgcagtatgagcattcattatgttccatgatgggatcccagccgagccagagcamtgaaataggacttggtattttccttattgtaaggacaccaagagacaccagagagctttttatatttaatgacattttactacaacatagtgtatacagtgtaacttwttgattaaagaaaaaatgkttttgctatgtagatgcaggttatgaacacttcttcactctactatttcggccctataatctgtaatcagacaagtagctttcaaacttsctctcatttataaagtgtcaagggattcctaggtcatagtttggctcagggctgctctcctgycaccttaggaaatttttgtccctcatgggcagtgcctgtttgttgtcgaatattgcccactgttccccagaaaagatgcagtctccttccaccacctagtagctgtacctgacccagtgtgtagcagc

SEQ ID NO: 6244 - DNA, 600 bp, Chicken  19866894110284_3
tactgactgaaggaaatgagaaaaactgataaaagaacataatatgattttatttgctattttaaatccagtaatttaagcctgtgtacactttggtacatttggttttataggaatttgcagtatgagcattcattatgttccatgatgggatcccagccgagccagagcamtgaaataggacttggtattttccttattgtaaggacaccaagagacaccagagagctttttatatttaatgacattttactacaacatagtgtatacagtgtaacttwttgattaaagaaaaaatgkttttgctatgtagatgcaggttatgaacacttcttcactctactatttcggccctataatctgtaatcagacaagtagctttcaaacttsctctcatttataaagtgtcaagggattcctaggtcatagtttggctcagggctgctctcctgycaccttaggaaatttttgtccctcatgggcagtgcctgtttgttgtcgaatattgcccactgttccccagaaaagatgcagtctccttccaccacctagtagctgtacctgacccagtgtgtagcagcaagaggatagcagaggcag

SEQ ID NO: 6245 - DNA, 600 bp, Chicken  19866894110284_4
ctttggtacatttggttttataggaatttgcagtatgagcattcattatgttccatgatgggatcccagccgagccagagcamtgaaataggacttggtattttccttattgtaaggacaccaagagacaccagagagctttttatatttaatgacattttactacaacatagtgtatacagtgtaacttwttgattaaagaaaaaatgkttttgctatgtagatgcaggttatgaacacttcttcactctactatttcggccctataatctgtaatcagacaagtagctttcaaacttsctctcatttataaagtgtcaagggattcctaggtcatagtttggctcagggctgctctcctgycaccttaggaaatttttgtccctcatgggcagtgcctgtttgttgtcgaatattgcccactgttccccagaaaagatgcagtctccttccaccacctagtagctgtacctgacccagtgtgtagcagcaagaggatagcagaggcagcccttatccttgcttttagtctacaacttgaaggtgaatgcaagtccatcgaatgattgattatttagattacaagaggaagcaagccat

SEQ ID NO: 6246 - DNA, 541 bp, Chicken  19866894110284_5
tcccagccgagccagagcamtgaaataggacttggtattttccttattgtaaggacaccaagagacaccagagagctttttatatttaatgacattttactacaacatagtgtatacagtgtaacttwttgattaaagaaaaaatgkttttgctatgtagatgcaggttatgaacacttcttcactctactatttcggccctataatctgtaatcagacaagtagctttcaaacttsctctcatttataaagtgtcaagggattcctaggtcatagtttggctcagggctgctctcctgycaccttaggaaatttttgtccctcatgggcagtgcctgtttgttgtcgaatattgcccactgttccccagaaaagatgcagtctccttccaccacctagtagctgtacctgacccagtgtgtagcagcaagaggatagcagaggcagcccttatccttgcttttagtctacaacttgaaggtgaatgcaagtccatcgaatgattgattatttagattacaagaggaagcaagccatttga

SEQ ID NO: 6247 - DNA, 600 bp, Chicken  19866894110299_1
gagaggaaaaacagtctaggatgtttcgtggctgttactttttgatacagacgtgcaagcacagacaaccctgctgtaacagagggacagctgggtcataccacacagtgcttcaccctgaattcctaatttcacagcagccagtgctcatcttaggacttaagagtgctttgccatgcacacgtgggatgaagtgagagagcagtggtaggacctggtgctctggtctgtctcgacatcacgaggcagtggttgggcacagccagatgtgtacgaggcagggggctcagctcctgctcrgctggctctgctgtttgaattggcttgctctcaggaaaggagtttccagctcacaagttaatctatggctgtggtgtggagaccagaaataaaatacctgtgaagagatggatgggaatcctgagctgtgaatcagagaaggacactgagtgtcttagtgactcaagttctcagtttcatgaacagggctgccaacagcataattttttgccgtgtacaagcagggctttagttacgcttccatctgttttttgcaactttggtctaattggctaacttatagtggcttcttatagcagg

SEQ ID NO: 6248 - DNA, 600 bp, Chicken  19866894110299_2
attggcttgctctcaggaaaggagtttccagctcacaagttaatctatggctgtggtgtggagaccagaaataaaatacctgtgaagagatggatgggaatcctgagctgtgaatcagagaaggacactgagtgtcttagtgactcaagttctcagtttcatgaacagggctgccaacagcataattttttgccgtgtacaagcagggctttagttacgcttccatctgttttttgcaactttggtctaattggctaacttatagtggcttcttatagcagggagtcaaaattcctcccstccatcttactgctgttgtaatctaggattatttttttcaattccttgttattataactaattattgttacaactgattaattgttattaataattattattttctttctttctttaaatttaaaagactgtctctgaccaaggtatttcataatgtagcagctagcatgggcaaggatttactttaattaattatctttgctatagctggaaaacaggtgtaaaatatttgcttttcaaaacattgtgagttattgtcccttaacatttgtaaacccatttaaataagccatgcaatac

SEQ ID NO: 6249 - DNA, 600 bp, Chicken  19866894110299_3
gaatttttactcattttgtgggggaaaaaacacactcctaggggttcactgcagcccagatgcagggtatggtatgcagcagctaatgtgcagcagtggggagtgctggggattgcttactatgtgatgcttggcaaggcacaacagtcattgcttctctttgttgtgtcactccagccaataaaatagttgctgataattaataatcttaatccatgattaaaattatgggaagttactgggaaataatagtggtcagacttttgccaaagtgatagtctcttgggacaaattgggcayctggtatgtcaaatagatttctgtccttataaagrgaaggtggcaagctctactaatattacatcggagaacaaaatggatcagattgcattattactccttcctttagcgtcgtaagggctgtccagagtatggcatatcatgctcctgctggaaaggtcttgttctgcctttgcttgttgcatggttttccttgtcctgaacagttactttagattaaattttccctgaaaaattggcacctaattcacaacagaaagtggtggattgaactgaagcatttaataccagtgaaatggt

SEQ ID NO: 6250 - DNA, 600 bp, Chicken  19866894110299_4
tcctaggggttcactgcagcccagatgcagggtatggtatgcagcagctaatgtgcagcagtggggagtgctggggattgcttactatgtgatgcttggcaaggcacaacagtcattgcttctctttgttgtgtcactccagccaataaaatagttgctgataattaataatcttaatccatgattaaaattatgggaagttactgggaaataatagtggtcagacttttgccaaagtgatagtctcttgggacaaattgggcayctggtatgtcaaatagatttctgtccttataaagrgaaggtggcaagctctactaatattacatcggagaacaaaatggatcagattgcattattactccttcctttagcgtcgtaagggctgtccagagtatggcatatcatgctcctgctggaaaggtcttgttctgcctttgcttgttgcatggttttccttgtcctgaacagttactttagattaaattttccctgaaaaattggcacctaattcacaacagaaagtggtggattgaactgaagcatttaataccagtgaaatggttaataacccttattacaagcaatgttgtagataag

SEQ ID NO: 6251 - DNA, 600 bp, Chicken  19866894110299_5
gaatcattcatgaaacttgtgctaaacagaattcagttagagaaaaaagaatacctcaccccactcttagtaagtcttaaactaagatttacttagaaatatctgttaagtaaggagaactacctgtaaaatgatgtcaacaaatttaagatggtaatttagtagtgtgatcataatggaaaccttttcatctgctgcatctgcctatgtcttcttttccacggccttatggtagtctgtgtttgagaaataaggtttctctgaaactatagatagcctgaaaagaaaggaactattatktaatttacaatttaattgaatgctgaaaaaagcatttagagaagcgtggtagtagagaagcgtggctaaggaagagtgataagcttgcactgatgccagcactaacaaggattctgctttcagcagctgaggtggtgtggttggaattagctcagttatatctgtactgttccacacagagcacagagcagataaaactaggaaaaccttgcagtgtctgtatttgaaggctaggtctcttagcagtaaagtatttgagactttattgcaagtgtgcttatggagaatttttgcacatcc

SEQ ID NO: 6252 - DNA, 600 bp, Chicken  19866894110300_1
atgaagatagcaatttaatatgcctcatttccttcactgccaagaaaaacagaggaaaataagataatggaatttgtataaagatacccaagcctgatcttgcaagtacacaattggcatcttttcacttaattggaagtactaacatggggaaagtgacatacctgaagaaattgaaggaatagaggtttattgtccagcacgttaatgccattagagaaatggctttatttgacccttcagtgggtcagatgtaagttttttaaattatttccactggtattcttactttacttaagratttcatctttagaatattttttcccaagataaatagcaacataacctccttagacattcatcacacaatacagaagacaattctgaagaagaaagcaaagtaaccctagactgtctgaaatggaaaaatatgaaataaagttaaaaggtacattaaattagaattcaaatccaacactgagtatttccatttaagagggatgcagctggccttggctttacataagagcatgagaatgtataagttccacaacataacattcccaagctttaaaaaagcagaaaagattgccttttgct

SEQ ID NO: 6253 - DNA, 599 bp, Chicken  19866894110301_1
  misc_feature (1)..(10): n is any nucleotide
nnnnnnnnnnttagtcactggagcaatccataaaggttactgttggctttctgtaaatcacattctccttagaggtgcagctctagagctggtagagtctctctttagagactctggtagagtctaccagcccgggggagcctggggaatgtgcagatgcagaataggggcccttctctctctctctagttcttccagtttgcgtaggcagtaaaatagatgtctgggcaagcaagatgcaatacctctgtttttactgtatattgctgttacaggacagtcctttattacaggacacaygggtgaaagtaagtaggatgaacaaagcaacagtgacactaagggtagcctgtgtcctgcaaaaccatttgtcgagtaccatggaaaaattaagggactggatttcagagtaccagctttgtactcacacttmtgatagaaaatatgtctgtcycttacctacaagtgtatcatgggaargaaataaagcactgctcccatatctgacataatacttacatggataagtaatttcatgcaagtatattgtagtcccattgactagccttttgcaaagtcacccggatgttgctaatgtc

SEQ ID NO: 6254 - DNA, 600 bp, Chicken  19866894110301_2
gggggagcctggggaatgtgcagatgcagaataggggcccttctctctctctctagttcttccagtttgcgtaggcagtaaaatagatgtctgggcaagcaagatgcaatacctctgtttttactgtatattgctgttacaggacagtcctttattacaggacacaygggtgaaagtaagtaggatgaacaaagcaacagtgacactaagggtagcctgtgtcctgcaaaaccatttgtcgagtaccatggaaaaattaagggactggatttcagagtaccagctttgtactcacacttmtgatagaaaatatgtctgtcycttacctacaagtgtatcatgggaargaaataaagcactgctcccatatctgacataatacttacatggataagtaatttcatgcaagtatattgtagtcccattgactagccttttgcaaagtcacccggatgttgctaatgtccacctgccaaagttgcatcctattatggtagtgggtatgatattgcgtatactacacattctgtaccttttttatgtagaatttgatgtctgcactgtagatatgttttctcacagcaggatttttgttttgcc

SEQ ID NO: 6255 - DNA, 600 bp, Chicken  19866894110301_3
agatgcagaataggggcccttctctctctctctagttcttccagtttgcgtaggcagtaaaatagatgtctgggcaagcaagatgcaatacctctgtttttactgtatattgctgttacaggacagtcctttattacaggacacaygggtgaaagtaagtaggatgaacaaagcaacagtgacactaagggtagcctgtgtcctgcaaaaccatttgtcgagtaccatggaaaaattaagggactggatttcagagtaccagctttgtactcacacttmtgatagaaaatatgtctgtcycttacctacaagtgtatcatgggaargaaataaagcactgctcccatatctgacataatacttacatggataagtaatttcatgcaagtatattgtagtcccattgactagccttttgcaaagtcacccggatgttgctaatgtccacctgccaaagttgcatcctattatggtagtgggtatgatattgcgtatactacacattctgtaccttttttatgtagaatttgatgtctgcactgtagatatgttttctcacagcaggatttttgttttgccagtaaggcaggaaatggttcc

SEQ ID NO: 6256 - DNA, 600 bp, Chicken  19866894110301_4
tctctctagttcttccagtttgcgtaggcagtaaaatagatgtctgggcaagcaagatgcaatacctctgtttttactgtatattgctgttacaggacagtcctttattacaggacacaygggtgaaagtaagtaggatgaacaaagcaacagtgacactaagggtagcctgtgtcctgcaaaaccatttgtcgagtaccatggaaaaattaagggactggatttcagagtaccagctttgtactcacacttmtgatagaaaatatgtctgtcycttacctacaagtgtatcatgggaargaaataaagcactgctcccatatctgacataatacttacatggataagtaatttcatgcaagtatattgtagtcccattgactagccttttgcaaagtcacccggatgttgctaatgtccacctgccaaagttgcatcctattatggtagtgggtatgatattgcgtatactacacattctgtaccttttttatgtagaatttgatgtctgcactgtagatatgttttctcacagcaggatttttgttttgccagtaaggcaggaaatggttccggttctccagtgagaagtatggcaaa

SEQ ID NO: 6257 - DNA, 600 bp, Chicken  19866894110301_5
agatagtaaaagtgctccatgtatcatctacttctaatttcaggtggtggaagaataagaaacaatatgaaacctccacagagtatctggcttttcaagaacctgctttccagttgctactgttatggtcaacttcacaattcccctcttccttctgtcgcaaagaagataagttatgtgatgagactgcacagctgtggattttggaggccggaatctttgttggacacggatagattcactctgtcatttcatggttggcttaggaagaagcatcaggactctcgagcgctgtggaarcatgaggctgtgcagaagtatctggaaactctcagcaaggaatatcagcaggttgatcatctgctaaatgctgattcaaaaaatgaatttgagcaaagaaccctgaggagaagacgtgctgacctatccccagttgctactgcatttcaagaaatcagagaggctgaaagtgagctccaggaattagaaactatgtgtaraggtaaggagagcacatctacttaatcattttgaaagagtggctttgcttgtgataaacctcattgctcagcctttatgggaagcttttaagtgaattaa

SEQ ID NO: 6258 - DNA, 600 bp, Chicken  19866894110301_6
attttggaggccggaatctttgttggacacggatagattcactctgtcatttcatggttggcttaggaagaagcatcaggactctcgagcgctgtggaarcatgaggctgtgcagaagtatctggaaactctcagcaaggaatatcagcaggttgatcatctgctaaatgctgattcaaaaaatgaatttgagcaaagaaccctgaggagaagacgtgctgacctatccccagttgctactgcatttcaagaaatcagagaggctgaaagtgagctccaggaattagaaactatgtgtaraggtaaggagagcacatctacttaatcattttgaaagagtggctttgcttgtgataaacctcattgctcagcctttatgggaagcttttaagtgaattaagccagctctggaatgctctctggtcttgtctgttcctgygagcttgtgtccttttaaggctttctagatccagacatttccttttatttttatgctctctctcttaatacaggtcttaatgcagccaacttaggaaaataggggctgtttggactctgaggcctatgcatctagcagaaatagtttggaaatgtttggtt

SEQ ID NO: 6259 - DNA, 571 bp, Chicken  19866894110301_7
gaatatcagcaggttgatcatctgctaaatgctgattcaaaaaatgaatttgagcaaagaaccctgaggagaagacgtgctgacctatccccagttgctactgcatttcaagaaatcagagaggctgaaagtgagctccaggaattagaaactatgtgtaraggtaaggagagcacatctacttaatcattttgaaagagtggctttgcttgtgataaacctcattgctcagcctttatgggaagcttttaagtgaattaagccagctctggaatgctctctggtcttgtctgttcctgygagcttgtgtccttttaaggctttctagatccagacatttccttttatttttatgctctctctcttaatacaggtcttaatgcagccaacttaggaaaataggggctgtttggactctgaggcctatgcatctagcagaaatagtttggaaatgtttggtttaggttcttttttggtagagccaagagcagtacaaactgaaggataaacatcagcaagtcttgcctgttgaacagacgcagactacagccatgccacttaaaatggggat

SEQ ID NO: 6260 - DNA, 600 bp, Chicken  19866894110306_1
acccatcttcggtgtacagctttgcacctttggaaaggctctactcggaactgcagaaccaaggatggaagatagcctgcatctccttctgctcctggcttgagtttgggagaaacgtgcaaatgagataaaaatacattcagttttgttttctcctccctgaaaataaaacaacgaattctggtggctaaaccagaacataaaatatgctgggcaaaatgtgtagggtggaagggaacagctcagatgggcatttctaacgccagcattttgcaggagcctgtaatataattgctccarctaagcttgcctcggaygcagcagagatttccagcctttttcctctcttccagccaacaaaggattttggtgactgaggtcacagcaatctcccctttaaaatgaagaaaaggatttgtctcagcttcccaacatctcactttcattctacatgaaaagtccccgtttttctctctctcggtgttgccctcagctcatttccccatgactgcagcacagctctctccagcccgccagcgccagatgactcaagccggcatctatgagtcacaaacacaaaggatgcagaaatgtcaatta

SEQ ID NO: 6261 - DNA, 600 bp, Chicken  19866894110306_2
agctttgcacctttggaaaggctctactcggaactgcagaaccaaggatggaagatagcctgcatctccttctgctcctggcttgagtttgggagaaacgtgcaaatgagataaaaatacattcagttttgttttctcctccctgaaaataaaacaacgaattctggtggctaaaccagaacataaaatatgctgggcaaaatgtgtagggtggaagggaacagctcagatgggcatttctaacgccagcattttgcaggagcctgtaatataattgctccarctaagcttgcctcggaygcagcagagatttccagcctttttcctctcttccagccaacaaaggattttggtgactgaggtcacagcaatctcccctttaaaatgaagaaaaggatttgtctcagcttcccaacatctcactttcattctacatgaaaagtccccgtttttctctctctcggtgttgccctcagctcatttccccatgactgcagcacagctctctccagcccgccagcgccagatgactcaagccggcatctatgagtcacaaacacaaaggatgcagaaatgtcaattaagttacacagccacttc

SEQ ID NO: 6262 - DNA, 600 bp, Chicken  19866894110309_1
ctgttgatagggcaaataagcaactgtttcaacacaggtatttggggtagttgctcgctgattttgtgcctaactttctgtgaaaattaaaacaatgataataacttcccttaagatctgataacttctctctttggtgaagaactgctgaagaacccagctatgctgtgctacatgactctgacacatcatttggaatggggtttggttttgattttgtagcgactgtgggcactgcaggtctgccatgggcaggcacctttccagtgacacctcatgtggtaagcctgctaggtcccmcctctcatgggtaaataccaacctcwggttcatttcaataaattctttggctgcagctaacayctgctttcttgattgtcaaagattttttaacagtctccctcttgagtacagggcgtttctttctgctgcctcttactttcacagtttgctcttatctcttcttcattttgtcttcttctcttctgactcttagtatcatggttgcgcagacttcctattaacagctgtcatattctttctcctctcccctcctactttcttttgtaggtgaaattctcattgacaaaattatccttt

SEQ ID NO: 6263 - DNA, 600 bp, Chicken  19866894110309_2
tttcaacacaggtatttggggtagttgctcgctgattttgtgcctaactttctgtgaaaattaaaacaatgataataacttcccttaagatctgataacttctctctttggtgaagaactgctgaagaacccagctatgctgtgctacatgactctgacacatcatttggaatggggtttggttttgattttgtagcgactgtgggcactgcaggtctgccatgggcaggcacctttccagtgacacctcatgtggtaagcctgctaggtcccmcctctcatgggtaaataccaacctcwggttcatttcaataaattctttggctgcagctaacayctgctttcttgattgtcaaagattttttaacagtctccctcttgagtacagggcgtttctttctgctgcctcttactttcacagtttgctcttatctcttcttcattttgtcttcttctcttctgactcttagtatcatggttgcgcagacttcctattaacagctgtcatattctttctcctctcccctcctactttcttttgtaggtgaaattctcattgacaaaattatcctttttagtccgtgcttgcaaggatatgct

SEQ ID NO: 6264 - DNA, 600 bp, Chicken  19866894110309_3
ttgtgcctaactttctgtgaaaattaaaacaatgataataacttcccttaagatctgataacttctctctttggtgaagaactgctgaagaacccagctatgctgtgctacatgactctgacacatcatttggaatggggtttggttttgattttgtagcgactgtgggcactgcaggtctgccatgggcaggcacctttccagtgacacctcatgtggtaagcctgctaggtcccmcctctcatgggtaaataccaacctcwggttcatttcaataaattctttggctgcagctaacayctgctttcttgattgtcaaagattttttaacagtctccctcttgagtacagggcgtttctttctgctgcctcttactttcacagtttgctcttatctcttcttcattttgtcttcttctcttctgactcttagtatcatggttgcgcagacttcctattaacagctgtcatattctttctcctctcccctcctactttcttttgtaggtgaaattctcattgacaaaattatcctttttagtccgtgcttgcaaggatatgctcttgtacaattaagaaatatacagtcagaagagtggt

SEQ ID NO: 6265 - DNA, 599 bp, Chicken  19866894110314_1
  misc_feature (1)..(68): n is any nucleotide
nnnnnnnnnnnnnnnnnnnnnnnnnnnnnnnnnnnnnnnnnnnnnnnnnnnnnnnnnnnnnnnnnnnncacatacagcttccaagggtcagggcaatgtgggtttgaaagcatgcatacaatcataagggttggaaaagacctctaaaatcatctcgtccaaccatcagtccaaccccaccgttcccactggccacatccctcagtgctgcatcttcacatgtcttgaacacctccagggtggtcctccactactcccctgggcagcctgtgccagtgcctcacctttccttccgagaasaaatgtttcccaatagccaacccraacctcctctggcacaacttcaggccattacctcaccgcgtgcatgaaagggtgacgtgcaaacaattagcagatagagggaatcagaggacgctacagaggaaacatagctccattaatatacacatcagctaattcagttcgggtagacaagtgtcctatcccgagtgacgtggaagctggtaacttcgaaggaagggcaaggaattaatgggcaaagcagctataaattttgcagtggtttctatgggtcaggtctgatgcagaaagacaga

SEQ ID NO: 6266 - DNA, 599 bp, Chicken  19866894110314_2
  misc_feature (1)..(44): n is any nucleotide
nnnnnnnnnnnnnnnnnnnnnnnnnnnnnnnnnnnnnnnnnnnncacatacagcttccaagggtcagggcaatgtgggtttgaaagcatgcatacaatcataagggttggaaaagacctctaaaatcatctcgtccaaccatcagtccaaccccaccgttcccactggccacatccctcagtgctgcatcttcacatgtcttgaacacctccagggtggtcctccactactcccctgggcagcctgtgccagtgcctcacctttccttccgagaasaaatgtttcccaatagccaacccraacctcctctggcacaacttcaggccattacctcaccgcgtgcatgaaagggtgacgtgcaaacaattagcagatagagggaatcagaggacgctacagaggaaacatagctccattaatatacacatcagctaattcagttcgggtagacaagtgtcctatcccgagtgacgtggaagctggtaacttcgaaggaagggcaaggaattaatgggcaaagcagctataaattttgcagtggtttctatgggtcaggtctgatgcagaaagacagagcacagggtgagaaagcatgcatc

SEQ ID NO: 6267 - DNA, 455 bp, Chicken  19866894110314_3
cagctaattcagttcgggtagacaagtgtcctatcccgagtgacgtggaagctggtaacttcgaaggaagggcaaggaattaatgggcaaagcagctataaattttgcagtggtttctatgggtcaggtctgatgcagaaagacagagcacagggtgagaaagcatgcatcatcactctgattgtgacaaacaggattacagtctctgagctcaccaaacaaacatcctctggactaattacccccacaaacaactgcacgtttgcctgcagagcacatgttgaacctaaaagtgctagkaaaccaacacagacttccctactttcattgcracgctgcaaacttacatatatccatatataacccttttccccccgtgaaaatgaataaacagaagggtttgaaagctccagacactgctgcagggaatggaactcattgaacagctttgtgtt

SEQ ID NO: 6268 - DNA, 423 bp, Chicken  19866894110314_4
atcccgagtgacgtggaagctggtaacttcgaaggaagggcaaggaattaatgggcaaagcagctataaattttgcagtggtttctatgggtcaggtctgatgcagaaagacagagcacagggtgagaaagcatgcatcatcactctgattgtgacaaacaggattacagtctctgagctcaccaaacaaacatcctctggactaattacccccacaaacaactgcacgtttgcctgcagagcacatgttgaacctaaaagtgctagkaaaccaacacagacttccctactttcattgcracgctgcaaacttacatatatccatatataacccttttccccccgtgaaaatgaataaacagaagggtttgaaagctccagacactgctgcagggaatggaactcattgaacagctttgtgtt

SEQ ID NO: 6269 - DNA, 599 bp, Chicken  19866894110315_1
  misc_feature (1)..(137): n is any nucleotide
nnnnnnnnnnnnnnnnnnnnnnnnnnnnnnnnnnnnnnnnnnnnnnnnnnnnnnnnnnnnnnnnnnnnnnnnnnnnnnnnnnnnnnnnnnnnnnnnnnnnnnnnnnnnnnnnnnnnnnnnnnnnnnnnnnnnnnnnntgtcttgacctactttttttttttcccctaaccctaatgcttccagctagtcaggaaaagcctttcttcttctagcacaaattactatccaaatgtttcttgcatatgctgcatacatggcacctatccaatgcacagaaaaaaatacttggtatttcagaaragctctagcaaacttaattcctgtctgatttcctttgctttgtcttctrttatggtctaacatctctgatgacctcatgagttgaaaacaaagaatagcatggaaatattggcagaatttttcccgaagtccaggaataaactgtattccaggattcaacatgctaaattgcctgattacatataaagaaatgctgatcttctgcttactgctttcttttcactaatgtccttcttactctccttcccttgtaygttctctactgtactgctgtaggaatcttagcacttgtactaagt

SEQ ID NO: 6270 - DNA, 599 bp, Chicken  19866894110315_2
  misc_feature (1)..(88): n is any nucleotide
nnnnnnnnnnnnnnnnnnnnnnnnnnnnnnnnnnnnnnnnnnnnnnnnnnnnnnnnnnnnnnnnnnnnnnnnnnnnnnnnnnnnnnnntgtcttgacctactttttttttttcccctaaccctaatgcttccagctagtcaggaaaagcctttcttcttctagcacaaattactatccaaatgtttcttgcatatgctgcatacatggcacctatccaatgcacagaaaaaaatacttggtatttcagaaragctctagcaaacttaattcctgtctgatttcctttgctttgtcttctrttatggtctaacatctctgatgacctcatgagttgaaaacaaagaatagcatggaaatattggcagaatttttcccgaagtccaggaataaactgtattccaggattcaacatgctaaattgcctgattacatataaagaaatgctgatcttctgcttactgctttcttttcactaatgtccttcttactctccttcccttgtaygttctctactgtactgctgtaggaatcttagcacttgtactaagtgcttaacacttctcctccaagaccataaaacgactttrccatccgttaa

SEQ ID NO: 6271 - DNA, 600 bp, Chicken  19866894110315_3
tggcacctatccaatgcacagaaaaaaatacttggtatttcagaaragctctagcaaacttaattcctgtctgatttcctttgctttgtcttctrttatggtctaacatctctgatgacctcatgagttgaaaacaaagaatagcatggaaatattggcagaatttttcccgaagtccaggaataaactgtattccaggattcaacatgctaaattgcctgattacatataaagaaatgctgatcttctgcttactgctttcttttcactaatgtccttcttactctccttcccttgtaygttctctactgtactgctgtaggaatcttagcacttgtactaagtgcttaacacttctcctccaagaccataaaacgactttrccatccgttaagagtacaaaagagcagtctttgttgtatttttctcccagtcaaggacatatgcagcactcagaagaggatgtatactcggtaggcagaagctgtgcttatttctgagaggtttttcagactgtaggcactgttatgacttatgaaaatcartttttttcaggtcacaaatacgcactgaggatttctctatagttttaatctgctt

SEQ ID NO: 6272 - DNA, 600 bp, Chicken  19866894110315_4
ctttgtcttctrttatggtctaacatctctgatgacctcatgagttgaaaacaaagaatagcatggaaatattggcagaatttttcccgaagtccaggaataaactgtattccaggattcaacatgctaaattgcctgattacatataaagaaatgctgatcttctgcttactgctttcttttcactaatgtccttcttactctccttcccttgtaygttctctactgtactgctgtaggaatcttagcacttgtactaagtgcttaacacttctcctccaagaccataaaacgactttrccatccgttaagagtacaaaagagcagtctttgttgtatttttctcccagtcaaggacatatgcagcactcagaagaggatgtatactcggtaggcagaagctgtgcttatttctgagaggtttttcagactgtaggcactgttatgacttatgaaaatcartttttttcaggtcacaaatacgcactgaggatttctctatagttttaatctgctttacctggagtagaatattctttgtggagagtatatctgagcacagataaaatgtttaaactacatgcatcagtgacgatgaat

SEQ ID NO: 6273 - DNA, 600 bp, Chicken  19866894110315_5
ttctgcttactgctttcttttcactaatgtccttcttactctccttcccttgtaygttctctactgtactgctgtaggaatcttagcacttgtactaagtgcttaacacttctcctccaagaccataaaacgactttrccatccgttaagagtacaaaagagcagtctttgttgtatttttctcccagtcaaggacatatgcagcactcagaagaggatgtatactcggtaggcagaagctgtgcttatttctgagaggtttttcagactgtaggcactgttatgacttatgaaaatcartttttttcaggtcacaaatacgcactgaggatttctctatagttttaatctgctttacctggagtagaatattctttgtggagagtatatctgagcacagataaaatgtttaaactacatgcatcagtgacgatgaatatcaggttccatctatgtcatcagttatttgaatttcacgtttctggtttctaaccttaagaatatactttgcagtgcaatcagcagtccctgatagacgactgaagtactatggttctaataattaccttttagctgttgctgtgatgctaatatatattc

SEQ ID NO: 6274 - DNA, 600 bp, Chicken  19866894110319_1
gatgtgtttagcaaaggactgttgctcgatatgcatagtgtgttagtttggagtatgaataaggaagcatgtgtgcaactgtgatatttgtagtcatgaacttctgtgttacagttttagctgtataatactattaggtgcttgcattttttgtgtgtgtttctataaataacattgcaactcagtctagtgggaatgcagtattatccattttgtatgattgcaaggatacgattgcagttgtctgattttcttattgtgttattaatgtggtgttttttttcattcctgctttttcamatttcttagaaatcagtctgctggaaaattaggtctgggaagtttggctcttctaagctaatccatayccaaaaccgtcttacatactcaatgaacagatcttacaactgtgtaatttatatatatgtaaactggaaagagaagaaacaattttgctcaaggtttaagaaaaaaaaaaaaatagaatattgctgtttgtgctgtgaccattcgtgaaagactttcaaccaaacaggaaagtttttaacagtctgaggctgtaatttaacagcagctgtttgtgatcgctgccagcagaaa

SEQ ID NO: 6275 - DNA, 564 bp, Chicken  19866894110319_2
atgtgtgcaactgtgatatttgtagtcatgaacttctgtgttacagttttagctgtataatactattaggtgcttgcattttttgtgtgtgtttctataaataacattgcaactcagtctagtgggaatgcagtattatccattttgtatgattgcaaggatacgattgcagttgtctgattttcttattgtgttattaatgtggtgttttttttcattcctgctttttcamatttcttagaaatcagtctgctggaaaattaggtctgggaagtttggctcttctaagctaatccatayccaaaaccgtcttacatactcaatgaacagatcttacaactgtgtaatttatatatatgtaaactggaaagagaagaaacaattttgctcaaggtttaagaaaaaaaaaaaaatagaatattgctgtttgtgctgtgaccattcgtgaaagactttcaaccaaacaggaaagtttttaacagtctgaggctgtaatttaacagcagctgtttgtgatcgctgccagcagaaatcacttgttttcacccagctgaaaagaacagg

SEQ ID NO: 6276 - DNA, 571 bp, Chicken  19866894110320_1
tgctgtaaatacagagcaaatgtaaccaaatggactgaaaaatctttctgtctgggatctacctttgaaatgagaattatgacatgttcttaaattgaaatacatttggtcggcaagagtaatgaattttttttcccaaaacccttggtagtgacagtgaactgcaccaaggtaaccactggatttaggtcatggcatggtaggtgaagttgatgttgacacagtgaagttgttcagaagcaagcagaagtactgttgtttacacctcaagaggagacccaccaaactagattcagcttyctcatgcttgagcatacgttgcttataaaaggtacaaagccttcattctatacattgaggtgatgttgccgacgataactagtttgccatcagagagagaaagtcaatcaaattaatacaggctgtccaaagtcaccctaaaaacctgttcctttgaaatcaatggatactttttaaatcaaatccctgatatcttatcatgcaaatgcacacgttcatttctgtaagcttaaataagacacctaagctcatgtttgaaaaatgtccacgt

SEQ ID NO: 6277 - DNA, 599 bp, Chicken  19866894110329_1
  misc_feature (1)..(50): n is any nucleotide
nnnnnnnnnnnnnnnnnnnnnnnnnnnnnnnnnnnnnnnnnnnnnnnnnntgtggtgccgcgaggcggggcgaggcggggcaggcggggtagcgagagtagtggcagggcgtggcagggtgaggcttggcgtggcggggcgaggcgaggcaatgtgggcaaggcgaggcagggcaaggcgaggcgaggcgaggcggggcgaggcaaggcgaggctcagcgtggtggggtaaggcaaagcgaggcagggcgaggcgaggggaaatgaggcggggtgaggttaggcgaggcggggcgaaacraggcgggatggggcagagcaaggcggggcgaggctaggcatggcggggtgaggcagggcgaggtggggtgaggcgatacgtggcaggcaaggcttggcrgggtrgggcgaggcggggtgaggcagggtgaggcggggcgaggcagggcaatgcggggtgggcagaggcgtggcagggcgaggcaaggcaaggcaaggtgaggcgatgaaaagcaaggctaggcagggcraggcaaggcgaggcggggcggggcaagacgaggcggggcgaggcggggtgaggcggggtggggctatgcg

SEQ ID NO: 6278 - DNA, 600 bp, Chicken  19866894110329_2
agtggcagggcgtggcagggtgaggcttggcgtggcggggcgaggcgaggcaatgtgggcaaggcgaggcagggcaaggcgaggcgaggcgaggcggggcgaggcaaggcgaggctcagcgtggtggggtaaggcaaagcgaggcagggcgaggcgaggggaaatgaggcggggtgaggttaggcgaggcggggcgaaacraggcgggatggggcagagcaaggcggggcgaggctaggcatggcggggtgaggcagggcgaggtggggtgaggcgatacgtggcaggcaaggcttggcrgggtrgggcgaggcggggtgaggcagggtgaggcggggcgaggcagggcaatgcggggtgggcagaggcgtggcagggcgaggcaaggcaaggcaaggtgaggcgatgaaaagcaaggctaggcagggcraggcaaggcgaggcggggcggggcaagacgaggcggggcgaggcggggtgaggcggggtggggctatgcgttgcaaggcgggagaggtggggcgaggcggggcgaggctcggtgtggcggggtgaggtggggcaaggcggggtgaggtgaggcgtggcaggcgatgcgga

SEQ ID NO: 6279 - DNA, 600 bp, Chicken  19866894110329_3
cagggcgtggcagggtgaggcttggcgtggcggggcgaggcgaggcaatgtgggcaaggcgaggcagggcaaggcgaggcgaggcgaggcggggcgaggcaaggcgaggctcagcgtggtggggtaaggcaaagcgaggcagggcgaggcgaggggaaatgaggcggggtgaggttaggcgaggcggggcgaaacraggcgggatggggcagagcaaggcggggcgaggctaggcatggcggggtgaggcagggcgaggtggggtgaggcgatacgtggcaggcaaggcttggcrgggtrgggcgaggcggggtgaggcagggtgaggcggggcgaggcagggcaatgcggggtgggcagaggcgtggcagggcgaggcaaggcaaggcaaggtgaggcgatgaaaagcaaggctaggcagggcraggcaaggcgaggcggggcggggcaagacgaggcggggcgaggcggggtgaggcggggtggggctatgcgttgcaaggcgggagaggtggggcgaggcggggcgaggctcggtgtggcggggtgaggtggggcaaggcggggtgaggtgaggcgtggcaggcgatgcggagcggg

SEQ ID NO: 6280 - DNA, 600 bp, Chicken  19866894110329_4
aaggcaaagcgaggcagggcgaggcgaggggaaatgaggcggggtgaggttaggcgaggcggggcgaaacraggcgggatggggcagagcaaggcggggcgaggctaggcatggcggggtgaggcagggcgaggtggggtgaggcgatacgtggcaggcaaggcttggcrgggtrgggcgaggcggggtgaggcagggtgaggcggggcgaggcagggcaatgcggggtgggcagaggcgtggcagggcgaggcaaggcaaggcaaggtgaggcgatgaaaagcaaggctaggcagggcraggcaaggcgaggcggggcggggcaagacgaggcggggcgaggcggggtgaggcggggtggggctatgcgttgcaaggcgggagaggtggggcgaggcggggcgaggctcggtgtggcggggtgaggtggggcaaggcggggtgaggtgaggcgtggcaggcgatgcggagcgggacaggtcgaaaggtagcgaggcggggcgaggcgaggcagggcgaggcagggcgggttggggcggggcgaggcggggcgaggtggggcaaggcggggcagggagaggcgtggcaggacgaggcaag

SEQ ID NO: 6281 - DNA, 599 bp, Chicken  19866894110337_1
  misc_feature (1)..(6): n is any nucleotide
nnnnnntctgaaaatgaccgtgatttaaagtgtaaccaataatgctgccttccgtgtggctcctgcatgagggcagttccccctcggtgcagtcccagcctcatagccggacagaaagaggattcttttttatcattatttatttatttatttggaggtcaaacatgaatgaattcggtgaaaattcttgttttggagattcaattttaatcattttaattttgttactcagtgccagggtagtcttgtagggcatgaaaggggtttaaaaacaccagctaggttacagcctgcctcccyagctgccttgcatttttatcatcactgacctcagcaaatcctcattagaaattaatataatggggacgttttcactgcagcgttttatgtggctttgrgtttaaagcagtcttctttgacttgcaaaattctctagattgttcttgcttaataatcacaaacaacttgtaagtgtactcgggacagcgagttctgtgtgtgtctgtctcacacgagaataataccgggcagtataaaataccaggcaaaacagcagagaggaaattggacttgcattgacttaaataagcaagtgctgt

SEQ ID NO: 6282 - DNA, 600 bp, Chicken  19866894110337_2
cctcatagccggacagaaagaggattcttttttatcattatttatttatttatttggaggtcaaacatgaatgaattcggtgaaaattcttgttttggagattcaattttaatcattttaattttgttactcagtgccagggtagtcttgtagggcatgaaaggggtttaaaaacaccagctaggttacagcctgcctcccyagctgccttgcatttttatcatcactgacctcagcaaatcctcattagaaattaatataatggggacgttttcactgcagcgttttatgtggctttgrgtttaaagcagtcttctttgacttgcaaaattctctagattgttcttgcttaataatcacaaacaacttgtaagtgtactcgggacagcgagttctgtgtgtgtctgtctcacacgagaataataccgggcagtataaaataccaggcaaaacagcagagaggaaattggacttgcattgacttaaataagcaagtgctgtgacaaaattgtttagttctcttttgaccttttgaggtcacgtttgactatttatgctatctcctaatgctctgcttctccctgcctggtaacaattatg

SEQ ID NO: 6283 - DNA, 600 bp, Chicken  19866894110342_1
tcagacacaaattatgtgcaaagggataaaaagaacatattttgagccagaagttctggagaggggtatgagaggactgaaggatggaacaaaacaggtgggaaaatagaaagcttggttcacttctgtcaaactcatcacgtgtttcttgggtgccaatgtgggcatcgctcaagtccttgtgagccctaagcattcagcccgtgctttgcaggacaggcctgttctgtgtacagcaaaagccagtggtcactaaggtctgttgagagcaaagcgtaagtgtggggggcacacgtaccrttggtacttacaggtcagggctgaaagcacagctggcagcctatattgattaggtttaaactgtcaaccaagaagaccacaaaaataccaggggaatatgtgacatcccagtgggaaaccaactattgccttccctaggatggcttagaagtggtcctgaagtcgttcatggcctctcctctactgatatatcagatgctactgagaacctttcccacacctgcctttgagagttcagtctgctccttttgaacttgccttgtgagctctcttagactttctaccacacatatgtaaaag

SEQ ID NO: 6284 - DNA, 599 bp, Chicken  19866894110350_1
  misc_feature (1)..(107): n is any nucleotide
nnnnnnnnnnnnnnnnnnnnnnnnnnnnnnnnnnnnnnnnnnnnnnnnnnnnnnnnnnnnnnnnnnnnnnnnnnnnnnnnnnnnnnnnnnnnnnnnnnnnnnnnnnntctgtctttctgttgaccccttataggtcccatacagagctctctcttctctaggctaaacaaatccaactccctcaaactcttctcacagggcaagtgctccaggatttgattgtcttagtgatcctgtgctgaactcactttattttatcagtgtctttcttgtactagggatgccagactggattaatgkcatggtctcaaactattagcaggccgtgcacctgctagtacagctctaggtacacttggctgtcttggctgccaagactcactgctggctcatcctcaacctgctatctcttcagcccaggctttttcttcctaygtaaatgacttagaatttgtccttgttgaattttgtacatttctaattgccccatacctccagtttctttgtttctctatgggtggcagccctgtccttgagggtatcagctacatgcttcagactggtgttacctcctagcttgatgagtgtgctgcagtgac

SEQ ID NO: 6285 - DNA, 600 bp, Chicken  19866894110350_2
cccatacagagctctctcttctctaggctaaacaaatccaactccctcaaactcttctcacagggcaagtgctccaggatttgattgtcttagtgatcctgtgctgaactcactttattttatcagtgtctttcttgtactagggatgccagactggattaatgkcatggtctcaaactattagcaggccgtgcacctgctagtacagctctaggtacacttggctgtcttggctgccaagactcactgctggctcatcctcaacctgctatctcttcagcccaggctttttcttcctaygtaaatgacttagaatttgtccttgttgaattttgtacatttctaattgccccatacctccagtttctttgtttctctatgggtggcagccctgtccttgagggtatcagctacatgcttcagactggtgttacctcctagcttgatgagtgtgctgcagtgaccattgcctagttcactgaaaagttaacaaaaaatatattaaaaaaaataaaacaaatctaaatatggttttaattcaaagtaactactcctggtacaacctgaattctgataagaaaagaggctgcaagaatgtac

SEQ ID NO: 6286 - DNA, 600 bp, Chicken  19866894110353_1
tggtgtttaattttattaaagagcagatttgtttctgcatttaaaaaagaaaaaaggctaaactagcaaaggtgggctgtagtaggagagcggagaacataaaggttgtggaactgcaactttttcttaggaaacatatctgctgtcgggcaccaactgatcacgtggtggtttattgctggttcctccatgctctctgtgttcctgctatgtcaaagagtggtttcaaaccaagtttgaaaagtaatgactaaattttatatggatggaaatttaatatttcttctttcccttcttatratgatgattaataaaaagaacagcrtaactatgacctgtccctcctcctgcacacacccttatttcctacagactgctaatgactactgctgtgtttgttgggtgctgtagattgcaagaaatgaatgtatttcacgctgctgttttttttcctgggtgtgtaaaactggtattcctacaattctccctaactctgctgatcaactgtcactgaattagggactgtgctttgaagggttttgacctgctgttttctatttacatggtaaacacacattaaagcaggtgaaggaggcttgt

SEQ ID NO: 6287 - DNA, 600 bp, Chicken  19866894110353_2
gatttgtttctgcatttaaaaaagaaaaaaggctaaactagcaaaggtgggctgtagtaggagagcggagaacataaaggttgtggaactgcaactttttcttaggaaacatatctgctgtcgggcaccaactgatcacgtggtggtttattgctggttcctccatgctctctgtgttcctgctatgtcaaagagtggtttcaaaccaagtttgaaaagtaatgactaaattttatatggatggaaatttaatatttcttctttcccttcttatratgatgattaataaaaagaacagcrtaactatgacctgtccctcctcctgcacacacccttatttcctacagactgctaatgactactgctgtgtttgttgggtgctgtagattgcaagaaatgaatgtatttcacgctgctgttttttttcctgggtgtgtaaaactggtattcctacaattctccctaactctgctgatcaactgtcactgaattagggactgtgctttgaagggttttgacctgctgttttctatttacatggtaaacacacattaaagcaggtgaaggaggcttgttaccctgtgtgatcctggttttcgt

SEQ ID NO: 6288 - DNA, 600 bp, Chicken  19866894110358_1
tccccgccattcataaaaaggagattagcaacgacagactttgataaaatagtgcatcagctctggctgctgtatcatatcctgctttcacccttaaactcacagaatgatgatggcattgcaaagcctttgttggatgtgttggctttggtcactacataattccctacaggtatttaaggctctggggagatgagggcgtgcgaggcagccccggtgccactctcatatctgtaggatgaataacctcatttacagttggaatgcactcacgtatgtattgttacagccaggaaagtyggtgatgtgcaagtaamgaactgtaacacccatgctaagccatcacagaagtaataagggtatgtaagggggctcaagccattttgcctcctgtttttggctgggtcacagggratgtttaaacaagacactttactcgctcaatgcctcactttctccttctgcaacaggatgaccatagtagttaaaataatgcagatcccaatctatgattcagctacaattaaactgttaatccttttgttatattgtccagtaccaagactggagaagctcgggggctcttcaggcattttcccc

SEQ ID NO: 6289 - DNA, 600 bp, Chicken  19866894110358_2
aaggagattagcaacgacagactttgataaaatagtgcatcagctctggctgctgtatcatatcctgctttcacccttaaactcacagaatgatgatggcattgcaaagcctttgttggatgtgttggctttggtcactacataattccctacaggtatttaaggctctggggagatgagggcgtgcgaggcagccccggtgccactctcatatctgtaggatgaataacctcatttacagttggaatgcactcacgtatgtattgttacagccaggaaagtyggtgatgtgcaagtaamgaactgtaacacccatgctaagccatcacagaagtaataagggtatgtaagggggctcaagccattttgcctcctgtttttggctgggtcacagggratgtttaaacaagacactttactcgctcaatgcctcactttctccttctgcaacaggatgaccatagtagttaaaataatgcagatcccaatctatgattcagctacaattaaactgttaatccttttgttatattgtccagtaccaagactggagaagctcgggggctcttcaggcattttccccgtggagcatctgttgtc

SEQ ID NO: 6290 - DNA, 600 bp, Chicken  19866894110358_3
ggcattgcaaagcctttgttggatgtgttggctttggtcactacataattccctacaggtatttaaggctctggggagatgagggcgtgcgaggcagccccggtgccactctcatatctgtaggatgaataacctcatttacagttggaatgcactcacgtatgtattgttacagccaggaaagtyggtgatgtgcaagtaamgaactgtaacacccatgctaagccatcacagaagtaataagggtatgtaagggggctcaagccattttgcctcctgtttttggctgggtcacagggratgtttaaacaagacactttactcgctcaatgcctcactttctccttctgcaacaggatgaccatagtagttaaaataatgcagatcccaatctatgattcagctacaattaaactgttaatccttttgttatattgtccagtaccaagactggagaagctcgggggctcttcaggcattttccccgtggagcatctgttgtcagcatggtctgctgtaggcgctgtgaactgccaaattcggagtgtttctctgctctaggtgctgttgcatgttccttttctttctgtgctcagttga

SEQ ID NO: 6291 - DNA, 599 bp, Chicken  19866894110361_1
  misc_feature (1)..(99): n is any nucleotide
nnnnnnnnnnnnnnnnnnnnnnnnnnnnnnnnnnnnnnnnnnnnnnnnnnnnnnnnnnnnnnnnnnnnnnnnnnnnnnnnnnnnnnnnnnnnnnnnnnntcttgaattgatcttttggtctttggttgtttcctcccagaaaataggtcactctgaaaaatactgtttatttgttagtagtctcttaaactactgctttagcagtttatctttgtatttcctgaccttatcaagactttccctactaatcattcagaatgtgaatgccattcattggaatgccattccacttgaagaaaragtgctggtggcagttgattttaatagttcaaaacacattctgggtaggacctattagatttagatagttttgtattccagagagctagctggaggaggcaaatttggcaggcttgaatggtctgacaatctytagaatttggcaggatctaaaacaagtttgtaataagaacacggtgactttagaaaataaactataagaaggtacagtgaggcagatttttaaggcattatgcattgcacatgtattttattgtacatacagctcataatttacttgtatactcagacagtaaagc

SEQ ID NO: 6292 - DNA, 600 bp, Chicken  19866894110361_2
tcccagaaaataggtcactctgaaaaatactgtttatttgttagtagtctcttaaactactgctttagcagtttatctttgtatttcctgaccttatcaagactttccctactaatcattcagaatgtgaatgccattcattggaatgccattccacttgaagaaaragtgctggtggcagttgattttaatagttcaaaacacattctgggtaggacctattagatttagatagttttgtattccagagagctagctggaggaggcaaatttggcaggcttgaatggtctgacaatctytagaatttggcaggatctaaaacaagtttgtaataagaacacggtgactttagaaaataaactataagaaggtacagtgaggcagatttttaaggcattatgcattgcacatgtattttattgtacatacagctcataatttacttgtatactcagacagtaaagcacctggtcatatamttgaatscaatctgggtgagtgcgtcagtgatataaagacatatgccagtgtctgcatacmgtagcatgttctttacctttgawattgtggctgtgctgtttttcagccacaaaagcaag

SEQ ID NO: 6293 - DNA, 600 bp, Chicken  19866894110361_3
gttgattttaatagttcaaaacacattctgggtaggacctattagatttagatagttttgtattccagagagctagctggaggaggcaaatttggcaggcttgaatggtctgacaatctytagaatttggcaggatctaaaacaagtttgtaataagaacacggtgactttagaaaataaactataagaaggtacagtgaggcagatttttaaggcattatgcattgcacatgtattttattgtacatacagctcataatttacttgtatactcagacagtaaagcacctggtcatatamttgaatscaatctgggtgagtgcgtcagtgatataaagacatatgccagtgtctgcatacmgtagcatgttctttacctttgawattgtggctgtgctgtttttcagccacaaaagcaagaaacagtatgtgtgtatctttcctatatcgtaaggaacaaagagcttatgtgaaaagagtacaggagaagatcttaagagattctgtcccatcaaaaacggaaatacagcaacatgaaaagagcaaacacgctgcctggcttctctgaagctgtttgctaatgacctccaatgaactaga

SEQ ID NO: 6294 - DNA, 600 bp, Chicken  19866894110361_4
ttaatagttcaaaacacattctgggtaggacctattagatttagatagttttgtattccagagagctagctggaggaggcaaatttggcaggcttgaatggtctgacaatctytagaatttggcaggatctaaaacaagtttgtaataagaacacggtgactttagaaaataaactataagaaggtacagtgaggcagatttttaaggcattatgcattgcacatgtattttattgtacatacagctcataatttacttgtatactcagacagtaaagcacctggtcatatamttgaatscaatctgggtgagtgcgtcagtgatataaagacatatgccagtgtctgcatacmgtagcatgttctttacctttgawattgtggctgtgctgtttttcagccacaaaagcaagaaacagtatgtgtgtatctttcctatatcgtaaggaacaaagagcttatgtgaaaagagtacaggagaagatcttaagagattctgtcccatcaaaaacggaaatacagcaacatgaaaagagcaaacacgctgcctggcttctctgaagctgtttgctaatgacctccaatgaactagaaaatgtt

SEQ ID NO: 6295 - DNA, 600 bp, Chicken  19866894110361_5
attccagagagctagctggaggaggcaaatttggcaggcttgaatggtctgacaatctytagaatttggcaggatctaaaacaagtttgtaataagaacacggtgactttagaaaataaactataagaaggtacagtgaggcagatttttaaggcattatgcattgcacatgtattttattgtacatacagctcataatttacttgtatactcagacagtaaagcacctggtcatatamttgaatscaatctgggtgagtgcgtcagtgatataaagacatatgccagtgtctgcatacmgtagcatgttctttacctttgawattgtggctgtgctgtttttcagccacaaaagcaagaaacagtatgtgtgtatctttcctatatcgtaaggaacaaagagcttatgtgaaaagagtacaggagaagatcttaagagattctgtcccatcaaaaacggaaatacagcaacatgaaaagagcaaacacgctgcctggcttctctgaagctgtttgctaatgacctccaatgaactagaaaatgttagagagcctggtctcagcttgaagcctgagaggagaaaaataggaggcagagag

SEQ ID NO: 6296 - DNA, 600 bp, Chicken  19866894110361_6
ggcaaatttggcaggcttgaatggtctgacaatctytagaatttggcaggatctaaaacaagtttgtaataagaacacggtgactttagaaaataaactataagaaggtacagtgaggcagatttttaaggcattatgcattgcacatgtattttattgtacatacagctcataatttacttgtatactcagacagtaaagcacctggtcatatamttgaatscaatctgggtgagtgcgtcagtgatataaagacatatgccagtgtctgcatacmgtagcatgttctttacctttgawattgtggctgtgctgtttttcagccacaaaagcaagaaacagtatgtgtgtatctttcctatatcgtaaggaacaaagagcttatgtgaaaagagtacaggagaagatcttaagagattctgtcccatcaaaaacggaaatacagcaacatgaaaagagcaaacacgctgcctggcttctctgaagctgtttgctaatgacctccaatgaactagaaaatgttagagagcctggtctcagcttgaagcctgagaggagaaaaataggaggcagagagaatggaaagaaagtgaaaaaggg

SEQ ID NO: 6297 - DNA, 600 bp, Chicken  19866894110361_7
gtggctgtgctgtttttcagccacaaaagcaagaaacagtatgtgtgtatctttcctatatcgtaaggaacaaagagcttatgtgaaaagagtacaggagaagatcttaagagattctgtcccatcaaaaacggaaatacagcaacatgaaaagagcaaacacgctgcctggcttctctgaagctgtttgctaatgacctccaatgaactagaaaatgttagagagcctggtctcagcttgaagcctgagaggagaaaaataggaggcagagagaatggaaagaaagtgaaaaagggaayggaggcagtcaataattatttttcaacaacagcagcaacaaaaacccaatcgggcagcaaatttttgacagctttcatgctgcctgacctgcactgccatgtctgggctaacaggaaaaaaaaaagagcagcagcagttttggaggtcatgaaggtaaaatcacagaataataaaataattgagcmaactgtaagaggcagagggtatgaaatgcrgattaagtatattagaacgaacattttatgataggcacttgaatgattaccacttattggtgaaatataacgttacgtagagta

SEQ ID NO: 6298 - DNA, 600 bp, Chicken  19866894110361_8
tttgctaatgacctccaatgaactagaaaatgttagagagcctggtctcagcttgaagcctgagaggagaaaaataggaggcagagagaatggaaagaaagtgaaaaagggaayggaggcagtcaataattatttttcaacaacagcagcaacaaaaacccaatcgggcagcaaatttttgacagctttcatgctgcctgacctgcactgccatgtctgggctaacaggaaaaaaaaaagagcagcagcagttttggaggtcatgaaggtaaaatcacagaataataaaataattgagcmaactgtaagaggcagagggtatgaaatgcrgattaagtatattagaacgaacattttatgataggcacttgaatgattaccacttattggtgaaatataacgttacgtagagtatagtaagtacttaaaggaaaaggtttgtgtcagaagacttacaatcaaatctgacaaaatatcacaagagacacagagagatagaacttttgccaaggaaagctacgtgtgtctggcatagggagaaatgcttgaaatgagggagaagaaacgttcacagcgcaggttaattatttttaaaggaag

SEQ ID NO: 6299 - DNA, 600 bp, Chicken  19866894110361_9
tgttagagagcctggtctcagcttgaagcctgagaggagaaaaataggaggcagagagaatggaaagaaagtgaaaaagggaayggaggcagtcaataattatttttcaacaacagcagcaacaaaaacccaatcgggcagcaaatttttgacagctttcatgctgcctgacctgcactgccatgtctgggctaacaggaaaaaaaaaagagcagcagcagttttggaggtcatgaaggtaaaatcacagaataataaaataattgagcmaactgtaagaggcagagggtatgaaatgcrgattaagtatattagaacgaacattttatgataggcacttgaatgattaccacttattggtgaaatataacgttacgtagagtatagtaagtacttaaaggaaaaggtttgtgtcagaagacttacaatcaaatctgacaaaatatcacaagagacacagagagatagaacttttgccaaggaaagctacgtgtgtctggcatagggagaaatgcttgaaatgagggagaagaaacgttcacagcgcaggttaattatttttaaaggaagaatttacattaacttttcagatacccggaa

SEQ ID NO: 6300 - DNA, 600 bp, Chicken  19866894110362_1
attatgtgaatgacctgggttttgccctctataggaatatttggatgcagtcttacaatttcaattgcagaggaggtcaggactccaaactctagtgaatgtttgttatcgtgaataaattctctctttgtccatgtgtttattgatctaaatttttcctgcagctggctgctgcctgtacttgacaattttcgctctgctgttgctcctgcagagagaggcaaataacacctggcagaacacataatttaaatgcagaaaattggaacgtggtggatactcctttcctttctcccttgyttcagttttattttgcatacgggcttagactttgaaatactgccctgattttgtagcaccctccctgctctccccatatgaaatgtgaaacaagacaaggctcactgtaacacgcaccaagtgcagygcatttgtctcattcgcagaatgccaagccagggctgaacaagtgcaatgcacataagagtacgtaaaatgttacagactgagccctgtaaggtttggaaacagggcattgcctgaataaccctggagtaacagcatgaggctgactattttattctctcattttgaagacgc

SEQ ID NO: 6301 - DNA, 560 bp, Chicken  19866894110362_2
ttgtccatgtgtttattgatctaaatttttcctgcagctggctgctgcctgtacttgacaattttcgctctgctgttgctcctgcagagagaggcaaataacacctggcagaacacataatttaaatgcagaaaattggaacgtggtggatactcctttcctttctcccttgyttcagttttattttgcatacgggcttagactttgaaatactgccctgattttgtagcaccctccctgctctccccatatgaaatgtgaaacaagacaaggctcactgtaacacgcaccaagtgcagygcatttgtctcattcgcagaatgccaagccagggctgaacaagtgcaatgcacataagagtacgtaaaatgttacagactgagccctgtaaggtttggaaacagggcattgcctgaataaccctggagtaacagcatgaggctgactattttattctctcattttgaagacgcgggaccaaaatgctctgctggtgtaaaggattctgaaagaagttctgtcttcaggctgtgctaatctaaaaccggaatcctccttta

SEQ ID NO: 6302 - DNA, 600 bp, Chicken  19866894110367_1
ggaggtagaattgcaatacacctttgcaaaaaggttcctcactgaaaaccaacaaacgaaaccctcaggaaacagtattaccaccgggggtttgagtttactttgtggatttttggtgctgttcctaatagaaccgctgctttacatagcattatttgcatttgttcagaagagtggctcactgaatgcatctcattcatgggtactatctgtcctgtttgaatggcaaataaattctgaagaatggaaaaatagcatgtcgttatgtcattttaaactgttctggaatatgtgactgarcaacctccattacctgactttttttagtctccactgaattgccagtcctttttattattttttttttcaattattactctataaattgtagcttacttcttgtttagctccaaggagtatgcggttttgttgtctttgttgttttggtttttattcagtcttcacaatagagggatatttgaaggaaaaaggtctgagaagcacctgcttgattacagagttgatcagaaagaccacattttggcctgagcacttacctgctacaagcagaggatttgaaaatacgacagtgcgttttgt

SEQ ID NO: 6303 - DNA, 529 bp, Chicken  19866894110367_2
ttaatttgtgatgtctcaggtcagtgtcattctgctgctggtaatgacaaatgtaaatgttctgctgtggctaaacatgtttaggagccaaagaacctgtagtgctttaatcttgtaatgcactgcttcttctgcttctttaccagcattccttgcatcttcctaaaggaaagcctgattttattgggagaggtttggttggcactattagcatctaagcaagtggagttcctgaagttgccatcatctgttggacatttcttgggataattttctagcatgctaataaagcaactgacrgaaatctgaccagcacaggtgtcagggagtgtggctggatgcaggaagagggaaactcccctttgcagtggcagtgagctgctgtattgtcacgtgctaccctcatttggccacaagtatccatgagttctctgaccaagaagcagttttttcaggggtgagcatatcagtagttcctgctaaagctctttgtctgtgctgctgaaatgttctgccagaagtaagattg

SEQ ID NO: 6304 - DNA, 600 bp, Chicken  19866894110368_1
gaaatctcccccaaagcttttgcaaaactcaattcctaatgaagtttcttcacttctccccaaggagtgctgactacctctatctaggttaaaaatgacatccttagcacttcactaaataggatcgtcacctggaaaactaaatacaattcactaatgcttagcctaattctaagaaataataaagctgtttatcacttgggttgtgatttcccctcaatgccaagacacagtttaaaattttagtgcctaacagctacagaatgaaaagtatactttatgcaaaacattaatgagaayaacacacatggctcactagtagttcctgatcaaaagcattcgccacaaaaccagaatagcttgattaccagttctaaatgaaggcacaacttcattatgtatgtattatttccctttccccttggtgacataacaatagtccatgagataactatacagaattagtaacttaatggagtaaagtaaatgaaataaaaattttttataaggtaatccatactgaagtttaaaaagtttaatgtacaaatcttgtattttagcagatttttatatttttcatagtgaaaagctttttcagat

SEQ ID NO: 6305 - DNA, 600 bp, Chicken  19866894110369_1
ttgtcccaacaggcagatgataccgttcagtgttcgagctttacttgcttagcactttgctggctgagagagtaaatagctgaattggtttgcctcaagtttgtcaaagtgctctctgcttgtcctctatgatctctcagtgataaatgactgtaaactcaggcagcaaatgaaggagaaataacatcaagacaatgatgtgatgggttttaggtgactcactaatatcaaacaatccaatacatgacaaaaagcctcagagtctctcctgcctggcgggtgagtgagatgatgcagaascttgtcctgagaacaggcttgttttgttcctgttgcatctcaactgtgttgttggctcatttcctgaaatagtttggcagcagtgcagtgtatttaggatcaccctccctccagctcttgaaatctgaatgccagttgtctgagttacctctggagtccccgagggaagaarggtgcagccagagtttgactcagtgrttcagattgcttccaactccactgattgcagcttaaatgcggacagtttgctttccaaaatktaaagtttggaaagctttcttgatggttatagagcacaag

SEQ ID NO: 6306 - DNA, 600 bp, Chicken  19866894110369_2
aaggagaaataacatcaagacaatgatgtgatgggttttaggtgactcactaatatcaaacaatccaatacatgacaaaaagcctcagagtctctcctgcctggcgggtgagtgagatgatgcagaascttgtcctgagaacaggcttgttttgttcctgttgcatctcaactgtgttgttggctcatttcctgaaatagtttggcagcagtgcagtgtatttaggatcaccctccctccagctcttgaaatctgaatgccagttgtctgagttacctctggagtccccgagggaagaarggtgcagccagagtttgactcagtgrttcagattgcttccaactccactgattgcagcttaaatgcggacagtttgctttccaaaatktaaagtttggaaagctttcttgatggttatagagcacaagagctggaatttgatggcagttcatatagtctgtaagttcccatgttcattctggttttctcagtaagactgaaatgtggctgcagtgctgttcacagccaggaagcaatgagtgcctgtcttgtggatcygtgcttccttttgtttcagtaaagcagtgtataaatctcatt

SEQ ID NO: 6307 - DNA, 600 bp, Chicken  19866894110369_3
tgtgatgggttttaggtgactcactaatatcaaacaatccaatacatgacaaaaagcctcagagtctctcctgcctggcgggtgagtgagatgatgcagaascttgtcctgagaacaggcttgttttgttcctgttgcatctcaactgtgttgttggctcatttcctgaaatagtttggcagcagtgcagtgtatttaggatcaccctccctccagctcttgaaatctgaatgccagttgtctgagttacctctggagtccccgagggaagaarggtgcagccagagtttgactcagtgrttcagattgcttccaactccactgattgcagcttaaatgcggacagtttgctttccaaaatktaaagtttggaaagctttcttgatggttatagagcacaagagctggaatttgatggcagttcatatagtctgtaagttcccatgttcattctggttttctcagtaagactgaaatgtggctgcagtgctgttcacagccaggaagcaatgagtgcctgtcttgtggatcygtgcttccttttgtttcagtaaagcagtgtataaatctcattttgatgtttgactttaccaattcaga

SEQ ID NO: 6308 - DNA, 600 bp, Chicken  19866894110369_4
agtctctcctgcctggcgggtgagtgagatgatgcagaascttgtcctgagaacaggcttgttttgttcctgttgcatctcaactgtgttgttggctcatttcctgaaatagtttggcagcagtgcagtgtatttaggatcaccctccctccagctcttgaaatctgaatgccagttgtctgagttacctctggagtccccgagggaagaarggtgcagccagagtttgactcagtgrttcagattgcttccaactccactgattgcagcttaaatgcggacagtttgctttccaaaatktaaagtttggaaagctttcttgatggttatagagcacaagagctggaatttgatggcagttcatatagtctgtaagttcccatgttcattctggttttctcagtaagactgaaatgtggctgcagtgctgttcacagccaggaagcaatgagtgcctgtcttgtggatcygtgcttccttttgtttcagtaaagcagtgtataaatctcattttgatgtttgactttaccaattcagacacccagcagggcagyacaagtaatatgactgcaggtcattgtattttcttcaccaggatct

SEQ ID NO: 6309 - DNA, 600 bp, Chicken  19866894110369_5
gccagttgtctgagttacctctggagtccccgagggaagaarggtgcagccagagtttgactcagtgrttcagattgcttccaactccactgattgcagcttaaatgcggacagtttgctttccaaaatktaaagtttggaaagctttcttgatggttatagagcacaagagctggaatttgatggcagttcatatagtctgtaagttcccatgttcattctggttttctcagtaagactgaaatgtggctgcagtgctgttcacagccaggaagcaatgagtgcctgtcttgtggatcygtgcttccttttgtttcagtaaagcagtgtataaatctcattttgatgtttgactttaccaattcagacacccagcagggcagyacaagtaatatgactgcaggtcattgtattttcttcaccaggatctatccttacagattgtttttctgttctgctttccaggttcccgtaggaagcagtaaactatgctagcctttgctttggtactgactcttctgtagcaaacattactggaattgccaggcaactttctcaaatccttactctgtgggggatccaccttccactctcaggatc

SEQ ID NO: 6310 - DNA, 600 bp, Chicken  19866894110369_6
ctccactgattgcagcttaaatgcggacagtttgctttccaaaatktaaagtttggaaagctttcttgatggttatagagcacaagagctggaatttgatggcagttcatatagtctgtaagttcccatgttcattctggttttctcagtaagactgaaatgtggctgcagtgctgttcacagccaggaagcaatgagtgcctgtcttgtggatcygtgcttccttttgtttcagtaaagcagtgtataaatctcattttgatgtttgactttaccaattcagacacccagcagggcagyacaagtaatatgactgcaggtcattgtattttcttcaccaggatctatccttacagattgtttttctgttctgctttccaggttcccgtaggaagcagtaaactatgctagcctttgctttggtactgactcttctgtagcaaacattactggaattgccaggcaactttctcaaatccttactctgtgggggatccaccttccactctcaggatctcctttctaagtgtcatcatattaataaggaacatttgttcatttcaattttctattcatacgtgatcagtcaagcagtgccgt

SEQ ID NO: 6311 - DNA, 600 bp, Chicken  19866894110380_1
cttacttctatggctgtgtcggtatcttctttgccctacataattatccaatctcagcattcttagcaattgaaaacatagatttttttttttctgccagtgtggcatactggggggagaatatcacttgaaatatcattaagcacagatatatcagctagtcattatcatatatggatttatcaaatctgagtgcctaatgctggtgaaaaaagggagttgttgcttctcttggatcttgagaagatgggacgagcttcaagtggctttgggcaactgagggtgtcaccatagcccccycaaagccaacgcttcatcagctgggggctcttcccaccaggctgacaagkagatgtggaaaactatttttcatagtttttatttatttttgaaaggcttccaaaaggtgatggagaatttctcttgcaggttgcaccgacagaaaaggaagctgcagttagaaatgttagaaagcctatctgcaggagcagcgcctctcttgtgctgttcagagtaattcggcagacctatggctgcgtagaggaaacctctcaaacatttgtttccctgctattttgattacctcctttatttttatgg

SEQ ID NO: 6312 - DNA, 600 bp, Chicken  19866894110380_2
atctcagcattcttagcaattgaaaacatagatttttttttttctgccagtgtggcatactggggggagaatatcacttgaaatatcattaagcacagatatatcagctagtcattatcatatatggatttatcaaatctgagtgcctaatgctggtgaaaaaagggagttgttgcttctcttggatcttgagaagatgggacgagcttcaagtggctttgggcaactgagggtgtcaccatagcccccycaaagccaacgcttcatcagctgggggctcttcccaccaggctgacaagkagatgtggaaaactatttttcatagtttttatttatttttgaaaggcttccaaaaggtgatggagaatttctcttgcaggttgcaccgacagaaaaggaagctgcagttagaaatgttagaaagcctatctgcaggagcagcgcctctcttgtgctgttcagagtaattcggcagacctatggctgcgtagaggaaacctctcaaacatttgtttccctgctattttgattacctcctttatttttatggagataatttattctttgtcaggaagtacctcacacagtcttccagtcttt

SEQ ID NO: 6313 - DNA, 600 bp, Chicken  19866894110381_1
gggttcgaggctgaaccgaaaaccaagagcagaggtgggaggaagcagagccacaacctttgcactgaccctctcctcacacatctggcatcagctgcactgcgatctgccttgcagaagggatgtctgtgtgatggtaatttgtagcttagctgtgaccccccatgtgaatactgaatcagaaaggaggaaacgcaccaaaaccaattggagagcttgttccatgggcagggcttcacagtgctcctcgccgctcctcgccaacccaagaggagctgagttccactgtaacacagtaamatgggcaccagagtcgactcawggttttcttaaagctgctctgagctgtgtgaaaaacatcatgcacatccctccctcctccctgcaagcgttggtcgtaaggctgagcctgcacgagggcactggctggggtggccccttattttcagctttggaaaaggaagggctgtggtttcaagtgcgtttcgtgttcgtggtttgcttgcaataaacgttggttgctttttgccttcaytgaagtgaactgttttagtcttcagtgtggaaaacacagtgctttaaggctcctgggaatcgtgg

SEQ ID NO: 6314 - DNA, 600 bp, Chicken  19866894110381_2
ccaagagcagaggtgggaggaagcagagccacaacctttgcactgaccctctcctcacacatctggcatcagctgcactgcgatctgccttgcagaagggatgtctgtgtgatggtaatttgtagcttagctgtgaccccccatgtgaatactgaatcagaaaggaggaaacgcaccaaaaccaattggagagcttgttccatgggcagggcttcacagtgctcctcgccgctcctcgccaacccaagaggagctgagttccactgtaacacagtaamatgggcaccagagtcgactcawggttttcttaaagctgctctgagctgtgtgaaaaacatcatgcacatccctccctcctccctgcaagcgttggtcgtaaggctgagcctgcacgagggcactggctggggtggccccttattttcagctttggaaaaggaagggctgtggtttcaagtgcgtttcgtgttcgtggtttgcttgcaataaacgttggttgctttttgccttcaytgaagtgaactgttttagtcttcagtgtggaaaacacagtgctttaaggctcctgggaatcgtggaaccatagaatggcctgagttg

SEQ ID NO: 6315 - DNA, 600 bp, Chicken  19866894110381_3
tcacagtgctcctcgccgctcctcgccaacccaagaggagctgagttccactgtaacacagtaamatgggcaccagagtcgactcawggttttcttaaagctgctctgagctgtgtgaaaaacatcatgcacatccctccctcctccctgcaagcgttggtcgtaaggctgagcctgcacgagggcactggctggggtggccccttattttcagctttggaaaaggaagggctgtggtttcaagtgcgtttcgtgttcgtggtttgcttgcaataaacgttggttgctttttgccttcaytgaagtgaactgttttagtcttcagtgtggaaaacacagtgctttaaggctcctgggaatcgtggaaccatagaatggcctgagttgaaaaggaccacaatgctcatccagttccaaccccctgctatgtgcagggtcgccaaccagcagcccaggctgcccagagccacatccagcctggccttgaatgcctgcagggatggggcatccacagcctccttgggcaacctgtcgttttggatatacatatctggagtgtcagtgagaaagtgcttcaagggctctttgttgtatatatgg

SEQ ID NO: 6316 - DNA, 600 bp, Chicken  19866894110384_1
tttaaggtattctagagatgataggaatctaattaacaatttaaaagagaagaaagcaagctgacagatgggtgcatacccagatggacacgtagttgtgcccttcagtattttatggaaataggttctaagggaacataataaaacatactgggggaacagacactacaaagtaattatatggtcctagtactaggaacagggtacaagtggggcctattgggaaagggaaccttctagggcaacaatggcaaactgattttttttggaactgccaggaaaaaggagggttttgttatrtgctaggtctaaccaatacccatttcagggtggccagaagcattcccttgtaggaccaataaagccaaagaaataaccaaggtattgttgcaggagattattccaaggtttggggttcctgcaacaatatcctccaacctgggaactcactttactgcaaagattatccaacaggtcagtaagctattgggaatggattgacaattgcacataccacacaggccacaggcaagtagtcaggaggaaaagatgaaccacctaattaaatcacaggttgtaaaactgggtcaggaagctgga

SEQ ID NO: 6317 - DNA, 600 bp, Chicken  19866894110385_1
tttaaacctgcctgataatggaaagtgtgtggaagggcaacttgcttgcttctgacatccattgcctttccagacactgagtgctactatttcattatttttgggtgggtttggcaatgtatacttcatattcttacagttattaatccttcctctgtaaaaggattctttttctagatgtcatttgaagctgcttttcccactgtattcaagaaaataaaaaccatgccttatttgccagtgatggaacatgatcagtgagggaggattatcatgggaaggttatctgagaattgtctraataaatcatgtattccccaggggagcattcctagaagcctctgaggcatttgaattagaatctcttytggtctgtgaaaaacagaagcatacaaccactgtaatgggcaatccacttgctgaatttgctaggtgaattcgagaaactgcaatgaaacctttactataaataataacatatggagagaatggtrggatgaaatttagctcaactgttcttggaagggtttgggttaatgtcctcagaggtgctgaaagctgactggggttaagctgaaaaaagaacaggtgggggctcac

SEQ ID NO: 6318 - DNA, 600 bp, Chicken  19866894110385_2
tccagacactgagtgctactatttcattatttttgggtgggtttggcaatgtatacttcatattcttacagttattaatccttcctctgtaaaaggattctttttctagatgtcatttgaagctgcttttcccactgtattcaagaaaataaaaaccatgccttatttgccagtgatggaacatgatcagtgagggaggattatcatgggaaggttatctgagaattgtctraataaatcatgtattccccaggggagcattcctagaagcctctgaggcatttgaattagaatctcttytggtctgtgaaaaacagaagcatacaaccactgtaatgggcaatccacttgctgaatttgctaggtgaattcgagaaactgcaatgaaacctttactataaataataacatatggagagaatggtrggatgaaatttagctcaactgttcttggaagggtttgggttaatgtcctcagaggtgctgaaagctgactggggttaagctgaaaaaagaacaggtgggggctcacatctgcttctgtttcatctgcagctacttaggtaaggattaacaaaatagtttagcctgttggttata

SEQ ID NO: 6319 - DNA, 600 bp, Chicken  19866894110385_3
ttttcccactgtattcaagaaaataaaaaccatgccttatttgccagtgatggaacatgatcagtgagggaggattatcatgggaaggttatctgagaattgtctraataaatcatgtattccccaggggagcattcctagaagcctctgaggcatttgaattagaatctcttytggtctgtgaaaaacagaagcatacaaccactgtaatgggcaatccacttgctgaatttgctaggtgaattcgagaaactgcaatgaaacctttactataaataataacatatggagagaatggtrggatgaaatttagctcaactgttcttggaagggtttgggttaatgtcctcagaggtgctgaaagctgactggggttaagctgaaaaaagaacaggtgggggctcacatctgcttctgtttcatctgcagctacttaggtaaggattaacaaaatagtttagcctgttggttatactgtttgttatatggcttagttgtcttcacttttctgtgaaacggtgtgtgttagcatagtgagaggatgcttttccttgctgtttttgaagacttatattcctgttctctaaatcaaattctgtt

SEQ ID NO: 6320 - DNA, 600 bp, Chicken  19866894110386_1
ttcccagaaaaatcttaccttttccaacagggagtcttggaagaatgtttatttcaagcatttccagtcaaagtcccctggcagcactccacagtgccatggctttcggtgctagacacaaagaggcaactcctctccacaaggtttaagatgtggggagtatttcagtttcatggttccacaccagtgacaagcctcaccaattgaaacaaagacattgcagtttccacctgctctggaactgtgaaattacaccagaatttcagttttcacagcatcctcctgtcctgctatgtctawcagtgagatcctgaaactaaaactaaacacaaggtaaattttgcaatccttagttcttgtcactgaatttttcttttttaaaatttcatgaaaatgtaatgaatgcagttaatttcgtctgaatctgctgacaggtctgggagaactgttttaattactacttcacaactttaagggatacactgtttcagaggagcgttcaagcattagcctgtgcttagggctagatgaaaagagtacttgagcctgttcacctgcacagatgtacctggtgttctgctatgctaactggaaagatag

SEQ ID NO: 6321 - DNA, 600 bp, Chicken  19866894110388_1
tgttacagcttctagtgacaaactctacgtgggctgtagcagtaccgatgccattcaccgacactacaaaagaaaatcagtgtatctgatcacagacaaacttacctcctcagataaacaagtgcaagacacactttttgtctgaacggctttaatagcaattaataaatttgctctaataaaaatcttgctggcaaagagcccttaaacgtgacattatttacataatttcctgcgaagaacagctgcgtagccctccactctggccataacttctcagttgtagtgctcacgcacccraacgttgcaaatcttaacgcacctgcctggcatttatgatgcagagcagcttatggaagaggtgtgcctctgggaaagcagcacctcacatgtgcaacgtaaacatcaacagtgtcatctgggtctagatctgcagtcagatccatactggtaaccactgggatgcattatattgggctcatatttactgctggcttttaattagtctgcatagttcatttccacatctgctttcctataaacaaaccactaattagttcagtgagtcagttaaaaactgtaccattgtgccagatagtt

SEQ ID NO: 6322 - DNA, 600 bp, Chicken  19866894110392_1
ggggttcttatgggaaagttttatgagttaggtttaaaattatttgcctgactttatctgatttactggctggtaatgtatcctttgttttacagtccttttacattcttggggtgcaaacctttgcataatggtctgttctgtctgcaacccatcaataacaaaaagactccaggcttattgagatgaattcagagtggagtcatatttactactggcctactgatttgcttctactctgttgctttaaaaagctaccatgcgtaatatgtctgtcttaaactctcttgaaataaaacwttttttwaaaaaaaaaaaaccttaatgattcttgaactccagatatatttctatcttgattgttgagaggtgactcattaaagagcatttttccatctgtctgcagaaacagtttcatatctcctcctgaagggtgtagagtcactggaataatggtcttctcttgtattaawagaattctgattgcacatgatggcctattttctttaccttaataaagttgttctgtccatttggcagcrgtaagtgatttgatggaaatcctcaaaatttcagaaacatgacttttatggctcttag

SEQ ID NO: 6323 - DNA, 600 bp, Chicken  19866894110392_2
ttatgggaaagttttatgagttaggtttaaaattatttgcctgactttatctgatttactggctggtaatgtatcctttgttttacagtccttttacattcttggggtgcaaacctttgcataatggtctgttctgtctgcaacccatcaataacaaaaagactccaggcttattgagatgaattcagagtggagtcatatttactactggcctactgatttgcttctactctgttgctttaaaaagctaccatgcgtaatatgtctgtcttaaactctcttgaaataaaacwttttttwaaaaaaaaaaaaccttaatgattcttgaactccagatatatttctatcttgattgttgagaggtgactcattaaagagcatttttccatctgtctgcagaaacagtttcatatctcctcctgaagggtgtagagtcactggaataatggtcttctcttgtattaawagaattctgattgcacatgatggcctattttctttaccttaataaagttgttctgtccatttggcagcrgtaagtgatttgatggaaatcctcaaaatttcagaaacatgacttttatggctcttagtaacagt

SEQ ID NO: 6324 - DNA, 600 bp, Chicken  19866894110392_3
aggcttattgagatgaattcagagtggagtcatatttactactggcctactgatttgcttctactctgttgctttaaaaagctaccatgcgtaatatgtctgtcttaaactctcttgaaataaaacwttttttwaaaaaaaaaaaaccttaatgattcttgaactccagatatatttctatcttgattgttgagaggtgactcattaaagagcatttttccatctgtctgcagaaacagtttcatatctcctcctgaagggtgtagagtcactggaataatggtcttctcttgtattaawagaattctgattgcacatgatggcctattttctttaccttaataaagttgttctgtccatttggcagcrgtaagtgatttgatggaaatcctcaaaatttcagaaacatgacttttatggctcttagtaacagtgaatgtgtgatcttttacccttttagaggaaaagtgctgcacaaatagagtacagcacagctcagtggatgaactttaccccgctcaattccaggtttacaaaaagcttgagcatcctttgaaattattgtttattatgagcagaatgctcttgtcttttggagag

SEQ ID NO: 6325 - DNA, 600 bp, Chicken  19866894110392_4
tgctttaaaaagctaccatgcgtaatatgtctgtcttaaactctcttgaaataaaacwttttttwaaaaaaaaaaaaccttaatgattcttgaactccagatatatttctatcttgattgttgagaggtgactcattaaagagcatttttccatctgtctgcagaaacagtttcatatctcctcctgaagggtgtagagtcactggaataatggtcttctcttgtattaawagaattctgattgcacatgatggcctattttctttaccttaataaagttgttctgtccatttggcagcrgtaagtgatttgatggaaatcctcaaaatttcagaaacatgacttttatggctcttagtaacagtgaatgtgtgatcttttacccttttagaggaaaagtgctgcacaaatagagtacagcacagctcagtggatgaactttaccccgctcaattccaggtttacaaaaagcttgagcatcctttgaaattattgtttattatgagcagaatgctcttgtcttttggagagagtgtaacatctctcagaacatatatacacaccagtggtattacacaagagaaatgaaaccttggtttt

SEQ ID NO: 6326 - DNA, 600 bp, Chicken  19866894110405_1
aggatatatctctggtgatgaagctgtggtgcatggcaccagcatcaccctatcatctgaaaaacccagctgaagggatccatcagcctcttttcatgtcaccctctgcagatatcaatgagtgtgagcgagacccactgctgtgccgaggtgggatctgcatgaacactgacggcagctttgaatgcatctgcccccctggacatgagctgacttcagaagggaacacttgcataggtaagatgatggaaagctatgttatgaccagagtctggtcaagataatgatgtggtgagaacygagtgtcatgctgggcccaggaatgtccttccaatcccttgcatgactagaatacattcagccaggaagggctgaggttaccctcaagaattcattgtgtttaggatgtctcttattctaactgctgttcactgaagactgagcaatagggtgatgctaaggcaatggaaaatctgagtttccttctaactgctgtgtctcttatctttaccagtaaatgaaatatcatttcctagacctggagccccatgacctctacccacacagatctatacaccccaactcttaatctcccaagca

SEQ ID NO: 6327 - DNA, 600 bp, Chicken  19866894110406_1
agtatgtcatcctttatctaagattattttccttctttttttttctttcccctaataaccctctctattatcttctctggcttttgatcttttatgggtaactgcattcactgttaactgagacacttcattgctcattgttcataagttccccacacttccaatactatttaatttgggagggtggagattgtaaaactgaatgcgggtgggaaaaagagaaagggtagctgagcaggcttacaaagacattcacatcatgtgtccaaggatgttgttagtattagacttggtcatgargggaagatcggaggccaaacccacatcattccccacttaggtgagcattggttcattttctttccattcttacaggtacatcaacttgtaactcttagaagtttagatgccacatttctttcaaaggcagtttctttgcttataaagcgtaggaatccttaattaagcatactgccctcttaaacacctttgtcattaattatgaatgtgaacaatcaaatattctatcctcataataatgctaagattagattaatatcaactctgaactctaggatgacctccatagttcagaaacaa

SEQ ID NO: 6328 - DNA, 600 bp, Chicken  19866894110412_1
agacaacctcagatcagtaatatctagaggaaatggctctttattttcatagaatcacagaatcattaaggttggaaaaaaacagtaagatcatctagtccaaccaccatcctaccacaccatgcccactgacaacttccctcagtgccacatccacacagttcttgaacacctccagggacagcgacgccaccacctccctgggcagctgtgccactgcctcaccactcttttggagaagacatttttcctgtcaaaatattgctgttagttactttgaagaaatacttagtttgttasctcrtaagaaatgaaactactgcagtggaagtatttcttacaaaagcaacagtaatatctttcttcattcttgtacatatatctccttaccttcaattttcttctgtggttgaaagtgaagtactgryttcaactgttttaactagctttcagttttcacaagatttttcctggtatcaaataaaaggtttttataagacagataatataatttttctttgttaaaaataagagaataacagtgaaacttagttgtgaaggagggtggaaagagtaagtaatggttagattaaccatact

SEQ ID NO: 6329 - DNA, 600 bp, Chicken  19866894110412_2
aacctcagatcagtaatatctagaggaaatggctctttattttcatagaatcacagaatcattaaggttggaaaaaaacagtaagatcatctagtccaaccaccatcctaccacaccatgcccactgacaacttccctcagtgccacatccacacagttcttgaacacctccagggacagcgacgccaccacctccctgggcagctgtgccactgcctcaccactcttttggagaagacatttttcctgtcaaaatattgctgttagttactttgaagaaatacttagtttgttasctcrtaagaaatgaaactactgcagtggaagtatttcttacaaaagcaacagtaatatctttcttcattcttgtacatatatctccttaccttcaattttcttctgtggttgaaagtgaagtactgryttcaactgttttaactagctttcagttttcacaagatttttcctggtatcaaataaaaggtttttataagacagataatataatttttctttgttaaaaataagagaataacagtgaaacttagttgtgaaggagggtggaaagagtaagtaatggttagattaaccatactcagc

SEQ ID NO: 6330 - DNA, 600 bp, Chicken  19866894110412_3
actgacaacttccctcagtgccacatccacacagttcttgaacacctccagggacagcgacgccaccacctccctgggcagctgtgccactgcctcaccactcttttggagaagacatttttcctgtcaaaatattgctgttagttactttgaagaaatacttagtttgttasctcrtaagaaatgaaactactgcagtggaagtatttcttacaaaagcaacagtaatatctttcttcattcttgtacatatatctccttaccttcaattttcttctgtggttgaaagtgaagtactgryttcaactgttttaactagctttcagttttcacaagatttttcctggtatcaaataaaaggtttttataagacagataatataatttttctttgttaaaaataagagaataacagtgaaacttagttgtgaaggagggtggaaagagtaagtaatggttagattaaccatactcagcttttgttcttcctgaggtagtgaagactgaagtactgaagaaagaggtgctgaaaacagtgggacaaagcaaaggacaagtccttggggctacacttagagggttttgaaagaaatggtgaaa

SEQ ID NO: 6331 - DNA, 600 bp, Chicken  19866894110412_4
ctgacaacttccctcagtgccacatccacacagttcttgaacacctccagggacagcgacgccaccacctccctgggcagctgtgccactgcctcaccactcttttggagaagacatttttcctgtcaaaatattgctgttagttactttgaagaaatacttagtttgttasctcrtaagaaatgaaactactgcagtggaagtatttcttacaaaagcaacagtaatatctttcttcattcttgtacatatatctccttaccttcaattttcttctgtggttgaaagtgaagtactgryttcaactgttttaactagctttcagttttcacaagatttttcctggtatcaaataaaaggtttttataagacagataatataatttttctttgttaaaaataagagaataacagtgaaacttagttgtgaaggagggtggaaagagtaagtaatggttagattaaccatactcagcttttgttcttcctgaggtagtgaagactgaagtactgaagaaagaggtgctgaaaacagtgggacaaagcaaaggacaagtccttggggctacacttagagggttttgaaagaaatggtgaaac

SEQ ID NO: 6332 - DNA, 600 bp, Chicken  19866894110416_1
ccacgagcctatttatcataataaagttaagaagcttttggtaattactggcagtgtgacagatattgtctcataggggtgtatctcaagcccatgagaataactgaggacaaaactgaaagataaattttgcagttgtacctacccaataaggtctcaattgactttatcatggctgtatctggcccaggagttctgctgagatcagacagtttgctgtctttaatgtttgtctttagtgatggcaattaaactctccattttgtcataaaatggaaatagtgaagtttgttataaatygagttttgratcaaaacaggaatttctttatcttgaatgctaagtgcagtctgatgcaacttttgttttgtttttgtatgagcttcttgtgttattgtgatgcttcgtatcatcagcttcttgtttgcctctgcaggaaggaacagccatgcttctggaacacctagctgggagcttggcttctgcaatccctgtgagcacgcaattagacattgcagcgcagcatcatctctttatgatgggtcgaaatggcagtaacatcaaacatatcatgcagaggactggtgctcagatccattt

SEQ ID NO: 6333 - DNA, 600 bp, Chicken  19866894110416_2
tatttatcataataaagttaagaagcttttggtaattactggcagtgtgacagatattgtctcataggggtgtatctcaagcccatgagaataactgaggacaaaactgaaagataaattttgcagttgtacctacccaataaggtctcaattgactttatcatggctgtatctggcccaggagttctgctgagatcagacagtttgctgtctttaatgtttgtctttagtgatggcaattaaactctccattttgtcataaaatggaaatagtgaagtttgttataaatygagttttgratcaaaacaggaatttctttatcttgaatgctaagtgcagtctgatgcaacttttgttttgtttttgtatgagcttcttgtgttattgtgatgcttcgtatcatcagcttcttgtttgcctctgcaggaaggaacagccatgcttctggaacacctagctgggagcttggcttctgcaatccctgtgagcacgcaattagacattgcagcgcagcatcatctctttatgatgggtcgaaatggcagtaacatcaaacatatcatgcagaggactggtgctcagatccatttccctgaccc

SEQ ID NO: 6334 - DNA, 600 bp, Chicken  19866894110416_3
ttctggaacacctagctgggagcttggcttctgcaatccctgtgagcacgcaattagacattgcagcgcagcatcatctctttatgatgggtcgaaatggcagtaacatcaaacatatcatgcagaggactggtgctcagatccatttccctgaccctagtaacccacagaagaaatccactgtctacctccagggcacaattgagtctgtctgtcttgccagacaatatctcatggtaaatactttcagttaaacttgcttatgaaaatgctaaataatggaaaatctaccctatccasattggtccaatgtaagtcaattttagagaagatggtttattacattgcgaaatgctagatcagctgagtgttctaattttgtcagtgttttgtgtgtgtttgtagttactcaaagtacttgtgatctgtggtagcatgagttgaaaaaaggctgtggcaatattaatgcggcataagcaatttgtatttatggtaactgtgcttccgctcctcctgagtggaaggcagacttggggggtgaggggtggaaaaggggaggagttattgctgtgtgctgtgttgccatcttctgcttgtctt

SEQ ID NO: 6335 - DNA, 600 bp, Chicken  19866894110416_4
agtaattttgttttaatttcttataactagaagaatctagacacttgtaccaagaaaagaaatgccactaatgtttgcagagttgacaatgtgcctttaatgtgtacctttgtttatgagatatgtcgtgttgcagtattcttcagaagttgcttaatagtatgtctgaatggaaacttaatattagctagtaactaatatcattgataagaccatctaaagtgtaaattgtgagtatacatgatctttgatagcgttgctagtcagttgcagtttctaatcatcagcatattgcttacwgagaaatattcatagtgttgtttaaggcgatgatcatagtgatgaaggccaactgtaaaaggaagaaagaagatgtagtgatttttaactagtagactgagtgagaggggttcgggtcttgataaaatattcttgttctgtcttcctctcatccctaacccattggttttatccatatttttataatcactaaaaaagtagacttaatatgttggttaggcatacggtattttggactgtgttgtatttaattatggacaatattgacaaatcattttcattcattcatgttgtattgaa

SEQ ID NO: 6336 - DNA, 600 bp, Chicken  19866894110431_1
ttcctttttgtagcatactgcagttgtgaccaaaaaccccacttcccactgctgtctttaagtggtatctcttaactcgagacttgagtctgccaaggattgaacagaaggatacagagaaaaggaggcatccctgggaagcggtgctgtcagagcaggctttgcgcacttcagcagggctgcatggaaagtctgtggtagttcatagtgtagctttttgttccgagtctggattccttctgattatagtcatccagcacttttatacaagcacaaaatgcggtctggcttaagcttcartttgtgtctctctttgaagaaggtgtaatcactgcttcgcaccactaagtggagtgagaatgttagtgttaaaggtactaacagagcgtagcgagctgcttgctaaaagttgacagatgccttaatgacttcctgtgctggagatcaatggctcrtacaacttctcacatagtgcttagaaattaacatgtaacgacatgggaggcccaggctggatttttttcttagtaggcaactcctgttttttcctttaaccagcagagtttgaatactgcagcaaacttcgttaactcaaagctt

SEQ ID NO: 6337 - DNA, 600 bp, Chicken  19866894110431_2
caggctttgcgcacttcagcagggctgcatggaaagtctgtggtagttcatagtgtagctttttgttccgagtctggattccttctgattatagtcatccagcacttttatacaagcacaaaatgcggtctggcttaagcttcartttgtgtctctctttgaagaaggtgtaatcactgcttcgcaccactaagtggagtgagaatgttagtgttaaaggtactaacagagcgtagcgagctgcttgctaaaagttgacagatgccttaatgacttcctgtgctggagatcaatggctcrtacaacttctcacatagtgcttagaaattaacatgtaacgacatgggaggcccaggctggatttttttcttagtaggcaactcctgttttttcctttaaccagcagagtttgaatactgcagcaaacttcgttaactcaaagcttgtatgagtgatttaaataagtaattgaaccttctagcctccgtgaaatagaaaaggaagtcttacaacaatggcattttatctgcgatgtttgtctggagtcattgtaaaaatgtatttttccaatatgcattactttgttgtgtaataattcta

SEQ ID NO: 6338 - DNA, 600 bp, Chicken  19866894110442_1
tcccagtcagcctgctggagtggtgagacaattcttccatgtcacccatgaagaagcatgatttgagtgtgcacgtatacaagttagcttgatttcctctcctggatgggaaggtcatgctgttaaagtcttctttttatgagggtctttctggtcattattctttttcacttctgcatttgaaaagataaagcttttctaggttttgagagtgttgtgggaatgaatgtttttgccgtggaggtaatctgtgtatggcatggaaacagccaggagaaactgtaaccaaactcattcctkggctatgaggaagggtctgcgttgttcagggcaacctggtccctrctggtgatgsagctggcacaggcatgggccaggctgctgggcaggggtaagatgttcccttgaaggaatcactcctttractgttttctaaacctgttcacttccactgcaagwaggagggggctaaaaagcaactgatctgtttagtggcttctttccttagtcctcttaaccccctgtcttcatctcgggtttttttggaaactgaacatgtgcagagaggaaggaagtcctggtgcagcctctcaagcacaa

SEQ ID NO: 6339 - DNA, 600 bp, Chicken  19866894110442_2
ccatgaagaagcatgatttgagtgtgcacgtatacaagttagcttgatttcctctcctggatgggaaggtcatgctgttaaagtcttctttttatgagggtctttctggtcattattctttttcacttctgcatttgaaaagataaagcttttctaggttttgagagtgttgtgggaatgaatgtttttgccgtggaggtaatctgtgtatggcatggaaacagccaggagaaactgtaaccaaactcattcctkggctatgaggaagggtctgcgttgttcagggcaacctggtccctrctggtgatgsagctggcacaggcatgggccaggctgctgggcaggggtaagatgttcccttgaaggaatcactcctttractgttttctaaacctgttcacttccactgcaagwaggagggggctaaaaagcaactgatctgtttagtggcttctttccttagtcctcttaaccccctgtcttcatctcgggtttttttggaaactgaacatgtgcagagaggaaggaagtcctggtgcagcctctcaagcacaaggtgagggataggaggaagaacctcagaagctgatgggggaagga

SEQ ID NO: 6340 - DNA, 600 bp, Chicken  19866894110442_3
gcatgatttgagtgtgcacgtatacaagttagcttgatttcctctcctggatgggaaggtcatgctgttaaagtcttctttttatgagggtctttctggtcattattctttttcacttctgcatttgaaaagataaagcttttctaggttttgagagtgttgtgggaatgaatgtttttgccgtggaggtaatctgtgtatggcatggaaacagccaggagaaactgtaaccaaactcattcctkggctatgaggaagggtctgcgttgttcagggcaacctggtccctrctggtgatgsagctggcacaggcatgggccaggctgctgggcaggggtaagatgttcccttgaaggaatcactcctttractgttttctaaacctgttcacttccactgcaagwaggagggggctaaaaagcaactgatctgtttagtggcttctttccttagtcctcttaaccccctgtcttcatctcgggtttttttggaaactgaacatgtgcagagaggaaggaagtcctggtgcagcctctcaagcacaaggtgagggataggaggaagaacctcagaagctgatgggggaaggaggtgtggagg

SEQ ID NO: 6341 - DNA, 534 bp, Chicken  19866894110442_4
aaagtcttctttttatgagggtctttctggtcattattctttttcacttctgcatttgaaaagataaagcttttctaggttttgagagtgttgtgggaatgaatgtttttgccgtggaggtaatctgtgtatggcatggaaacagccaggagaaactgtaaccaaactcattcctkggctatgaggaagggtctgcgttgttcagggcaacctggtccctrctggtgatgsagctggcacaggcatgggccaggctgctgggcaggggtaagatgttcccttgaaggaatcactcctttractgttttctaaacctgttcacttccactgcaagwaggagggggctaaaaagcaactgatctgtttagtggcttctttccttagtcctcttaaccccctgtcttcatctcgggtttttttggaaactgaacatgtgcagagaggaaggaagtcctggtgcagcctctcaagcacaaggtgagggataggaggaagaacctcagaagctgatgggggaaggaggtgtggaggtgg

SEQ ID NO: 6342 - DNA, 499 bp, Chicken  19866894110442_5
attctttttcacttctgcatttgaaaagataaagcttttctaggttttgagagtgttgtgggaatgaatgtttttgccgtggaggtaatctgtgtatggcatggaaacagccaggagaaactgtaaccaaactcattcctkggctatgaggaagggtctgcgttgttcagggcaacctggtccctrctggtgatgsagctggcacaggcatgggccaggctgctgggcaggggtaagatgttcccttgaaggaatcactcctttractgttttctaaacctgttcacttccactgcaagwaggagggggctaaaaagcaactgatctgtttagtggcttctttccttagtcctcttaaccccctgtcttcatctcgggtttttttggaaactgaacatgtgcagagaggaaggaagtcctggtgcagcctctcaagcacaaggtgagggataggaggaagaacctcagaagctgatgggggaaggaggtgtggaggtgg

SEQ ID NO: 6343 - DNA, 600 bp, Chicken  19866894110450_1
attaaattgtactaaaatattcatatgtgagtgcatttagctgaaagcaattgatgtgcttttccctagagagcaaaaagaaattgctgtatggccctgcactccagcagacaccctaaccacgcttaagagtaattacatagcttgtctcatcagaggcactcgcagtgaagaagagactgtagctgggatgcagtttagtaatgtgcccttcttgaatggggcatattggacagcatcactgccgagtgcaggatattgtttgatatacagtgtgatataggaacttgtgtgaagccwgcacacrttttattccagttacatttggaattacaaaaaataacttggtgtgtaattgcataaaattacgttttatttggtcaatagcttgcagttgggaggaatctcatgtatgaggcagttcttacgatggcttctaattcctttgtcctttcacycttgcaaaggagataaaatgagctgcctttaaaaagaggacgtgtgcctaaggagtttatcagaccagcttgtttaaatgcacrccactgatagggtgatcagctgatgtacactgaaggttttcggtataattcaagggtt

SEQ ID NO: 6344 - DNA, 600 bp, Chicken  19866894110450_2
tgtactaaaatattcatatgtgagtgcatttagctgaaagcaattgatgtgcttttccctagagagcaaaaagaaattgctgtatggccctgcactccagcagacaccctaaccacgcttaagagtaattacatagcttgtctcatcagaggcactcgcagtgaagaagagactgtagctgggatgcagtttagtaatgtgcccttcttgaatggggcatattggacagcatcactgccgagtgcaggatattgtttgatatacagtgtgatataggaacttgtgtgaagccwgcacacrttttattccagttacatttggaattacaaaaaataacttggtgtgtaattgcataaaattacgttttatttggtcaatagcttgcagttgggaggaatctcatgtatgaggcagttcttacgatggcttctaattcctttgtcctttcacycttgcaaaggagataaaatgagctgcctttaaaaagaggacgtgtgcctaaggagtttatcagaccagcttgtttaaatgcacrccactgatagggtgatcagctgatgtacactgaaggttttcggtataattcaagggttgacataa

SEQ ID NO: 6345 - DNA, 600 bp, Chicken  19866894110450_3
gcactcgcagtgaagaagagactgtagctgggatgcagtttagtaatgtgcccttcttgaatggggcatattggacagcatcactgccgagtgcaggatattgtttgatatacagtgtgatataggaacttgtgtgaagccwgcacacrttttattccagttacatttggaattacaaaaaataacttggtgtgtaattgcataaaattacgttttatttggtcaatagcttgcagttgggaggaatctcatgtatgaggcagttcttacgatggcttctaattcctttgtcctttcacycttgcaaaggagataaaatgagctgcctttaaaaagaggacgtgtgcctaaggagtttatcagaccagcttgtttaaatgcacrccactgatagggtgatcagctgatgtacactgaaggttttcggtataattcaagggttgacataaaaatctatagcagctgacagccctcttgcagagtaactacctcctcttgtgttgcacctgtgaaagatgcaccgtcgtaccctacagcattcaaaatcactgtaagttgcagctaaaaactgtacttgtcattctcctacataaatgtagt

SEQ ID NO: 6346 - DNA, 600 bp, Chicken  19866894110450_4
tgccgagtgcaggatattgtttgatatacagtgtgatataggaacttgtgtgaagccwgcacacrttttattccagttacatttggaattacaaaaaataacttggtgtgtaattgcataaaattacgttttatttggtcaatagcttgcagttgggaggaatctcatgtatgaggcagttcttacgatggcttctaattcctttgtcctttcacycttgcaaaggagataaaatgagctgcctttaaaaagaggacgtgtgcctaaggagtttatcagaccagcttgtttaaatgcacrccactgatagggtgatcagctgatgtacactgaaggttttcggtataattcaagggttgacataaaaatctatagcagctgacagccctcttgcagagtaactacctcctcttgtgttgcacctgtgaaagatgcaccgtcgtaccctacagcattcaaaatcactgtaagttgcagctaaaaactgtacttgtcattctcctacataaatgtagttccaactgcctcgaggtggcctaaggggttttaaaatattctcatcagtaaaagtgaagtaatgttatatgccaccagaaatgg

SEQ ID NO: 6347 - DNA, 600 bp, Chicken  19866894110454_1
cgaacatgtcaaaggccttactgaagtccaggcagataacatcagtggcttttccttctaactggtatttatgccatcataaaaagccccgaggttaatcaggtaagatttgcccttggtgaagccatgctaattattctatatcacctctctgtctcatgggcttgagtatagcttccagaaagttctgctccatgatcttccctggcacagtggggaggctgacaggtcagtaactccctggatcatcctttctactcttcttaaaaatgggtgcatctgactgccatgacttttcamatatcattgagagtggccaagtgacacatcagacaattccatcaggactctgggatgcatctcatcaggactcttagaattaaggatgttctgattcctcaggcggtcatgaacctgatctttgcttacagtgggaagggcatccctcccccagttcccatcttctgaactacctacttgagggccatcactagtgaagactgaggcaaaaaagttattgaatacctcagtcttctccctgtctgttgtttctagatgctatttaagagctgagaaattcccttcatttttactataaaa

SEQ ID NO: 6348 - DNA, 600 bp, Chicken  19866894110473_1
aaaaaaaaagggattcagaaaaaggtctttctcacttccttgataatttgctgaaaaaccaaaccaaacaaagcaagaaaaccctgaaaaagcaacagtacttctaccagaaaacaagtttaaaatcatgaagttcttgcatcctcaacatgggaacaggcattatatcttagtctttaagtagttcatttggtctgaagtaagagagaaactaatgtgtaagaatagcataactggcccttaggaatatgtcttgatccaaatgtaaattccatggaagctgtaaattgaagtaagtgragttacaactgaggaagaaattagatattatatcagtattgctatgttttaggataatgatgaaattgttctatggcaatagacacatactttctcattatttaataacattttaaatacttgtgcgcatgttttaattgttaatacttaatatatagaaatagcatttctcagtttgtcatgaatgttgatttaacatagtgcatttgctttgactcttcgttttcaataaacttcagtgctgagattgaaggatttactgtatctatttcaaataacwttacatagaaggaaaaaccc

SEQ ID NO: 6349 - DNA, 558 bp, Chicken  19866894110473_2
ctgtaaattgaagtaagtgragttacaactgaggaagaaattagatattatatcagtattgctatgttttaggataatgatgaaattgttctatggcaatagacacatactttctcattatttaataacattttaaatacttgtgcgcatgttttaattgttaatacttaatatatagaaatagcatttctcagtttgtcatgaatgttgatttaacatagtgcatttgctttgactcttcgttttcaataaacttcagtgctgagattgaaggatttactgtatctatttcaaataacwttacatagaaggaaaaacccaggttatttgattttcagtaaaacttctggtaaaattagaattcttatggacttatctctggctctttgaaaataagagaagtcaatttataaatgtgaagtcgaagtacagactggtgcaggagggagtgacagcaagaaaatagtgggcattgtattatacattaccaaagagtgtcataaattgaacccttgtatataaatttaacatatcatatacaggtgtattaaaaagaac

SEQ ID NO: 6350 - DNA, 600 bp, Chicken  19866894110477_1
ataattccctttaaggcaaaacatcggtgtttaaactatgctcaagcacagaacgtctatccccttacatcctcctcccagtgaatcacctccaaaaaatgcttacattccaccaacacgagacagagacgcacgactcctccaaacgaggaatgtactgaagccaatctaatttccctataattgctttgttcccttcctataccatggacagagacctacagactttttccccagctgccctctatttgtgacacatcgctggcatggaaatcccaactgctgtagcctcaaccccawctcggtctgggaaaacacaacggrattccctttaggagcgcaaaaatcttatccaaaggatatctgctgcgcaatgcttcccatccccccacatcaccccctgtatcccaacattttcaaagcactctcacaacacagacgctgcagaaatagttttctctttcattttcctctgagcagtgcttctatagaatacgagagaccagacttgctcctaggaacatctgagcaggcaccaggtttcattcaaacacagttttatgagaaaatacctgacatgttgttaaatgtcaggaatac

SEQ ID NO: 6351 - DNA, 600 bp, Chicken  19866894110477_2
cggtgtttaaactatgctcaagcacagaacgtctatccccttacatcctcctcccagtgaatcacctccaaaaaatgcttacattccaccaacacgagacagagacgcacgactcctccaaacgaggaatgtactgaagccaatctaatttccctataattgctttgttcccttcctataccatggacagagacctacagactttttccccagctgccctctatttgtgacacatcgctggcatggaaatcccaactgctgtagcctcaaccccawctcggtctgggaaaacacaacggrattccctttaggagcgcaaaaatcttatccaaaggatatctgctgcgcaatgcttcccatccccccacatcaccccctgtatcccaacattttcaaagcactctcacaacacagacgctgcagaaatagttttctctttcattttcctctgagcagtgcttctatagaatacgagagaccagacttgctcctaggaacatctgagcaggcaccaggtttcattcaaacacagttttatgagaaaatacctgacatgttgttaaatgtcaggaatacttcatttcctctatgtagtattca

SEQ ID NO: 6352 - DNA, 600 bp, Chicken  19866894110477_3
atcttatccaaaggatatctgctgcgcaatgcttcccatccccccacatcaccccctgtatcccaacattttcaaagcactctcacaacacagacgctgcagaaatagttttctctttcattttcctctgagcagtgcttctatagaatacgagagaccagacttgctcctaggaacatctgagcaggcaccaggtttcattcaaacacagttttatgagaaaatacctgacatgttgttaaatgtcaggaatacttcatttcctctatgtagtattcaaagttcatacaaaatttaacragaaatgaaagaggcctctggtgcagctctaaatgcattgaacaaaacgtgaccaatttaataaaacaaaagcacacaagaaataagctgccacaggaatataaacaagaaattcctcgtaaagaaaaaaaaggagtgcctaaagaggaaagaggtgaagggcgaagcaaatctgcaaggagaaggtcaggctgagcaacaataaaagaagtacgtttagcctggaaaacaaaggttgacagaaaagctggagtgcttcctttcactgaccctgccaaaaccttttctaaatcatggctt

SEQ ID NO: 6353 - DNA, 600 bp, Chicken  19866894110478_1
gctatctgaacagaccttgcattttctctctctttacactaagacagaagacccctagaagagtcagtcaatctgttagcctgaagagctcaccctggagtttaagcgcaggactgcctggtctcattgttcaagaggagtacccgaccctttgttggtagcagatgctaccaaaaagggatccaaatactactcataattgatgcacatcaaacctaacaatttggcacttagatttccaagcagccaactgatacttatagtgcaagtgaccataataagaacgtgactggccactaytgaatttatgaagactttaatttaataattcaacagtcctggtcatcctttcagctttaaattctaaacttcctccatgacaaggtttccacattacaagcttctgttataccgatcagaaaactgtgaagtctttcccccacaaaatagcatgttctttctcctgtttcaagggcctgggtctaattttgccatacttgcatgcctaccagcttttactactactaaactagtaaaatgtcagttatcatcaggtaatgagctaattaatattcatttctcctatcaggcataatgcaa

SEQ ID NO: 6354 - DNA, 600 bp, Chicken  19866894110484_1
aaattagcaagtctactaagacagggaaatcttggctcaaaccccaaccatatggaagatctgtctccagatcttagcgctgctgcctcacatcaagtaccatctcagtgggatataccctacagtctcctcctactgaagatgttttccctcttttccaagcccagttatttcacacagtcattcattctgaacaggcatctgggagtttcctgtacacaacagtgcctataaatccaactcacagttcacattcagtacaattcctctgagagtacgaggttactaataaggccatcygaaatgctatgcttggcttctacctgctttgataaaacaagcaagcaacacctgtcttttttacaatttgtcaktttcattttgccttcaaaaacagcactcttttgatcacagcctatgttccctcattaaatctcacagccttaccaggaacagaagcctctggtgatgacactacctggggtttgccaaataactcctgcatcacaaaggagactgaaaaccttggacccacataccagttggccttccaatgtgagtacactccattcctaagtcggttcacaggttgtctctata

SEQ ID NO: 6355 - DNA, 600 bp, Chicken  19866894110484_2
tagcgctgctgcctcacatcaagtaccatctcagtgggatataccctacagtctcctcctactgaagatgttttccctcttttccaagcccagttatttcacacagtcattcattctgaacaggcatctgggagtttcctgtacacaacagtgcctataaatccaactcacagttcacattcagtacaattcctctgagagtacgaggttactaataaggccatcygaaatgctatgcttggcttctacctgctttgataaaacaagcaagcaacacctgtcttttttacaatttgtcaktttcattttgccttcaaaaacagcactcttttgatcacagcctatgttccctcattaaatctcacagccttaccaggaacagaagcctctggtgatgacactacctggggtttgccaaataactcctgcatcacaaaggagactgaaaaccttggacccacataccagttggccttccaatgtgagtacactccattcctaagtcggttcacaggttgtctctatagtcttttttggctgcaatcaacacatgatcctactggccagccactgtaccagttacagtttcttcttgtgcta

SEQ ID NO: 6356 - DNA, 600 bp, Chicken  19866894110486_1
agcctggtcaaaatgtctgtaaaacagtattcaggataatctgctaatgaactgctgtgttggcagctagtttggtgtcaagcggttctgccttttgttttaatagcctagctgaagaggcttaacctttaacattcacagtgagactctgctggccagcagccacctttactgttgaaaatctgcagtcgttggcaaaaggtctgtcctgcagtccattgagttcctgccagtggaagacttaaggaaagtactgcttctcctaatggttgttgctactgcaagcagacacgctgtacygtctaaggcctgggtgaatggtaaatagcctgaaagcttcactgacacctcacatatgataacctaataacacatctttgtttttctcataggtatttaatctctgatacaacagcgaagatactgcagtggtgtcagcctatctcagggccaaattttatatatatatatatatatatatatatatatatatatattttttttcagctcaagactgaacataataaattcactgcagaggacgcgtgctcatttaagtgtgtaaaatacagaccttaacaattcatagtaagtgattca

SEQ ID NO: 6357 - DNA, 599 bp, Chicken  19866894110491_1
  misc_feature (1)..(48): n is any nucleotide
nnnnnnnnnnnnnnnnnnnnnnnnnnnnnnnnnnnnnnnnnnnnnnnnctgcagatttccaccttcagagctaatacgtaagaacattacctctaacacactggggtcttagctcctaagtgctatttgttgagttgcataaataatcacaagtctacacagttttaaaggtttgtagtattcatgtcaaattttatgccaagtaatatgctacaatgtaagggaaattacagtttggagagactatcctgtcaggtccaggtttggtgaaggagacaaaaatcttgctctcactctcaraagcaaaaatatttgtcagaagcgtttgggcttgtctgaggcctcttttgttgtttgtttcttsttacgattatgaagatgtgccttgagggagrggtcagcttataaactcctagttgagaaacrtactcatctggattgactgtgctgaaatatattgkctggaaaaatcttttggtgagaggaggctttctaagaacaaaagagtgaaatcatcattattcactgtagtgcacgcactaaagatgctagagtaaagaaaaataaaacttagtgtgaaaatcttgctcaaatgtttg

SEQ ID NO: 6358 - DNA, 600 bp, Chicken  19866894110491_2
tcagagctaatacgtaagaacattacctctaacacactggggtcttagctcctaagtgctatttgttgagttgcataaataatcacaagtctacacagttttaaaggtttgtagtattcatgtcaaattttatgccaagtaatatgctacaatgtaagggaaattacagtttggagagactatcctgtcaggtccaggtttggtgaaggagacaaaaatcttgctctcactctcaraagcaaaaatatttgtcagaagcgtttgggcttgtctgaggcctcttttgttgtttgtttcttsttacgattatgaagatgtgccttgagggagrggtcagcttataaactcctagttgagaaacrtactcatctggattgactgtgctgaaatatattgkctggaaaaatcttttggtgagaggaggctttctaagaacaaaagagtgaaatcatcattattcactgtagtgcacgcactaaagatgctagagtaaagaaaaataaaacttagtgtgaaaatcttgctcaaatgtttgctctcatgagctgccaaaagccttgctagcaaatccgtacagaacttcaatgtcattctccagcc

SEQ ID NO: 6359 - DNA, 600 bp, Chicken  19866894110491_3
acacactggggtcttagctcctaagtgctatttgttgagttgcataaataatcacaagtctacacagttttaaaggtttgtagtattcatgtcaaattttatgccaagtaatatgctacaatgtaagggaaattacagtttggagagactatcctgtcaggtccaggtttggtgaaggagacaaaaatcttgctctcactctcaraagcaaaaatatttgtcagaagcgtttgggcttgtctgaggcctcttttgttgtttgtttcttsttacgattatgaagatgtgccttgagggagrggtcagcttataaactcctagttgagaaacrtactcatctggattgactgtgctgaaatatattgkctggaaaaatcttttggtgagaggaggctttctaagaacaaaagagtgaaatcatcattattcactgtagtgcacgcactaaagatgctagagtaaagaaaaataaaacttagtgtgaaaatcttgctcaaatgtttgctctcatgagctgccaaaagccttgctagcaaatccgtacagaacttcaatgtcattctccagcccctttattctgtagcctgatttgtactgaaa

SEQ ID NO: 6360 - DNA, 600 bp, Chicken  19866894110491_4
ttgttgagttgcataaataatcacaagtctacacagttttaaaggtttgtagtattcatgtcaaattttatgccaagtaatatgctacaatgtaagggaaattacagtttggagagactatcctgtcaggtccaggtttggtgaaggagacaaaaatcttgctctcactctcaraagcaaaaatatttgtcagaagcgtttgggcttgtctgaggcctcttttgttgtttgtttcttsttacgattatgaagatgtgccttgagggagrggtcagcttataaactcctagttgagaaacrtactcatctggattgactgtgctgaaatatattgkctggaaaaatcttttggtgagaggaggctttctaagaacaaaagagtgaaatcatcattattcactgtagtgcacgcactaaagatgctagagtaaagaaaaataaaacttagtgtgaaaatcttgctcaaatgtttgctctcatgagctgccaaaagccttgctagcaaatccgtacagaacttcaatgtcattctccagcccctttattctgtagcctgatttgtactgaaaaatgtatgtttctctttcagagtgcyttccc

SEQ ID NO: 6361 - DNA, 600 bp, Chicken  19866894110491_5
gttttaaaggtttgtagtattcatgtcaaattttatgccaagtaatatgctacaatgtaagggaaattacagtttggagagactatcctgtcaggtccaggtttggtgaaggagacaaaaatcttgctctcactctcaraagcaaaaatatttgtcagaagcgtttgggcttgtctgaggcctcttttgttgtttgtttcttsttacgattatgaagatgtgccttgagggagrggtcagcttataaactcctagttgagaaacrtactcatctggattgactgtgctgaaatatattgkctggaaaaatcttttggtgagaggaggctttctaagaacaaaagagtgaaatcatcattattcactgtagtgcacgcactaaagatgctagagtaaagaaaaataaaacttagtgtgaaaatcttgctcaaatgtttgctctcatgagctgccaaaagccttgctagcaaatccgtacagaacttcaatgtcattctccagcccctttattctgtagcctgatttgtactgaaaaatgtatgtttctctttcagagtgcyttcccaatggcactgtggtaattactgcaataaaattagt

SEQ ID NO: 6362 - DNA, 396 bp, Chicken  19866894110491_6
aaacrtactcatctggattgactgtgctgaaatatattgkctggaaaaatcttttggtgagaggaggctttctaagaacaaaagagtgaaatcatcattattcactgtagtgcacgcactaaagatgctagagtaaagaaaaataaaacttagtgtgaaaatcttgctcaaatgtttgctctcatgagctgccaaaagccttgctagcaaatccgtacagaacttcaatgtcattctccagcccctttattctgtagcctgatttgtactgaaaaatgtatgtttctctttcagagtgcyttcccaatggcactgtggtaattactgcaataaaattagtaagacttgcagatctggacaccagccttcttgtcttaagagacaaacagtgcaaac

SEQ ID NO: 6363 - DNA, 600 bp, Chicken  19866894110492_1
ggacccaaagcatgcaacagcaaattccccattgtccatggatctgcccacggacactactgttaccatcctggcagggtctagggcaacttttctgaaggaactgtaagtaattaagaaacagcttttacttccaaacaggctggtgagtatgtgaaacacaccagactctgccatactaactggaagccctcttcccagaaaggtggcactggtgatggtgctgctgatccctgtagattccaattgtctcctaacgtgagacacagtttgaaagagaagggggggtatacaagaagratgggagaaaatagctttaatctccaaatcccccaaactgtaatcctgcccatgcacaaacactctctccaataccaaacagagcttttacctccaaaaagcccacagggagtgggaatccccactttatatctgtagtaatagtagagcttggctaaagcagcagtgagtaatgagttattgggtaggtacatctgtgtcatggtaaatgagaaacaatctggttcccaaataccagtgggataaaggcttcctcagcagcagaaagcctccagctcttcccctgcccatcatagaatc

SEQ ID NO: 6364 - DNA, 600 bp, Chicken  19866894110492_2
ccaccaacattgcccatgtccctcagttccacttctccaggtttcttgaaggggatggtgactccaccacctccctgggcagggtgcaccggtctggggatggttttccttcttcatcctgttgctgtcaccctcggaaccagacctcaatctgtactgtttctttctcactcatccctgtgcagatcagggtggtaacatccctttccctgttcattgcaggagagttggactagatgacctttacgggtcccttccaactcaaatgattttatgattctatgatctgacaaagggcaragaaaatgggaagtgagctgggaagctggatggcccatggaaattttcccttcttttgcacaaagttgcttgggcttgagctgtgtggctactgagtgaatgtagcacaacaatgctctgctctctgattcgctatattttcctccagggtgttcttcctgaatggagagctcaccattggaaaaagcaatctcctgcatcttctctcttgcatttttgtccttccctccaaccctaccattttctgaggttatcgtagaacaagtagaagtccagctcttcattcttggctctgcagag

SEQ ID NO: 6365 - DNA, 600 bp, Chicken  19866894110495_1
ctctaagtcttttatctcttctttcctattttgcaggtttaatttctgtctctgtggtttgttaacctattcacctcagcatttgcatgacccaacagtaatagtagctgagtacctcaactacagatgaatttattctcataattttattgagggacacagaaatattactatccacatttagaaacagagaagaagacaagaacggattaacagatttgtccaaggtcatgaaagagctaggaacaaagttatgtctcttcagtggccagtctaacacttacacctttaagctaattytttctaaaaaaaaatctatttttttctttatattcatctcaatagcatatttatttttctttccatctgtagagtgcaatgtgctcttatttaagcttcctgacatatttccttgtccatttatgcaagatcatcaccctttattgtttcaccttcagccaataagaatgactcagtcttcttttccctatcgtaatcttccttgatccacaaggttccattctgtctccacatcccatgcaaaacactgaataaccttctgattatcacatttgtggaatacagtctcaaaagccacgt

SEQ ID NO: 6366 - DNA, 600 bp, Chicken  19866894110495_2
tcctaatggaattactatacaaatcacggacagtcaaatgaaggtttgcagaaggcctttaaaatatttcttgtgttttacattgctatgaaagcttatgttcatttcagtttgcttgatcacaactcctcatatgaatgctagaatactactactacttctacactatcagtgagcagtctgaccaagtactgtctgttacatctaagctgtatcaatacaactgaacaagacaagcacttattccttaatagtgcaactcttccttcaagtctctctttcttgaaactcttacagcaygtaatcaagtgaaatcaatgggatttgattttaagtgatacaaatattgcttactgtcatgtattctatttaaaatagaattaagcacagctagaataattcaaatactagagccattattcttttatatatcataagggcatcaatgtagatttattaaaagagaaagaattattcagacatttataattaaattatttttatagttaaagtccagtgtacattaaaaaaaaaattgctgaggctgaagatcaatgcaagtcttcacaatgcagaagctaatgccaacccagtggacaa

SEQ ID NO: 6367 - DNA, 600 bp, Chicken  19866894110495_3
ataagggcatcaatgtagatttattaaaagagaaagaattattcagacatttataattaaattatttttatagttaaagtccagtgtacattaaaaaaaaaattgctgaggctgaagatcaatgcaagtcttcacaatgcagaagctaatgccaacccagtggacaactttgagggcaatagtagagaaagaagtaaaaagcaggagctcttgtgagaagacaaattcactgcctttgaaaatcttacagagacaaacagttttaatatgcaagttatttggtgcttgcagtaggattaytgacatgtttagtcaattgtacttatcttggaagagtgggatccaaaaataatagcaatactcsataaactttacttcttacttggagcttaatttgactaaaaaaaaacaactatgaattccctttcaagttgctgagcatgggatttagttctcatttcagtataattacgaatactaagttcctttacagtaaaaaaaaaaaaaagtaacacttctagtctactaagaagagataacctgtttattacaaagttctaggctaaactgctttttgaaaatcagtctcacctgtcaaaa

SEQ ID NO: 6368 - DNA, 600 bp, Chicken  19866894110495_4
tttttatagttaaagtccagtgtacattaaaaaaaaaattgctgaggctgaagatcaatgcaagtcttcacaatgcagaagctaatgccaacccagtggacaactttgagggcaatagtagagaaagaagtaaaaagcaggagctcttgtgagaagacaaattcactgcctttgaaaatcttacagagacaaacagttttaatatgcaagttatttggtgcttgcagtaggattaytgacatgtttagtcaattgtacttatcttggaagagtgggatccaaaaataatagcaatactcsataaactttacttcttacttggagcttaatttgactaaaaaaaaacaactatgaattccctttcaagttgctgagcatgggatttagttctcatttcagtataattacgaatactaagttcctttacagtaaaaaaaaaaaaaagtaacacttctagtctactaagaagagataacctgtttattacaaagttctaggctaaactgctttttgaaaatcagtctcacctgtcaaaacagcatacagcatgggcaacaagcagcagagcatctccaaggagttacaatagattttaaataa

SEQ ID NO: 6369 - DNA, 600 bp, Chicken  19866894110495_5
gcatgggatttagttctcatttcagtataattacgaatactaagttcctttacagtaaaaaaaaaaaaaagtaacacttctagtctactaagaagagataacctgtttattacaaagttctaggctaaactgctttttgaaaatcagtctcacctgtcaaaacagcatacagcatgggcaacaagcagcagagcatctccaaggagttacaatagattttaaataatttcaactatcagcaccaactttggagtttttttttattttgacagaaatgctggatgaatttgtgtaggagarccatagtattggctgactactcaggttaagtaggttcattcaatacttatatgcatttataaacaaactttttaatttattgtttcctgatagcaactaatgccttgtctgctactatcaatattcttcataattctggtaggtctttaaacaagtctattagaagcttcctaacttagatgtcttgatattctggatactcagctatcgtgacatttatccttgttagagccttacgaacacacaatctggatttttacaatatcctctagcttaaaaaacaacaaaaacaacaacaac

SEQ ID NO: 6370 - DNA, 600 bp, Chicken  19866894110498_1
ggcagacagctgaaattccatgtaatggcagttatagcagaatatctggctctgtgggcctagtatttctcaattagaaactcctattacaaaccagaataaaaaaacccataatttctgaaaatctaaattctcagccttactaataactcaaggcagacagggaaataccgtatacaggcattacagaacaaaaacattccttcctaaaaaacagcagacagcagttcagcgagggatgctgcacaacaggcagggccagaatgttttctcagagatgaagcttttttcttatgcctyatctgtgcaaaaagatgtttcagaagtagaaagtgctgcctctcattctacacttgttgggttgtgaaaagagaaaatgatacagtgrgaaggcaaaaaggccccagattctttggacatgtttctgtaatctagaatatttggataactagaaatattagtgacaggtgcagrtcttgcaggtccctcctgtaatttgtattcctgaaactgaacgcagaggtatgatcagataagtgacattctgtctgtggataaaagatgaatgttactggccctaagttctgacagataggcagt

SEQ ID NO: 6371 - DNA, 600 bp, Chicken  19866894110498_2
acaaaccagaataaaaaaacccataatttctgaaaatctaaattctcagccttactaataactcaaggcagacagggaaataccgtatacaggcattacagaacaaaaacattccttcctaaaaaacagcagacagcagttcagcgagggatgctgcacaacaggcagggccagaatgttttctcagagatgaagcttttttcttatgcctyatctgtgcaaaaagatgtttcagaagtagaaagtgctgcctctcattctacacttgttgggttgtgaaaagagaaaatgatacagtgrgaaggcaaaaaggccccagattctttggacatgtttctgtaatctagaatatttggataactagaaatattagtgacaggtgcagrtcttgcaggtccctcctgtaatttgtattcctgaaactgaacgcagaggtatgatcagataagtgacattctgtctgtggataaaagatgaatgttactggccctaagttctgacagataggcagtggggccataaacaggatctaactgtgttacagaagcaaacgtgcatcactgggatacatcagataacttattccttcttaaatgcact

SEQ ID NO: 6372 - DNA, 600 bp, Chicken  19866894110498_3
atacaggcattacagaacaaaaacattccttcctaaaaaacagcagacagcagttcagcgagggatgctgcacaacaggcagggccagaatgttttctcagagatgaagcttttttcttatgcctyatctgtgcaaaaagatgtttcagaagtagaaagtgctgcctctcattctacacttgttgggttgtgaaaagagaaaatgatacagtgrgaaggcaaaaaggccccagattctttggacatgtttctgtaatctagaatatttggataactagaaatattagtgacaggtgcagrtcttgcaggtccctcctgtaatttgtattcctgaaactgaacgcagaggtatgatcagataagtgacattctgtctgtggataaaagatgaatgttactggccctaagttctgacagataggcagtggggccataaacaggatctaactgtgttacagaagcaaacgtgcatcactgggatacatcagataacttattccttcttaaatgcactgctggtacacttcccttggaatagatcacagcactgccacagtgtaagaaagagttttttcacccctggaaatgcagcttgggcac

SEQ ID NO: 6373 - DNA, 600 bp, Chicken  19866894110500_1
ccaggctatattgacatcatttgtagcagaagcagcattttagttaaacttgaaatctgcggctgttgggtatagattaccaactagagggctgagttctcatctacagcatcttgagcgacctgacttcaaaggctggatttagacttactgagccaacgggaaacaaacacctttaatctccacactgacattaagctcaaacacaaaataattctgggaaaagccctctattatcacacaaccagacggaaatagaggaaaggtggtaaaaacttgagcaattctgcacaaataacytggctcataggcaagkgtactagtttctctcttcctgatatctttttccatcctgttttactcacctcttttttaaatattcagttatactgggcactgagcctagattaacatatctgaacactgaacgctaagaatttattctaggaaaaatctgggcatttagatgcatgtgcaaacacctaaattatctgtcatctgcacctaggtgctactgtactttgggtaagaaataagccctgcatgtgaaagagagctggcagcactaagcgatcttttctggccctggagatgctcagt

SEQ ID NO: 6374 - DNA, 600 bp, Chicken  19866894110500_2
tcatttgtagcagaagcagcattttagttaaacttgaaatctgcggctgttgggtatagattaccaactagagggctgagttctcatctacagcatcttgagcgacctgacttcaaaggctggatttagacttactgagccaacgggaaacaaacacctttaatctccacactgacattaagctcaaacacaaaataattctgggaaaagccctctattatcacacaaccagacggaaatagaggaaaggtggtaaaaacttgagcaattctgcacaaataacytggctcataggcaagkgtactagtttctctcttcctgatatctttttccatcctgttttactcacctcttttttaaatattcagttatactgggcactgagcctagattaacatatctgaacactgaacgctaagaatttattctaggaaaaatctgggcatttagatgcatgtgcaaacacctaaattatctgtcatctgcacctaggtgctactgtactttgggtaagaaataagccctgcatgtgaaagagagctggcagcactaagcgatcttttctggccctggagatgctcagttattagaccccgaaat

SEQ ID NO: 6375 - DNA, 600 bp, Chicken  19866894110500_3
ttctaggaaaaatctgggcatttagatgcatgtgcaaacacctaaattatctgtcatctgcacctaggtgctactgtactttgggtaagaaataagccctgcatgtgaaagagagctggcagcactaagcgatcttttctggccctggagatgctcagttattagaccccgaaatcttatttctagtatgaggttcaacactgtctgctccttatttccgcaaatatactggaatcccagacatcacgtgcctggttaaacagaatacaccaagatcaacagccttctgccccacctacwtatcaacggctttaaaaacygttyagaaacccaaaatatataatacttcccaaatgaagagagagtgcaaaggagaaaacagcatcttttaccatacaaataccaccagcaaatgccatatagcccaggcacacctatgtgacgatctaccaagaggaaacaggctctgggtttaaaggcagaagctgtttaactgcgaacaacaggaaaacaacattcaaagcaggaaaaatatcataaaccgttgaaatttctagatgaaattcacctgggggaattccaatacagaatccaagacgg

SEQ ID NO: 6376 - DNA, 591 bp, Chicken  19866894110500_4
tttagatgcatgtgcaaacacctaaattatctgtcatctgcacctaggtgctactgtactttgggtaagaaataagccctgcatgtgaaagagagctggcagcactaagcgatcttttctggccctggagatgctcagttattagaccccgaaatcttatttctagtatgaggttcaacactgtctgctccttatttccgcaaatatactggaatcccagacatcacgtgcctggttaaacagaatacaccaagatcaacagccttctgccccacctacwtatcaacggctttaaaaacygttyagaaacccaaaatatataatacttcccaaatgaagagagagtgcaaaggagaaaacagcatcttttaccatacaaataccaccagcaaatgccatatagcccaggcacacctatgtgacgatctaccaagaggaaacaggctctgggtttaaaggcagaagctgtttaactgcgaacaacaggaaaacaacattcaaagcaggaaaaatatcataaaccgttgaaatttctagatgaaattcacctgggggaattccaatacagaatccaagacggcacagacatcc

SEQ ID NO: 6377 - DNA, 587 bp, Chicken  19866894110500_5
gatgcatgtgcaaacacctaaattatctgtcatctgcacctaggtgctactgtactttgggtaagaaataagccctgcatgtgaaagagagctggcagcactaagcgatcttttctggccctggagatgctcagttattagaccccgaaatcttatttctagtatgaggttcaacactgtctgctccttatttccgcaaatatactggaatcccagacatcacgtgcctggttaaacagaatacaccaagatcaacagccttctgccccacctacwtatcaacggctttaaaaacygttyagaaacccaaaatatataatacttcccaaatgaagagagagtgcaaaggagaaaacagcatcttttaccatacaaataccaccagcaaatgccatatagcccaggcacacctatgtgacgatctaccaagaggaaacaggctctgggtttaaaggcagaagctgtttaactgcgaacaacaggaaaacaacattcaaagcaggaaaaatatcataaaccgttgaaatttctagatgaaattcacctgggggaattccaatacagaatccaagacggcacagacatcc

SEQ ID NO: 6378 - DNA, 599 bp, Chicken  19866894110505_1
  misc_feature (1)..(147): n is any nucleotide
nnnnnnnnnnnnnnnnnnnnnnnnnnnnnnnnnnnnnnnnnnnnnnnnnnnnnnnnnnnnnnnnnnnnnnnnnnnnnnnnnnnnnnnnnnnnnnnnnnnnnnnnnnnnnnnnnnnnnnnnnnnnnnnnnnnnnnnnnnnnnnnnnnnaaaaaaaaatacttccccaagattctccaacatcactaggatttagcaaatatatcatagaagtgcaagaaaaaaaaataacatgcagaatgtttcactcacatacatacaaaatcctctgtgattacagcacacaaatgacgggtacgttgygattagagtctggctgaagcgtattaaaactgaatgtccaattttaacattgcagaagtaaatcaatcaacactttaaacttgtatggacttactatatgaaagcaagttatgtggttataaaatatgctgtctgcatgacatgctatttaacatttttaaatttctcctctctagtaacctggcrtgtcccaattctttttatacaaaaatcttccaaaagagcagatcgctctccagtcatctcatactattgtcattatacacttgaactcaaagagcagaagatattcatactgc

SEQ ID NO: 6379 - DNA, 600 bp, Chicken  19866894110505_2
gatttagcaaatatatcatagaagtgcaagaaaaaaaaataacatgcagaatgtttcactcacatacatacaaaatcctctgtgattacagcacacaaatgacgggtacgttgygattagagtctggctgaagcgtattaaaactgaatgtccaattttaacattgcagaagtaaatcaatcaacactttaaacttgtatggacttactatatgaaagcaagttatgtggttataaaatatgctgtctgcatgacatgctatttaacatttttaaatttctcctctctagtaacctggcrtgtcccaattctttttatacaaaaatcttccaaaagagcagatcgctctccagtcatctcatactattgtcattatacacttgaactcaaagagcagaagatattcatactgcaagagaatgagttagactgagttaaacattaacagaatactgtagaaayttagcatgtttggcaaacaagagactactagaacaaaaaacaatattgctcattatatatactttttttcccactttggaaacataatttagcaccctttcaactaggtgtaaatattctgagttttacatattccca

SEQ ID NO: 6380 - DNA, 600 bp, Chicken  19866894110505_3
attgcagaagtaaatcaatcaacactttaaacttgtatggacttactatatgaaagcaagttatgtggttataaaatatgctgtctgcatgacatgctatttaacatttttaaatttctcctctctagtaacctggcrtgtcccaattctttttatacaaaaatcttccaaaagagcagatcgctctccagtcatctcatactattgtcattatacacttgaactcaaagagcagaagatattcatactgcaagagaatgagttagactgagttaaacattaacagaatactgtagaaayttagcatgtttggcaaacaagagactactagaacaaaaaacaatattgctcattatatatactttttttcccactttggaaacataatttagcaccctttcaactaggtgtaaatattctgagttttacatattcccagaaagaagctctgcagattttgttcaataacatgtaaagaagtacatggttctttctttttccgtgtctgagaataccttgtcctctcagataaagtgtatgctgctcaaagggatgataattaagcctttggagtttgccatcccttaaaacttggtgatc

SEQ ID NO: 6381 - DNA, 600 bp, Chicken  19866894110506_1
actttgaagcagtggaacctgctttgctcaaactttccagaacaatttgccctcaggctactgccagaactgtaagacttacaccccaaagatgaaagggggagagtgccagagccctgctccacatctgcagagcagcagcacctgcaagcctggaagcggccatgtctgcatctccatcacacggcgctgggagcaacctgctcctctccccaccccaattgtgcttgcaaaagaagggggatgctgagcttcactttgtcttgactgaagtcagaagctcatcagagggaggcaggratgctatgaggggccctcttgccctgctgggatgggcagtatctctgcaggacttgctcaggatgtmttgttagcctccatttcctccaaccccactgcatcagtggccctttagatgtcttccatctcaaagaagacattccttctgacagctgtgaatgggaaaactgtttgggcagcaggttgcccacaccaaaggatgcgatttcacagctggttttctccaatggagaatgaaatgcattatcagagatgttagctttcatcttaatcagtgggttgttttcacttgctatagac

SEQ ID NO: 6382 - DNA, 600 bp, Chicken  19866894110506_2
aactgtaagacttacaccccaaagatgaaagggggagagtgccagagccctgctccacatctgcagagcagcagcacctgcaagcctggaagcggccatgtctgcatctccatcacacggcgctgggagcaacctgctcctctccccaccccaattgtgcttgcaaaagaagggggatgctgagcttcactttgtcttgactgaagtcagaagctcatcagagggaggcaggratgctatgaggggccctcttgccctgctgggatgggcagtatctctgcaggacttgctcaggatgtmttgttagcctccatttcctccaaccccactgcatcagtggccctttagatgtcttccatctcaaagaagacattccttctgacagctgtgaatgggaaaactgtttgggcagcaggttgcccacaccaaaggatgcgatttcacagctggttttctccaatggagaatgaaatgcattatcagagatgttagctttcatcttaatcagtgggttgttttcacttgctatagacaatgcaagaaagataaggcagcacacaggagtgttttggtcttgcacagtgtgtgtgaccaggtagc

SEQ ID NO: 6383 - DNA, 600 bp, Chicken  19866894110508_1
actgcaatgtttggttttattagaaggctgagacagtacaaaataatctgcaagaaaccactgctatcagctccacctgatgtgcacaatacagtgctactgagacactgctgtgaagccagacaagaaatgagaagcaaaacctgaggaaagatgtaaatgttaagtgggagactgattatcaaataaaattattacgcttcctgcatggaaactacacgtatttctgtatgacagcctcaacaaattgttcctgaaataaaactctaacatatttttagttatttaaaactgaactcktggggctttttaatgaaactacttttgtctttctctcttttctggattgatccttctttgaagggaagtacaaatccctcatgacacagaaaaactgaatgacacaagtatacctcaggttcagamatagccattaactttactgctttcttctgaagaaaagaaactccatcacctcttttttttgcttgaaccaccatttcttcgtactgctgtctgtgtttctgagcttcttctgctggttttgctgggaggttccttaaattwaaaaaaaaagcagtatttcaagtcgccgtgtcc

SEQ ID NO: 6384 - DNA, 600 bp, Chicken  19866894110508_2
gaaatgagaagcaaaacctgaggaaagatgtaaatgttaagtgggagactgattatcaaataaaattattacgcttcctgcatggaaactacacgtatttctgtatgacagcctcaacaaattgttcctgaaataaaactctaacatatttttagttatttaaaactgaactcktggggctttttaatgaaactacttttgtctttctctcttttctggattgatccttctttgaagggaagtacaaatccctcatgacacagaaaaactgaatgacacaagtatacctcaggttcagamatagccattaactttactgctttcttctgaagaaaagaaactccatcacctcttttttttgcttgaaccaccatttcttcgtactgctgtctgtgtttctgagcttcttctgctggttttgctgggaggttccttaaattwaaaaaaaaagcagtatttcaagtcgccgtgtccatctagagacaattctaggcactttaaaaaaaaaagcataatgctgctysatgtcaaaatatttgattaaggagtagtccaacagattcttggaaagattttttttgccagagtcagcggaagaga

SEQ ID NO: 6385 - DNA, 596 bp, Chicken  19866894110508_3
taacatatttttagttatttaaaactgaactcktggggctttttaatgaaactacttttgtctttctctcttttctggattgatccttctttgaagggaagtacaaatccctcatgacacagaaaaactgaatgacacaagtatacctcaggttcagamatagccattaactttactgctttcttctgaagaaaagaaactccatcacctcttttttttgcttgaaccaccatttcttcgtactgctgtctgtgtttctgagcttcttctgctggttttgctgggaggttccttaaattwaaaaaaaaagcagtatttcaagtcgccgtgtccatctagagacaattctaggcactttaaaaaaaaaagcataatgctgctysatgtcaaaatatttgattaaggagtagtccaacagattcttggaaagattttttttgccagagtcagcggaagagaaggaaagaacacttgaacagctatgagtacttctatacacaaaatctgctgagcaatttccttttgtttggcaacttcagcatttttattattaaaccgactgaacccacagactaatcttcataaataaagggaat

SEQ ID NO: 6386 - DNA, 514 bp, Chicken  19866894110508_4
atccttctttgaagggaagtacaaatccctcatgacacagaaaaactgaatgacacaagtatacctcaggttcagamatagccattaactttactgctttcttctgaagaaaagaaactccatcacctcttttttttgcttgaaccaccatttcttcgtactgctgtctgtgtttctgagcttcttctgctggttttgctgggaggttccttaaattwaaaaaaaaagcagtatttcaagtcgccgtgtccatctagagacaattctaggcactttaaaaaaaaaagcataatgctgctysatgtcaaaatatttgattaaggagtagtccaacagattcttggaaagattttttttgccagagtcagcggaagagaaggaaagaacacttgaacagctatgagtacttctatacacaaaatctgctgagcaatttccttttgtttggcaacttcagcatttttattattaaaccgactgaacccacagactaatcttcataaataaagggaat

SEQ ID NO: 6387 - DNA, 513 bp, Chicken  19866894110508_5
tccttctttgaagggaagtacaaatccctcatgacacagaaaaactgaatgacacaagtatacctcaggttcagamatagccattaactttactgctttcttctgaagaaaagaaactccatcacctcttttttttgcttgaaccaccatttcttcgtactgctgtctgtgtttctgagcttcttctgctggttttgctgggaggttccttaaattwaaaaaaaaagcagtatttcaagtcgccgtgtccatctagagacaattctaggcactttaaaaaaaaaagcataatgctgctysatgtcaaaatatttgattaaggagtagtccaacagattcttggaaagattttttttgccagagtcagcggaagagaaggaaagaacacttgaacagctatgagtacttctatacacaaaatctgctgagcaatttccttttgtttggcaacttcagcatttttattattaaaccgactgaacccacagactaatcttcataaataaagggaat

SEQ ID NO: 6388 - DNA, 600 bp, Chicken  19866894110516_1
taggtttgtttgttttgttgttattttttaagcaagtgtacgctggtcccagtgtggttgctaactacttattgagcaccatcaaaaattggtgaccaagacaggtccaggccttgcccaaaaccattgcagaagaagggcctcattcagtgcttccatcagtaccaccaggctatttccaagggttttggtcccctgcaccataagtgatgttcctcacatgagtaaacgttgggtcaatgagtaaaagtgggctgagtgtcatttgtcccgagccacaaggtgctcccagctctggcrtctccyggtagtgtcccagctctgtgtgttcccacaacygggatcttaccaccacaaccaggatcttaccaccacaactgggatttgccatcagaatgggcttagaggagcctcaggactgtatgggaaagcactttgcagcctttgtggcaacatcaagtccttccgcttgcaaacataaaggtaactgctttcaaactacagcttggttttgaagtctaagtatcgtcaatgattactaacacaacatgacttaattaaggtaacacaagtcacttaggatagcttatgcatcttatt

SEQ ID NO: 6389 - DNA, 600 bp, Chicken  19866894110516_2
tgtttgttttgttgttattttttaagcaagtgtacgctggtcccagtgtggttgctaactacttattgagcaccatcaaaaattggtgaccaagacaggtccaggccttgcccaaaaccattgcagaagaagggcctcattcagtgcttccatcagtaccaccaggctatttccaagggttttggtcccctgcaccataagtgatgttcctcacatgagtaaacgttgggtcaatgagtaaaagtgggctgagtgtcatttgtcccgagccacaaggtgctcccagctctggcrtctccyggtagtgtcccagctctgtgtgttcccacaacygggatcttaccaccacaaccaggatcttaccaccacaactgggatttgccatcagaatgggcttagaggagcctcaggactgtatgggaaagcactttgcagcctttgtggcaacatcaagtccttccgcttgcaaacataaaggtaactgctttcaaactacagcttggttttgaagtctaagtatcgtcaatgattactaacacaacatgacttaattaaggtaacacaagtcacttaggatagcttatgcatcttatttgtacc

SEQ ID NO: 6390 - DNA, 600 bp, Chicken  19866894110516_3
acgctggtcccagtgtggttgctaactacttattgagcaccatcaaaaattggtgaccaagacaggtccaggccttgcccaaaaccattgcagaagaagggcctcattcagtgcttccatcagtaccaccaggctatttccaagggttttggtcccctgcaccataagtgatgttcctcacatgagtaaacgttgggtcaatgagtaaaagtgggctgagtgtcatttgtcccgagccacaaggtgctcccagctctggcrtctccyggtagtgtcccagctctgtgtgttcccacaacygggatcttaccaccacaaccaggatcttaccaccacaactgggatttgccatcagaatgggcttagaggagcctcaggactgtatgggaaagcactttgcagcctttgtggcaacatcaagtccttccgcttgcaaacataaaggtaactgctttcaaactacagcttggttttgaagtctaagtatcgtcaatgattactaacacaacatgacttaattaaggtaacacaagtcacttaggatagcttatgcatcttatttgtaccattttcacttatgtaagagtttctgatcacact

SEQ ID NO: 6391 - DNA, 600 bp, Chicken  19866894110523_1
aaggtttccctgatttttcctgcccctctcttcagtgtccccatgcagtgtgagtgagaatatccattgcactttgaatccagactctagctgaagtattttcctgcactgagaagcctcctaagagctgctggtgcttcaggttgttcggatcatgtgttttttctcctgcctccctttgctcattcggactttaggcaggctgggcagccacagcttcccccagactgtgccatgctggctcttccactggacacatgattgggaggggaccccacactggtcagccttgtagggaaraggtttgaaagccctytgttcccccatttccaaaagcaggagctcctgtgctctacttgcgtttgctgacagtttccataaccaggctggccagtccatctgccagctcgtctttctgaatgggctgatcatttcattctcaatataaaacaattcccatgggtatctctctttccctgcctagttttgcctatgaaataatctgtcctatattaagctctcggtcaaacataaatttaaactcagctgtgcttggcctcaatctcagttctttaaatgttaatcttggctggctccatg

SEQ ID NO: 6392 - DNA, 600 bp, Chicken  19866894110523_2
ttcctgcccctctcttcagtgtccccatgcagtgtgagtgagaatatccattgcactttgaatccagactctagctgaagtattttcctgcactgagaagcctcctaagagctgctggtgcttcaggttgttcggatcatgtgttttttctcctgcctccctttgctcattcggactttaggcaggctgggcagccacagcttcccccagactgtgccatgctggctcttccactggacacatgattgggaggggaccccacactggtcagccttgtagggaaraggtttgaaagccctytgttcccccatttccaaaagcaggagctcctgtgctctacttgcgtttgctgacagtttccataaccaggctggccagtccatctgccagctcgtctttctgaatgggctgatcatttcattctcaatataaaacaattcccatgggtatctctctttccctgcctagttttgcctatgaaataatctgtcctatattaagctctcggtcaaacataaatttaaactcagctgtgcttggcctcaatctcagttctttaaatgttaatcttggctggctccatgcacagcgtaagaaact

SEQ ID NO: 6393 - DNA, 600 bp, Chicken  19866894110529_1
tcaagctttggttttgataagcatccagaagttaggattagccaaacttctttggtcagccaagaatttatagtaagacatttataatggaaagctaaagtacgagaaacctgaacagaagtgaatcatggtcttccagccaaatctgtctaccatgcaaaggactgccaaggctcaacattcaggacaccttactggggtgacagcagcactggagctggaatgacgtatagcatctgggtcgacataaaggcaaacagatggtttcctttgggaaactgtccttggtggcacttcacrgatyaccatcaggccgtggtcagtcagggtcaaactgtagtgacttcacactgggtaaagtcttggctgtgctgaaattggcacagacactacttacagcttaacatcatccataacatcatctgttctgacacagtacagtgtgttactgatattttgccactaagaagcagaaagaatgaaaatgcctaagaagttttaaatgaagacttcaaagaaggtcaagtgtgctttattacagaccagttgtttgcagcaaaaccagctttcctgacccaggacttacagttggtaatgaca

SEQ ID NO: 6394 - DNA, 600 bp, Chicken  19866894110529_2
gctttggttttgataagcatccagaagttaggattagccaaacttctttggtcagccaagaatttatagtaagacatttataatggaaagctaaagtacgagaaacctgaacagaagtgaatcatggtcttccagccaaatctgtctaccatgcaaaggactgccaaggctcaacattcaggacaccttactggggtgacagcagcactggagctggaatgacgtatagcatctgggtcgacataaaggcaaacagatggtttcctttgggaaactgtccttggtggcacttcacrgatyaccatcaggccgtggtcagtcagggtcaaactgtagtgacttcacactgggtaaagtcttggctgtgctgaaattggcacagacactacttacagcttaacatcatccataacatcatctgttctgacacagtacagtgtgttactgatattttgccactaagaagcagaaagaatgaaaatgcctaagaagttttaaatgaagacttcaaagaaggtcaagtgtgctttattacagaccagttgtttgcagcaaaaccagctttcctgacccaggacttacagttggtaatgacacctc

SEQ ID NO: 6395 - DNA, 600 bp, Chicken  19866894110529_3
ttacagcttaacatcatccataacatcatctgttctgacacagtacagtgtgttactgatattttgccactaagaagcagaaagaatgaaaatgcctaagaagttttaaatgaagacttcaaagaaggtcaagtgtgctttattacagaccagttgtttgcagcaaaaccagctttcctgacccaggacttacagttggtaatgacacctcctgacgatgggtggaacactgttttccagcagcccctagaatggttcgaatgagaataccctaaactggcaaaatgcactgtcctaaawtgaaacaaaaccatgagcttaagtaaagggatgtggttagtggctggctgcttaccctccctttgctggctcatcttaacttataggatattataaagaaaagtctctctttcctcctatatccatgagcatggtggcagactgtggcagatttagagaagcagctgctggattttcccaacagtgacagatcccatwtatctcagccatggtgcctgaacgcacaggggcaacaggtagggcagaggagggtttggatacactgctcagataagaatttktcctttgtgccaatacaaa

SEQ ID NO: 6396 - DNA, 600 bp, Chicken  19866894110529_4
gtaatgacacctcctgacgatgggtggaacactgttttccagcagcccctagaatggttcgaatgagaataccctaaactggcaaaatgcactgtcctaaawtgaaacaaaaccatgagcttaagtaaagggatgtggttagtggctggctgcttaccctccctttgctggctcatcttaacttataggatattataaagaaaagtctctctttcctcctatatccatgagcatggtggcagactgtggcagatttagagaagcagctgctggattttcccaacagtgacagatcccatwtatctcagccatggtgcctgaacgcacaggggcaacaggtagggcagaggagggtttggatacactgctcagataagaatttktcctttgtgccaatacaaattttccccatgatacctcatagcatgwggatataacagaagagagcacattcattacttaagaattcagyaaaaacagcagattaaaagactgagagtgcatcaaaaaatacagcttcagccacatgatatctgccaacatctggagtcattctgtatgtaggagatcacagctggagagtttttctgagtatgagtg

SEQ ID NO: 6397 - DNA, 600 bp, Chicken  19866894110529_5
aaaatgcactgtcctaaawtgaaacaaaaccatgagcttaagtaaagggatgtggttagtggctggctgcttaccctccctttgctggctcatcttaacttataggatattataaagaaaagtctctctttcctcctatatccatgagcatggtggcagactgtggcagatttagagaagcagctgctggattttcccaacagtgacagatcccatwtatctcagccatggtgcctgaacgcacaggggcaacaggtagggcagaggagggtttggatacactgctcagataagaatttktcctttgtgccaatacaaattttccccatgatacctcatagcatgwggatataacagaagagagcacattcattacttaagaattcagyaaaaacagcagattaaaagactgagagtgcatcaaaaaatacagcttcagccacatgatatctgccaacatctggagtcattctgtatgtaggagatcacagctggagagtttttctgagtatgagtgggagaccttagcccacttgcacggacaggctgattgtacttccattttccatgtgatttacaaacagagagcaagtgtcagat

SEQ ID NO: 6398 - DNA, 600 bp, Chicken  19866894110529_6
gggatgtggttagtggctggctgcttaccctccctttgctggctcatcttaacttataggatattataaagaaaagtctctctttcctcctatatccatgagcatggtggcagactgtggcagatttagagaagcagctgctggattttcccaacagtgacagatcccatwtatctcagccatggtgcctgaacgcacaggggcaacaggtagggcagaggagggtttggatacactgctcagataagaatttktcctttgtgccaatacaaattttccccatgatacctcatagcatgwggatataacagaagagagcacattcattacttaagaattcagyaaaaacagcagattaaaagactgagagtgcatcaaaaaatacagcttcagccacatgatatctgccaacatctggagtcattctgtatgtaggagatcacagctggagagtttttctgagtatgagtgggagaccttagcccacttgcacggacaggctgattgtacttccattttccatgtgatttacaaacagagagcaagtgtcagatgtgtaaatgctgacttagcaggcaggtaaaacttggcttacctgaa

SEQ ID NO: 6399 - DNA, 600 bp, Chicken  19866894110529_7
tcatcttaacttataggatattataaagaaaagtctctctttcctcctatatccatgagcatggtggcagactgtggcagatttagagaagcagctgctggattttcccaacagtgacagatcccatwtatctcagccatggtgcctgaacgcacaggggcaacaggtagggcagaggagggtttggatacactgctcagataagaatttktcctttgtgccaatacaaattttccccatgatacctcatagcatgwggatataacagaagagagcacattcattacttaagaattcagyaaaaacagcagattaaaagactgagagtgcatcaaaaaatacagcttcagccacatgatatctgccaacatctggagtcattctgtatgtaggagatcacagctggagagtttttctgagtatgagtgggagaccttagcccacttgcacggacaggctgattgtacttccattttccatgtgatttacaaacagagagcaagtgtcagatgtgtaaatgctgacttagcaggcaggtaaaacttggcttacctgaaaccttgctgcatacactttctacagaagactgtaaccatctct

SEQ ID NO: 6400 - DNA, 438 bp, Chicken  19866894110534_1
ctcatggccctagggctcctcatggccctagagctcctcatgatcctacagctcctcatggccctacatcttcccatggctctatggcccctcatggtcctacagcttctcatggccctatagcttctcatgaccctacatttcctcgtgaccctacatctcctcttggccctatggcccctcgtggttctacagctcctcatgaccctaaatctcccccacatcctgcagctcctcatggcatcctgagttctacgtccacccgggcggcattatttagaagctgctccccatggttcrcaccataaccgctttcctcttccgtgcacaaaacacccattttcccctccaactattttcagaccgtctcagcatgacaaacacagagcaaatgtcacagcgccacctgaagcgaggcgtgcattccaaaccagaaag

SEQ ID NO: 6401 - DNA, 600 bp, Chicken  19866894110539_1
ataatcctatgaaagttactaatacttagttttgaggtcctgaacaaatccaaacacaaaccaagttttctaatttactgccgcttacaaactgctgtgcgctgaacacgccgaaaattattgcaaaattcaggtgaaagcaccaatgtgaaattacacctatatcatcaacatttaaaatatggattgtaaacaggagaagacagctgtgagaaaagcccactagaagagattatccatgagaatggccacagtcacttcaacagcactacattccccaggactctctcttctcttccrgagactttcagtggcacaacgcttttgagccagacaactttactgttggacagcaacccacgcaaggaaggattaggcaggtttgggccctcaaaactgtcctaacaaaatacgtatggcaaatgggtaagattagtgaagatacatgaagacaagcaaaatgcaagatagaatttgaaatccgagagagttatgagatacaattggaaaggaaacagtagctgagagcaaggacttaaggaatatcgcctgtgtgaagatcattatctgtgacataataacatataatagacagactgt

SEQ ID NO: 6402 - DNA, 600 bp, Chicken  19866894110543_1
acccagctatatatataaaaaagaaaccatatcagcattcttgttcccattgtacaagcattgactaaaatgcccctttttcatttaccccttaacatctggactgtaaaaacttaacatgagtttgccagtgatgtagtttatctagatatcttcttcctattcacagctactcttgaatatcatcatttctgtaagtcttgtcgtggtagtttttgtgcatttagttggaaaaactactgcatttgaatatttccagttcagcaccagcatgcagactctgtttgggtttcttttttwtgtagcccagacacaggtatgttctgataccaaagatactgtctctatatttagaagttgtcttgttctgtccctcagactttatgcagtcttctgcagggtcattcgttttacttctgttgtatatatactgggtttatgttagtatttttagcrtgttgaagaaactcaggggcagttcttccatgagggtaatgttttcaaacaatgaactggctctttaaaagcgtaaaaatgttgttgaagtcataaacttaagtgtgtcaatattggaggtgatttaaaaaaatttatttgtaa

SEQ ID NO: 6403 - DNA, 600 bp, Chicken  19866894110543_2
ttcctattcacagctactcttgaatatcatcatttctgtaagtcttgtcgtggtagtttttgtgcatttagttggaaaaactactgcatttgaatatttccagttcagcaccagcatgcagactctgtttgggtttcttttttwtgtagcccagacacaggtatgttctgataccaaagatactgtctctatatttagaagttgtcttgttctgtccctcagactttatgcagtcttctgcagggtcattcgttttacttctgttgtatatatactgggtttatgttagtatttttagcrtgttgaagaaactcaggggcagttcttccatgagggtaatgttttcaaacaatgaactggctctttaaaagcgtaaaaatgttgttgaagtcataaacttaagtgtgtcaatattggaggtgatttaaaaaaatttatttgtaatgagtacctctgtacctgaaatgcaggactgtgtaactgggctagtttgtttgttttaaattcagttcttcagccaaatgtccttatattgcaggctttttggctggcacaggaggatcagactttctgctcattgatgtagatagaatttttctt

SEQ ID NO: 6404 - DNA, 599 bp, Chicken  19866894110545_1
  misc_feature (1)..(157): n is any nucleotide
nnnnnnnnnnnnnnnnnnnnnnnnnnnnnnnnnnnnnnnnnnnnnnnnnnnnnnnnnnnnnnnnnnnnnnnnnnnnnnnnnnnnnnnnnnnnnnnnnnnnnnnnnnnnnnnnnnnnnnnnnnnnnnnnnnnnnnnnnnnnnnnnnnnnnnnnnnnnntcaacccttctttgtaggagaggtgctccaacactctgacctctttgtggccctcctctggacctgctccaacatctccacatcttttttttgttggaagcaccaggcctggacacataactgcaggtcaggcctcacaaggrcaraccagaggggacaatcacctccctctccctgatggccacaycttttttgatgcagtgcagatacagttggccttccaggctgcaagtacacacttgwcatccaccagaacccctgaaaactccaaaaggctgctctcagtaagttcttctggtctgtacacttatctgggattgcttcagtgcaataccttgcacttggccttgttgaaccacattaggttcatgtgggcccacttttcaagcttgtactctgtcctgatttcagctgtaacagaaggttgttgttttttttttcc

SEQ ID NO: 6405 - DNA, 599 bp, Chicken  19866894110545_2
  misc_feature (1)..(154): n is any nucleotide
nnnnnnnnnnnnnnnnnnnnnnnnnnnnnnnnnnnnnnnnnnnnnnnnnnnnnnnnnnnnnnnnnnnnnnnnnnnnnnnnnnnnnnnnnnnnnnnnnnnnnnnnnnnnnnnnnnnnnnnnnnnnnnnnnnnnnnnnnnnnnnnnnnnnnnnnnntcaacccttctttgtaggagaggtgctccaacactctgacctctttgtggccctcctctggacctgctccaacatctccacatcttttttttgttggaagcaccaggcctggacacataactgcaggtcaggcctcacaaggrcaraccagaggggacaatcacctccctctccctgatggccacaycttttttgatgcagtgcagatacagttggccttccaggctgcaagtacacacttgwcatccaccagaacccctgaaaactccaaaaggctgctctcagtaagttcttctggtctgtacacttatctgggattgcttcagtgcaataccttgcacttggccttgttgaaccacattaggttcatgtgggcccacttttcaagcttgtactctgtcctgatttcagctgtaacagaaggttgttgttttttttttccttc

SEQ ID NO: 6406 - DNA, 599 bp, Chicken  19866894110545_3
  misc_feature (1)..(113): n is any nucleotide
nnnnnnnnnnnnnnnnnnnnnnnnnnnnnnnnnnnnnnnnnnnnnnnnnnnnnnnnnnnnnnnnnnnnnnnnnnnnnnnnnnnnnnnnnnnnnnnnnnnnnnnnnnnnnnnnntcaacccttctttgtaggagaggtgctccaacactctgacctctttgtggccctcctctggacctgctccaacatctccacatcttttttttgttggaagcaccaggcctggacacataactgcaggtcaggcctcacaaggrcaraccagaggggacaatcacctccctctccctgatggccacaycttttttgatgcagtgcagatacagttggccttccaggctgcaagtacacacttgwcatccaccagaacccctgaaaactccaaaaggctgctctcagtaagttcttctggtctgtacacttatctgggattgcttcagtgcaataccttgcacttggccttgttgaaccacattaggttcatgtgggcccacttttcaagcttgtactctgtcctgatttcagctgtaacagaaggttgttgttttttttttccttctctccatggtgcctggtatgatgctatgccttggctttggg

SEQ ID NO: 6407 - DNA, 599 bp, Chicken  19866894110545_4
  misc_feature (1)..(57): n is any nucleotide
nnnnnnnnnnnnnnnnnnnnnnnnnnnnnnnnnnnnnnnnnnnnnnnnnnnnnnnnntcaacccttctttgtaggagaggtgctccaacactctgacctctttgtggccctcctctggacctgctccaacatctccacatcttttttttgttggaagcaccaggcctggacacataactgcaggtcaggcctcacaaggrcaraccagaggggacaatcacctccctctccctgatggccacaycttttttgatgcagtgcagatacagttggccttccaggctgcaagtacacacttgwcatccaccagaacccctgaaaactccaaaaggctgctctcagtaagttcttctggtctgtacacttatctgggattgcttcagtgcaataccttgcacttggccttgttgaaccacattaggttcatgtgggcccacttttcaagcttgtactctgtcctgatttcagctgtaacagaaggttgttgttttttttttccttctctccatggtgcctggtatgatgctatgccttggctttgggagaaaaacagtgtgtataactcacccatgtttttagttgttgctgagcagtgactt

SEQ ID NO: 6408 - DNA, 600 bp, Chicken  19866894110547_1
cttggcatggctgtgacgcagacgatcgctgcagccgatagggaaggaggattttctggcccagccccagcactcggtgactttcctaaggaaggtggctgccaatagctgttcgtagggcaggagatgtgagcgtggcacagcgccctgtcacctttctcggggtttcttcatttcaagagtcagctcttatcatatcgctggcggaaactatttaaaggctccttaattagtctgtggtctccggcagttcctgcgctgactgatagatggatctgggcaacgccacgtggttcctaytgtcagatggaaaaagttctcatctaaaacacagcagaattgcatgttcggcyggctgctgggtaggctggagctggggacagggcagtggtggaagatagggtttgtttgtgtgaggccctgataggcagcgatrggctctggacaagctggatttcagcaggtctcaatttaatgtgcttcctgctgyagtaagggtagtgctgtatcttcgtgacctgaagtctcacaaaagcctttttgctggaccccatctgcaccacaaaccatgcctcagggtacccagctctgcagcatccc

SEQ ID NO: 6409 - DNA, 600 bp, Chicken  19866894110547_2
ttctggcccagccccagcactcggtgactttcctaaggaaggtggctgccaatagctgttcgtagggcaggagatgtgagcgtggcacagcgccctgtcacctttctcggggtttcttcatttcaagagtcagctcttatcatatcgctggcggaaactatttaaaggctccttaattagtctgtggtctccggcagttcctgcgctgactgatagatggatctgggcaacgccacgtggttcctaytgtcagatggaaaaagttctcatctaaaacacagcagaattgcatgttcggcyggctgctgggtaggctggagctggggacagggcagtggtggaagatagggtttgtttgtgtgaggccctgataggcagcgatrggctctggacaagctggatttcagcaggtctcaatttaatgtgcttcctgctgyagtaagggtagtgctgtatcttcgtgacctgaagtctcacaaaagcctttttgctggaccccatctgcaccacaaaccatgcctcagggtacccagctctgcagcatcccccrgagtaccagggctcccaggcacagcctcagtgaatgggacagagaaggac

SEQ ID NO: 6410 - DNA, 600 bp, Chicken  19866894110547_3
ggcacagcgccctgtcacctttctcggggtttcttcatttcaagagtcagctcttatcatatcgctggcggaaactatttaaaggctccttaattagtctgtggtctccggcagttcctgcgctgactgatagatggatctgggcaacgccacgtggttcctaytgtcagatggaaaaagttctcatctaaaacacagcagaattgcatgttcggcyggctgctgggtaggctggagctggggacagggcagtggtggaagatagggtttgtttgtgtgaggccctgataggcagcgatrggctctggacaagctggatttcagcaggtctcaatttaatgtgcttcctgctgyagtaagggtagtgctgtatcttcgtgacctgaagtctcacaaaagcctttttgctggaccccatctgcaccacaaaccatgcctcagggtacccagctctgcagcatcccccrgagtaccagggctcccaggcacagcctcagtgaatgggacagagaaggacctttcagccagcggaggcttgtggcagaggttgagttaaagctttaaagcagctcctgaagctgctgttaaattcagttgtta

SEQ ID NO: 6411 - DNA, 600 bp, Chicken  19866894110547_4
tatcatatcgctggcggaaactatttaaaggctccttaattagtctgtggtctccggcagttcctgcgctgactgatagatggatctgggcaacgccacgtggttcctaytgtcagatggaaaaagttctcatctaaaacacagcagaattgcatgttcggcyggctgctgggtaggctggagctggggacagggcagtggtggaagatagggtttgtttgtgtgaggccctgataggcagcgatrggctctggacaagctggatttcagcaggtctcaatttaatgtgcttcctgctgyagtaagggtagtgctgtatcttcgtgacctgaagtctcacaaaagcctttttgctggaccccatctgcaccacaaaccatgcctcagggtacccagctctgcagcatcccccrgagtaccagggctcccaggcacagcctcagtgaatgggacagagaaggacctttcagccagcggaggcttgtggcagaggttgagttaaagctttaaagcagctcctgaagctgctgttaaattcagttgttaaatcaggcttagaaacctgcttttcagctgggacacctagctggtttccccagt

SEQ ID NO: 6412 - DNA, 600 bp, Chicken  19866894110547_5
cagatggaaaaagttctcatctaaaacacagcagaattgcatgttcggcyggctgctgggtaggctggagctggggacagggcagtggtggaagatagggtttgtttgtgtgaggccctgataggcagcgatrggctctggacaagctggatttcagcaggtctcaatttaatgtgcttcctgctgyagtaagggtagtgctgtatcttcgtgacctgaagtctcacaaaagcctttttgctggaccccatctgcaccacaaaccatgcctcagggtacccagctctgcagcatcccccrgagtaccagggctcccaggcacagcctcagtgaatgggacagagaaggacctttcagccagcggaggcttgtggcagaggttgagttaaagctttaaagcagctcctgaagctgctgttaaattcagttgttaaatcaggcttagaaacctgcttttcagctgggacacctagctggtttccccagtgcttgggccaaaccccaagcaaatcaaagccacagttcctgagttagatgggggatccacaaccagaggcttgaggacttctctctgccctgatcttgaaaggatgtgctcct

SEQ ID NO: 6413 - DNA, 600 bp, Chicken  19866894110557_1
agcatcaagtacaggcagtttgtttttagttttataatccttcacagactgacttcatgatacctattattcttcataaagtagaaaaaaaatgagccattaatttcctacttttagattttcagataagccctattgtactttctcccgtgctgtctgtaatgattgcagggtacctcattatcctcctccaagtcaatcattcagacttctccagttgatgtatagaaagcttagccacatatattgccttctatcatgacaggtttttcctatcagtctgtcactgtcatcatttgycttrtacaggacagttatttaacactgtgtttgtggagtgcctacagtttgttcctggtcagctatgtgggagccttcgcacatctgtggtactgtcygtgctgctgctgcttcagagtctttcatcagcctttgtgacttaccatgtgcattgaagtgctgcattctaacaggataaaataaggccttataattaatttttctgcattactgattcagctggaagtttttggtgctctgacctttctgggagacaaatcgtggccgtcttcgctggcctcaaagtttactgactttgca

SEQ ID NO: 6414 - DNA, 600 bp, Chicken  19866894110557_2
tcaagtacaggcagtttgtttttagttttataatccttcacagactgacttcatgatacctattattcttcataaagtagaaaaaaaatgagccattaatttcctacttttagattttcagataagccctattgtactttctcccgtgctgtctgtaatgattgcagggtacctcattatcctcctccaagtcaatcattcagacttctccagttgatgtatagaaagcttagccacatatattgccttctatcatgacaggtttttcctatcagtctgtcactgtcatcatttgycttrtacaggacagttatttaacactgtgtttgtggagtgcctacagtttgttcctggtcagctatgtgggagccttcgcacatctgtggtactgtcygtgctgctgctgcttcagagtctttcatcagcctttgtgacttaccatgtgcattgaagtgctgcattctaacaggataaaataaggccttataattaatttttctgcattactgattcagctggaagtttttggtgctctgacctttctgggagacaaatcgtggccgtcttcgctggcctcaaagtttactgactttgcagagc

SEQ ID NO: 6415 - DNA, 600 bp, Chicken  19866894110557_3
attaatttcctacttttagattttcagataagccctattgtactttctcccgtgctgtctgtaatgattgcagggtacctcattatcctcctccaagtcaatcattcagacttctccagttgatgtatagaaagcttagccacatatattgccttctatcatgacaggtttttcctatcagtctgtcactgtcatcatttgycttrtacaggacagttatttaacactgtgtttgtggagtgcctacagtttgttcctggtcagctatgtgggagccttcgcacatctgtggtactgtcygtgctgctgctgcttcagagtctttcatcagcctttgtgacttaccatgtgcattgaagtgctgcattctaacaggataaaataaggccttataattaatttttctgcattactgattcagctggaagtttttggtgctctgacctttctgggagacaaatcgtggccgtcttcgctggcctcaaagtttactgactttgcagagcacgcatatctctgctgcattactgaggattccagtattcttggtctacaaaataaatgtttttaaagtcatatcaagggatatgattcacaagg

SEQ ID NO: 6416 - DNA, 600 bp, Chicken  19866894110558_1
taaaaatcaagtgacccttcagtatcctgattctttggcttctgcaggtttgtcataggttcttcagatctccagctaacacttccatatttgaaactgaaagatccttgaaaatgagtttatttcaccccagaaagtgatgtgatcaagctggcatagattctagctgccagttaaagggatggaaaaactttagtatggtcagcaagtccctttgctcttcaaagatcagagcttttccagtactaccttttgttgttgttgttgtttgtttatttgtttgttggttttgcttttttkggggggggggggtgaggggggctttattttattttatattattttattttattgaggagaatggttagaatgatggtagaagaaaaacaaaaacaggaagacaaaaaaagccaaacaccataagatccaagttagtagacaagagatgctgaatgcctagacaaccacaggccatcagaatagaaaccgaaagtagatttaccaaaaatctatgtcatggattaggtagggtattctaggtagggtaatctatggagatttcactttaggtcagtatgtacctgctaaatatcccttttt

SEQ ID NO: 6417 - DNA, 600 bp, Chicken  19866894110562_1
gacagacttcttggtgctgctcagtgaaggggaaagcagcaacgggaacaaaatataaggtagcaaattcttttcaggaaaagttttactgtcaggatgactgaccacttacagaatgtccagaataattgtggagtcttcttctttggatgtgctcaaaattcaagtggacatagttctgagcaacctgctctagtagaccctactcacaaaaaatggaaacatttacattaggactctttgtgatgaggtggtccttaaatatatgtctgaaatgttgatgtagaagttgtctataaycttctgttcaaaaaatgcatcagcagtgcttgaatttctatcaattggtagatttgaagaaaacttctgcagttggatttattttttaatatcaatgccttttctctaaaaataaattagataattctcacattctctagaggagcatttccaaatgtcaggtaggcctcactaacaaggggaagggttgggctgggtttgccagctacatttgctctgcagctctccttcccttagctgtagctgccataggattaaggtatgctttcaatccacagtctctatgtttaaagtatgacg

SEQ ID NO: 6418 - DNA, 600 bp, Chicken  19866894110563_1
tctatgagaagcacagccctctctatccaattcctgcacatctttaaaatatcttatacccccccccatctttttatttggtggaagaataagtggtcagatctgcctgctaagccatatacatgtagcctgaactgatatacccatataactcattgcttgcttatatttcatacacaaaacaagaagtcctcgtaaaagaatatcatcgtgaaaaaattgtctgccagtccgaattggtggatctctgctaagggcagtgagacaaaacccagttacatcaggttgaatctagactcyagtcaagataagcaggaaaaaaagaaacaaatactgggattctgatgaaagacaggagccactaaaccctagttagttaatattacaagggattaaactgacagttgacatagaaagcttcatagaacagtgcaccagtgcacgtatattagtaggatagtagaaaggaaaaagaaaaggtgataggtggagaaaggaaagagaaaagtggatagatggagagaaatacagaggaaaggtcattcaaacacactttagtccctccagttcttagccatgttggagagaggcttctggggg

SEQ ID NO: 6419 - DNA, 600 bp, Chicken  19866894110563_2
cctccagttcttagccatgttggagagaggcttctgggggaagttcttagtgagcaactaattacctatcacgtgaacatctcagtactgcagccctggatccaggaatcaacttctgtgtggttcacacactcagccctccagggagatgacttgcacatttcctgtcagagagctgaaaggctctaatttattgcctggagataccacatcctcatttgctaagttcagcccaacacttcttttttaaaaggacttagttcctcttgcactgcttgtcctggggaaaaccagtttgcrggcaatttagctttcatctaaccactgaggcaatcagagcagaggtccaaaatgtgcctttgcctatgtcacattaagagaaaaaggagggttttagtgttcctctgtccttgcccagggacatatctgctaatcccagcgtgagcagtgaaaaagagaaggatgagctgctccgctaaactgtcctcccctttcccttgaaggcatctggggtgtggaggaatgtggaggaagaagggagagagcaaatttgtgctctgtcttctccacctgaatataagaaccccttatattctgatt

SEQ ID NO: 6420 - DNA, 600 bp, Chicken  19866894110563_3
aaagagaaggatgagctgctccgctaaactgtcctcccctttcccttgaaggcatctggggtgtggaggaatgtggaggaagaagggagagagcaaatttgtgctctgtcttctccacctgaatataagaaccccttatattctgattcagacactcagactagagctttacaagctttacaagctttacaagtgctggaggacagagtttggaagggcataggaactttacccgctgggcatcccacttgcacgctgccctctcaggacaaccagcatcttgccagtcttgcacatackgagcgggagagttgtgttgtgggaatacgtaactttttttactacctcggctgtgttttccgatccaaaggtatcaaatcttgctgttaagtatttttagtccgaactttttaccattcagtctacttcgcaggcttggtttcttcgactaaaaatagtgccaaggcaacaatagcttttaggtggctctgctttttggattagacgtggtttgttaaaaaaagcagtgacacatgacagcagtttggtgcctccattccagaaggatctcacggagattgactggcctgcactgcgtcc

SEQ ID NO: 6421 - DNA, 600 bp, Chicken  19866894110568_1
caagatggatggcttggagaattacatcactgcttccacggtttatgatttttgtatcatgagaagacatgggaattcctgctgggtataaaataatgaaccgttacaatatgaaataagtaatatcttgaattagcttaggaagtgaaatggtaagacaatactgcaaacttaatgatgagattttggtgataggaatgtagctttttatttttgcatctctcttgttttgtaaagctataataagaaaaaatcacaaatagtattgaaactacatgctattttacacctccacatagytgtaatatacaaacaataaaaaagcattacttcctttcctccctgctggctgtctgaaccgtagttaaactattccaaactcatagattaggaactgtccagaagaatgaagataaattaatgatggtttatgaggcaacctaactttttttttttaaagataaatttagtgatttattgtctgacttcattacatgytgtattcagtgcctttccttccattagcttatttcttgaaaactttatataagctccatgttaaaatgagtttcattctaccacccagaaatccaccctgta

SEQ ID NO: 6422 - DNA, 576 bp, Chicken  19866894110568_2
tgtagctttttatttttgcatctctcttgttttgtaaagctataataagaaaaaatcacaaatagtattgaaactacatgctattttacacctccacatagytgtaatatacaaacaataaaaaagcattacttcctttcctccctgctggctgtctgaaccgtagttaaactattccaaactcatagattaggaactgtccagaagaatgaagataaattaatgatggtttatgaggcaacctaactttttttttttaaagataaatttagtgatttattgtctgacttcattacatgytgtattcagtgcctttccttccattagcttatttcttgaaaactttatataagctccatgttaaaatgagtttcattctaccacccagaaatccaccctgtaaaascctactgtttttcattttcttttaaatgtgttatgaaggggtaacaaaacctgtgggtgttgttacagaccaaaaggtctgggggtgtttcttaatcagatggagtgaacaataatgttaaatttagactagaaaggtatatatatatatttaaatctaagaaggaaaga

SEQ ID NO: 6423 - DNA, 470 bp, Chicken  19866894110568_3
atatacaaacaataaaaaagcattacttcctttcctccctgctggctgtctgaaccgtagttaaactattccaaactcatagattaggaactgtccagaagaatgaagataaattaatgatggtttatgaggcaacctaactttttttttttaaagataaatttagtgatttattgtctgacttcattacatgytgtattcagtgcctttccttccattagcttatttcttgaaaactttatataagctccatgttaaaatgagtttcattctaccacccagaaatccaccctgtaaaascctactgtttttcattttcttttaaatgtgttatgaaggggtaacaaaacctgtgggtgttgttacagaccaaaaggtctgggggtgtttcttaatcagatggagtgaacaataatgttaaatttagactagaaaggtatatatatatatttaaatctaagaaggaaaga

SEQ ID NO: 6424 - DNA, 600 bp, Chicken  19866894110570_1
acatctctgttcaattttttttctaaaatatcttcccacaaaactcttcttttttgataaatcagcactttcagatgaaaaattgttctacctagaagtaaacaaccagctttagctttgagaaatgttgattagttaattgtatcagtgagtgcttactttgaagcttagatataaacatatccttaatacccaaccaagctctgctaagaagaaaggatgatttatagagcaatgcagaggctggtggagcccgaggcttgagattaagccctatcttaatacttgttgatactactrcatcctgtgcctccaagaaggaatgacacaatgcagmagaaagggaccagcttttggatatgttatattctgctcttattaattatatctgaggttgagggtttcatgctctgctcatgtgtatgctagtaacaaaagatctgttacagtcacactaaaaatgtttagctatgtatccaaagtaataagccagagcaatgttttgtgttgtttctcaaagaatgcccctccatttgggttcacttcacaaattacattctaaatactttaccatacgatttttctccctaaaaatgaact

SEQ ID NO: 6425 - DNA, 600 bp, Chicken  19866894110570_2
acaaaactcttcttttttgataaatcagcactttcagatgaaaaattgttctacctagaagtaaacaaccagctttagctttgagaaatgttgattagttaattgtatcagtgagtgcttactttgaagcttagatataaacatatccttaatacccaaccaagctctgctaagaagaaaggatgatttatagagcaatgcagaggctggtggagcccgaggcttgagattaagccctatcttaatacttgttgatactactrcatcctgtgcctccaagaaggaatgacacaatgcagmagaaagggaccagcttttggatatgttatattctgctcttattaattatatctgaggttgagggtttcatgctctgctcatgtgtatgctagtaacaaaagatctgttacagtcacactaaaaatgtttagctatgtatccaaagtaataagccagagcaatgttttgtgttgtttctcaaagaatgcccctccatttgggttcacttcacaaattacattctaaatactttaccatacgatttttctccctaaaaatgaactctaatgtccataaccatcttcttctgtttctagtaaa

SEQ ID NO: 6426 - DNA, 600 bp, Chicken  19866894110578_1
tgctgttggttccctttcagattctgtatctgtgttcaggtattacattacaggactgtaattataccaaggttttcagttttctaaaaacaaactgcttagaaataacaaaatagatgtttggcctggagtgtatttctcctgttagaagctggaaattctgagaaaaaatacccatgaattgatttgttactttattccccgtttcttgttcagaagctaccttccgattagtgcaggcttagagggtgaatgtgtgcagttgctgtgggacactggtgtgcattgctgctgttacayaacaataatcctactttattgaaggtagaacaaaataaaggaaaacctcacttctagctgagactcaaaagtgctgaggctgtggtggggtctatgaaacagcactgaaaaagcactgcagcctggatcctgtttgatttctgtagcacaggccttaattaaggatgtaccaggatgaccttgtggtcttttacagaccagtttttctttaatgttactgttaagctgcattcactagtaatgagcaggaagaggactatctcttcctcagagcagtgaatcttgtgtgaagtttgaggc

SEQ ID NO: 6427 - DNA, 600 bp, Chicken  19866894110581_1
cacatcatctcaaggcaaaccaagctgagcccagttaaaatcatttcagcaaacgtttcatgctacatttacatcagtctttccaaagggaaaaccctccatagccattatcctttgagtaactctctgcacattcaaatcttctgaattcatcgtagatttaaaggcatgggtgcgagagtaacaataagcactcagcaaagaaatgagagtaagtcagatacctgcttcattgctctgttaacgccccagcaccgctctcggagtgctgcatacccttcatatcactgcagacaaacwgtagccaaagacctacagtatttgctgtccggtgtgcacagcaatagygatttttgattctgtgcatcccttccctctccccctcccacaggcagtttgcctcgggtaaggctgagggctacaacrctctcgccagtgatatgtccatgccctgtgtctcaccagttgaaaccactcgctcaagtacctgatcagcatccctatgatgctttcttgcaatgttggaaaaaggttttgagtgcttttgcacggtgccgcaatttgacggaatgaatcaaaattgcctgtgtttctcccagc

SEQ ID NO: 6428 - DNA, 600 bp, Chicken  19866894110581_2
gcaaacgtttcatgctacatttacatcagtctttccaaagggaaaaccctccatagccattatcctttgagtaactctctgcacattcaaatcttctgaattcatcgtagatttaaaggcatgggtgcgagagtaacaataagcactcagcaaagaaatgagagtaagtcagatacctgcttcattgctctgttaacgccccagcaccgctctcggagtgctgcatacccttcatatcactgcagacaaacwgtagccaaagacctacagtatttgctgtccggtgtgcacagcaatagygatttttgattctgtgcatcccttccctctccccctcccacaggcagtttgcctcgggtaaggctgagggctacaacrctctcgccagtgatatgtccatgccctgtgtctcaccagttgaaaccactcgctcaagtacctgatcagcatccctatgatgctttcttgcaatgttggaaaaaggttttgagtgcttttgcacggtgccgcaatttgacggaatgaatcaaaattgcctgtgtttctcccagcccattcctgaaggaggcattcacccatccatttatttccatggtgccc

SEQ ID NO: 6429 - DNA, 600 bp, Chicken  19866894110581_3
ctgcacattcaaatcttctgaattcatcgtagatttaaaggcatgggtgcgagagtaacaataagcactcagcaaagaaatgagagtaagtcagatacctgcttcattgctctgttaacgccccagcaccgctctcggagtgctgcatacccttcatatcactgcagacaaacwgtagccaaagacctacagtatttgctgtccggtgtgcacagcaatagygatttttgattctgtgcatcccttccctctccccctcccacaggcagtttgcctcgggtaaggctgagggctacaacrctctcgccagtgatatgtccatgccctgtgtctcaccagttgaaaccactcgctcaagtacctgatcagcatccctatgatgctttcttgcaatgttggaaaaaggttttgagtgcttttgcacggtgccgcaatttgacggaatgaatcaaaattgcctgtgtttctcccagcccattcctgaaggaggcattcacccatccatttatttccatggtgccctgccaaagcatcacaaaaaaaaagcacgctccaaatttagctctattgatacataaatacagtcacttcagctaaaga

SEQ ID NO: 6430 - DNA, 600 bp, Chicken  19866894110581_4
agctaaagagccatcaagtcactctgacgcttggtaacttgattaaatctgtattaatgtagcgagtcttactgcacggcctttaacaccgagccgggaaataattaagttttaaagggagctggtgaaagataacgccaagtctggtttgctgccgcagcgctgataaaggaaggggtatacaattgaacattaattaggtacaagcaaacatctttgctaatagctcatgttctcattcccaaaatgtcaacaacagatattagtgccagatgctggtaaaacatctcccaggactgsaactgggatgcgggaataggtttgtgcacgtggaggaaatgccagtgmtgctggggggaactgccacgatgccccccggagcagcggctgccccacatcaccccgtgattaaaggcagtcgtggtcacactgccaggccctgggaagcagaatttaaccatcagatggcacagtccaggaagcagagacaacattggcactgggagaccaacacacagatcaccggaggctgctacggttatcaagcaccttcccacaataaggcctccactgaatttagggtaatttaggatagaaaat

SEQ ID NO: 6431 - DNA, 600 bp, Chicken  19866894110581_5
ctgtattaatgtagcgagtcttactgcacggcctttaacaccgagccgggaaataattaagttttaaagggagctggtgaaagataacgccaagtctggtttgctgccgcagcgctgataaaggaaggggtatacaattgaacattaattaggtacaagcaaacatctttgctaatagctcatgttctcattcccaaaatgtcaacaacagatattagtgccagatgctggtaaaacatctcccaggactgsaactgggatgcgggaataggtttgtgcacgtggaggaaatgccagtgmtgctggggggaactgccacgatgccccccggagcagcggctgccccacatcaccccgtgattaaaggcagtcgtggtcacactgccaggccctgggaagcagaatttaaccatcagatggcacagtccaggaagcagagacaacattggcactgggagaccaacacacagatcaccggaggctgctacggttatcaagcaccttcccacaataaggcctccactgaatttagggtaatttaggatagaaaataataattaaaaaaccttcaacagaagcaagaaaatcctaaatcttgct

SEQ ID NO: 6432 - DNA, 600 bp, Chicken  19866894110582_1
aagggaaaaaaaaggtctcggcacatagcaaatagaaagggataagctgaagagagaacctaactgcaattgcactggtcaccaattggcactctccatgtttcaaatacaggctgtaacagcagggttctgataaaactggtcccagagttgaaatctacaggtctacataggatctacatcggacttcccactttctatgaacagaaatctatgaaaagatcagacttctgcacaatactctttgcagttcagtgcccatggaactgcaagagcatgaggccaacgaactgtaagaaytgcagctcagctgcatcccaccacaaaggatccacgcatttccagcccaagatgagtagttatcacagggtaatctctgattgtaaccatttaaatccgagaaagtcttgaatcagaactgctgaaatgagtcatataagatttatatgaataatttcttccccactagtgatctcataaattttttgacaataatgttttcatgcatctttgctagtgcttcgacttccaaatacttcacaccacgtaaattatttacaatttttcagcagctagtgaataatttctttgtgagcagct

SEQ ID NO: 6433 - DNA, 600 bp, Chicken  19866894110585_1
tctgacagccctggaaaaatgtgtcagaaagcccacagcggcacaagtaaaactaaatacatatgtgcaggtagtcaggaggtatacttggccaacactgtcggggcaaccctgaaatctaatccctgatcatgttttgattacctaaacagagtgtttactgccttctgagatgtcaagcgtagacatttaaattgacaccaataaaagggttgttaatctccgttgaaagtactgagtaaaccactcgagtttgataggaatttagatgcttggctggtttgtaagcacctgtatggyatatatgtatattttggcaccttaatttgaaattgagttctatccaaaccatacactggttgcctaaacacatatttttagttaccttcaagatactctacagtactgctcaccctctagaacagcgttaagcatctacatttaagcaatcagatcctcctccaaaggtgtaaaataaatttggtatcagttcaggtgcctaaataaaaaatattgagtgcagtttgggatgttctaggatactcaaaatatgaggcattacaccatgggatatatcacagcctgtgcttttctgaagtg

SEQ ID NO: 6434 - DNA, 600 bp, Chicken  19866894110586_1
aaagccatatcttcttttttcatttttactgatttgagctgagagaaatctgctctggcgaacccccttgagccttctgatttttcccatattaggcatagaatgaaaacaacatgtatttcctattgcctcatgcacctctcaaaaggaaagcaggggaaatatcactgagctcttttaagatagaacagaagattccataggtgtcataatgatttttaaggatgctgcctcaaggcatagtcttggggaccactaagtccccatgtctctagcatctctgaatttattataaatacwtttytttttctgtacgctatattatgtaaaaggaaaatataataacttattccaaaaatgatttaaaaaaagctgcaaaagcaacaaaagatgaactgtattgcattttatcttctccttcatcccccccccccaaaaaaaaaactaaaaaaaaaacctaccacagacaattgtgtctgaagactcttggccagggaaccatggagacatgatttgtatcatgcaacagtgaatttattttgggtgctggagataggggatgatcaaagatgaggatgaggtaagccataaatacaggtg

SEQ ID NO: 6435 - DNA, 600 bp, Chicken  19866894110586_2
ccatatcttcttttttcatttttactgatttgagctgagagaaatctgctctggcgaacccccttgagccttctgatttttcccatattaggcatagaatgaaaacaacatgtatttcctattgcctcatgcacctctcaaaaggaaagcaggggaaatatcactgagctcttttaagatagaacagaagattccataggtgtcataatgatttttaaggatgctgcctcaaggcatagtcttggggaccactaagtccccatgtctctagcatctctgaatttattataaatacwtttytttttctgtacgctatattatgtaaaaggaaaatataataacttattccaaaaatgatttaaaaaaagctgcaaaagcaacaaaagatgaactgtattgcattttatcttctccttcatcccccccccccaaaaaaaaaactaaaaaaaaaacctaccacagacaattgtgtctgaagactcttggccagggaaccatggagacatgatttgtatcatgcaacagtgaatttattttgggtgctggagataggggatgatcaaagatgaggatgaggtaagccataaatacaggtgtaaa

SEQ ID NO: 6436 - DNA, 558 bp, Chicken  19866894110590_1
cagaatgatcatgtatgtgggcatttaaatatcagaggcagttaccactatgaggactgggagagggaaaagacataaaatgagattaagccagaaggatatgagctgccataaaagtaactcaataaagaaggcacagagctcaagctgtacacccataagcatcccatcgctatgaacccagagatacagtgggatcaggtcaaaaaacacaaggatgggaaatggtttttggcagatggaggctcttccaaggtgccccatactgcaacacagaccagggaacctgaaatgggtttrggatcagtatgtttctgccacttctggtgcttgctagagcagaaccaccactgccccagaggttgcaaggaaataaatgtattgacagaataatgataatgtgcttgcagtagaaaattgcctatattcgggcaatgccatactataactctgcaacagtaacaggcagccccagaaataggaagagaatcagctttggagagattttcagcttttaaagaaaattaaacaaaatgaaaatcactggcaatacatgca

SEQ ID NO: 6437 - DNA, 600 bp, Chicken  19866894110598_1
tttattatttttttcctcacagataactgcttgttcacaatagcaattctgagataattcagaaatttactgataatttcaccatctaattttctgatgacaaatagagtacagctctgctataaaaccctgtagcacagttcacatatcaaacataaataaatcaataaaaaatcactccactacacatatgattttatcctttgagagaagatgacggaatggatagaccacatttgaattcatcatcacatttctagttggagaagctcaagacaaatgtgatattaaaaaaaaaartaacaacaacaacaacaaaaaactctgaatctattacaaaagtaagtgtagctttctcctggtgggaaaagaaaatttaattgtaatcagacaccaaagaagaggaagatctggaaaattcatatttgaataaaactttaaaattagcccaaactttggggcttacagatcagactgcatctagcaaaaacaaagaggtttttatatatctttaaacccactcttcctgtgacataggagtgcctgctatcagaacccagaaaggttaaaatagacatatgttttattagtaaaatagac

SEQ ID NO: 6438 - DNA, 600 bp, Chicken  19866894110605_1
tttatattttcctcacatacctattgcttcttatggaaaatactgctttttgtttgcagaagacagtacaatgaaaaagcaagactgaacagaggtagaaaatggctgagtataaagctgccttaactcagtatgatcatcctcgcttcccttaatagaacatctaaaggcagtgagagatgaagacactgcacacccaaacagaagctcttcaacagtgaaagtccatggctttgtagtattcattcagctgcagagtcacttctctcttgtatcagcactgggtgcagcagccctctstgcatggctatgtctcgttttacgtaagacagaagtcctggtgtcattaaagcattactcctgcttttacattaaaaatatcaaagcttcagtagtctaattggaataattagctatgaaaatctgaccgcaagtaatcaagggaattggttgggaaggtgcacttagaacttgatacctatttattgtaaccaattagaaagcagaactttagatctcagtttagctgatctttccccgagtgcttagctattacaaggatttagtatacctttcttccttctctgattccatccattt

SEQ ID NO: 6439 - DNA, 600 bp, Chicken  19866894110608_1
acataacatgccagagactcaagaaaatgtgaatagtagctaattcattagggttttctaatagaaataaggttcttaagcaacagggagttcttttcagaagttcaatggcttttctcagaagttaaaggatttggacatataaacaatgtaagattatgtttgatgcaaagtgaattctgtttctgtttgaatcagggatgtttctgaggccaggcccatataacgtattatgtattgctgggtctcactcttaatggtgatcatttgaatgccgttaataacgcagtgatcctcttmtttgcttcttcacctacaaggatggcttggtgttcacctttggagcaggaggggctggccagcttggtcacaactccacccggaatgaatttagacctcgcatggtggctgaactgtggggagcaagagtttcactggttgcctgtggaaggtggggaaagtaccttaataaaatgccttcctaggtcagactctcagatgaatcactgaagaacagtagggagggaaatcaccaagatgcttaaatccctgtattccagtagatcagttctgtcagtgtcttgtccatccttcacgcac

SEQ ID NO: 6440 - DNA, 599 bp, Chicken  19866894110615_1
  misc_feature (1)..(82): n is any nucleotide
nnnnnnnnnnnnnnnnnnnnnnnnnnnnnnnnnnnnnnnnnnnnnnnnnnnnnnnnnnnnnnnnnnnnnnnnnnnnnnnnnngtggtgcccagcatgaagcacctcagaccagtcagagcagccagactgtgagaacagatgctgaatgctcccgaaaaccacagctcttcacgagttctcaagctgaacatcaaaaactgctaaatgcttcacgttttacttcttcctcggtgttgcacacactcagaatggcaaaagctttacaatctgaagtcaatacaagagcactggtgtaccaycggcttacaatagcatctatttgaaggggtgctttaacagcctgcagtgctggaaggcggcttttctgcaccgcttcgagcaagtatgtgcccatctgagcatttggtggcatgatttatttatcagaacttcagtacagttttttttctcccctttgacacgggattaaaattaaacatccttaactgtgggagatgaaagcacagcgtagctcattcagatatgtctgaatagatatgtgtgtaagtgactgttctttgtgagcttgatctcatgytcctgtattgacaaactgcct

SEQ ID NO: 6441 - DNA, 540 bp, Chicken  19866894110615_2
tacaagagcactggtgtaccaycggcttacaatagcatctatttgaaggggtgctttaacagcctgcagtgctggaaggcggcttttctgcaccgcttcgagcaagtatgtgcccatctgagcatttggtggcatgatttatttatcagaacttcagtacagttttttttctcccctttgacacgggattaaaattaaacatccttaactgtgggagatgaaagcacagcgtagctcattcagatatgtctgaatagatatgtgtgtaagtgactgttctttgtgagcttgatctcatgytcctgtattgacaaactgcctcaagacttgctgcagtgggtgcttggaagggcttggatgtgtggctacatgcccagaggagctaaaggttggactggacaaaggcaaagctatgcaggctttgatccttggaaggcgtaattgatagctgtcattgatacaaaggcttctctttaaggctaaagagacccatggggtctgtggcccggtcattgtacctgctgagcacaacactgctca

SEQ ID NO: 6442 - DNA, 599 bp, Chicken  19866894110617_1
  misc_feature (1)..(26): n is any nucleotide
nnnnnnnnnnnnnnnnnnnnnnnnnntcactgcacattgtatggttacttaggcagctgttaagctcttgctggagtcttccccagtacagagacatgcatatgataatatttagcttaactattttcaataagtcaacgtgggctgccattcaaaagaccaaaaaggtgaccccatacagtaagtcttacatacttcaagcagttccaaacacgtatgtgctttagcaggactgggctggagaaggaattacttaatgaaagctgctatgtgttaaaacatgccttaattcacaaatgyggggtcacgtgaataacagcctacaaaatctagttcagaatttgtgctttctttctacgcagccactctcctgcagttccctgctctggaaacgtgccccaatcagtgccagcaacagctgcactcacagagaggcaggagcatcctcaccagcacagctgcacagggctgaaaaggggcggacgaccaccagcacgtacagcaatactttccattcacaacccamggaggctactctgcacagcagatacagcrtatcaagttttggatatctgcaattccctgtctggcactggtac

SEQ ID NO: 6443 - DNA, 573 bp, Chicken  19866894110617_2
gcaggactgggctggagaaggaattacttaatgaaagctgctatgtgttaaaacatgccttaattcacaaatgyggggtcacgtgaataacagcctacaaaatctagttcagaatttgtgctttctttctacgcagccactctcctgcagttccctgctctggaaacgtgccccaatcagtgccagcaacagctgcactcacagagaggcaggagcatcctcaccagcacagctgcacagggctgaaaaggggcggacgaccaccagcacgtacagcaatactttccattcacaacccamggaggctactctgcacagcagatacagcrtatcaagttttggatatctgcaattccctgtctggcactggtactattcttgacttcgcagcattgcaagaaacatttgtagatactaatgttgatttttcagaattcaaacgatcgtgacaaagttggaaaacactgccatatgaaagtgctataaacgataaagtcaaacggagcacagattggaaccggaacgctgctgtagcttccagccagcaggtcacacagcctaacgcaacggatg

SEQ ID NO: 6444 - DNA, 544 bp, Chicken  19866894110617_3
aatgaaagctgctatgtgttaaaacatgccttaattcacaaatgyggggtcacgtgaataacagcctacaaaatctagttcagaatttgtgctttctttctacgcagccactctcctgcagttccctgctctggaaacgtgccccaatcagtgccagcaacagctgcactcacagagaggcaggagcatcctcaccagcacagctgcacagggctgaaaaggggcggacgaccaccagcacgtacagcaatactttccattcacaacccamggaggctactctgcacagcagatacagcrtatcaagttttggatatctgcaattccctgtctggcactggtactattcttgacttcgcagcattgcaagaaacatttgtagatactaatgttgatttttcagaattcaaacgatcgtgacaaagttggaaaacactgccatatgaaagtgctataaacgataaagtcaaacggagcacagattggaaccggaacgctgctgtagcttccagccagcaggtcacacagcctaacgcaacggatg

SEQ ID NO: 6445 - DNA, 600 bp, Chicken  19866894110621_1
cccggtgcagctccgccagcggcaatggctgcgttgtttgccggagtggccctgaacatgtgcgagccgtggattatgcacagcccctaatcgctgtaggaacagcttgatgctgctgcagctctccccggtgctttgtgcgagcgagcttttaatagtgcctgtgacacagaaaaggaactatcagcctcctgtaatttgggttcgtttttactgctggtgcgtcaggagacaactgtgaactaatttcagggatgccatttgataaccttgtgaaatctgtcaccgtttcagccatcrggggggagctctcgcgggcgccgcttggccgggggtcggtgtctgtgtgcctgggggctcccgtgtgctcygggctgtgtgggacagccctgctccattccttccccyggggctcagtgtgttctggggggccggcttgctcccatccctccgtccccactttcctcctattatccacttgtaaaatggggctgctcctttttgctgggctgaagttcaggcaggctgtgtcccaaggctgttktcaccaaggggtgctgctccccatctcctcgtgctgtttccactcccctccccctg

SEQ ID NO: 6446 - DNA, 600 bp, Chicken  19866894110621_2
gattatgcacagcccctaatcgctgtaggaacagcttgatgctgctgcagctctccccggtgctttgtgcgagcgagcttttaatagtgcctgtgacacagaaaaggaactatcagcctcctgtaatttgggttcgtttttactgctggtgcgtcaggagacaactgtgaactaatttcagggatgccatttgataaccttgtgaaatctgtcaccgtttcagccatcrggggggagctctcgcgggcgccgcttggccgggggtcggtgtctgtgtgcctgggggctcccgtgtgctcygggctgtgtgggacagccctgctccattccttccccyggggctcagtgtgttctggggggccggcttgctcccatccctccgtccccactttcctcctattatccacttgtaaaatggggctgctcctttttgctgggctgaagttcaggcaggctgtgtcccaaggctgttktcaccaaggggtgctgctccccatctcctcgtgctgtttccactcccctccccctgtccccaagcaggatgtgtataggacrcatgggtgcacagcccaacacggtcactgctgcggtggacgagag

SEQ ID NO: 6447 - DNA, 600 bp, Chicken  19866894110621_3
gatgctgctgcagctctccccggtgctttgtgcgagcgagcttttaatagtgcctgtgacacagaaaaggaactatcagcctcctgtaatttgggttcgtttttactgctggtgcgtcaggagacaactgtgaactaatttcagggatgccatttgataaccttgtgaaatctgtcaccgtttcagccatcrggggggagctctcgcgggcgccgcttggccgggggtcggtgtctgtgtgcctgggggctcccgtgtgctcygggctgtgtgggacagccctgctccattccttccccyggggctcagtgtgttctggggggccggcttgctcccatccctccgtccccactttcctcctattatccacttgtaaaatggggctgctcctttttgctgggctgaagttcaggcaggctgtgtcccaaggctgttktcaccaaggggtgctgctccccatctcctcgtgctgtttccactcccctccccctgtccccaagcaggatgtgtataggacrcatgggtgcacagcccaacacggtcactgctgcggtggacgagagcgctgcgaaaaccacgtgaggagggatttaatgcctt

SEQ ID NO: 6448 - DNA, 600 bp, Chicken  19866894110621_4
aatttcagggatgccatttgataaccttgtgaaatctgtcaccgtttcagccatcrggggggagctctcgcgggcgccgcttggccgggggtcggtgtctgtgtgcctgggggctcccgtgtgctcygggctgtgtgggacagccctgctccattccttccccyggggctcagtgtgttctggggggccggcttgctcccatccctccgtccccactttcctcctattatccacttgtaaaatggggctgctcctttttgctgggctgaagttcaggcaggctgtgtcccaaggctgttktcaccaaggggtgctgctccccatctcctcgtgctgtttccactcccctccccctgtccccaagcaggatgtgtataggacrcatgggtgcacagcccaacacggtcactgctgcggtggacgagagcgctgcgaaaaccacgtgaggagggatttaatgcctttctgggaccgctgctcccatccgaagcaggagcagggggaagggaggcttttaggctgctaatcatgaaattttattgcagcctggagaggctgctggcaaaccacaacacatcggcgcgcacacgcgctcacaaa

SEQ ID NO: 6449 - DNA, 600 bp, Chicken  19866894110621_5
ggccgggggtcggtgtctgtgtgcctgggggctcccgtgtgctcygggctgtgtgggacagccctgctccattccttccccyggggctcagtgtgttctggggggccggcttgctcccatccctccgtccccactttcctcctattatccacttgtaaaatggggctgctcctttttgctgggctgaagttcaggcaggctgtgtcccaaggctgttktcaccaaggggtgctgctccccatctcctcgtgctgtttccactcccctccccctgtccccaagcaggatgtgtataggacrcatgggtgcacagcccaacacggtcactgctgcggtggacgagagcgctgcgaaaaccacgtgaggagggatttaatgcctttctgggaccgctgctcccatccgaagcaggagcagggggaagggaggcttttaggctgctaatcatgaaattttattgcagcctggagaggctgctggcaaaccacaacacatcggcgcgcacacgcgctcacaaatcagctgcagaaagccccagcagcccccccacgtccatgagtgtgagtggagctgtgctgcgggtgagccctgcgcagggcc

SEQ ID NO: 6450 - DNA, 600 bp, Chicken  19866894110623_1
ttattagtgtaactgggaatcataaatgcaatatttgaatgcttagaatgaggcactacaggagacagtctctttgattgcagcagataagtgtgtaaatgaaggtatgtctgaacagagttggctgcatgctgccttctgaaacattcctttaatgagttttaccatgttttccaaagtattcaacaaataaattttaatgagttatcttccttaagttggatgagtgatcctcaaatatatacagatatccagaaaagaatattttcagtttttgccatcaacatctgtccttgtcaytgttgttggatgaattgttattagagatggtttatggagaagtagtatctgaagaaatgtccccatacagtaataaaaaaggtaattttttccttgtgctcttcttctttgttctcttgtatgtttgctgtcctgctcatgccttaggggtgtaatttaccgtgactaggaatgttttacttaagttctcagtttgaatttaaaatcagwaggcagggagctattgcctggaagggcttaacaattctattgctatttgttttgcttcttaactcagtacataaactgcagattttaggc

SEQ ID NO: 6451 - DNA, 571 bp, Chicken  19866894110623_2
tccttaagttggatgagtgatcctcaaatatatacagatatccagaaaagaatattttcagtttttgccatcaacatctgtccttgtcaytgttgttggatgaattgttattagagatggtttatggagaagtagtatctgaagaaatgtccccatacagtaataaaaaaggtaattttttccttgtgctcttcttctttgttctcttgtatgtttgctgtcctgctcatgccttaggggtgtaatttaccgtgactaggaatgttttacttaagttctcagtttgaatttaaaatcagwaggcagggagctattgcctggaagggcttaacaattctattgctatttgttttgcttcttaactcagtacataaactgcagattttaggcgttatgcaatacaatcaggtgatacaagggtcaggcttctagtggtttaaacattatatccatccattcaagacacagcctgagggcaaagctgtggcttgcacattcacagtagtttaatgaacatcctaatatccaatgctttatcttcaccagatgtgctctattttattcttcatag

SEQ ID NO: 6452 - DNA, 600 bp, Chicken  19866894110625_1
gcttcagcactgcccagcttcccagaatggccctggctcctaaccaggcagccatacttagtatctacaataccaaccacttgggcagcccaaatctcatcaccagttactgcaaagattccttctctgcacttaaagataaaccaaagctaaagacttttgctctcttcctcctctccccagccacatccctatctcaggggcatccttttgctgcccttccgttgaatgcaagtgctttgtaacaccactgtgcttgtaccataatcatgcagaggtactaccaataaaaaagggatygttcgttggttgggggttttttttgttctgtttgggatagaagctggacttggctgcagcgcgatgagatgtgtttcagactcggcatagaaacataccagaaacttcaaataagagaaakgagctgtgagaaggaagcaagcttacagtacagcacaaggaaaaacatgagaaagcatcaggctttccattctgctcttcatgcatacaaaaatacacaacttcccaagggcacagggctgtaaccggcagctttccgttactgctttaataggaggacaaaaaccagccctgagagaa

SEQ ID NO: 6453 - DNA, 600 bp, Chicken  19866894110625_2
cttctctgcacttaaagataaaccaaagctaaagacttttgctctcttcctcctctccccagccacatccctatctcaggggcatccttttgctgcccttccgttgaatgcaagtgctttgtaacaccactgtgcttgtaccataatcatgcagaggtactaccaataaaaaagggatygttcgttggttgggggttttttttgttctgtttgggatagaagctggacttggctgcagcgcgatgagatgtgtttcagactcggcatagaaacataccagaaacttcaaataagagaaakgagctgtgagaaggaagcaagcttacagtacagcacaaggaaaaacatgagaaagcatcaggctttccattctgctcttcatgcatacaaaaatacacaacttcccaagggcacagggctgtaaccggcagctttccgttactgctttaataggaggacaaaaaccagccctgagagaagaactgacgaagcaacattaatcactacttactgctcttctacctaacacaactttgccttgcaaaaccttgaaaagtaccatcttgatgacaaaaaaagaacaaaaaatacacagagttg

SEQ ID NO: 6454 - DNA, 600 bp, Chicken  19866894110625_3
tacacaacttcccaagggcacagggctgtaaccggcagctttccgttactgctttaataggaggacaaaaaccagccctgagagaagaactgacgaagcaacattaatcactacttactgctcttctacctaacacaactttgccttgcaaaaccttgaaaagtaccatcttgatgacaaaaaaagaacaaaaaatacacagagttgcacgtaaaacctcacaatgttctttcagaggactgtcacgtagcagaatgtattttttttttcttagatcagagttgtttataaatatttgcragcagccgaaacaaaccatgagagtactttcactttcatgggcaggcaacagcagaagaggaactgaactcctagctccaccccttcttccagccttcagggttaccaaaacagaggatctgtgtcaacaaacaaaacaaggtgctgctaacagcayaggacagttgccacttgcctcagacagctagaagcaaaacctctttgatctggcagcctctgaagaaccttatcaagtcttcagcagaattaagattttcagcacatgggcaggttcatcagatctgaagacttactgtgcta

SEQ ID NO: 6455 - DNA, 600 bp, Chicken  19866894110625_4
gaaaagtaccatcttgatgacaaaaaaagaacaaaaaatacacagagttgcacgtaaaacctcacaatgttctttcagaggactgtcacgtagcagaatgtattttttttttcttagatcagagttgtttataaatatttgcragcagccgaaacaaaccatgagagtactttcactttcatgggcaggcaacagcagaagaggaactgaactcctagctccaccccttcttccagccttcagggttaccaaaacagaggatctgtgtcaacaaacaaaacaaggtgctgctaacagcayaggacagttgccacttgcctcagacagctagaagcaaaacctctttgatctggcagcctctgaagaaccttatcaagtcttcagcagaattaagattttcagcacatgggcaggttcatcagatctgaagacttactgtgctattaacagagcttctatcagagtacgttttacaacaggcacagactggagggcactaccaacaaccagtgaaggtttctctttacagtccaactgctgaagcctgcagacaggcttgacagcaagcagtgagaggcacggcgggcacgcaggcaggta

SEQ ID NO: 6456 - DNA, 600 bp, Chicken  19866894110626_1
atcgagttgcctttgggcaatacagataaaaccttggagttactgatggagccactttctcaaggagaaagtacaactcaaaataatagtgtgtatgtcaaaattttgtcagccaccttgaaatggcacatttattttgctgtacagataatttacccctaaaattcacaagtctgtgtctgaaaattggacttgtccagctctgactgtctgggatgggaagcaagtaaacgtaaagtttgttggctgtaattcctttcaaattataaaaataatctgaataatttgtgctttgttggmaatgtgcccctccaaaaaaaaattytgaragagataactgtttcaaaatccacatttcattttggactcctatcattaaaaaattgaccttcgatttcttcttgtgtctcttcgtggcgtattatcacattattgttcagttataatgcaaaactgacatgccagaacrgctgtaagaatatcaaagaaagatgtggttttatttcttcttgttttgttagctaacttaatagttgtgccatacataatgaatgttgaaggctccattatagctagctaggcttctgagagagtgactca

SEQ ID NO: 6457 - DNA, 600 bp, Chicken  19866894110626_2
ataaaaccttggagttactgatggagccactttctcaaggagaaagtacaactcaaaataatagtgtgtatgtcaaaattttgtcagccaccttgaaatggcacatttattttgctgtacagataatttacccctaaaattcacaagtctgtgtctgaaaattggacttgtccagctctgactgtctgggatgggaagcaagtaaacgtaaagtttgttggctgtaattcctttcaaattataaaaataatctgaataatttgtgctttgttggmaatgtgcccctccaaaaaaaaattytgaragagataactgtttcaaaatccacatttcattttggactcctatcattaaaaaattgaccttcgatttcttcttgtgtctcttcgtggcgtattatcacattattgttcagttataatgcaaaactgacatgccagaacrgctgtaagaatatcaaagaaagatgtggttttatttcttcttgttttgttagctaacttaatagttgtgccatacataatgaatgttgaaggctccattatagctagctaggcttctgagagagtgactcattgtagagatgcatgtaggttctgt

SEQ ID NO: 6458 - DNA, 600 bp, Chicken  19866894110626_3
aaccttggagttactgatggagccactttctcaaggagaaagtacaactcaaaataatagtgtgtatgtcaaaattttgtcagccaccttgaaatggcacatttattttgctgtacagataatttacccctaaaattcacaagtctgtgtctgaaaattggacttgtccagctctgactgtctgggatgggaagcaagtaaacgtaaagtttgttggctgtaattcctttcaaattataaaaataatctgaataatttgtgctttgttggmaatgtgcccctccaaaaaaaaattytgaragagataactgtttcaaaatccacatttcattttggactcctatcattaaaaaattgaccttcgatttcttcttgtgtctcttcgtggcgtattatcacattattgttcagttataatgcaaaactgacatgccagaacrgctgtaagaatatcaaagaaagatgtggttttatttcttcttgttttgttagctaacttaatagttgtgccatacataatgaatgttgaaggctccattatagctagctaggcttctgagagagtgactcattgtagagatgcatgtaggttctgtattt

SEQ ID NO: 6459 - DNA, 600 bp, Chicken  19866894110626_4
aagtctgtgtctgaaaattggacttgtccagctctgactgtctgggatgggaagcaagtaaacgtaaagtttgttggctgtaattcctttcaaattataaaaataatctgaataatttgtgctttgttggmaatgtgcccctccaaaaaaaaattytgaragagataactgtttcaaaatccacatttcattttggactcctatcattaaaaaattgaccttcgatttcttcttgtgtctcttcgtggcgtattatcacattattgttcagttataatgcaaaactgacatgccagaacrgctgtaagaatatcaaagaaagatgtggttttatttcttcttgttttgttagctaacttaatagttgtgccatacataatgaatgttgaaggctccattatagctagctaggcttctgagagagtgactcattgtagagatgcatgtaggttctgtatttatccagcacttttcagttcaccttgagtgcttgacaaatgctagaagaaattgattttttggtctctctcttccctctcctcattccattttgcttctttcctttaagaaaatgttacagaataatcttacactgcgttt

SEQ ID NO: 6460 - DNA, 600 bp, Chicken  19866894110633_1
tgtaaaaaatgtggatcaaaagtcaggagtcgggaagtgggacagtgttcaagtagacccatctgtaaacactggagtattgttcttattattgtgtttttgaccagaacattacacgcatatgttcaggtaatccttggattaaggaaacctcttttaatgcctactgtgataccaaatccatgtcttagtaacagcctgctagatttaagccttctcattgagttattcatccctcctcagggggcaagtggatgagtgtacttcctttgctaacaaatatctcatagtttgtagacrtctcttctyagcagcctttcctttctgctttccaccatgtctcacatgcttaatgggcagctaacaagggtgactcagtaggcagtcaatgttgtctttggaaaagtgcactcagaagcagagttgatgaacagtacattttggggacaagaatgagggattttctgaataaacagttttgtgtcactggtgataaacaagtcctctcagctggtatataaattcaaaatttctgtcagtatgtgctgtcagtatgaaaacaacagaagagaaaagcaagtctggactgcctgttggtct

SEQ ID NO: 6461 - DNA, 600 bp, Chicken  19866894110633_2
tgtggatcaaaagtcaggagtcgggaagtgggacagtgttcaagtagacccatctgtaaacactggagtattgttcttattattgtgtttttgaccagaacattacacgcatatgttcaggtaatccttggattaaggaaacctcttttaatgcctactgtgataccaaatccatgtcttagtaacagcctgctagatttaagccttctcattgagttattcatccctcctcagggggcaagtggatgagtgtacttcctttgctaacaaatatctcatagtttgtagacrtctcttctyagcagcctttcctttctgctttccaccatgtctcacatgcttaatgggcagctaacaagggtgactcagtaggcagtcaatgttgtctttggaaaagtgcactcagaagcagagttgatgaacagtacattttggggacaagaatgagggattttctgaataaacagttttgtgtcactggtgataaacaagtcctctcagctggtatataaattcaaaatttctgtcagtatgtgctgtcagtatgaaaacaacagaagagaaaagcaagtctggactgcctgttggtctctttctgat

SEQ ID NO: 6462 - DNA, 600 bp, Chicken  19866894110636_1
cagcagcccctcaatcaggttatgcaagtgaaccagagcaatttgccaaagcccaagttagcacctgcacagacatagatttacacccttacatccatctgagcaggtcaagacacagccttgggcaaggacaggatctgctgccatcagcttaaagggccaagtccacatctgtgctggggaaaagagagcaggagaggcacattggacatttgtattgcaccactcatctcaaacttgaccatttgccctgattaagacaagtcagttattgagatgccagacacacagccgtatggraagtctcagttctcaccaagcaggagttatgaggaactgtagccacgaacctaaacaagatgcttaataaccattaagcattatctttcacctagaacatgtcaaagtggtttttattattggcttcctatcataattctcttatctcctcagcagcataatgtagcattggtcatggtggttcacaccactggtcttccagtctgaagtcctgtccttagcaggacaggactaattagcaagaccaatgacctcagctgagctgactcattagcagctcaaggttaattacttgtggtt

SEQ ID NO: 6463 - DNA, 599 bp, Chicken  19866894110640_1
  misc_feature (1)..(254): n is any nucleotide
nnnnnnnnnnnnnnnnnnnnnnnnnnnnnnnnnnnnnnnnnnnnnnnnnnnnnnnnnnnnnnnnnnnnnnnnnnnnnnnnnnnnnnnnnnnnnnnnnnnnnnnnnnnnnnnnnnnnnnnnnnnnnnnnnnnnnnnnnnnnnnnnnnnnnnnnnnnnnnnnnnnnnnnnnnnnnnnnnnnnnnnnnnnnnnnnnnnnnnnnnnnnnnnnnnnnnnnnnnnnnnnnnnnnnnnnnnnnnnnnnnnnnnnnnnnnnnaaaaaaaaccctcaaataaaccgtgaatttcagcagcatggaatcygactttatctaaacctgaatgactgacaaatcttgagtcagcaacctggtttgagatctgcaggtctctgtgcctttcctcagagcagcacaacttggtctcaccatgggcggacatcagaagagtgagatattcactctctccctgccaagcagcaggcttgcctgacataaaggcagaagcagagaagggctttcctccatagtttgtctaaatacatstgtagagataaacagcctccgaactcagattgcttttcatttgtatgcttaaatagacattagtgttaatgagagtcc

SEQ ID NO: 6464 - DNA, 599 bp, Chicken  19866894110640_2
  misc_feature (1)..(33): n is any nucleotide
nnnnnnnnnnnnnnnnnnnnnnnnnnnnnnnnnaaaaaaaaccctcaaataaaccgtgaatttcagcagcatggaatcygactttatctaaacctgaatgactgacaaatcttgagtcagcaacctggtttgagatctgcaggtctctgtgcctttcctcagagcagcacaacttggtctcaccatgggcggacatcagaagagtgagatattcactctctccctgccaagcagcaggcttgcctgacataaaggcagaagcagagaagggctttcctccatagtttgtctaaatacatstgtagagataaacagcctccgaactcagattgcttttcatttgtatgcttaaatagacattagtgttaatgagagtccaagcaccttatggtgaattcttccatagggtggaaaatggagtgaagcaatgcaggcagctataggacactggattgctaagaacacatttcatctgtctcacacacagctgctctcctgcctggtcagcctcagctctgagtgctttcttcttactgttgctctcaaagaaccaaatgctactcaaagcagtttgcagcaactctgacagtgaacctcag

SEQ ID NO: 6465 - DNA, 600 bp, Chicken  19866894110640_3
cttatggtgaattcttccatagggtggaaaatggagtgaagcaatgcaggcagctataggacactggattgctaagaacacatttcatctgtctcacacacagctgctctcctgcctggtcagcctcagctctgagtgctttcttcttactgttgctctcaaagaaccaaatgctactcaaagcagtttgcagcaactctgacagtgaacctcagaccagttttcaccacccatgaaatcctggtccaaaaggaagaccccacacccagagtaacttggtagatgctaagagagaaacayrcatattttgcaggaagtaatcatgtagtgaaaacgttccctggctcttctatacatattaattattgcatgatacacagaacacataaatctctgtactagtttttttaaaaatgggcctcataacaaatggtttcatttcagcagcatcggtcagagcacagaaagcaggatacccccaaggtagggctgcagaacagcccctgcattgctttcctcagccccaccatttccatgcaccagagccatgctcagacaccctgctggccaggctgcagcacagaagctgcctgagctgaa

SEQ ID NO: 6466 - DNA, 600 bp, Chicken  19866894110640_4
ttatggtgaattcttccatagggtggaaaatggagtgaagcaatgcaggcagctataggacactggattgctaagaacacatttcatctgtctcacacacagctgctctcctgcctggtcagcctcagctctgagtgctttcttcttactgttgctctcaaagaaccaaatgctactcaaagcagtttgcagcaactctgacagtgaacctcagaccagttttcaccacccatgaaatcctggtccaaaaggaagaccccacacccagagtaacttggtagatgctaagagagaaacayrcatattttgcaggaagtaatcatgtagtgaaaacgttccctggctcttctatacatattaattattgcatgatacacagaacacataaatctctgtactagtttttttaaaaatgggcctcataacaaatggtttcatttcagcagcatcggtcagagcacagaaagcaggatacccccaaggtagggctgcagaacagcccctgcattgctttcctcagccccaccatttccatgcaccagagccatgctcagacaccctgctggccaggctgcagcacagaagctgcctgagctgaag

SEQ ID NO: 6467 - DNA, 599 bp, Chicken  19866894110653_1
  misc_feature (1)..(103): n is any nucleotide
nnnnnnnnnnnnnnnnnnnnnnnnnnnnnnnnnnnnnnnnnnnnnnnnnnnnnnnnnnnnnnnnnnnnnnnnnnnnnnnnnnnnnnnnnnnnnnnnnnnnnnnaaatgagacttcggcaaaaaatatataacaagttggaagaagctgtacagagtttaagttacattgccttccgttcaagcacatactttggtatgtgcttgaacagtgacaaagccaaggtgtgaaactctgggagaaggtgaaagtcatgcacagaagtcagtggtaatgcccaggtacggaaaccaagcaaaaarctcagcagcacccagcagctctgtgcacaggtagtttgctatttctaacagatgtcagaaggatgagttatcaattgaactgcttaagctacccacacgtgttctgcataatttcctgttctttttatgcatataaaaactactgcattttcttagttctgcaatttctggaaggaaacgttcttcaccgctttatcaaactacactcacagcctttttacatacaactttgtcctttcatcctgcagccaggattgtccaggcycttcttctgataaggggatgagtgcagaaagtga

SEQ ID NO: 6468 - DNA, 600 bp, Chicken  19866894110653_2
gtggtaatgcccaggtacggaaaccaagcaaaaarctcagcagcacccagcagctctgtgcacaggtagtttgctatttctaacagatgtcagaaggatgagttatcaattgaactgcttaagctacccacacgtgttctgcataatttcctgttctttttatgcatataaaaactactgcattttcttagttctgcaatttctggaaggaaacgttcttcaccgctttatcaaactacactcacagcctttttacatacaactttgtcctttcatcctgcagccaggattgtccaggcycttcttctgataaggggatgagtgcagaaagtgaaagcattagctctagcagtggcagwctacactcagataaatggttgcaaagtaaattctgaaaaaaacccatcagtctttgttcttggtcaattcaaaaacagccaaaaagactggaaaggcacagagaggacacaccagataggtaactgttgctcagctgaaatgaaytgtcaaaagacagtaatcttgtttctgactgtatcacattaccttgtaatgtatttctttcttttccttccctcgcagtggagttctactgcagga

SEQ ID NO: 6469 - DNA, 600 bp, Chicken  19866894110653_3
gcacaggtagtttgctatttctaacagatgtcagaaggatgagttatcaattgaactgcttaagctacccacacgtgttctgcataatttcctgttctttttatgcatataaaaactactgcattttcttagttctgcaatttctggaaggaaacgttcttcaccgctttatcaaactacactcacagcctttttacatacaactttgtcctttcatcctgcagccaggattgtccaggcycttcttctgataaggggatgagtgcagaaagtgaaagcattagctctagcagtggcagwctacactcagataaatggttgcaaagtaaattctgaaaaaaacccatcagtctttgttcttggtcaattcaaaaacagccaaaaagactggaaaggcacagagaggacacaccagataggtaactgttgctcagctgaaatgaaytgtcaaaagacagtaatcttgtttctgactgtatcacattaccttgtaatgtatttctttcttttccttccctcgcagtggagttctactgcaggaaatctatacgctacacaaatgactggtttgcacgttcagtgctattcacttccatcaat

SEQ ID NO: 6470 - DNA, 600 bp, Chicken  19866894110653_4
ggaaggaaacgttcttcaccgctttatcaaactacactcacagcctttttacatacaactttgtcctttcatcctgcagccaggattgtccaggcycttcttctgataaggggatgagtgcagaaagtgaaagcattagctctagcagtggcagwctacactcagataaatggttgcaaagtaaattctgaaaaaaacccatcagtctttgttcttggtcaattcaaaaacagccaaaaagactggaaaggcacagagaggacacaccagataggtaactgttgctcagctgaaatgaaytgtcaaaagacagtaatcttgtttctgactgtatcacattaccttgtaatgtatttctttcttttccttccctcgcagtggagttctactgcaggaaatctatacgctacacaaatgactggtttgcacgttcagtgctattcacttccatcaatctgaggccgatttaatccaaattgataatcatccatagaggaagttcccctccctctcatcgctgtctctaggctcttggctcacagctgtaaactatttcccttccctcactctaacagtatctctgagactcatgggacttca

SEQ ID NO: 6471 - DNA, 600 bp, Chicken  19866894110654_1
agggcaggatgcagtgcaggacagcggcagctctgtggaatcactcctttaggtgctttctcagcactggttgtctcagggctggagggggctccagtttctaatttaaaaagacaaacacacgcctgtcatctgacactacacgttatggctgtgctgggaatcagacactgctctgagattcctcccacccccaagcctgcaggtggacttcccatcagctttacactctggaaaaggtcatctgctgtactggaacgtggcctgggagcattgccagcctgcaagctgggcccatcygcacacatcgcactctgctggtgtttgtttccctggtgcttgtggggaaaaggaaagctacttgctatctctgctgccagctgcctcctctgttcagcagtgatcgctgctcctcctcccatcaaacatttgagtttgaccgcgatccaaacaagcagaggacagacataaaagagaaaacataaatctactctgtgttttaacttgttttcaactaattgagtgtggggttttccctctttgcttggaatcatcggatgtgatcttagctatgtctacagcctgctcctgtctgcccct

SEQ ID NO: 6472 - DNA, 600 bp, Chicken  19866894110660_1
gtagatgcacttcagctgagccccttgcctcatccccagtcccatcatcgtttctcttgctcatctctagatggcctggttttatccctttcccccttcatatctagtttaaagttctttcaacaagccctgccagctcctgggctaggatgcatttccccctttgagacaggtgagacccatctgcagccatcagtccaggttctgagtaaactgtcccatcattaaaaaaaaaaaagaaagaaagaaatcttgtgtttgcaccagcctctcagccatgtatttatgagatgggttctycttcgagttccagagcctcaaacctattatgaagtggcacctggggaaccaaaataggtcaggaaggttggaatcacattgcctgtgattcyaatctgggacctgtttccagtactacccttaaattgccttcttctactcaacagtggcaggggaggggatccaccactgctgaggggtatcatcccggtgtctttcttgcaagttcaacagagtaacttcaccaatctatctccttgcactttctgatactccttaatctctccacctcctccctcaggttcagcactgcactgaaca

SEQ ID NO: 6473 - DNA, 600 bp, Chicken  19866894110660_2
ccccttcatatctagtttaaagttctttcaacaagccctgccagctcctgggctaggatgcatttccccctttgagacaggtgagacccatctgcagccatcagtccaggttctgagtaaactgtcccatcattaaaaaaaaaaaagaaagaaagaaatcttgtgtttgcaccagcctctcagccatgtatttatgagatgggttctycttcgagttccagagcctcaaacctattatgaagtggcacctggggaaccaaaataggtcaggaaggttggaatcacattgcctgtgattcyaatctgggacctgtttccagtactacccttaaattgccttcttctactcaacagtggcaggggaggggatccaccactgctgaggggtatcatcccggtgtctttcttgcaagttcaacagagtaacttcaccaatctatctccttgcactttctgatactccttaatctctccacctcctccctcaggttcagcactgcactgaacagacaacccatctgctcacacctcacgcaggcagtatccctgctacccttcatgggtagtaacaggctcaggcattcgctgcagccagagact

SEQ ID NO: 6474 - DNA, 599 bp, Chicken  19866894110671_1
  misc_feature (1)..(202): n is any nucleotide
nnnnnnnnnnnnnnnnnnnnnnnnnnnnnnnnnnnnnnnnnnnnnnnnnnnnnnnnnnnnnnnnnnnnnnnnnnnnnnnnnnnnnnnnnnnnnnnnnnnnnnnnnnnnnnnnnnnnnnnnnnnnnnnnnnnnnnnnnnnnnnnnnnnnnnnnnnnnnnnnnnnnnnnnnnnnnnnnnnnnnnnnnnnnnnnnnnnnnnnnnnctcgtttccttgccttgccaggaaccagctcccagtgtttagttaggtgactcagtctacgaagctttgaataatttcacttgtcctttgctgcagtkagaaagactttgtgatgaccttttgatcattttagttttgaggagactgaaatattatgtattaacacatcttctcctgctgggaaaagtccagcatgccagtgagttgggaaaagcagtgaatccaattaggtgtacgtacagtaaggctgtgtttactgcttgacactgcatttataatggaggtatttttcctgctcctactgttaaacaacarcrcagtaaaaaaagrgggaagagtttttcttttwtctttcatgtcttaaaagctttgagaagatacaaagggaagccttccc

SEQ ID NO: 6475 - DNA, 600 bp, Chicken  19866894110671_2
tgccaggaaccagctcccagtgtttagttaggtgactcagtctacgaagctttgaataatttcacttgtcctttgctgcagtkagaaagactttgtgatgaccttttgatcattttagttttgaggagactgaaatattatgtattaacacatcttctcctgctgggaaaagtccagcatgccagtgagttgggaaaagcagtgaatccaattaggtgtacgtacagtaaggctgtgtttactgcttgacactgcatttataatggaggtatttttcctgctcctactgttaaacaacarcrcagtaaaaaaagrgggaagagtttttcttttwtctttcatgtcttaaaagctttgagaagatacaaagggaagccttcccttgcaaggctttctcattcacacctctgtgttgttactgctgtggttttccattctgtatcttttatttgattttttctcgtggcctttattctgctccctggaaaggtcactggtttttactgtagcagtcattcatctaggcataggcacgtgctgcatcctaacatttgctcacatctgggatttgagggttaagcacttgtgttccgtggtaga

SEQ ID NO: 6476 - DNA, 600 bp, Chicken  19866894110671_3
ccaggaaccagctcccagtgtttagttaggtgactcagtctacgaagctttgaataatttcacttgtcctttgctgcagtkagaaagactttgtgatgaccttttgatcattttagttttgaggagactgaaatattatgtattaacacatcttctcctgctgggaaaagtccagcatgccagtgagttgggaaaagcagtgaatccaattaggtgtacgtacagtaaggctgtgtttactgcttgacactgcatttataatggaggtatttttcctgctcctactgttaaacaacarcrcagtaaaaaaagrgggaagagtttttcttttwtctttcatgtcttaaaagctttgagaagatacaaagggaagccttcccttgcaaggctttctcattcacacctctgtgttgttactgctgtggttttccattctgtatcttttatttgattttttctcgtggcctttattctgctccctggaaaggtcactggtttttactgtagcagtcattcatctaggcataggcacgtgctgcatcctaacatttgctcacatctgggatttgagggttaagcacttgtgttccgtggtagatt

SEQ ID NO: 6477 - DNA, 600 bp, Chicken  19866894110671_4
cccagtgtttagttaggtgactcagtctacgaagctttgaataatttcacttgtcctttgctgcagtkagaaagactttgtgatgaccttttgatcattttagttttgaggagactgaaatattatgtattaacacatcttctcctgctgggaaaagtccagcatgccagtgagttgggaaaagcagtgaatccaattaggtgtacgtacagtaaggctgtgtttactgcttgacactgcatttataatggaggtatttttcctgctcctactgttaaacaacarcrcagtaaaaaaagrgggaagagtttttcttttwtctttcatgtcttaaaagctttgagaagatacaaagggaagccttcccttgcaaggctttctcattcacacctctgtgttgttactgctgtggttttccattctgtatcttttatttgattttttctcgtggcctttattctgctccctggaaaggtcactggtttttactgtagcagtcattcatctaggcataggcacgtgctgcatcctaacatttgctcacatctgggatttgagggttaagcacttgtgttccgtggtagatttcttatgagaaat

SEQ ID NO: 6478 - DNA, 600 bp, Chicken  19866894110671_5
actcagtctacgaagctttgaataatttcacttgtcctttgctgcagtkagaaagactttgtgatgaccttttgatcattttagttttgaggagactgaaatattatgtattaacacatcttctcctgctgggaaaagtccagcatgccagtgagttgggaaaagcagtgaatccaattaggtgtacgtacagtaaggctgtgtttactgcttgacactgcatttataatggaggtatttttcctgctcctactgttaaacaacarcrcagtaaaaaaagrgggaagagtttttcttttwtctttcatgtcttaaaagctttgagaagatacaaagggaagccttcccttgcaaggctttctcattcacacctctgtgttgttactgctgtggttttccattctgtatcttttatttgattttttctcgtggcctttattctgctccctggaaaggtcactggtttttactgtagcagtcattcatctaggcataggcacgtgctgcatcctaacatttgctcacatctgggatttgagggttaagcacttgtgttccgtggtagatttcttatgagaaataatttctgcaagccaagcg

SEQ ID NO: 6479 - DNA, 600 bp, Chicken  19866894110674_1
ggcacttgtggggaaatctgagagaaggtcatgactggaattcaacagttcctgactctttaacctatgtttagaccatgcatccttcaaactgattcctttgtaaatgcacctaccacagacaatttaaaacaagctattaatggttgcctgccaaattgctgcaattctaaaataccctaagtactaggtgaacactttgcaatgtatttttgcctgctgcagctatgcagtgtctgcaggctaaagccttgatgccattactccaagtataacttttcagtgatttgttcagagaargtaactccaaatctgaattatacccttgcatatcaaggttaggtgtttctctattgactggcttagaaaacccaaaactaacctgacataaaaagcttctgtgacataatctctgaaatcctgaagcctgtggcgaggtacctccaaatccctaccaccattcccaaatttaccttcttatctctcctacaaacaggctgcactcacacggttggaccagtagtccaaactatgttactaagtaaggcaactcatccatcccaataaggactccatcacaccctggcgtttagaaaactt

SEQ ID NO: 6480 - DNA, 600 bp, Chicken  19866894110682_1
agtggaggtaaggctttcacaatgccaactgaggactcagttttaaacataccctttaggcctgccctggttgttctgtggcatcttgatggaagtcgcttttttaaacagttcctggagagtttcttctgaggcagcatatgacaggttgttcacaatcagagtctttgactccctctctccacctcctagaaaggaaacacaatgctctaagcccaggcttagagaggaagagctctctacctctaggcataaagtcccctcctaaggggatggtagctgttgcacccccttcccacktcgaggtgaggcacaaagccaagaacagtgctgttctggtcacctggactgtcctcttttggcagaarcattcaggagagacctgcaatgcatgccatttggaggacaagtaaggcaaaaggctccttcccattatcttacagctttgctgcagtgcttcaagtcattctggccctagccagcttctaacacaagcatagtgaagtcctgccctctgcacgcacactattaatctgaaaacatacctttctgactttcttgttggctcttctcaccggtgtagtcaatgaccatggcacg

SEQ ID NO: 6481 - DNA, 600 bp, Chicken  19866894110682_2
ggttgttctgtggcatcttgatggaagtcgcttttttaaacagttcctggagagtttcttctgaggcagcatatgacaggttgttcacaatcagagtctttgactccctctctccacctcctagaaaggaaacacaatgctctaagcccaggcttagagaggaagagctctctacctctaggcataaagtcccctcctaaggggatggtagctgttgcacccccttcccacktcgaggtgaggcacaaagccaagaacagtgctgttctggtcacctggactgtcctcttttggcagaarcattcaggagagacctgcaatgcatgccatttggaggacaagtaaggcaaaaggctccttcccattatcttacagctttgctgcagtgcttcaagtcattctggccctagccagcttctaacacaagcatagtgaagtcctgccctctgcacgcacactattaatctgaaaacatacctttctgactttcttgttggctcttctcaccggtgtagtcaatgaccatggcacgaccgtcaacctctgtgccttgcttctcctccagtgctttttctgcctcagcttctgtttgaattcaat

SEQ ID NO: 6482 - DNA, 599 bp, Chicken  19866894110685_1
  misc_feature (1)..(87): n is any nucleotide
nnnnnnnnnnnnnnnnnnnnnnnnnnnnnnnnnnnnnnnnnnnnnnnnnnnnnnnnnnnnnnnnnnnnnnnnnnnnnnnnnnnnnnncctagaaagtggatctgtaggcctggttgttccttcttaataactgctttgacatgatcaaatctgaatctaaagaatcatgatatacatttaattttttttcttcaccaatcattctgatatttgggaaatttgtctgtttttaactctcttggcacctatttatatgaaagtaccatttctgcctcatcttttctgatatgagtgatgggkggaaatgctggcctttcctactagtttgaatctgcattatataaaataattggagttagagatattcaagcttaggctggacaaggctctgagcaacatgatctagctgtagatctccctgtycattgcrggggagttgggctaggtgacctttaaggatcccttccaactcaaarggttctataattctatgatgtactagcacagcagaaaaaatgcttgggaacagttctgctgaytccaattatttatggcttagcatcagtaacttagaagctaaggtgtccagtaattaactc

SEQ ID NO: 6483 - DNA, 600 bp, Chicken  19866894110685_2
ttaataactgctttgacatgatcaaatctgaatctaaagaatcatgatatacatttaattttttttcttcaccaatcattctgatatttgggaaatttgtctgtttttaactctcttggcacctatttatatgaaagtaccatttctgcctcatcttttctgatatgagtgatgggkggaaatgctggcctttcctactagtttgaatctgcattatataaaataattggagttagagatattcaagcttaggctggacaaggctctgagcaacatgatctagctgtagatctccctgtycattgcrggggagttgggctaggtgacctttaaggatcccttccaactcaaarggttctataattctatgatgtactagcacagcagaaaaaatgcttgggaacagttctgctgaytccaattatttatggcttagcatcagtaacttagaagctaaggtgtccagtaattaactctctctgttgctgaaatagataacaaaatggtattacaatattcaacagcagctacttgtttcagtgtttaaggaagttgctgtaaacagtgttcttctccagcattatttagactgatgaatat

SEQ ID NO: 6484 - DNA, 600 bp, Chicken  19866894110685_3
ctgctttgacatgatcaaatctgaatctaaagaatcatgatatacatttaattttttttcttcaccaatcattctgatatttgggaaatttgtctgtttttaactctcttggcacctatttatatgaaagtaccatttctgcctcatcttttctgatatgagtgatgggkggaaatgctggcctttcctactagtttgaatctgcattatataaaataattggagttagagatattcaagcttaggctggacaaggctctgagcaacatgatctagctgtagatctccctgtycattgcrggggagttgggctaggtgacctttaaggatcccttccaactcaaarggttctataattctatgatgtactagcacagcagaaaaaatgcttgggaacagttctgctgaytccaattatttatggcttagcatcagtaacttagaagctaaggtgtccagtaattaactctctctgttgctgaaatagataacaaaatggtattacaatattcaacagcagctacttgtttcagtgtttaaggaagttgctgtaaacagtgttcttctccagcattatttagactgatgaatattaaatgt

SEQ ID NO: 6485 - DNA, 600 bp, Chicken  19866894110685_4
tttaattttttttcttcaccaatcattctgatatttgggaaatttgtctgtttttaactctcttggcacctatttatatgaaagtaccatttctgcctcatcttttctgatatgagtgatgggkggaaatgctggcctttcctactagtttgaatctgcattatataaaataattggagttagagatattcaagcttaggctggacaaggctctgagcaacatgatctagctgtagatctccctgtycattgcrggggagttgggctaggtgacctttaaggatcccttccaactcaaarggttctataattctatgatgtactagcacagcagaaaaaatgcttgggaacagttctgctgaytccaattatttatggcttagcatcagtaacttagaagctaaggtgtccagtaattaactctctctgttgctgaaatagataacaaaatggtattacaatattcaacagcagctacttgtttcagtgtttaaggaagttgctgtaaacagtgttcttctccagcattatttagactgatgaatattaaatgtggcttgatcttagagcagcagaacacaagatctgacaggttaaaat

SEQ ID NO: 6486 - DNA, 555 bp, Chicken  19866894110685_5
tggcacctatttatatgaaagtaccatttctgcctcatcttttctgatatgagtgatgggkggaaatgctggcctttcctactagtttgaatctgcattatataaaataattggagttagagatattcaagcttaggctggacaaggctctgagcaacatgatctagctgtagatctccctgtycattgcrggggagttgggctaggtgacctttaaggatcccttccaactcaaarggttctataattctatgatgtactagcacagcagaaaaaatgcttgggaacagttctgctgaytccaattatttatggcttagcatcagtaacttagaagctaaggtgtccagtaattaactctctctgttgctgaaatagataacaaaatggtattacaatattcaacagcagctacttgtttcagtgtttaaggaagttgctgtaaacagtgttcttctccagcattatttagactgatgaatattaaatgtggcttgatcttagagcagcagaacacaagatctgacaggttaaaatgcattccacacagctgaa

SEQ ID NO: 6487 - DNA, 600 bp, Chicken  19866894110686_1
aacagaagccaccttgtacttctgcagtactacttcaattgcctacaattcattttcaaaactaaagtagctcactgtcagttttgcacactcttgatcctcatacagtagttgcagagtttcccccaaaaaatgcatacaaatttgtattatagggaaggtgttttcttaaaaatggaaaagggaagctaaaaacgatgacatgttccaattttcttcgcagaacggctgactgagtcatgtaaatcatctcttagatgctgtagtctagagggatgcatcagcaatgtaaagatccaytcacttgaaagaagtgtataggcttcttttaaagcatataggttctaacaaagggagcatttcttctggtatggctatgtctgtgccagcagcatttggggtggagtgatgtttaattgtttaagaattaatgcagcttttagatttcacacagtacagcttttaggtctagtcgttcctgcaaaggttaacttgtctgaagttggmacaggcaagcaggtatcggtccgtctgctttcccaatgcgctgctagcatcccagctgcatcctgtgattgacacacttgtatccgggcagca

SEQ ID NO: 6488 - DNA, 600 bp, Chicken  19866894110686_2
ccaattttcttcgcagaacggctgactgagtcatgtaaatcatctcttagatgctgtagtctagagggatgcatcagcaatgtaaagatccaytcacttgaaagaagtgtataggcttcttttaaagcatataggttctaacaaagggagcatttcttctggtatggctatgtctgtgccagcagcatttggggtggagtgatgtttaattgtttaagaattaatgcagcttttagatttcacacagtacagcttttaggtctagtcgttcctgcaaaggttaacttgtctgaagttggmacaggcaagcaggtatcggtccgtctgctttcccaatgcgctgctagcatcccagctgcatcctgtgattgacacacttgtatccgggcagcagcagtcccgctgtttttgctgccttgggttttctgtccccagagggtcgccacgcgctctcctcagtgggagctctccttgccgctgtgtctggctttgggcaactgcagagctttgctgaatgccactcggtgtggttttggtctgtatgatttggtgtgcgctgccttcaattgcatgtgtccagggtgttaaaaacacgtttct

SEQ ID NO: 6489 - DNA, 600 bp, Chicken  19866894110692_1
ctggagctatgtggtttatgtatctcacactgcagagttcatgggctctgtctagtctacaggacttgtgtctgctgtccaaagccaggggtgctgctttgcctttccttcttttcttctttcatccccaactttttgtagccaccttttgtcatgtgtgtgggatgtgaggcacggtcctttcttccttgatcagagctcaaatatgaatgaagtcacatcttaatgtttgtgtttgctggtttatcatctatgggctcagggacatagcagggaggtgagagagatggattcccatcyctactgcagtcagtttgttaaacacctggctcaaattgaacagcttgaatatagaagacatgaagataattcccygttaccagtgcagccagggagggaacaggtagtagttttcatcctaaaatgaaggaattaaatttatgtgcttagctatcagtgccactgtaagcccagtgtctaggttcctacacaggatctagatcataaaatcatagaatgattaatgttggagaagaccactaagataattatgtccagccatcaacccatcaccaccgtgcccactaaccatgttccctg

SEQ ID NO: 6490 - DNA, 600 bp, Chicken  19866894110692_2
tgtccaaagccaggggtgctgctttgcctttccttcttttcttctttcatccccaactttttgtagccaccttttgtcatgtgtgtgggatgtgaggcacggtcctttcttccttgatcagagctcaaatatgaatgaagtcacatcttaatgtttgtgtttgctggtttatcatctatgggctcagggacatagcagggaggtgagagagatggattcccatcyctactgcagtcagtttgttaaacacctggctcaaattgaacagcttgaatatagaagacatgaagataattcccygttaccagtgcagccagggagggaacaggtagtagttttcatcctaaaatgaaggaattaaatttatgtgcttagctatcagtgccactgtaagcccagtgtctaggttcctacacaggatctagatcataaaatcatagaatgattaatgttggagaagaccactaagataattatgtccagccatcaacccatcaccaccgtgcccactaaccatgttccctggtgccacatctacggagatctagccatgacagtcagtgtagattagaagcaatgctgtaaacttctgttttagga

SEQ ID NO: 6491 - DNA, 600 bp, Chicken  19866894110698_1
ctgaatcattctcccttttcttccaaatcttctaagcttgttgttatctatttgggagatggctgcaagctatgtcttggtgcaagcacaggattgcacaactgtgaaagatgtcacaagcagggtgctgcttggaaagcaaggcagtcctaccagctgaggaagttcgttagctccctccatcatccgcttgcttcatacaaatgaaagattattacaggaagattcacgtggcaactctggcctgctttcagatagcagcatcttagagtgggaagcaacctcagactataggtctcytgagcttttttcagtaagaaatgacctaagctggctgttccatcctcatggatgccttgatcaccttttggtgcgttagctatgctgctgcatgtgtgaagggcctttaacatgggtgacatgactgagtagaagtgctgcttgcccatcagagctgtggctctctgctagtaacttgcaaggcttgtgtggttggagagttttcagctcacggcctgtcaccatggcaagtggtaagatcaatttcaagcatcctgtcttaagatgtctgcaacagaggaacaggggcctttaacccaa

SEQ ID NO: 6492 - DNA, 599 bp, Chicken  19866894110699_1
  misc_feature (1)..(51): n is any nucleotide
nnnnnnnnnnnnnnnnnnnnnnnnnnnnnnnnnnnnnnnnnnnnnnnnnnntgctataaaagttttcaaaattggttgaacatgctatttagtagatgaattctataaaaaaaatcatgttttgtaggtgatgaatttctctttggcagaagaacaaataatactttttttttttttttacttttttttaaattatattttattactccaagtttttttcagcgtcagacagaaaaatgcacgtagaaaagctaggatattaggttagtgatactagaggtgtttaattagcttccatcytgcagttctcttactcatttataggagatctgaacggagcttcttgtgttaaaatactcctggaattgaaaaacagagcctgctgagtaaaaagccctttatgacatgtgcaaaacttctaaaggtccttttgcatgcagtttgggcatatttagtcctttcttctgagcctactgagcaaataactaactgtcaatgttgggaggcaaaaattctttaagtgatctgtgtgtagctaccacagctacttcttagccagctgtgtgaaggattgtgctgccaaagcaagcattcaccag

SEQ ID NO: 6493 - DNA, 600 bp, Chicken  19866894110699_2
tctttcctaccctatctgtcaactgacacatttttctactgaaaagaaagagaattcatcaaaagaatgaaggcaattatttgctggaatatttcaagccttttttgacataaatgtgggacaaagcattggagtaatgggttgggacaaaacagatactggttggaaacaactgtcttgcttttcagagatccaagcctcactgacctaaaagtacagcctgttgcagttgttttgactgagcatccatgcgggctgacaagagccaacacccaaagccatagggcagtataacctttmctgtcttttccctgctagaatgtcacagctcagtcgaaaaaccatgtccaattaaataaaaaagcagttcaacaaaaaaacatcagcttttggtttctaaaccaaaatcatcaaccaaggcacatcattaagaagttcttgacccgactctgtttttttatcccctgggtcctctggtgttggttcctggcttgctttaacctctacrtagctatgtgagtattcacatactctgttttctaaaagcagttcagagactgtgactttctaccctctcaatctgctattttaaggacagag

SEQ ID NO: 6494 - DNA, 600 bp, Chicken  19866894110699_3
taaaagtacagcctgttgcagttgttttgactgagcatccatgcgggctgacaagagccaacacccaaagccatagggcagtataacctttmctgtcttttccctgctagaatgtcacagctcagtcgaaaaaccatgtccaattaaataaaaaagcagttcaacaaaaaaacatcagcttttggtttctaaaccaaaatcatcaaccaaggcacatcattaagaagttcttgacccgactctgtttttttatcccctgggtcctctggtgttggttcctggcttgctttaacctctacrtagctatgtgagtattcacatactctgttttctaaaagcagttcagagactgtgactttctaccctctcaatctgctattttaaggacagagttgggccaacccctgcctctatatgaggtaagggagggaagatgcaagcatttcctctagtttcctctggagtagataaaactcctgctctactaggggaaaaaaaaaccaaatggtgggatggcagttttcctgtccactttctgccctgttgcctgtgagatgctgcaagccctttatgcttcatcagggatttatagcacaacct

SEQ ID NO: 6495 - DNA, 600 bp, Chicken  19866894110701_1
agctctgataatttatagaaacaatttaattggacttgatgtaatttggtttcctttgatttccctgtggcactaaccttcccctcctcatttcctagctaagatcattagcaacacttgcaaatctcctctaggaaagccattagccctacagaaactgcacttccagcaaataaaagtgctggggctgtcctatgcacagcagccccaggagagcatcacatcacatcgcagagggggacagcgctgtcagggaggcagaaaattactgtgagcacttcaggcctttcctttttattrccccccccccactcaaggctttcaaacagcctcagtcacctgaattctgttgttctaacaagcagagagcctcagaaaataacaacaacatcaagctaaaggaaagagtgaggacttttaggacacgcaggacacacgagctgccctcagtttctgttacctcggaagttacacctgtttccaaaagtgatgcaaccacgtaagctgtcagggagatcttaccatggattccaccctggggggcaaagaagacaaagtcaccaaggtaagaaactggaggaaaggatgctgaataagcaa

SEQ ID NO: 6496 - DNA, 600 bp, Chicken  19866894110702_1
aggctgacatttctaatatttccctgaaaaatatttggaagctgattgctttgggagcaacttcactgtttcaacacagtttgtattcaatttcacacatcatttggattcgtgaaaataataaatcagactagaaacagtaaagattgctgtttttgtttttttttactcaagactgaaactgaggagtaaaagtctgctaagcatttctgcaagtatactaagaaataaaataattagtaccatttcaatatctttagaagcacttgtaaaatacagatgttgttttattgttaaacwatagataatacgtccatggcatctttgaaataaaatctgcagtatatagatttcttatatacagatttcaacactattgcatagctacaatttcctggctagcagttacacttctaatttttaaaaactagaaaaaatattttgcattcccaatgactttaactaatataaggtgtttcagtgcataaatgcataatcatatttatcattctggatcttttaaataagttgctgtattatcaatcacatcctttgtttacaaatatctacttccagtcagaaaggagtgtgcctttgctt

SEQ ID NO: 6497 - DNA, 600 bp, Chicken  19866894110706_1
aaaaaaaaagtactgttttttgcatggtttacaatattttgttaacatcttatcagctttaaactgtatgctcagtgatgggtagcataaaatgtagtatatgtttaatacggggttcttgtgatgctctctgcagtctacctgctggtgtttttgaaatccatttccagaaggaaccacactccaagaaaatgtttaaattttgcattgttacaggtataatctgatagaagtgggttagcctgtgattcagtgtggcttgtgtgcagccgaactgtgggccttgctgcagcctgcatractggtatggcagcgcaaagccgcgctggtgtgcgaggctgttaggcaatcggtattcctggctgaggaagacagtgaatcagcaggcatggctgaaggtgacagtgacaaatggccccgagtctctgctgtgtagccagcacagtcaagtcttgttcttcagcccagtgatgaaactggtgaggttccctccagagratcacatcaacagcaatttatcstcaattcttcaaagaccatggcgtgagtcttctgactttgagacacatgcagatatgagtctctggcccagaggcaaga

SEQ ID NO: 6498 - DNA, 600 bp, Chicken  19866894110706_2
aattttgcattgttacaggtataatctgatagaagtgggttagcctgtgattcagtgtggcttgtgtgcagccgaactgtgggccttgctgcagcctgcatractggtatggcagcgcaaagccgcgctggtgtgcgaggctgttaggcaatcggtattcctggctgaggaagacagtgaatcagcaggcatggctgaaggtgacagtgacaaatggccccgagtctctgctgtgtagccagcacagtcaagtcttgttcttcagcccagtgatgaaactggtgaggttccctccagagratcacatcaacagcaatttatcstcaattcttcaaagaccatggcgtgagtcttctgactttgagacacatgcagatatgagtctctggcccagaggcaagaaactggatttctcttgcttagaagaatgtgcatttattgtaaatcttccatccacttgggaattcttctggggccctggtttgtaggtgtttcattctttaaatattgcattacaataatattcagaaatatctgagtcagtaaatgttttcccaatgactgtgagaagcaggagtgtgacaaagcacagatcagtac

SEQ ID NO: 6499 - DNA, 600 bp, Chicken  19866894110706_3
atctgatagaagtgggttagcctgtgattcagtgtggcttgtgtgcagccgaactgtgggccttgctgcagcctgcatractggtatggcagcgcaaagccgcgctggtgtgcgaggctgttaggcaatcggtattcctggctgaggaagacagtgaatcagcaggcatggctgaaggtgacagtgacaaatggccccgagtctctgctgtgtagccagcacagtcaagtcttgttcttcagcccagtgatgaaactggtgaggttccctccagagratcacatcaacagcaatttatcstcaattcttcaaagaccatggcgtgagtcttctgactttgagacacatgcagatatgagtctctggcccagaggcaagaaactggatttctcttgcttagaagaatgtgcatttattgtaaatcttccatccacttgggaattcttctggggccctggtttgtaggtgtttcattctttaaatattgcattacaataatattcagaaatatctgagtcagtaaatgttttcccaatgactgtgagaagcaggagtgtgacaaagcacagatcagtaccttgagatctgcgaagcctatat

SEQ ID NO: 6500 - DNA, 600 bp, Chicken  19866894110707_1
aacagaagctctgttttctgcccagaatttaagattcttatgcaaagagtataatcaccttaactagtaactgtatactattttatctgtcagttttatgttacctcttactataattctattaaggatacatgtccgtttctttttctggaaatataaaacccaagcaattccacacaagtgaacagagatttatactgaacaaatctttatgctgtagctgataggataatattttacttctcaagaaaaaaagcagagcatgatagctgtacatccacaggggttgttcaattcctycttgcttgcagaaagtctgaataatagtatcagtttttgcagttgttattactatcttgctacttggcttgcacctttgatcccaaaagtgcagttcatagagaaaggtgacgaaatcagtgggatgaaagattgcaaaatccctgtttttacgtggaaaaaaacagtatgttcsactccagcatttggcctcacaaggattgctatcagggagaatggggaaagggtaagctagaagaatgaaacttcctttgctcttgaggccatctgcatagatgagaagtaaatctatgcaatgtc

SEQ ID NO: 6501 - DNA, 600 bp, Chicken  19866894110707_2
cacaagtgaacagagatttatactgaacaaatctttatgctgtagctgataggataatattttacttctcaagaaaaaaagcagagcatgatagctgtacatccacaggggttgttcaattcctycttgcttgcagaaagtctgaataatagtatcagtttttgcagttgttattactatcttgctacttggcttgcacctttgatcccaaaagtgcagttcatagagaaaggtgacgaaatcagtgggatgaaagattgcaaaatccctgtttttacgtggaaaaaaacagtatgttcsactccagcatttggcctcacaaggattgctatcagggagaatggggaaagggtaagctagaagaatgaaacttcctttgctcttgaggccatctgcatagatgagaagtaaatctatgcaatgtcatagtaatgtatagtaattcggcctgaattatcattttttattattattactttcgacaagaatcagttccacattagaaaaacatcaaagttctgtgaacccagtgagagaaaataagacaaagaaaatacattatctaagtcaggggaaaggttactgaagttacaaatagtt

SEQ ID NO: 6502 - DNA, 600 bp, Chicken  19866894110710_1
gaagaaattttagaaactctcatagcaaaagctgtaatacaaaagtcacagagcagtgagcaaattggatgcacgtccatgtttttacataaaatgcatgtgtgaagagacagacatgcatcttgccactgaaaacccataacacgctgtgcttttctaacaatgcatttgggaattttgaaagtgttcaatacaaattccaaaatacatcactgaactaaaaaatggcaggcattccaagaaaaaatgtaatagtctggaaatcaagcccaaatccctctttgtatattcaagcatcgyatttgactttttcaaagagggagaatgcctcatctttgtgcaggtgggtggcatctggtagtccagatacccctggttgaaatatctatgcgaattttaagctgtgtgttggtaccttataacatagctacctaaggaggattctgttcatagattaggacagttagctatatttttgtgagccaagtatttagttctcagtatactcaatgaaactctaggcaatacttcaggaattggttcatttgcccaggcactaatttgtaagcccatgaaagatgtggtctggcatcccaccct

SEQ ID NO: 6503 - DNA, 394 bp, Chicken  19866894110713_1
tcttagcagagctttaaaattctttgccagaactcatattcttccattagtggtacggatagttattggtattccaagggttttttgggttaactttttttgtcttgttgtatggcaactctcagaaggaatgaatggttttcaaatcgtttcctaaaataatctgctagaatgaaaattgttttcagttgagagtttcagtgacttcgtagtttcttaagcactgcggagaggtatcagattaagagccattgctgaacagtagcaggtaaaattgtgtgttgacacaggagagaagcrtagatggaatgtgtctcacagcagttgtgttttaaaggaagattttgcatatatggaaacttgtagctaggacagaatagaatctggcataaag

SEQ ID NO: 6504 - DNA, 600 bp, Chicken  19866894110715_1
tgactcccagaggactgacacttggtggtttaagaggaaaaccaccagagtgggaactcggctgacctcacatccatcccaagaaagagccctctgacctgctgacaagtgacacaccagaaaatgtgggagccttttcttctgccttcccattccagcatgaataatactaaaaggcggaagagcttgaagccagttagctttttcccccccactccctcatccttacctccacagacaggaagcagaacctcagaaatgcccagcatgctgacactcaggttgtccagacagattggkagatgaaggtcatgacacagggagcatgaaatatggtcttgtgagaactcattttgtaagtgcagaggctcaagacatggtttgaacctggcagctctcctccaagctgcctactgttcctttggcacaacaatgagctggaataagtcccagctagggtcgaggatcagctctcgacacatggctccaaaaacaaagtgacagagcctggaagctayggagggcctcctccagaagtcactagcagcaacaacaaaaaaaccaataccacacacaactcattgaaaatacaatctaaat

SEQ ID NO: 6505 - DNA, 600 bp, Chicken  19866894110715_2
ctcatccttacctccacagacaggaagcagaacctcagaaatgcccagcatgctgacactcaggttgtccagacagattggkagatgaaggtcatgacacagggagcatgaaatatggtcttgtgagaactcattttgtaagtgcagaggctcaagacatggtttgaacctggcagctctcctccaagctgcctactgttcctttggcacaacaatgagctggaataagtcccagctagggtcgaggatcagctctcgacacatggctccaaaaacaaagtgacagagcctggaagctayggagggcctcctccagaagtcactagcagcaacaacaaaaaaaccaataccacacacaactcattgaaaatacaatctaaatctaaagtatgtttcttagttttccatacacagtactgcgcagtctacmttctgcaagtacattttaacaacatctctgttgatcctgccttgtgcccactctggcttgtatttaactttccacagcagcccatattcatttcttggcacaataaaacaaatagatttctcgygttgtttctttcttatttgtgcaaatcgttaacattaaacacatga

SEQ ID NO: 6506 - DNA, 600 bp, Chicken  19866894110715_3
tcattttgtaagtgcagaggctcaagacatggtttgaacctggcagctctcctccaagctgcctactgttcctttggcacaacaatgagctggaataagtcccagctagggtcgaggatcagctctcgacacatggctccaaaaacaaagtgacagagcctggaagctayggagggcctcctccagaagtcactagcagcaacaacaaaaaaaccaataccacacacaactcattgaaaatacaatctaaatctaaagtatgtttcttagttttccatacacagtactgcgcagtctacmttctgcaagtacattttaacaacatctctgttgatcctgccttgtgcccactctggcttgtatttaactttccacagcagcccatattcatttcttggcacaataaaacaaatagatttctcgygttgtttctttcttatttgtgcaaatcgttaacattaaacacatgatatggcaatgacaatggaattgatggcctaatgggatgaattttaatttaagtaatatttccattaatctaaaagctcacccttaaaagtctggagaatgaatttattggaaaacttccagcataattct

SEQ ID NO: 6507 - DNA, 600 bp, Chicken  19866894110715_4
ctcgacacatggctccaaaaacaaagtgacagagcctggaagctayggagggcctcctccagaagtcactagcagcaacaacaaaaaaaccaataccacacacaactcattgaaaatacaatctaaatctaaagtatgtttcttagttttccatacacagtactgcgcagtctacmttctgcaagtacattttaacaacatctctgttgatcctgccttgtgcccactctggcttgtatttaactttccacagcagcccatattcatttcttggcacaataaaacaaatagatttctcgygttgtttctttcttatttgtgcaaatcgttaacattaaacacatgatatggcaatgacaatggaattgatggcctaatgggatgaattttaatttaagtaatatttccattaatctaaaagctcacccttaaaagtctggagaatgaatttattggaaaacttccagcataattctagcaaaaatcctcctctgaatgatatgtcagacttttaaggcgctccttggcaggtttgcttcttggctttgaatgttactgacataagaatacatttctcacaagtcttctgagtaatgaaga

SEQ ID NO: 6508 - DNA, 600 bp, Chicken  19866894110717_1
aaactgaaaatcaggccaagatccaatattcaattttgccaatatgaatagactggaattaaactcatattgctaaagggaaagaacaggtggttcaatttctcatgctctatatccacgtttgttttgcctgcaagtgtgtttttaaagactgacacatttattccttacaaacccagcatgaatttttcaaaaaggccactctggactgtacaagttagaaatgtactgtatagtgattaactcatgtggcaaatggacggaaagccaattaccaaaaaaagtttgcctttaagataygaagatgttttttktgtgtgtgtgtgtgtgtatgtgtttcattaatagagaagctgtagtgttgagggatttgatttttaaaatccaaatacaagctacaaacttgtcatgaatttggaagagcaacagcatctagccaaatgtctctgattatttctaccaaggcatgacttctttaagctctctctgaagttcagttcccagaagaaaagtaaagcctcactgcaaaatctttgtaagaaaaatatcttgagaaggatatagctggctgaaacacctaaaatcctgcatggaataaca

SEQ ID NO: 6509 - DNA, 600 bp, Chicken  19866894110717_2
gccaagatccaatattcaattttgccaatatgaatagactggaattaaactcatattgctaaagggaaagaacaggtggttcaatttctcatgctctatatccacgtttgttttgcctgcaagtgtgtttttaaagactgacacatttattccttacaaacccagcatgaatttttcaaaaaggccactctggactgtacaagttagaaatgtactgtatagtgattaactcatgtggcaaatggacggaaagccaattaccaaaaaaagtttgcctttaagataygaagatgttttttktgtgtgtgtgtgtgtgtatgtgtttcattaatagagaagctgtagtgttgagggatttgatttttaaaatccaaatacaagctacaaacttgtcatgaatttggaagagcaacagcatctagccaaatgtctctgattatttctaccaaggcatgacttctttaagctctctctgaagttcagttcccagaagaaaagtaaagcctcactgcaaaatctttgtaagaaaaatatcttgagaaggatatagctggctgaaacacctaaaatcctgcatggaataacaaagcaacactggac

SEQ ID NO: 6510 - DNA, 600 bp, Chicken  19866894110719_1
gaaggaagactcatcaatcctgagcactggaactgtgaggatccataaggattttacatgacaccagtgaacctgagctgaggaaccactgctgtagctgagctgcacagggagcagcatagaactggttgccttcctttgctcagtgtgacagatctcagatttagggagaatctggcctcatgtgttttccatgggcgttgtgatagacaagtggctgcggctggaagcaacccaggagttcctacagaaagtgtccccgtgagcatgagggaagctcagggctaaggatgaagctgyctggtcagcaacatgggcacaaccatgcacttcccaggacccagtgggctgtctgtaggagaaggcaggccctgatccttgaaaagtcgcataaatatctttacttatttggcctggtagctttgggtgatgggaacttttgagatgacgtttatacaaagaataaattccttaagacaactcttgccttcaagcagccaaaagaaaaacggaagagtttgcaatcatattaayagtgtctgaaaattagaagtgtgaaataagctttaaaagattaaaaatgaaatagtattttcctct

SEQ ID NO: 6511 - DNA, 600 bp, Chicken  19866894110719_2
ccaggagttcctacagaaagtgtccccgtgagcatgagggaagctcagggctaaggatgaagctgyctggtcagcaacatgggcacaaccatgcacttcccaggacccagtgggctgtctgtaggagaaggcaggccctgatccttgaaaagtcgcataaatatctttacttatttggcctggtagctttgggtgatgggaacttttgagatgacgtttatacaaagaataaattccttaagacaactcttgccttcaagcagccaaaagaaaaacggaagagtttgcaatcatattaayagtgtctgaaaattagaagtgtgaaataagctttaaaagattaaaaatgaaatagtattttcctctcttactcagttattttcaactctyatctgaaacaatgtctccacttctgaacaggggcacagcccttggctccatggctgccctcctggccccccggctgcagtgccctggcctgagcctggcccatggcaacggggagcacagcagggtgtacatgttagttggacgtttgaagggaaaatagagcctgatacctctgttcccacaggatgctaccacagagactatttgctg

SEQ ID NO: 6512 - DNA, 600 bp, Chicken  19866894110719_3
atgcacttcccaggacccagtgggctgtctgtaggagaaggcaggccctgatccttgaaaagtcgcataaatatctttacttatttggcctggtagctttgggtgatgggaacttttgagatgacgtttatacaaagaataaattccttaagacaactcttgccttcaagcagccaaaagaaaaacggaagagtttgcaatcatattaayagtgtctgaaaattagaagtgtgaaataagctttaaaagattaaaaatgaaatagtattttcctctcttactcagttattttcaactctyatctgaaacaatgtctccacttctgaacaggggcacagcccttggctccatggctgccctcctggccccccggctgcagtgccctggcctgagcctggcccatggcaacggggagcacagcagggtgtacatgttagttggacgtttgaagggaaaatagagcctgatacctctgttcccacaggatgctaccacagagactatttgctgtaaaacgaaacctgtggggtggtgttttacaccacagcgtcacatgaaaggcaacaggcggcccagcaatactcctacacygacagatcc

SEQ ID NO: 6513 - DNA, 600 bp, Chicken  19866894110719_4
tcaactctyatctgaaacaatgtctccacttctgaacaggggcacagcccttggctccatggctgccctcctggccccccggctgcagtgccctggcctgagcctggcccatggcaacggggagcacagcagggtgtacatgttagttggacgtttgaagggaaaatagagcctgatacctctgttcccacaggatgctaccacagagactatttgctgtaaaacgaaacctgtggggtggtgttttacaccacagcgtcacatgaaaggcaacaggcggcccagcaatactcctacacygacagatcccgcatcttctgacagcttcacatttctctatctggcaagcacaaaattgtggtctatgtacaaagcagcctttttatttagagaacaattaagctaatcccagtaagatttcatgtttaactaggtttgtagcaaacacstttgtagtctgcattcagtcaagctcttttgactttcacaaaataggggaaaaacagtggagttgaaatgtaaaaatctatgctgcctgggacatrtgcaaggcccgagtgagtagaactgctgacctatttgctgaaatttcagtatttt

SEQ ID NO: 6514 - DNA, 600 bp, Chicken  19866894110719_5
gacgtttgaagggaaaatagagcctgatacctctgttcccacaggatgctaccacagagactatttgctgtaaaacgaaacctgtggggtggtgttttacaccacagcgtcacatgaaaggcaacaggcggcccagcaatactcctacacygacagatcccgcatcttctgacagcttcacatttctctatctggcaagcacaaaattgtggtctatgtacaaagcagcctttttatttagagaacaattaagctaatcccagtaagatttcatgtttaactaggtttgtagcaaacacstttgtagtctgcattcagtcaagctcttttgactttcacaaaataggggaaaaacagtggagttgaaatgtaaaaatctatgctgcctgggacatrtgcaaggcccgagtgagtagaactgctgacctatttgctgaaatttcagtattttatcaaatagatgcctttcttcagtttatcttccaattaagcagtagggagttttttaaaaacctgccttttccatcagagtgatttggtatactctgcagcgcttgataaatacacacatatgcatatgtatgcacacatgcacaacac

SEQ ID NO: 6515 - DNA, 600 bp, Chicken  19866894110719_6
ttacaccacagcgtcacatgaaaggcaacaggcggcccagcaatactcctacacygacagatcccgcatcttctgacagcttcacatttctctatctggcaagcacaaaattgtggtctatgtacaaagcagcctttttatttagagaacaattaagctaatcccagtaagatttcatgtttaactaggtttgtagcaaacacstttgtagtctgcattcagtcaagctcttttgactttcacaaaataggggaaaaacagtggagttgaaatgtaaaaatctatgctgcctgggacatrtgcaaggcccgagtgagtagaactgctgacctatttgctgaaatttcagtattttatcaaatagatgcctttcttcagtttatcttccaattaagcagtagggagttttttaaaaacctgccttttccatcagagtgatttggtatactctgcagcgcttgataaatacacacatatgcatatgtatgcacacatgcacaacacacaataaaatagagttgatgttggcatagatggggtaaggtttgctgcactcattacaagatgcaggctcatggccctcaaagtctcacctcttca

SEQ ID NO: 6516 - DNA, 599 bp, Chicken  19866894110723_1
  misc_feature (1)..(202): n is any nucleotide
nnnnnnnnnnnnnnnnnnnnnnnnnnnnnnnnnnnnnnnnnnnnnnnnnnnnnnnnnnnnnnnnnnnnnnnnnnnnnnnnnnnnnnnnnnnnnnnnnnnnnnnnnnnnnnnnnnnnnnnnnnnnnnnnnnnnnnnnnnnnnnnnnnnnnnnnnnnnnnnnnnnnnnnnnnnnnnnnnnnnnnnnnnnnnnnnnnnnnnnnnnacaaagcaggttgagatgggactctttgggggaagacaggtggcaggactgtgtgggctgaggtggatttcatgtacctaaagttcactaatcaattmgaaggggatttgacaaatgattatacacaaaattatgtattttacatgtggataggaggagattaactgataagagagataagaaatctgacgagaagatgaaaaataatagcttctgtgttatctgatgctttgcagtacactgttttcttgtgttggcagacggtatgtagaaatttaacacaagattgtgaaatcttaagtatcaatgaaaaatgcccagaagtgtttaaaaacctgtcagtgaagattagctaaattatgatgagttcttgtatactaatatttttccctgcttg

SEQ ID NO: 6517 - DNA, 600 bp, Chicken  19866894110736_1
gctgcagcacaatagagttaaagagaagctctgctgactctgtgaactcacctccacagctggacaccaactaatgaagcaattgtagtgatgccctcattaggctagagagctgtcagtgctatcactctttcccattaccattagaaactgaattcgatgtgagaggggaacgggtatctctggcatctcctctaaacaagtgcatcattatctggtactgccaagaatggtatttatcaccccgctcattctcatcagcactttttgctaaccattttttaagagaatctttggggraaaaaaaaaaaaagcacattttaatcagtgagtaaacaattctagtgttatgccagaagacagtgagatctctacatgcagggatactccctgtcagaggggctcaaaggaggctgtttgctaatgacaatcttgctctttaaaaaaaaaaaaaggatgctggttggatttccaaagttgatatttctgagtaataactttacccagaattccatgtaagaaaacttctactggtcaaactagatggatcaaaacactgtataaaagggttttagttgctctcttcttctgtaaaaagca

SEQ ID NO: 6518 - DNA, 510 bp, Chicken  19866894110737_1
catcccatcagcaggcaaggcagcccttggagggacgagcagcagagcaagctcgggatgaaacgaccagtcatagaatcagagaatcatagaatggcttgggttgaaaggatccccagggatcatcagtagagtcctctagccatggggcttgatgtagtgcacagccctgtgggctctctggcatgcagttggggcacatgggggctgtgcatgggaccattctctggagtggttgagaatgggaagggctgggatggaaggcaaggggaaaacattggtacaggagtctcaagctgrggtgtgtctgatggtgactttctttgtgagagttgtttagtaggatgattaataaaaatttggtactcagtacatgagtagatgtcagagtctggacctgtaatagcttagtaagacctttcccagtcctgtcaattagttttcaattagagttttgtttcagtgttgtatatggtctacgggtttatgctgtgtcttagaatcatagaa

SEQ ID NO: 6519 - DNA, 599 bp, Chicken  19866894110740_1
  misc_feature (1)..(46): n is any nucleotide
nnnnnnnnnnnnnnnnnnnnnnnnnnnnnnnnnnnnnnnnnnnnnntcctgcacccaaagtttatatggtttgcactgacgtcattcttgtctataaaaatggaccaggtattagtaataatgacaaaatcaactcaacgacctacgttactctgattttcatccacacatttactatttccacctttgttttccatctgatttgttacataatccagtattgtccaatttactgcaactgctgcataaattggcatacttcctacacttctcgggagagccatacaaacccaacaatcygaaacactaaaaccttcatcaagattttcaattagctttacattacttttttttccagccaagctaaagcaacagttaaaactattgaagacagaaaaatattaggcaatttcttttcttaacataaatttcagagctctcttgggggtagaggtccgctgaagttttgaggccttctttaccctgcaggaacgcatccacaaaagcagctcataaattcagattgccagctgggcgttgacaaatagtcaaaacggtccttcccgcttcgactaggacagtgaatctgaaagaaatgt

SEQ ID NO: 6520 - DNA, 555 bp, Chicken  19866894110742_1
atctgaaagcctgtaattgatgctgctttccatctcccatcaggtggacacagaacattgctcatgcaaacaagtttgatgaaatctcttccctttcaggaaacttcaaattgcctctggagatccaactagctgctccttccccttcctacttaagatattttatacacgatcagcatgaacaaatagaagcagagcctccagccccagcctgggagcagtgctggtacaggttttgcctcatctctaggctggcagagacaacgtattactaatagtgaagaactgacagtcttgagstgcagtgagaacacattctgcagttttgagttgccaaataaaccagtcaccattccggtcgtgaccacataaatgccattgacctgatcagttatgtatgagaaaccatttgacaagaaatgaggaaaaaatgaccgagctcacagaaaccccatgcatgcagttgctgtactgcctgcactgtcttacatgtatttcacgtgtcactagatcagtgatgcatcacataaaaatggagaaaaaggctggcatttt

SEQ ID NO: 6521 - DNA, 599 bp, Chicken  19866894110743_1
  misc_feature (1)..(58): n is any nucleotide
nnnnnnnnnnnnnnnnnnnnnnnnnnnnnnnnnnnnnnnnnnnnnnnnnnnnnnnnnntttgccaccttttttcctcaccacactcccctttcgttttctagatatcttaggatctacatgcatgcatcgttcttttgggagaaaaggtgatcgtcctttggctgaagtgtctgagttaggtgctgctacgtggctttcagttgagtatctaacctatgatacaatttccccctgtacaaggattggacagattaaaattctacctctcaaagggtacagggccttgatgttggtaaaayattacaaactgtaatggtaaagactttctgccactactcaactaacagttacagggtacccagttcgtttggaaaggaaaagtctaaatggccataacggttgagctatgaaaggctcaaaactgagaaagggagagtatttctttgagaaagaatgtattactgttttcagatccaaaggaaaaggaaggaatgtaagactttaaagtttgtgtttttctggcatggaggaaacgagagcctgtagcaaccagaaaagaatgttaaagaaccgtttccttaagggcaagcaatgatgt

SEQ ID NO: 6522 - DNA, 565 bp, Chicken  19866894110743_2
ctaacagttacagggtacccagttcgtttggaaaggaaaagtctaaatggccataacggttgagctatgaaaggctcaaaactgagaaagggagagtatttctttgagaaagaatgtattactgttttcagatccaaaggaaaaggaaggaatgtaagactttaaagtttgtgtttttctggcatggaggaaacgagagcctgtagcaaccagaaaagaatgttaaagaaccgtttccttaagggcaagcaatgatgtgaaatttggtgaataaacctcacactttgatattacagaaaracagaagtgactggaaaaggcttgaatatgaacttgggtgagtagcaccagcttctttggaccgtactgggatctgctccttcaaggggtgctgttatggaggacacctcaagacaatattctgcaggcattgctgaaataaaccctcttcaatccagattaattattcactttttccgaagagcagaactgttatgccactatatttgaacctttagtgttcatatgaagctaaaaaaaaaaaagatgttccctgtgctaaatg

SEQ ID NO: 6523 - DNA, 600 bp, Chicken  19866894110745_1
tggtcagaaacccgtgtaatgcaaaggcatttgaatcctatactgtacctttcacttcaaattgaagtaaaaagaaagaaaaaatggagaaacatttgcttggagtaagcagactttataggtaatgcagttcgtgcgctaatgatgggggacagagctctgtgttcaagaatatgggtttccaagctcaggagattgacatactttgttttaagtaaggggaaaggttatatttgtgaggccgggttcaaatcccagttacagcaacgtaaatcggttcctgggtgtctgaagctggcygggaactgggagggctgggactggcaccggggtgtcccattgagcatctgyaggatctgcatcagcrgggaggaaattctccattcagcacatcctccacccagcattgacgccaggcttgagctcctcactggctgcccatttatttccctttcaaagcacaggggagcactgagcatgcaaaacctgagcttgcatgatcagtgtctgtgggtctggggggtctctgccatgtctcctggctgaggcagggaggagaggtcctggagaggatgcttgagatttgttctgtgtgagttc

SEQ ID NO: 6524 - DNA, 600 bp, Chicken  19866894110745_2
tcacttcaaattgaagtaaaaagaaagaaaaaatggagaaacatttgcttggagtaagcagactttataggtaatgcagttcgtgcgctaatgatgggggacagagctctgtgttcaagaatatgggtttccaagctcaggagattgacatactttgttttaagtaaggggaaaggttatatttgtgaggccgggttcaaatcccagttacagcaacgtaaatcggttcctgggtgtctgaagctggcygggaactgggagggctgggactggcaccggggtgtcccattgagcatctgyaggatctgcatcagcrgggaggaaattctccattcagcacatcctccacccagcattgacgccaggcttgagctcctcactggctgcccatttatttccctttcaaagcacaggggagcactgagcatgcaaaacctgagcttgcatgatcagtgtctgtgggtctggggggtctctgccatgtctcctggctgaggcagggaggagaggtcctggagaggatgcttgagatttgttctgtgtgagttccaggcacacaggggatagcggtgtccagaccctgaggttttcattatactg

SEQ ID NO: 6525 - DNA, 600 bp, Chicken  19866894110745_3
taaaaagaaagaaaaaatggagaaacatttgcttggagtaagcagactttataggtaatgcagttcgtgcgctaatgatgggggacagagctctgtgttcaagaatatgggtttccaagctcaggagattgacatactttgttttaagtaaggggaaaggttatatttgtgaggccgggttcaaatcccagttacagcaacgtaaatcggttcctgggtgtctgaagctggcygggaactgggagggctgggactggcaccggggtgtcccattgagcatctgyaggatctgcatcagcrgggaggaaattctccattcagcacatcctccacccagcattgacgccaggcttgagctcctcactggctgcccatttatttccctttcaaagcacaggggagcactgagcatgcaaaacctgagcttgcatgatcagtgtctgtgggtctggggggtctctgccatgtctcctggctgaggcagggaggagaggtcctggagaggatgcttgagatttgttctgtgtgagttccaggcacacaggggatagcggtgtccagaccctgaggttttcattatactgctcatcaccccccacc

SEQ ID NO: 6526 - DNA, 577 bp, Chicken  19866894110751_1
cgtactaaaatatccaaagacaaaagtgaattacaaacaaactgtatgaaggcttctctgggaatagacatatctcctaaacatttatgggagccagtcagttgcacctacatgcacaattactgcctctttaggtctgatgctacttagacttatgcagggtgttgcttttataacctcactttactattcctcagctgtgaacacaggtggatccaggcatggctaacttctagaagcatatcaggaaaattaacattaacataactgtcacacaggaaaactcagggagaactaggrattttatggaacacctcagaacaaaatatatattgagttgcccaaaacaggcacagatgtacaactgcatgcctctgttagtacagaacttcacccagctgtaggcagcccaggttttaggaggggaacctcatcatctgaagcctaatactgtctttgcatttaactgtgggccctgggatggcagctgtttttgctgctggtcacatctcttgaaagaagtacaaacagtacatctaaccactgttaagacatggatctgttttgttcttgaaaa

SEQ ID NO: 6527 - DNA, 600 bp, Chicken  19866894110754_1
cgaatgggcgtaattctgcataattgtacagagacactggaggtggttgttgaaaaatgtttataactctcctattaaaaatgaaaaaacctcaaaattttagtgcatttaacatccccaaagttgctgtttctttcgaggctcttgctgttagatgtttggtttgtcacgttgcaggtggtaaacagcagcacagacgtgaggttggcctgtgtgggggtgatggggagtgctggagctgttaggtgtgcccatggcaggtgcttgcagtggctttcttctctgcaccagggtcagagrgggatacctgagcagatagcctgcctgcccaacccrggctttgctgccattggtgcaatgagtaatccagatcctaatcccgtatcttcgattcttattgtaaaataagcaatatatttccagcttaaaagagaaacccattttgtcaagctcatttaactttattaaatgctgctgtgaagagatgagcagagygttttttgatggatggaggctggcctggtgaagaagcccgttgggtggtggtgtgtgcaggaatttggcacttgcaggtttgcttagctgcccccatggctgtga

SEQ ID NO: 6528 - DNA, 600 bp, Chicken  19866894110754_2
ctggaggtggttgttgaaaaatgtttataactctcctattaaaaatgaaaaaacctcaaaattttagtgcatttaacatccccaaagttgctgtttctttcgaggctcttgctgttagatgtttggtttgtcacgttgcaggtggtaaacagcagcacagacgtgaggttggcctgtgtgggggtgatggggagtgctggagctgttaggtgtgcccatggcaggtgcttgcagtggctttcttctctgcaccagggtcagagrgggatacctgagcagatagcctgcctgcccaacccrggctttgctgccattggtgcaatgagtaatccagatcctaatcccgtatcttcgattcttattgtaaaataagcaatatatttccagcttaaaagagaaacccattttgtcaagctcatttaactttattaaatgctgctgtgaagagatgagcagagygttttttgatggatggaggctggcctggtgaagaagcccgttgggtggtggtgtgtgcaggaatttggcacttgcaggtttgcttagctgcccccatggctgtgatgggcagtggggattggttgctggaggaggagagga

SEQ ID NO: 6529 - DNA, 540 bp, Chicken  19866894110754_3
gacgtgaggttggcctgtgtgggggtgatggggagtgctggagctgttaggtgtgcccatggcaggtgcttgcagtggctttcttctctgcaccagggtcagagrgggatacctgagcagatagcctgcctgcccaacccrggctttgctgccattggtgcaatgagtaatccagatcctaatcccgtatcttcgattcttattgtaaaataagcaatatatttccagcttaaaagagaaacccattttgtcaagctcatttaactttattaaatgctgctgtgaagagatgagcagagygttttttgatggatggaggctggcctggtgaagaagcccgttgggtggtggtgtgtgcaggaatttggcacttgcaggtttgcttagctgcccccatggctgtgatgggcagtggggattggttgctggaggaggagaggagggtactctcctgtggtctgggtgcttgtgcacacatctcagtgcttgtgtgagatgagatctcatcggggaacttgtgctccgtggctttaggctttt

SEQ ID NO: 6530 - DNA, 576 bp, Chicken  19866894110755_1
atgtaattgtatatatattttatcattgtaaaattaagggttcctcatgtgtttgtgcccaagagagagattacttcctcaagtatcacggaaaaggcacacaaatacttagacctgagcaaacacaagcctgtccaaggactgcagagcatgtttgagttctactccagagcaagatcagaactgcagattttacagctgtcaaattttttacatgagaggggattatttccatcagcactatttctcttctgagaaagaaaagaagattggatctcttcatttacatccttctgaagkatgtccactgtactgctctgtccatgtttacagtgacactatcactgataaggcaaaggccaacccaagccttaagttaacccagccaagactgctggacttctagccttcaatgatgaacctttgacttttggagtatatgctttcctaggatctcaaacaaarcactgtggctaaataaagggcaagaatattaaaccatatagctggctcacaagaacgcaacagtaacttcagagaacttttccatttggtcttcaagacattcatcaacag

SEQ ID NO: 6531 - DNA, 411 bp, Chicken  19866894110755_2
tccagagcaagatcagaactgcagattttacagctgtcaaattttttacatgagaggggattatttccatcagcactatttctcttctgagaaagaaaagaagattggatctcttcatttacatccttctgaagkatgtccactgtactgctctgtccatgtttacagtgacactatcactgataaggcaaaggccaacccaagccttaagttaacccagccaagactgctggacttctagccttcaatgatgaacctttgacttttggagtatatgctttcctaggatctcaaacaaarcactgtggctaaataaagggcaagaatattaaaccatatagctggctcacaagaacgcaacagtaacttcagagaacttttccatttggtcttcaagacattcatcaacag

SEQ ID NO: 6532 - DNA, 600 bp, Chicken  19866894110758_1
agcagaattagcattcaggtttctgcatacctgtaaaatacactgctctttctctgtggtaacagcagttctgcatgagggagtacctagccctgtcttaggcacagaaacatagagactaaaatagaattctacgatttgcaacgcaaacacaaaaaccgccaaagggaaagcctgatcaactacacattactacagcactaccaaaaacctgcagaatttaactcaaaggaaaactgaagaaattggaccagtatgtgccattctgttcccttcacttgtaaggaacaaagacacaaytacaaaatgtcttcacacattaaaacacagtcyatgaaaatttgaacagcattagaagagatactataagttattgtttgaactaatctctcttgtcaaactagagaaaagttgtactttctgtttagtgaactaaagcgttactaaatgtgacatgcatgtgcccctctgcttaaaagaaygaagtgcactcatatcctacctgatcggtattaaacagagcagaggccatggactcctgctgaagtgcgagcaaaggaacagactcttcactttcctcagacatagttaaaagtgaaa

SEQ ID NO: 6533 - DNA, 600 bp, Chicken  19866894110758_2
taaaatacactgctctttctctgtggtaacagcagttctgcatgagggagtacctagccctgtcttaggcacagaaacatagagactaaaatagaattctacgatttgcaacgcaaacacaaaaaccgccaaagggaaagcctgatcaactacacattactacagcactaccaaaaacctgcagaatttaactcaaaggaaaactgaagaaattggaccagtatgtgccattctgttcccttcacttgtaaggaacaaagacacaaytacaaaatgtcttcacacattaaaacacagtcyatgaaaatttgaacagcattagaagagatactataagttattgtttgaactaatctctcttgtcaaactagagaaaagttgtactttctgtttagtgaactaaagcgttactaaatgtgacatgcatgtgcccctctgcttaaaagaaygaagtgcactcatatcctacctgatcggtattaaacagagcagaggccatggactcctgctgaagtgcgagcaaaggaacagactcttcactttcctcagacatagttaaaagtgaaaattctgaagctaaaaagtcagtaacacctgttg

SEQ ID NO: 6534 - DNA, 600 bp, Chicken  19866894110758_3
ctacacattactacagcactaccaaaaacctgcagaatttaactcaaaggaaaactgaagaaattggaccagtatgtgccattctgttcccttcacttgtaaggaacaaagacacaaytacaaaatgtcttcacacattaaaacacagtcyatgaaaatttgaacagcattagaagagatactataagttattgtttgaactaatctctcttgtcaaactagagaaaagttgtactttctgtttagtgaactaaagcgttactaaatgtgacatgcatgtgcccctctgcttaaaagaaygaagtgcactcatatcctacctgatcggtattaaacagagcagaggccatggactcctgctgaagtgcgagcaaaggaacagactcttcactttcctcagacatagttaaaagtgaaaattctgaagctaaaaagtcagtaacacctgttgtaataccgtaagcaaacgtaagttatgaactacgcgctttcaggtgaataaacaacatcaaaagcaaatgatcggctttttttcctatcaggaaaatagttaatagcaaacctagatcaatgcccctggaccaacagatagaaagctag

SEQ ID NO: 6535 - DNA, 599 bp, Chicken  19866894110760_1
  misc_feature (1)..(166): n is any nucleotide
nnnnnnnnnnnnnnnnnnnnnnnnnnnnnnnnnnnnnnnnnnnnnnnnnnnnnnnnnnnnnnnnnnnnnnnnnnnnnnnnnnnnnnnnnnnnnnnnnnnnnnnnnnnnnnnnnnnnnnnnnnnnnnnnnnnnnnnnnnnnnnnnnnnnnnnnnnnnnnnnnnnnnnttaaaaagaagaagtgtcatggcagggttttcgacattgcatgtttgctgagccacatctacaggctggagaaatgagaggaaattctgctctctgggtttatttgctgctgccttttgtgccacatttcagtrggtgcaggattgttttccttcgagctgaatgggcacgtggtttcggctgagtatcttcctcctgtgaacgttttcatttggygcgtgaaaataatctggtgccgtgttactgagaataaagaggagttagattgtaggcacgggctgtgttgtcatctgcttttcttcccgttgtaatttcagtagatgctgaagcttttgttaatcccggggaggcggatttgccttccagtataaatattayctatgaaagttcatttcaagttatctaygggagagtgcacacgcgaggtggggat

SEQ ID NO: 6536 - DNA, 600 bp, Chicken  19866894110760_10
gctaaagaaactcttagaaagtgttaagaacaatgcagagataaaagtagttgggagaaaatatgcattgggctttcagtgctgggagaaaggcttgtggaataaagatgagggcttttaaaagggttttttttttttttttgctgtttttttccatgaggtctgaaggtctgtgaagttcaatttctctcggaggggagagagcagtgaaggggagggaggtctgtcatattctctgcatttcaaatgagttggttgctgtttgggtaggaaaagcatttggatttactcttaacttcrggctgtcaaaagaaatcacaatctggagttaagtaatgaaacctctttaggaaaatcgatgctaccttatccgagctcaatttattcaagaggtcagctctgttgctgccctggaaaagcttgaatttaatgattaacctctttgtgactgttcatgtaacttcaggctttctgtctggtacattatgtaagcatgaggcaagatgataatggaacactttatggaatgctatgcrctatttggggagaaaatccctcrgaattctacctgcagtgtgcatcagccccartgaaactgag

SEQ ID NO: 6537 - DNA, 523 bp, Chicken  19866894110760_11
tgcatttcaaatgagttggttgctgtttgggtaggaaaagcatttggatttactcttaacttcrggctgtcaaaagaaatcacaatctggagttaagtaatgaaacctctttaggaaaatcgatgctaccttatccgagctcaatttattcaagaggtcagctctgttgctgccctggaaaagcttgaatttaatgattaacctctttgtgactgttcatgtaacttcaggctttctgtctggtacattatgtaagcatgaggcaagatgataatggaacactttatggaatgctatgcrctatttggggagaaaatccctcrgaattctacctgcagtgtgcatcagccccartgaaactgagagaagcccattaagaaatcctattagctgtctgctctccagatgagttaaaacctctgctcagtgtctacctggtggcttatctggcaacagtgctgtcgccccttctggagaggtgccttttcgtgcagctctgccaggcgtacattcatctcagcca

SEQ ID NO: 6538 - DNA, 500 bp, Chicken  19866894110760_12
tgtttgggtaggaaaagcatttggatttactcttaacttcrggctgtcaaaagaaatcacaatctggagttaagtaatgaaacctctttaggaaaatcgatgctaccttatccgagctcaatttattcaagaggtcagctctgttgctgccctggaaaagcttgaatttaatgattaacctctttgtgactgttcatgtaacttcaggctttctgtctggtacattatgtaagcatgaggcaagatgataatggaacactttatggaatgctatgcrctatttggggagaaaatccctcrgaattctacctgcagtgtgcatcagccccartgaaactgagagaagcccattaagaaatcctattagctgtctgctctccagatgagttaaaacctctgctcagtgtctacctggtggcttatctggcaacagtgctgtcgccccttctggagaggtgccttttcgtgcagctctgccaggcgtacattcatctcagcca

SEQ ID NO: 6539 - DNA, 469 bp, Chicken  19866894110760_13
cttaacttcrggctgtcaaaagaaatcacaatctggagttaagtaatgaaacctctttaggaaaatcgatgctaccttatccgagctcaatttattcaagaggtcagctctgttgctgccctggaaaagcttgaatttaatgattaacctctttgtgactgttcatgtaacttcaggctttctgtctggtacattatgtaagcatgaggcaagatgataatggaacactttatggaatgctatgcrctatttggggagaaaatccctcrgaattctacctgcagtgtgcatcagccccartgaaactgagagaagcccattaagaaatcctattagctgtctgctctccagatgagttaaaacctctgctcagtgtctacctggtggcttatctggcaacagtgctgtcgccccttctggagaggtgccttttcgtgcagctctgccaggcgtacattcatctcagcca

SEQ ID NO: 6540 - DNA, 599 bp, Chicken  19866894110760_2
  misc_feature (1)..(84): n is any nucleotide
nnnnnnnnnnnnnnnnnnnnnnnnnnnnnnnnnnnnnnnnnnnnnnnnnnnnnnnnnnnnnnnnnnnnnnnnnnnnnnnnnnnnttaaaaagaagaagtgtcatggcagggttttcgacattgcatgtttgctgagccacatctacaggctggagaaatgagaggaaattctgctctctgggtttatttgctgctgccttttgtgccacatttcagtrggtgcaggattgttttccttcgagctgaatgggcacgtggtttcggctgagtatcttcctcctgtgaacgttttcatttggygcgtgaaaataatctggtgccgtgttactgagaataaagaggagttagattgtaggcacgggctgtgttgtcatctgcttttcttcccgttgtaatttcagtagatgctgaagcttttgttaatcccggggaggcggatttgccttccagtataaatattayctatgaaagttcatttcaagttatctaygggagagtgcacacgcgaggtggggatatgtggtgttttctttggagcatgccttttccaaagacatttgtgaaggttgctaatgcgtttcctgcctaagaagccgagg

SEQ ID NO: 6541 - DNA, 600 bp, Chicken  19866894110760_3
aggaaattctgctctctgggtttatttgctgctgccttttgtgccacatttcagtrggtgcaggattgttttccttcgagctgaatgggcacgtggtttcggctgagtatcttcctcctgtgaacgttttcatttggygcgtgaaaataatctggtgccgtgttactgagaataaagaggagttagattgtaggcacgggctgtgttgtcatctgcttttcttcccgttgtaatttcagtagatgctgaagcttttgttaatcccggggaggcggatttgccttccagtataaatattayctatgaaagttcatttcaagttatctaygggagagtgcacacgcgaggtggggatatgtggtgttttctttggagcatgccttttccaaagacatttgtgaaggttgctaatgcgtttcctgcctaagaagccgaggaagtcaaagagagaaggagatgacggacatacctgttagtgcagcgccggggcgtttctgtaacctccatctcctgyrcagttacragctctgcaggaaggggatctgcaccttgtgttggaaactctcaggcttcctgtttctatgaaaagctggtttctgg

SEQ ID NO: 6542 - DNA, 600 bp, Chicken  19866894110760_4
ctgctgccttttgtgccacatttcagtrggtgcaggattgttttccttcgagctgaatgggcacgtggtttcggctgagtatcttcctcctgtgaacgttttcatttggygcgtgaaaataatctggtgccgtgttactgagaataaagaggagttagattgtaggcacgggctgtgttgtcatctgcttttcttcccgttgtaatttcagtagatgctgaagcttttgttaatcccggggaggcggatttgccttccagtataaatattayctatgaaagttcatttcaagttatctaygggagagtgcacacgcgaggtggggatatgtggtgttttctttggagcatgccttttccaaagacatttgtgaaggttgctaatgcgtttcctgcctaagaagccgaggaagtcaaagagagaaggagatgacggacatacctgttagtgcagcgccggggcgtttctgtaacctccatctcctgyrcagttacragctctgcaggaaggggatctgcaccttgtgttggaaactctcaggcttcctgtttctatgaaaagctggtttctggtggggcctcttaacttgcactgctgggc

SEQ ID NO: 6543 - DNA, 600 bp, Chicken  19866894110760_5
gcttttcttcccgttgtaatttcagtagatgctgaagcttttgttaatcccggggaggcggatttgccttccagtataaatattayctatgaaagttcatttcaagttatctaygggagagtgcacacgcgaggtggggatatgtggtgttttctttggagcatgccttttccaaagacatttgtgaaggttgctaatgcgtttcctgcctaagaagccgaggaagtcaaagagagaaggagatgacggacatacctgttagtgcagcgccggggcgtttctgtaacctccatctcctgyrcagttacragctctgcaggaaggggatctgcaccttgtgttggaaactctcaggcttcctgtttctatgaaaagctggtttctggtggggcctcttaacttgcactgctgggccatctcttcctatttccattgccccagaaacttgctgctctcctccagtccccagtagttaccgatgtcttcacagtagagcagtgtagcagcatcagccacgtgccagtcccttggaattctgctgcgggtaatatttcctgtgaataaagtgttgctgttatagaattccagggagccctgaat

SEQ ID NO: 6544 - DNA, 600 bp, Chicken  19866894110760_6
cttttcttcccgttgtaatttcagtagatgctgaagcttttgttaatcccggggaggcggatttgccttccagtataaatattayctatgaaagttcatttcaagttatctaygggagagtgcacacgcgaggtggggatatgtggtgttttctttggagcatgccttttccaaagacatttgtgaaggttgctaatgcgtttcctgcctaagaagccgaggaagtcaaagagagaaggagatgacggacatacctgttagtgcagcgccggggcgtttctgtaacctccatctcctgyrcagttacragctctgcaggaaggggatctgcaccttgtgttggaaactctcaggcttcctgtttctatgaaaagctggtttctggtggggcctcttaacttgcactgctgggccatctcttcctatttccattgccccagaaacttgctgctctcctccagtccccagtagttaccgatgtcttcacagtagagcagtgtagcagcatcagccacgtgccagtcccttggaattctgctgcgggtaatatttcctgtgaataaagtgttgctgttatagaattccagggagccctgaatc

SEQ ID NO: 6545 - DNA, 600 bp, Chicken  19866894110760_7
cccgttgtaatttcagtagatgctgaagcttttgttaatcccggggaggcggatttgccttccagtataaatattayctatgaaagttcatttcaagttatctaygggagagtgcacacgcgaggtggggatatgtggtgttttctttggagcatgccttttccaaagacatttgtgaaggttgctaatgcgtttcctgcctaagaagccgaggaagtcaaagagagaaggagatgacggacatacctgttagtgcagcgccggggcgtttctgtaacctccatctcctgyrcagttacragctctgcaggaaggggatctgcaccttgtgttggaaactctcaggcttcctgtttctatgaaaagctggtttctggtggggcctcttaacttgcactgctgggccatctcttcctatttccattgccccagaaacttgctgctctcctccagtccccagtagttaccgatgtcttcacagtagagcagtgtagcagcatcagccacgtgccagtcccttggaattctgctgcgggtaatatttcctgtgaataaagtgttgctgttatagaattccagggagccctgaatctaaatgta

SEQ ID NO: 6546 - DNA, 600 bp, Chicken  19866894110760_8
tcctatttccattgccccagaaacttgctgctctcctccagtccccagtagttaccgatgtcttcacagtagagcagtgtagcagcatcagccacgtgccagtcccttggaattctgctgcgggtaatatttcctgtgaataaagtgttgctgttatagaattccagggagccctgaatctaaatgtatcaattatgtgtcaacacaacagcatctgtcgttgaaattgggtatcatttatttggcatcagcgtagtgaagatttggctgacagccagagtgaaatattccagcagaagmagcagcagcaggagccatctctgaagtaattctctgaaattcaggtgctctaactaacatcattgaacgcatccttaaaacacgagggaccttmagcaaaaaggttccatgttcttgtctgcttttctttctttttcacgttgagttattgttttgttcttgctctccgcagagacgcgcgcaggctgtgcaatgtatacatcctgtgatttgatatcctccttttgaccgcatttcatattccagcacttgtttacataaaaattccaagtgaatgcaatcagcgatggctgcttcggg

SEQ ID NO: 6547 - DNA, 600 bp, Chicken  19866894110760_9
cgtgccagtcccttggaattctgctgcgggtaatatttcctgtgaataaagtgttgctgttatagaattccagggagccctgaatctaaatgtatcaattatgtgtcaacacaacagcatctgtcgttgaaattgggtatcatttatttggcatcagcgtagtgaagatttggctgacagccagagtgaaatattccagcagaagmagcagcagcaggagccatctctgaagtaattctctgaaattcaggtgctctaactaacatcattgaacgcatccttaaaacacgagggaccttmagcaaaaaggttccatgttcttgtctgcttttctttctttttcacgttgagttattgttttgttcttgctctccgcagagacgcgcgcaggctgtgcaatgtatacatcctgtgatttgatatcctccttttgaccgcatttcatattccagcacttgtttacataaaaattccaagtgaatgcaatcagcgatggctgcttcgggggaaatttaactgtgaaagaggcaatgctttcaaaatgggagagttagaaatgacatcccttttctccaaaaggtttgcaagcgtctgtgtttt

SEQ ID NO: 6548 - DNA, 599 bp, Chicken  19866894110773_1
  misc_feature (1)..(116): n is any nucleotide
nnnnnnnnnnnnnnnnnnnnnnnnnnnnnnnnnnnnnnnnnnnnnnnnnnnnnnnnnnnnnnnnnnnnnnnnnnnnnnnnnnnnnnnnnnnnnnnnnnnnnnnnnnnnnnnnnnnnctcccagggtgcaggacctgcccttagaggatgagggctatgcaaagtcatttggagcatcctaacataaaaatgcaggcaccacagttcctgaagaggagtttctcagagcctgtcctgggtcagagagactcccagcttccccatcctctgaggcactcaaggaggcccacttactcgctcwtccagcgtgggcatgggcaagctctggcaaggaggtcagcagcayrggcccttgtcccacggcgaaaatctgcccccgagacagatamgtgcagacaagaaacaaggattccagtccacattgcctgctgcagaatctatgaaggccctgatgaccatcagatcaagatgatgcatctgtggctggagcaatatgaatatgttgagaggcgaaagttggaattttatagagactactacacccagcctaacaaygaaggatcccagggcgtggctccatctgacactgcagccccggtt

SEQ ID NO: 6549 - DNA, 599 bp, Chicken  19866894110773_2
  misc_feature (1)..(71): n is any nucleotide
nnnnnnnnnnnnnnnnnnnnnnnnnnnnnnnnnnnnnnnnnnnnnnnnnnnnnnnnnnnnnnnnnnnnnnnctcccagggtgcaggacctgcccttagaggatgagggctatgcaaagtcatttggagcatcctaacataaaaatgcaggcaccacagttcctgaagaggagtttctcagagcctgtcctgggtcagagagactcccagcttccccatcctctgaggcactcaaggaggcccacttactcgctcwtccagcgtgggcatgggcaagctctggcaaggaggtcagcagcayrggcccttgtcccacggcgaaaatctgcccccgagacagatamgtgcagacaagaaacaaggattccagtccacattgcctgctgcagaatctatgaaggccctgatgaccatcagatcaagatgatgcatctgtggctggagcaatatgaatatgttgagaggcgaaagttggaattttatagagactactacacccagcctaacaaygaaggatcccagggcgtggctccatctgacactgcagccccggttgttgcaggaggagcaacagttcragagaggaattcacccgaggtc

SEQ ID NO: 6550 - DNA, 599 bp, Chicken  19866894110773_3
  misc_feature (1)..(70): n is any nucleotide
nnnnnnnnnnnnnnnnnnnnnnnnnnnnnnnnnnnnnnnnnnnnnnnnnnnnnnnnnnnnnnnnnnnnnnctcccagggtgcaggacctgcccttagaggatgagggctatgcaaagtcatttggagcatcctaacataaaaatgcaggcaccacagttcctgaagaggagtttctcagagcctgtcctgggtcagagagactcccagcttccccatcctctgaggcactcaaggaggcccacttactcgctcwtccagcgtgggcatgggcaagctctggcaaggaggtcagcagcayrggcccttgtcccacggcgaaaatctgcccccgagacagatamgtgcagacaagaaacaaggattccagtccacattgcctgctgcagaatctatgaaggccctgatgaccatcagatcaagatgatgcatctgtggctggagcaatatgaatatgttgagaggcgaaagttggaattttatagagactactacacccagcctaacaaygaaggatcccagggcgtggctccatctgacactgcagccccggttgttgcaggaggagcaacagttcragagaggaattcacccgaggtca

SEQ ID NO: 6551 - DNA, 599 bp, Chicken  19866894110773_4
  misc_feature (1)..(28): n is any nucleotide
nnnnnnnnnnnnnnnnnnnnnnnnnnnnctcccagggtgcaggacctgcccttagaggatgagggctatgcaaagtcatttggagcatcctaacataaaaatgcaggcaccacagttcctgaagaggagtttctcagagcctgtcctgggtcagagagactcccagcttccccatcctctgaggcactcaaggaggcccacttactcgctcwtccagcgtgggcatgggcaagctctggcaaggaggtcagcagcayrggcccttgtcccacggcgaaaatctgcccccgagacagatamgtgcagacaagaaacaaggattccagtccacattgcctgctgcagaatctatgaaggccctgatgaccatcagatcaagatgatgcatctgtggctggagcaatatgaatatgttgagaggcgaaagttggaattttatagagactactacacccagcctaacaaygaaggatcccagggcgtggctccatctgacactgcagccccggttgttgcaggaggagcaacagttcragagaggaattcacccgaggtcaaggccagtgagcaacaggacaagaaaaataccactgctgccc

SEQ ID NO: 6552 - DNA, 600 bp, Chicken  19866894110773_5
cttccccatcctctgaggcactcaaggaggcccacttactcgctcwtccagcgtgggcatgggcaagctctggcaaggaggtcagcagcayrggcccttgtcccacggcgaaaatctgcccccgagacagatamgtgcagacaagaaacaaggattccagtccacattgcctgctgcagaatctatgaaggccctgatgaccatcagatcaagatgatgcatctgtggctggagcaatatgaatatgttgagaggcgaaagttggaattttatagagactactacacccagcctaacaaygaaggatcccagggcgtggctccatctgacactgcagccccggttgttgcaggaggagcaacagttcragagaggaattcacccgaggtcaaggccagtgagcaacaggacaagaaaaataccactgctgcccagcagccagaggggctccctgaacgtaccctcgtggagagttcttcggttstgccatggaggcgtctgccacagggtagaccattcagaccccaagcagcacacgcagagatgacgcccaggcaagaagcagcagaacacacgactcctagaccagagacaccacct

SEQ ID NO: 6553 - DNA, 600 bp, Chicken  19866894110773_6
tctggcaaggaggtcagcagcayrggcccttgtcccacggcgaaaatctgcccccgagacagatamgtgcagacaagaaacaaggattccagtccacattgcctgctgcagaatctatgaaggccctgatgaccatcagatcaagatgatgcatctgtggctggagcaatatgaatatgttgagaggcgaaagttggaattttatagagactactacacccagcctaacaaygaaggatcccagggcgtggctccatctgacactgcagccccggttgttgcaggaggagcaacagttcragagaggaattcacccgaggtcaaggccagtgagcaacaggacaagaaaaataccactgctgcccagcagccagaggggctccctgaacgtaccctcgtggagagttcttcggttstgccatggaggcgtctgccacagggtagaccattcagaccccaagcagcacacgcagagatgacgcccaggcaagaagcagcagaacacacgactcctagaccagagacaccacctacgctgtgcagaaactgctgtgcaccagccctcctgtgccatttcattcagaatgccggggccaagct

SEQ ID NO: 6554 - DNA, 575 bp, Chicken  19866894110773_7
atgaaggccctgatgaccatcagatcaagatgatgcatctgtggctggagcaatatgaatatgttgagaggcgaaagttggaattttatagagactactacacccagcctaacaaygaaggatcccagggcgtggctccatctgacactgcagccccggttgttgcaggaggagcaacagttcragagaggaattcacccgaggtcaaggccagtgagcaacaggacaagaaaaataccactgctgcccagcagccagaggggctccctgaacgtaccctcgtggagagttcttcggttstgccatggaggcgtctgccacagggtagaccattcagaccccaagcagcacacgcagagatgacgcccaggcaagaagcagcagaacacacgactcctagaccagagacaccacctacgctgtgcagaaactgctgtgcaccagccctcctgtgccatttcattcagaatgccggggccaagctccgagctgccagcatggccctctattccctgatcagaaaggcaactaagaagctctcaaagaagggaagagagcccatcataaaaacagat

SEQ ID NO: 6555 - DNA, 599 bp, Chicken  19866894110792_1
  misc_feature (1)..(32): n is any nucleotide
nnnnnnnnnnnnnnnnnnnnnnnnnnnnnnnnactgctgatgagctgcagaagcaggtgctggcttccttctcaaatcagcccacaaacaatgccaagtaaccgaggacagatacggcagcagaggaacctggggcgaggacacagagtggaagagaagggcgagggatgcacccagaacagacctgactatgggtcactctgccctacatgcaccaaagctccatgctgctgccagccaggaggtgtaagctcccagcgattggctgcacctgcaactgcagccccaggtgcaggaagrgamrtgactgtgagagaagaatccctccatgaggacagggacaagaggcagcagacctgaaaaatgctcctgccgatcagcagccagaggggctcctttggctaaggacatcaacccctgtaattgcaggagggagcccaccaggacacacagtcagtgagcagcagatctctgtcatgcccttccagggtgcaggagctctccctcttaagtgacgtcacgggtggttatcccctctttcctgtgtaagagcagcagctgcagctcctctgctcactactcagccatccttgcatcct

SEQ ID NO: 6556 - DNA, 599 bp, Chicken  19866894110792_2
  misc_feature (1)..(29): n is any nucleotide
nnnnnnnnnnnnnnnnnnnnnnnnnnnnnactgctgatgagctgcagaagcaggtgctggcttccttctcaaatcagcccacaaacaatgccaagtaaccgaggacagatacggcagcagaggaacctggggcgaggacacagagtggaagagaagggcgagggatgcacccagaacagacctgactatgggtcactctgccctacatgcaccaaagctccatgctgctgccagccaggaggtgtaagctcccagcgattggctgcacctgcaactgcagccccaggtgcaggaagrgamrtgactgtgagagaagaatccctccatgaggacagggacaagaggcagcagacctgaaaaatgctcctgccgatcagcagccagaggggctcctttggctaaggacatcaacccctgtaattgcaggagggagcccaccaggacacacagtcagtgagcagcagatctctgtcatgcccttccagggtgcaggagctctccctcttaagtgacgtcacgggtggttatcccctctttcctgtgtaagagcagcagctgcagctcctctgctcactactcagccatccttgcatccttgc

SEQ ID NO: 6557 - DNA, 599 bp, Chicken  19866894110792_3
  misc_feature (1)..(28): n is any nucleotide
nnnnnnnnnnnnnnnnnnnnnnnnnnnnactgctgatgagctgcagaagcaggtgctggcttccttctcaaatcagcccacaaacaatgccaagtaaccgaggacagatacggcagcagaggaacctggggcgaggacacagagtggaagagaagggcgagggatgcacccagaacagacctgactatgggtcactctgccctacatgcaccaaagctccatgctgctgccagccaggaggtgtaagctcccagcgattggctgcacctgcaactgcagccccaggtgcaggaagrgamrtgactgtgagagaagaatccctccatgaggacagggacaagaggcagcagacctgaaaaatgctcctgccgatcagcagccagaggggctcctttggctaaggacatcaacccctgtaattgcaggagggagcccaccaggacacacagtcagtgagcagcagatctctgtcatgcccttccagggtgcaggagctctccctcttaagtgacgtcacgggtggttatcccctctttcctgtgtaagagcagcagctgcagctcctctgctcactactcagccatccttgcatccttgcg

SEQ ID NO: 6558 - DNA, 599 bp, Chicken  19866894110798_1
  misc_feature (1)..(56): n is any nucleotide
nnnnnnnnnnnnnnnnnnnnnnnnnnnnnnnnnnnnnnnnnnnnnnnnnnnnnnnncccctgtaattgaggagggagcccaccaggacacacagtcagtgagcagcagatctctgtcatgcccttccagggtgcaggagctctccctcttaagtgacgtcacgggtggttatcccctctttcctgtgtaagagcagcagctgcagctcctctgctcactactcagccatccttgcatccttgcgtggacagctctgttgccatcttctacggagaggacagagtggctgtcctggtcccygagggcagggacccgggcctggcattccccgatgctttcagcatggactgagagcagtgccagtccttcaaggcagcaaagggcaagaaggcaatgatgttgggcgtccacagtgggactgagaagatagaggccccagtgcttcttctggctgcagtaggacaggcagcgaccctgggaacagcagaaagatgcctccgtgggtaccacctctccttgctgtggcatactatggatcagtctccttcaaaaccrctgcttctctttcaaggaaaatcagrgccrtggcatgctgctga

SEQ ID NO: 6559 - DNA, 600 bp, Chicken  19866894110798_2
gttgccatcttctacggagaggacagagtggctgtcctggtcccygagggcagggacccgggcctggcattccccgatgctttcagcatggactgagagcagtgccagtccttcaaggcagcaaagggcaagaaggcaatgatgttgggcgtccacagtgggactgagaagatagaggccccagtgcttcttctggctgcagtaggacaggcagcgaccctgggaacagcagaaagatgcctccgtgggtaccacctctccttgctgtggcatactatggatcagtctccttcaaaaccrctgcttctctttcaaggaaaatcagrgccrtggcatgctgctgacccaatagccctggaaggaggtaggatctcagtcctgagctctgatgctcgttatgagctctacttgaccaagtgcactgagagaagaaaaaagtcaaggggaggacatgagcaggaacactaaaagggaaggagggaacagtgagagctgacagaggcaactggcaatgaagaactcttgtagttcttcacaaackacatgyttatccatttcccagtacccaaaacaataactggatttttaaaattcagttta

SEQ ID NO: 6560 - DNA, 600 bp, Chicken  19866894110798_3
agtggctgtcctggtcccygagggcagggacccgggcctggcattccccgatgctttcagcatggactgagagcagtgccagtccttcaaggcagcaaagggcaagaaggcaatgatgttgggcgtccacagtgggactgagaagatagaggccccagtgcttcttctggctgcagtaggacaggcagcgaccctgggaacagcagaaagatgcctccgtgggtaccacctctccttgctgtggcatactatggatcagtctccttcaaaaccrctgcttctctttcaaggaaaatcagrgccrtggcatgctgctgacccaatagccctggaaggaggtaggatctcagtcctgagctctgatgctcgttatgagctctacttgaccaagtgcactgagagaagaaaaaagtcaaggggaggacatgagcaggaacactaaaagggaaggagggaacagtgagagctgacagaggcaactggcaatgaagaactcttgtagttcttcacaaackacatgyttatccatttcccagtacccaaaacaataactggatttttaaaattcagtttaattccccaaattgattcacatagtca

SEQ ID NO: 6561 - DNA, 600 bp, Chicken  19866894110798_4
gctgtcctggtcccygagggcagggacccgggcctggcattccccgatgctttcagcatggactgagagcagtgccagtccttcaaggcagcaaagggcaagaaggcaatgatgttgggcgtccacagtgggactgagaagatagaggccccagtgcttcttctggctgcagtaggacaggcagcgaccctgggaacagcagaaagatgcctccgtgggtaccacctctccttgctgtggcatactatggatcagtctccttcaaaaccrctgcttctctttcaaggaaaatcagrgccrtggcatgctgctgacccaatagccctggaaggaggtaggatctcagtcctgagctctgatgctcgttatgagctctacttgaccaagtgcactgagagaagaaaaaagtcaaggggaggacatgagcaggaacactaaaagggaaggagggaacagtgagagctgacagaggcaactggcaatgaagaactcttgtagttcttcacaaackacatgyttatccatttcccagtacccaaaacaataactggatttttaaaattcagtttaattccccaaattgattcacatagtcaccga

SEQ ID NO: 6562 - DNA, 451 bp, Chicken  19866894110798_5
tccgtgggtaccacctctccttgctgtggcatactatggatcagtctccttcaaaaccrctgcttctctttcaaggaaaatcagrgccrtggcatgctgctgacccaatagccctggaaggaggtaggatctcagtcctgagctctgatgctcgttatgagctctacttgaccaagtgcactgagagaagaaaaaagtcaaggggaggacatgagcaggaacactaaaagggaaggagggaacagtgagagctgacagaggcaactggcaatgaagaactcttgtagttcttcacaaackacatgyttatccatttcccagtacccaaaacaataactggatttttaaaattcagtttaattccccaaattgattcacatagtcaccgaatgttcaaagcggaagggacctctggagctcatctgatccaaccctgctcttctccagcagg

SEQ ID NO: 6563 - DNA, 445 bp, Chicken  19866894110798_6
ggtaccacctctccttgctgtggcatactatggatcagtctccttcaaaaccrctgcttctctttcaaggaaaatcagrgccrtggcatgctgctgacccaatagccctggaaggaggtaggatctcagtcctgagctctgatgctcgttatgagctctacttgaccaagtgcactgagagaagaaaaaagtcaaggggaggacatgagcaggaacactaaaagggaaggagggaacagtgagagctgacagaggcaactggcaatgaagaactcttgtagttcttcacaaackacatgyttatccatttcccagtacccaaaacaataactggatttttaaaattcagtttaattccccaaattgattcacatagtcaccgaatgttcaaagcggaagggacctctggagctcatctgatccaaccctgctcttctccagcagg

SEQ ID NO: 6564 - DNA, 599 bp, Chicken  19866894110800_1
  misc_feature (1)..(11): n is any nucleotide
nnnnnnnnnnntgatcttgtcacagaatcatagaatcatagaacagcttgggttggaagggaccttaaaggtcatcccgcctcaaccctctgccatgggctggttgccccccaccacatcaggtggtgcaggaatccacccaacttggccttgaattcctccagggatgaggcatccacaacccctctgggcagcctgtgccagcatctcactgccttctgagtatatcttgcaagattctgctgtgtgattaacatatttaagaagttttgctatttgcatgccctctgtagctaatasaaatgacgttaatttaactagcaaacagcccaatagaatccccaaatttcctttctactgaagtgaagatgctggggtgtcataatggttccttgtgttgggagacatatctgagcccatagaaagaaatygacgaagcactgccaacagattgagggaggtgagccttcccctctacttggctttggcaaggccacacatggaatactgtgtccagttctggcccctcccagtacaaggggacatgagcgtactggaaacagtccagcagaggaatccacaaagtcagtgaagggatt

SEQ ID NO: 6565 - DNA, 600 bp, Chicken  19866894110800_2
gaatccacccaacttggccttgaattcctccagggatgaggcatccacaacccctctgggcagcctgtgccagcatctcactgccttctgagtatatcttgcaagattctgctgtgtgattaacatatttaagaagttttgctatttgcatgccctctgtagctaatasaaatgacgttaatttaactagcaaacagcccaatagaatccccaaatttcctttctactgaagtgaagatgctggggtgtcataatggttccttgtgttgggagacatatctgagcccatagaaagaaatygacgaagcactgccaacagattgagggaggtgagccttcccctctacttggctttggcaaggccacacatggaatactgtgtccagttctggcccctcccagtacaaggggacatgagcgtactggaaacagtccagcagaggaatccacaaagtcagtgaagggattggagcagctctcttataaggagatgctgagaaagctggcacggttcagcctagggaaggcttgaggggatgttagtaatggctgtcagcatctgaagggagtgtacaaagaggatgaagccaggttcttttc

SEQ ID NO: 6566 - DNA, 599 bp, Chicken  19866894110803_1
  misc_feature (1)..(79): n is any nucleotide
nnnnnnnnnnnnnnnnnnnnnnnnnnnnnnnnnnnnnnnnnnnnnnnnnnnnnnnnnnnnnnnnnnnnnnnnnnnnnnnacccggggcctggcattccccgatgctttcagcatggactgagagcagtgccagtccttcaaggcagcaaagggcaagaaggcaatgatgttgggcgtccacagtgggactgagaagatagaggccccagtgcttcttctggctgcagtaggacaggcagcgaccctgggaacagcagaaagatgcctccgtgggtaccacctctccttgctgtggcataytrtggatcagtctccttcaaaaccgctgcttctctttcaaggaaaatcagggccatggcatgctgctgacccaatagccctggaaggaggtaggatctcagtcctgagctctgatgctcgttatgagctctacttgaccaagtgcactgagagaagaaaaaagtcaaggggaggacatgagcaggaacactaaaagggaaggagggaacagtgagagctgacagaggcaactggcaatgaagaactctcgtagttcttcacaaactacatgtttatccatttcccagtacccaaaacaa

SEQ ID NO: 6567 - DNA, 599 bp, Chicken  19866894110803_2
  misc_feature (1)..(77): n is any nucleotide
nnnnnnnnnnnnnnnnnnnnnnnnnnnnnnnnnnnnnnnnnnnnnnnnnnnnnnnnnnnnnnnnnnnnnnnnnnnnnacccggggcctggcattccccgatgctttcagcatggactgagagcagtgccagtccttcaaggcagcaaagggcaagaaggcaatgatgttgggcgtccacagtgggactgagaagatagaggccccagtgcttcttctggctgcagtaggacaggcagcgaccctgggaacagcagaaagatgcctccgtgggtaccacctctccttgctgtggcataytrtggatcagtctccttcaaaaccgctgcttctctttcaaggaaaatcagggccatggcatgctgctgacccaatagccctggaaggaggtaggatctcagtcctgagctctgatgctcgttatgagctctacttgaccaagtgcactgagagaagaaaaaagtcaaggggaggacatgagcaggaacactaaaagggaaggagggaacagtgagagctgacagaggcaactggcaatgaagaactctcgtagttcttcacaaactacatgtttatccatttcccagtacccaaaacaata

SEQ ID NO: 6568 - DNA, 600 bp, Chicken  19866894110803_3
ctgctgacccaatagccctggaaggaggtaggatctcagtcctgagctctgatgctcgttatgagctctacttgaccaagtgcactgagagaagaaaaaagtcaaggggaggacatgagcaggaacactaaaagggaaggagggaacagtgagagctgacagaggcaactggcaatgaagaactctcgtagttcttcacaaactacatgtttatccatttcccagtacccaaaacaataactggatttttaaaattcagtttaattccccaaattgattcacatagtcaccgaatgttcraagctggaagggacctctggagctcatctgatccaaccctgctcttctccagcaggttgcttatgaagatgtccaagaaaggaaagtccacaaccactctgggcaacctgtgccagcactcagtcaccctcatacaaaatgtttcccagtgttccgatggaaattcctgtattctggttggtgtccattacctcttgtcctgtccttgggcaccactgaaaagaacctggcttcatcctctttgtacactcccttcagatgctgacagccattactaacatcccctcaagccttccctag

SEQ ID NO: 6569 - DNA, 600 bp, Chicken  19866894110821_1
gtagactgtgtctctgacagccgcccaggatgcatcacttggaaagatcatcttgtggctgaagcacaagacaaggagggtgagctctgctcccagcagttctgctccacgctcggtgtgtgacctacagcaagtcacgaattctctgttcctgtttcctctttggcgaaaacgatgacgatgataatgtctgttctcagcagcactatgagtacccattaacttacatttgcaagtgtttctcattcctcacgggaaatacattgcagattttactgtcctaccaccacccaccatatyggtggttctgtactaacacaagtgcatcaggcaaacttcagcccagccacaccgattctcacaaccggttccatcagaaatgaccacccatgaggggattacaaagccaccattcaaaccagtcagccaaaggagaacctggagggctgctgggagcagcatctctctaggcctgccttgctggacttgccagctctgctcactgctgcagacaaggtcttaaagtcaaccagctcttcaacaacatatgtttttttgctatgcaaactcaaygctacaaatttcctggagtcccttatc

SEQ ID NO: 6570 - DNA, 600 bp, Chicken  19866894110821_2
tactgtcctaccaccacccaccatatyggtggttctgtactaacacaagtgcatcaggcaaacttcagcccagccacaccgattctcacaaccggttccatcagaaatgaccacccatgaggggattacaaagccaccattcaaaccagtcagccaaaggagaacctggagggctgctgggagcagcatctctctaggcctgccttgctggacttgccagctctgctcactgctgcagacaaggtcttaaagtcaaccagctcttcaacaacatatgtttttttgctatgcaaactcaaygctacaaatttcctggagtcccttatcatcttgcttacttgtctgaagcattggctacggaaagatgcaccccatgcacttacagactcagaactaaacacattctctgaaagcagagaaaagacttcacatattcgccccaagtaaatgtaagttccctgttttgcatcctctgaaaagcaatgaattgacagacctactgggtcctacgtcaagatatctaaagcatgggatctgaatttccaaggttagmatgcagcaggtttagggcaacaaggagcttccaaaggaacaagtgcc

SEQ ID NO: 6571 - DNA, 600 bp, Chicken  19866894110821_3
caaccagctcttcaacaacatatgtttttttgctatgcaaactcaaygctacaaatttcctggagtcccttatcatcttgcttacttgtctgaagcattggctacggaaagatgcaccccatgcacttacagactcagaactaaacacattctctgaaagcagagaaaagacttcacatattcgccccaagtaaatgtaagttccctgttttgcatcctctgaaaagcaatgaattgacagacctactgggtcctacgtcaagatatctaaagcatgggatctgaatttccaaggttagmatgcagcaggtttagggcaacaaggagcttccaaaggaacaagtgccccaaaacaaaacagctccagaaggaagaaaatgtcatgggagcaaaagcacaaagaccactgagatctgttcacctcaatgagcagattgcagttctgaagagcaggcagaaaataggcagataggggttatggataggagatgggagaatccatctgaaatctatgatgggcaagtctcttttgaaacgcacagacttgtccacatacatatggaggacacctggaaagcagctatttaagagaagcctaaa

SEQ ID NO: 6572 - DNA, 599 bp, Chicken  19866894110824_1
  misc_feature (1)..(21): n is any nucleotide
nnnnnnnnnnnnnnnnnnnnnttgttttggaattgcttgatagtgtgagcataaagcaagcctcatactgtaagaagtggtgaataatctctgcctacctcctttcttggtttcatggctctagagacctgtttcatacctctgttagtcaccttcttttcataataaagacaaccacgctacaactactaatgaggccaggactttccttatttatttcttttatgacatcaatgtatttccaactgaaggaagatttctaacagaataaaaataatattgttaatattaaaaaacaasaacaacaacaacaacaacaaaaaacacattattatcccaccctaccctgttccatgcaaggtgatgcacctatactactttcccagatcaattataacttgcataacacatattaaataacctttttttcctttagatatgagaactgtagcagtatgtgtctcttttcatcagggcttagaaaaactgaagaagattgtgcacagttcacragtcaagtaggtgtgcatggtctcactttacagcacagtaggaattacagaagtgtctgcagccaaggaattcctcatgcaaagcat

SEQ ID NO: 6573 - DNA, 600 bp, Chicken  19866894110824_2
tttatttcttttatgacatcaatgtatttccaactgaaggaagatttctaacagaataaaaataatattgttaatattaaaaaacaasaacaacaacaacaacaacaaaaaacacattattatcccaccctaccctgttccatgcaaggtgatgcacctatactactttcccagatcaattataacttgcataacacatattaaataacctttttttcctttagatatgagaactgtagcagtatgtgtctcttttcatcagggcttagaaaaactgaagaagattgtgcacagttcacragtcaagtaggtgtgcatggtctcactttacagcacagtaggaattacagaagtgtctgcagccaaggaattcctcatgcaaagcatctgagtgcactggtctgtctgatgggctgcaggcatcaaagagcaagcagtcacatcgcatttgagagagaggatactgataattttaacacttaaattatatagcaaaaggaacaagatctctgtactatctacatacaggtttctatatctacttcaagagaggcagtaaaatactgcttcaaagagctttgcagcccggagctccctgac

SEQ ID NO: 6574 - DNA, 600 bp, Chicken  19866894110841_1
gccaaactgtcccgatgacaccaactaggtttcataatcagctatcaaccagctaccaatcctttaaacataaagagtccagacaattaatttcttccatggtattttctatgtaggctttgtgtaggtattctaggtgctgttgttctgttttttcttcttaatatatttcatatattcatatatttttatatgtaagctctttcaacatcatacaacctttttccaagtcaaaggaaaccagataatacttgctgtacctggaaaggtacaattcatactagtatcagctacataagscagcagtgtgctcttgcagctcagaaggccaatggtatcccgggctccatcagaagaggggtggccagcagggacagggaggtgactgtccctcrttactcygccttcgtgagaccccatctggagtactgcattcaggtctgaggcccccagcacaagaaagatgtggagctgttggacagggtccagaggagggccacctcccccgtgaagacaggctgagggagctgggcttgttcagcctggagaagagaaggctgcgaggagaactcatggaagccttccagtatttaaaagggg

SEQ ID NO: 6575 - DNA, 600 bp, Chicken  19866894110841_2
tccatggtattttctatgtaggctttgtgtaggtattctaggtgctgttgttctgttttttcttcttaatatatttcatatattcatatatttttatatgtaagctctttcaacatcatacaacctttttccaagtcaaaggaaaccagataatacttgctgtacctggaaaggtacaattcatactagtatcagctacataagscagcagtgtgctcttgcagctcagaaggccaatggtatcccgggctccatcagaagaggggtggccagcagggacagggaggtgactgtccctcrttactcygccttcgtgagaccccatctggagtactgcattcaggtctgaggcccccagcacaagaaagatgtggagctgttggacagggtccagaggagggccacctcccccgtgaagacaggctgagggagctgggcttgttcagcctggagaagagaaggctgcgaggagaactcatggaagccttccagtatttaaaaggggattataaaaaaaaggaggggaatgaactttttacttgcataggtagggacaggacaagagggaatggttttaagttcaaggatggaaggtttaga

SEQ ID NO: 6576 - DNA, 600 bp, Chicken  19866894110841_3
tattttctatgtaggctttgtgtaggtattctaggtgctgttgttctgttttttcttcttaatatatttcatatattcatatatttttatatgtaagctctttcaacatcatacaacctttttccaagtcaaaggaaaccagataatacttgctgtacctggaaaggtacaattcatactagtatcagctacataagscagcagtgtgctcttgcagctcagaaggccaatggtatcccgggctccatcagaagaggggtggccagcagggacagggaggtgactgtccctcrttactcygccttcgtgagaccccatctggagtactgcattcaggtctgaggcccccagcacaagaaagatgtggagctgttggacagggtccagaggagggccacctcccccgtgaagacaggctgagggagctgggcttgttcagcctggagaagagaaggctgcgaggagaactcatggaagccttccagtatttaaaaggggattataaaaaaaaggaggggaatgaactttttacttgcataggtagggacaggacaagagggaatggttttaagttcaaggatggaaggtttagactggatg

SEQ ID NO: 6577 - DNA, 600 bp, Chicken  19866894110848_1
ccagggccactgacactttgtgtagtggcagtgggtcaagactgcccacagctgcgtgggtgagcgtcttcgtgtcctgtcttgtgcccagtgcctggtaaatgccaggaatgcagcctgggcaagttcatgctgtttccaattaggacactggctggctggcaggttgcttgctagaccacacatgtcttagggaaaccaggaactgctgcctggggtttgcgaggcaatcggcggtctggcccagtggaggagcccaccgctaaacaaggcatgatgtgagcccccaaagccccaaargatggrgcagtctcttggaaagaggttttacagggaaatacyggtactgagtaccctagggtgcaatcacggtaaggccaggaaaggccaggttcaggaaagtcccacagggaagtgggagctcctgtgggacaagcsctttggtggcacctcgcgggaagaagaggtgaagagaagggtttggtggacacgtgtgaaatactgatcttacttagggtgtttccccactactgggagccctttctgctaacaaggcatcactgtttatctaccttcctgcttttcagttctccctttcaa

SEQ ID NO: 6578 - DNA, 600 bp, Chicken  19866894110848_2
ccactgacactttgtgtagtggcagtgggtcaagactgcccacagctgcgtgggtgagcgtcttcgtgtcctgtcttgtgcccagtgcctggtaaatgccaggaatgcagcctgggcaagttcatgctgtttccaattaggacactggctggctggcaggttgcttgctagaccacacatgtcttagggaaaccaggaactgctgcctggggtttgcgaggcaatcggcggtctggcccagtggaggagcccaccgctaaacaaggcatgatgtgagcccccaaagccccaaargatggrgcagtctcttggaaagaggttttacagggaaatacyggtactgagtaccctagggtgcaatcacggtaaggccaggaaaggccaggttcaggaaagtcccacagggaagtgggagctcctgtgggacaagcsctttggtggcacctcgcgggaagaagaggtgaagagaagggtttggtggacacgtgtgaaatactgatcttacttagggtgtttccccactactgggagccctttctgctaacaaggcatcactgtttatctaccttcctgcttttcagttctccctttcaatgaagc

SEQ ID NO: 6579 - DNA, 600 bp, Chicken  19866894110848_3
tgcccacagctgcgtgggtgagcgtcttcgtgtcctgtcttgtgcccagtgcctggtaaatgccaggaatgcagcctgggcaagttcatgctgtttccaattaggacactggctggctggcaggttgcttgctagaccacacatgtcttagggaaaccaggaactgctgcctggggtttgcgaggcaatcggcggtctggcccagtggaggagcccaccgctaaacaaggcatgatgtgagcccccaaagccccaaargatggrgcagtctcttggaaagaggttttacagggaaatacyggtactgagtaccctagggtgcaatcacggtaaggccaggaaaggccaggttcaggaaagtcccacagggaagtgggagctcctgtgggacaagcsctttggtggcacctcgcgggaagaagaggtgaagagaagggtttggtggacacgtgtgaaatactgatcttacttagggtgtttccccactactgggagccctttctgctaacaaggcatcactgtttatctaccttcctgcttttcagttctccctttcaatgaagcactgttttcaaggcagtgtgacgtgtgtagggacgg

SEQ ID NO: 6580 - DNA, 600 bp, Chicken  19866894110848_4
ccaattaggacactggctggctggcaggttgcttgctagaccacacatgtcttagggaaaccaggaactgctgcctggggtttgcgaggcaatcggcggtctggcccagtggaggagcccaccgctaaacaaggcatgatgtgagcccccaaagccccaaargatggrgcagtctcttggaaagaggttttacagggaaatacyggtactgagtaccctagggtgcaatcacggtaaggccaggaaaggccaggttcaggaaagtcccacagggaagtgggagctcctgtgggacaagcsctttggtggcacctcgcgggaagaagaggtgaagagaagggtttggtggacacgtgtgaaatactgatcttacttagggtgtttccccactactgggagccctttctgctaacaaggcatcactgtttatctaccttcctgcttttcagttctccctttcaatgaagcactgttttcaaggcagtgtgacgtgtgtagggacgggaaaagctcagttatttgccagggatctgatgtttcattagcaacctctgcaaactggaactcagactttgctgttgccagctaagccccatcaga

SEQ ID NO: 6581 - DNA, 600 bp, Chicken  19866894110852_1
aggacacgcgtagtgcctggaaggaatgcgttttcttaccctacgctgctctactcttctaactgctgtgagttgattgtattacaggactggatttggctttgtttttctttcgcttcaattccgttttgcaacttcttacattttcactgttcagattttctataagaccagtaaaaagctggagataaagagaaacacagcacatcgattgttccagcattaagcagtattgtttctctttcaggagaatacaagtattggtaatcatttgacattggaatttgtaacagttgacawtgtattagataataggtataaaccattaaagccagcttttattagctctgagtagaggtcaaatggttaagaattccactgtgcttcagtactcaattttgctgtgtttttcttttgtgttttgttggggttatctgttatttctagaaacgttcagaataacagtttgcatttggttactaaagagttgttagtctgtattaaaacccagttactgttttggaaaactcatcattttcctcccttcttcaccagtgcaaatatcttattaactgatacgtatgtgcccaaaatttcgga

SEQ ID NO: 6582 - DNA, 600 bp, Chicken  19866894110853_1
gcccattctaacatgtttttacttaaaaagcatacactgaagtgaatttagttattacaaatcgttgtgaaaggaagatctggaatattttacttccaactggaatgttcagtgctttctcggtcttttggccagcgatatttgccaccaaatctgtcacaagttcacacatcgatgtttttggcttaagtattccttagtcagcaaagtcccttttaaaatatgacttggcccaagagcagcccagcagcacctccaggacgggagcagagcccctgggtgcctccatcactttccacrtgaaacccacaccgcaggaatgtttttttgtccaggcaagaaccagttcaactacatctctgtcaaagctctttccaaaccaaactttgttctttgaggcttgcaagctttcagcagcaatttgctgtatgggcttctgggtttaagctcgtgcatttccgtcaaaatctgacatctagaaacaacagaaaggccattcaaatatttttccagctaatgctaaatacagactgatggcacagggaaaaggaagagatttttacaggaggtccaaatctatacacaacatataagctatgg

SEQ ID NO: 6583 - DNA, 600 bp, Chicken  19866894110859_1
cctgtgggataacaggatataatggaacctgcgatgcctctttcctctcctactgctttacttcaccgttagtcatagccctaacagtatttgaagtgtatttctgctttgcatacacctggtggatgctcaagtgtttgcttgttgtgattcataacgcgtgctcaaagtacttggttgcaagagtggagtgaaccaaagctgccctcaatacttacatgagtttgtggtgacccacccggcttagggctgttggactcagggctttgttgatctggctggcagaaatgtcaagggcascattttggatccttgaagcagctgaggtctgtcggttctggacagtgatgcttgttcctgctctctgtcagctccaccagcayagaactgcagcactccagagaaagtatggcatgcttttctcttgctgagcgatcaggagggtcttgtgctgtgtgtatcttatactgttgtcatcaggttttggtattctgctttggtttgtttgggtttctgtactattttggtgccatcagcagaaacactgcaatgagaagcgaggagcagcagggacataaacgtgttctgccttgaaacttg

SEQ ID NO: 6584 - DNA, 600 bp, Chicken  19866894110859_2
acagtatttgaagtgtatttctgctttgcatacacctggtggatgctcaagtgtttgcttgttgtgattcataacgcgtgctcaaagtacttggttgcaagagtggagtgaaccaaagctgccctcaatacttacatgagtttgtggtgacccacccggcttagggctgttggactcagggctttgttgatctggctggcagaaatgtcaagggcascattttggatccttgaagcagctgaggtctgtcggttctggacagtgatgcttgttcctgctctctgtcagctccaccagcayagaactgcagcactccagagaaagtatggcatgcttttctcttgctgagcgatcaggagggtcttgtgctgtgtgtatcttatactgttgtcatcaggttttggtattctgctttggtttgtttgggtttctgtactattttggtgccatcagcagaaacactgcaatgagaagcgaggagcagcagggacataaacgtgttctgccttgaaacttgaagtgtaggctgtgaagtgatgctgctggagctgcatgaacttcacacctctgtttgtgtacttgcttaactcaggaaataaa

SEQ ID NO: 6585 - DNA, 600 bp, Chicken  19866894110860_1
gtagaatggaaagtggcaccaatgcttctttttatgtgaacattgttttagtttatacaagagaagaatcaaatcttcatattaatgatgtggatttatatttcaggtaaggttcccatcacacttcagttcagacctaaaggatcttctaagaaatttactccaggtagatttgaccaaacgatatggaaatctcaagaatggtgtaaatgacataaagaaccacaagtggtttgcaactacagattggattgccatttatcagagaaaggtaggacactttctgaatcaaattattamtgatctgtgaggagttgaagtccaatttctaattagtttgtttatttttgccttcttaaatgtgtgatttttttaaatgagaaaacgtgaaagtagttgaatatttaagactaaggattatatattgattgaattatgtttgattcttgttgccattttatcccggacctccatatattcatgttgtcttaacacgtgtttgtactttagtctatttctggaatatctcagaatgagccatctcctgcctctcttgctttttatttaatcccttctataatggcatctataaatactcct

SEQ ID NO: 6586 - DNA, 600 bp, Chicken  19866894110860_2
ctaattagtttgtttatttttgccttcttaaatgtgtgatttttttaaatgagaaaacgtgaaagtagttgaatatttaagactaaggattatatattgattgaattatgtttgattcttgttgccattttatcccggacctccatatattcatgttgtcttaacacgtgtttgtactttagtctatttctggaatatctcagaatgagccatctcctgcctctcttgctttttatttaatcccttctataatggcatctataaatactcctccacagcagagaggaatctgttttcctytccaactacttcttagcagtcaggctgtgctttactggggagaaactctagccaaagctgaagtaccactctgctgaaatggtattctccctccttgctcttgctcttgccttacctgtgactggaacaggttcagatgtagagtgtatctactggagatattttcattctgacactacactgcaattgtctgcggttttgtaagttacagcaatttataagagccctcctgagtcctgttttgtgatatttttagaaaggctctctagacctgcctgaccaacgtgaaatctaatgtga

SEQ ID NO: 6587 - DNA, 600 bp, Chicken  19866894110868_1
tctctcatataatgtgagaaaatgtatggtgtgggaaacctgtattactttttagatcagaaaaaaaaagtggatagaaaggaagatagtgtctgttttatagaagatctgttatatagttatgtaatcagaggtaaagagatgttaagaagctcatatagcatgtcagaaacaagatgtgtcccttacattcagttcctctacatgtagacattttaagtctagcctacttcatttttcactcttctagttgctatttaaggcagaagaaggcaatgtaacacccttaattagcaaagycaaaatgtggtggaagcgatcacatagtggtcagcagtgatattactttctttgcaactaaaagtttgtctgcgtggtaagcacctcagaaacctcactaaatctatgaaatttttgtgcttaagttaaagaggattagattcccataaagatgttctacctcaaaaatgaagtggccttagcttgcactagctccttagagaaggattaagttacagcaaatgaaggccactttattcctgaataaatgtccacatgggggattaatgcatttcaacttacacacattagttttgcagc

SEQ ID NO: 6588 - DNA, 599 bp, Chicken  19866894110869_1
  misc_feature (1)..(169): n is any nucleotide
nnnnnnnnnnnnnnnnnnnnnnnnnnnnnnnnnnnnnnnnnnnnnnnnnnnnnnnnnnnnnnnnnnnnnnnnnnnnnnnnnnnnnnnnnnnnnnnnnnnnnnnnnnnnnnnnnnnnnnnnnnnnnnnnnnnnnnnnnnnnnnnnnnnnnnnnnnnnnnnnnnnnnnnnnaccacttattcagatgatgacctcctactgtaggggagtgaggtattggaacagctgcccagagaagctatggatgtctcccccctggaggcattcaaggtcaggttggatggggtgctgggcagctgagmtggtggggcacaaccctgcccaaggcaggggttggaactggcaggggttagaattggatggytctctcccaacctaagccattctacrattctgtgattctgtacaacaaagtgtagcatccataggtgatattaactgaacgtactttcaagatggtggaggtatttgatttggatacattcctataaatttctttccgtgaagcttggtagaaattaatatcaaaccagtatttgtccttacaccgtttattccactttcttccttccaagacattgtmgtgcacattatggcctat

SEQ ID NO: 6589 - DNA, 599 bp, Chicken  19866894110869_2
  misc_feature (1)..(107): n is any nucleotide
nnnnnnnnnnnnnnnnnnnnnnnnnnnnnnnnnnnnnnnnnnnnnnnnnnnnnnnnnnnnnnnnnnnnnnnnnnnnnnnnnnnnnnnnnnnnnnnnnnnnnnnnnnnaccacttattcagatgatgacctcctactgtaggggagtgaggtattggaacagctgcccagagaagctatggatgtctcccccctggaggcattcaaggtcaggttggatggggtgctgggcagctgagmtggtggggcacaaccctgcccaaggcaggggttggaactggcaggggttagaattggatggytctctcccaacctaagccattctacrattctgtgattctgtacaacaaagtgtagcatccataggtgatattaactgaacgtactttcaagatggtggaggtatttgatttggatacattcctataaatttctttccgtgaagcttggtagaaattaatatcaaaccagtatttgtccttacaccgtttattccactttcttccttccaagacattgtmgtgcacattatggcctatctgaggaggcaaatgtargtcagtccttctgctwtggtttggtgggaagaggaagatgctgt

SEQ ID NO: 6590 - DNA, 599 bp, Chicken  19866894110869_3
  misc_feature (1)..(81): n is any nucleotide
nnnnnnnnnnnnnnnnnnnnnnnnnnnnnnnnnnnnnnnnnnnnnnnnnnnnnnnnnnnnnnnnnnnnnnnnnnnnnnnnnaccacttattcagatgatgacctcctactgtaggggagtgaggtattggaacagctgcccagagaagctatggatgtctcccccctggaggcattcaaggtcaggttggatggggtgctgggcagctgagmtggtggggcacaaccctgcccaaggcaggggttggaactggcaggggttagaattggatggytctctcccaacctaagccattctacrattctgtgattctgtacaacaaagtgtagcatccataggtgatattaactgaacgtactttcaagatggtggaggtatttgatttggatacattcctataaatttctttccgtgaagcttggtagaaattaatatcaaaccagtatttgtccttacaccgtttattccactttcttccttccaagacattgtmgtgcacattatggcctatctgaggaggcaaatgtargtcagtccttctgctwtggtttggtgggaagaggaagatgctgtggcttcttttggtcacrtgttcttca

SEQ ID NO: 6591 - DNA, 600 bp, Chicken  19866894110869_4
gggtgctgggcagctgagmtggtggggcacaaccctgcccaaggcaggggttggaactggcaggggttagaattggatggytctctcccaacctaagccattctacrattctgtgattctgtacaacaaagtgtagcatccataggtgatattaactgaacgtactttcaagatggtggaggtatttgatttggatacattcctataaatttctttccgtgaagcttggtagaaattaatatcaaaccagtatttgtccttacaccgtttattccactttcttccttccaagacattgtmgtgcacattatggcctatctgaggaggcaaatgtargtcagtccttctgctwtggtttggtgggaagaggaagatgctgtggcttcttttggtcacrtgttcttcagctgacgacaaggctcttgcaaccaagaagctgctaccagaccacataaagtgttccagaaccaaaaaaaaaaaattaaacatctccaaaaaaccttccttaaattatatattattattatttttttattaaaaattactctacatgcttctgtatctgttttaggttgcttggtctctctgtttctccccata

SEQ ID NO: 6592 - DNA, 600 bp, Chicken  19866894110869_5
gcccaaggcaggggttggaactggcaggggttagaattggatggytctctcccaacctaagccattctacrattctgtgattctgtacaacaaagtgtagcatccataggtgatattaactgaacgtactttcaagatggtggaggtatttgatttggatacattcctataaatttctttccgtgaagcttggtagaaattaatatcaaaccagtatttgtccttacaccgtttattccactttcttccttccaagacattgtmgtgcacattatggcctatctgaggaggcaaatgtargtcagtccttctgctwtggtttggtgggaagaggaagatgctgtggcttcttttggtcacrtgttcttcagctgacgacaaggctcttgcaaccaagaagctgctaccagaccacataaagtgttccagaaccaaaaaaaaaaaattaaacatctccaaaaaaccttccttaaattatatattattattatttttttattaaaaattactctacatgcttctgtatctgttttaggttgcttggtctctctgtttctccccatacaccctcttctctttgaatagtttaactaccaggag

SEQ ID NO: 6593 - DNA, 600 bp, Chicken  19866894110869_6
ggaactggcaggggttagaattggatggytctctcccaacctaagccattctacrattctgtgattctgtacaacaaagtgtagcatccataggtgatattaactgaacgtactttcaagatggtggaggtatttgatttggatacattcctataaatttctttccgtgaagcttggtagaaattaatatcaaaccagtatttgtccttacaccgtttattccactttcttccttccaagacattgtmgtgcacattatggcctatctgaggaggcaaatgtargtcagtccttctgctwtggtttggtgggaagaggaagatgctgtggcttcttttggtcacrtgttcttcagctgacgacaaggctcttgcaaccaagaagctgctaccagaccacataaagtgttccagaaccaaaaaaaaaaaattaaacatctccaaaaaaccttccttaaattatatattattattatttttttattaaaaattactctacatgcttctgtatctgttttaggttgcttggtctctctgtttctccccatacaccctcttctctttgaatagtttaactaccaggagacaaatatattaaaca

SEQ ID NO: 6594 - DNA, 600 bp, Chicken  19866894110869_7
ccattctacrattctgtgattctgtacaacaaagtgtagcatccataggtgatattaactgaacgtactttcaagatggtggaggtatttgatttggatacattcctataaatttctttccgtgaagcttggtagaaattaatatcaaaccagtatttgtccttacaccgtttattccactttcttccttccaagacattgtmgtgcacattatggcctatctgaggaggcaaatgtargtcagtccttctgctwtggtttggtgggaagaggaagatgctgtggcttcttttggtcacrtgttcttcagctgacgacaaggctcttgcaaccaagaagctgctaccagaccacataaagtgttccagaaccaaaaaaaaaaaattaaacatctccaaaaaaccttccttaaattatatattattattatttttttattaaaaattactctacatgcttctgtatctgttttaggttgcttggtctctctgtttctccccatacaccctcttctctttgaatagtttaactaccaggagacaaatatattaaacagaatcctcttaatagaaaaatggatttgagttcttgaattgtgtt

SEQ ID NO: 6595 - DNA, 599 bp, Chicken  19866894110870_1
  misc_feature (1)..(109): n is any nucleotide
nnnnnnnnnnnnnnnnnnnnnnnnnnnnnnnnnnnnnnnnnnnnnnnnnnnnnnnnnnnnnnnnnnnnnnnnnnnnnnnnnnnnnnnnnnnnnnnnnnnnnnnnnnnnntggcattgtatccatgagtttaaaataattcaatttgctgtgggaaactttatgtgaaataggtgacagtgatgaaattgaaaactgatgggctgacaaaatggtaagtcatgaaaaactcaagtttaaaaacaacatttgggaaagccttttctacatacacttcttctgcatctgtgtaattttctctkatattgtttactttcttgtaagaaatacaaaatagccattgacattaagaagtcatccttagactgagtagtagtatagctgatgtgctaataattagtcctgtgaagcagttcagtgaaaaactaattacagtttttgctgtgggctatggtaagtacatctacgctattttacaattttctactccttttttttctttatgctttgggacacttcaaacagcatcaaactgtatcttaactaggtacattctgggaaagcaatgctgagctctcatgtaagatgaggtttaatcatg

SEQ ID NO: 6596 - DNA, 600 bp, Chicken  19866894110872_1
caatctcccatcccagtccttcccattccagttccattccccatcccaatcccatcccaaatcccattcccacccccggtctcccatccccattccattccccatcccaatcccatcccataatgaaacatcaccctataggggcgccccactggggaaattgggggtgtgtgggaggggtcttcccttcttttagggtctcccttccttaattagttaactaaaacgattaaatgaaacgaggcagaaacatcaaaaccccatgaaggaattgtaattaaggggtaattgcttttatargtgggggaaaatgccttgtaattaagggagtaacatcattcattaggggaaaccttcgtaattaatgggtaatcccaatgtaagggggggaaatgctcttaattaatgggtaatcccattaatggggggaaatagcccccaaattaatgggtaatctcattaataggggaaaaaatgctcttaattaaagggtgatcccattattggggggggaatccttataataaagggataaacacagtaatagtggggaaaaatgcttataattaaggatcaatcccattaattggggataaaacg

SEQ ID NO: 6597 - DNA, 600 bp, Chicken  19866894110872_2
taacatcattcattaggggaaaccttcgtaattaatgggtaatcccaatgtaagggggggaaatgctcttaattaatgggtaatcccattaatggggggaaatagcccccaaattaatgggtaatctcattaataggggaaaaaatgctcttaattaaagggtgatcccattattggggggggaatccttataataaagggataaacacagtaatagtggggaaaaatgcttataattaaggatcaatcccattaattggggataaaacgcttataattaaaagggaaccccttctaacraatgggtaatcccattaattggggtataagcccttataattaaggggcatcccaatcaaaggaggaaaaaaaagctcttctaattaaggcatggccctttgtaattaattgttaatctgtaattaagacataatcccttttaatcaagggctgattcctcacctcgttaagataatgaccaattacgggcaccacccgcacctcattaggactttccccccgtaattgcgctgtaggcggggccaaggtgaagccccgcccataaccgcaggccgggggcggggtcacgattaagccacg

SEQ ID NO: 6598 - DNA, 600 bp, Chicken  19866894110877_1
gctctttcatgtcacgacccaagtgaaaagaaatagaaaccttatagctacgatcacagaagtagtttcctctgctgaacattcagacactgatcagctcttgtgatgtagcatgcaacatattcacagttaaatacacctggacaaccctggagcatgtggcacagacctgggcttccacagcttttgctcagaggtcagacagggaagccaataaataaacccaggagcccatactaaactgtgattttggccattccttgtggtaccagaaaaagaaaacccctcttcctagcagtwacagagactcttttcctkamcacaggtacgggttgccatttttagccttcatctgaagtacagcacagcttttggtggccttacatccccctgctgaaaagtggctggaaggcacccagctttgtcccatgttaaaaccagacacttaagggcatctgytccttctcctggatgatgatacacagcaactaatgggggattggaggtgctgggctaatatttggcaatgcttagaaccacgttttgagaaaaactttgtgtgtatgcattatctcccagtcactgttagtccattacatc

SEQ ID NO: 6599 - DNA, 600 bp, Chicken  19866894110877_2
ccaagtgaaaagaaatagaaaccttatagctacgatcacagaagtagtttcctctgctgaacattcagacactgatcagctcttgtgatgtagcatgcaacatattcacagttaaatacacctggacaaccctggagcatgtggcacagacctgggcttccacagcttttgctcagaggtcagacagggaagccaataaataaacccaggagcccatactaaactgtgattttggccattccttgtggtaccagaaaaagaaaacccctcttcctagcagtwacagagactcttttcctkamcacaggtacgggttgccatttttagccttcatctgaagtacagcacagcttttggtggccttacatccccctgctgaaaagtggctggaaggcacccagctttgtcccatgttaaaaccagacacttaagggcatctgytccttctcctggatgatgatacacagcaactaatgggggattggaggtgctgggctaatatttggcaatgcttagaaccacgttttgagaaaaactttgtgtgtatgcattatctcccagtcactgttagtccattacatctccaatcccagttgactt

SEQ ID NO: 6600 - DNA, 600 bp, Chicken  19866894110877_3
aagtgaaaagaaatagaaaccttatagctacgatcacagaagtagtttcctctgctgaacattcagacactgatcagctcttgtgatgtagcatgcaacatattcacagttaaatacacctggacaaccctggagcatgtggcacagacctgggcttccacagcttttgctcagaggtcagacagggaagccaataaataaacccaggagcccatactaaactgtgattttggccattccttgtggtaccagaaaaagaaaacccctcttcctagcagtwacagagactcttttcctkamcacaggtacgggttgccatttttagccttcatctgaagtacagcacagcttttggtggccttacatccccctgctgaaaagtggctggaaggcacccagctttgtcccatgttaaaaccagacacttaagggcatctgytccttctcctggatgatgatacacagcaactaatgggggattggaggtgctgggctaatatttggcaatgcttagaaccacgttttgagaaaaactttgtgtgtatgcattatctcccagtcactgttagtccattacatctccaatcccagttgactttt

SEQ ID NO: 6601 - DNA, 600 bp, Chicken  19866894110877_4
tggcacagacctgggcttccacagcttttgctcagaggtcagacagggaagccaataaataaacccaggagcccatactaaactgtgattttggccattccttgtggtaccagaaaaagaaaacccctcttcctagcagtwacagagactcttttcctkamcacaggtacgggttgccatttttagccttcatctgaagtacagcacagcttttggtggccttacatccccctgctgaaaagtggctggaaggcacccagctttgtcccatgttaaaaccagacacttaagggcatctgytccttctcctggatgatgatacacagcaactaatgggggattggaggtgctgggctaatatttggcaatgcttagaaccacgttttgagaaaaactttgtgtgtatgcattatctcccagtcactgttagtccattacatctccaatcccagttgactttttttcactttatctttacaaaaaaagtagaaatggttaaaaaacacattgcaaatgacctcatcctgattgtgatgggctcagctgaggtatttagacatgaggaaattagtctggactgagggattagaatcaccatct

SEQ ID NO: 6602 - DNA, 600 bp, Chicken  19866894110878_1
gggggatattggcaccaccttgatttgctgcaaggagttattgtatgtctgcaaagcattgccattgtgtgtctgcagagcactgcataaccccatccttcccctttcccacacgtctggagcagggcaggtgctgcagctccgttgctgctcccactcctcagcactggctccaacacccacatattcccagtgcagccccatggcttctttcccactcccattcgcccccggccagatgtgagcatcctccctagttatttttcccttggtgcctttgctttcactccttggaagccrgtccttggkctgggcactgatccaaagggtcgaggtctggatttggccccgggargagcaacraggcaaggagggctccaaccgggtgccccagctcctgtaccaggcaaggtctggcctggtccccggggcaatatctgatggtggctccatcagagccggctcagatcctggagcagtgcccatcctgcaggcagcaagtggcacaagaggcacctgacgtaccgcatggtgaactggcccccatacctgccacagcacgaggtgcgccttggctgtcagggctgcctttgagctctg

SEQ ID NO: 6603 - DNA, 600 bp, Chicken  19866894110878_2
tggcaccaccttgatttgctgcaaggagttattgtatgtctgcaaagcattgccattgtgtgtctgcagagcactgcataaccccatccttcccctttcccacacgtctggagcagggcaggtgctgcagctccgttgctgctcccactcctcagcactggctccaacacccacatattcccagtgcagccccatggcttctttcccactcccattcgcccccggccagatgtgagcatcctccctagttatttttcccttggtgcctttgctttcactccttggaagccrgtccttggkctgggcactgatccaaagggtcgaggtctggatttggccccgggargagcaacraggcaaggagggctccaaccgggtgccccagctcctgtaccaggcaaggtctggcctggtccccggggcaatatctgatggtggctccatcagagccggctcagatcctggagcagtgcccatcctgcaggcagcaagtggcacaagaggcacctgacgtaccgcatggtgaactggcccccatacctgccacagcacgaggtgcgccttggctgtcagggctgcctttgagctctggagcaacgt

SEQ ID NO: 6604 - DNA, 600 bp, Chicken  19866894110878_3
gcattgccattgtgtgtctgcagagcactgcataaccccatccttcccctttcccacacgtctggagcagggcaggtgctgcagctccgttgctgctcccactcctcagcactggctccaacacccacatattcccagtgcagccccatggcttctttcccactcccattcgcccccggccagatgtgagcatcctccctagttatttttcccttggtgcctttgctttcactccttggaagccrgtccttggkctgggcactgatccaaagggtcgaggtctggatttggccccgggargagcaacraggcaaggagggctccaaccgggtgccccagctcctgtaccaggcaaggtctggcctggtccccggggcaatatctgatggtggctccatcagagccggctcagatcctggagcagtgcccatcctgcaggcagcaagtggcacaagaggcacctgacgtaccgcatggtgaactggcccccatacctgccacagcacgaggtgcgccttggctgtcagggctgcctttgagctctggagcaacgtctcctcgctggtgttttgggaagctcgggatggccccggctgacat

SEQ ID NO: 6605 - DNA, 600 bp, Chicken  19866894110878_4
attgtgtgtctgcagagcactgcataaccccatccttcccctttcccacacgtctggagcagggcaggtgctgcagctccgttgctgctcccactcctcagcactggctccaacacccacatattcccagtgcagccccatggcttctttcccactcccattcgcccccggccagatgtgagcatcctccctagttatttttcccttggtgcctttgctttcactccttggaagccrgtccttggkctgggcactgatccaaagggtcgaggtctggatttggccccgggargagcaacraggcaaggagggctccaaccgggtgccccagctcctgtaccaggcaaggtctggcctggtccccggggcaatatctgatggtggctccatcagagccggctcagatcctggagcagtgcccatcctgcaggcagcaagtggcacaagaggcacctgacgtaccgcatggtgaactggcccccatacctgccacagcacgaggtgcgccttggctgtcagggctgcctttgagctctggagcaacgtctcctcgctggtgttttgggaagctcgggatggccccggctgacatccgcctga

SEQ ID NO: 6606 - DNA, 600 bp, Chicken  19866894110886_1
cttcatctcagctctactttttccaaggaacaagtgcaagactttcttggatgaggcaaaagagaacgtctgagccctttgctagataagctgaatttggacttcattcttaactccagcaatagcttgtcttttactttttttcttctgcagcattcaaactacactacgtttactttagattcctctaagctttaagcagacctgtttctggaggccagctgcagcacactgcctttggcagcagcatgagctgaagatgacgagctccaggaataagctaaatattaagttatcctytgctggcragcacaactgttcttgtctgtattaaagtttaaaataatggctggctagaagtgtttgaactgarcagcctgtatcagacttgtataagtcatgctttggctagtctgcctgatgtgcatgatakccagagatgttaccttcattctggctgcawgcagagcttctccttcattaccctccatgtttatataaatgaaggtacttgtcagttaagcagcaattacttgtgaattctgtagttgtcttcaagtcacattgctcacttacggttttctggttttgattttgggc

SEQ ID NO: 6607 - DNA, 600 bp, Chicken  19866894110886_2
cagctctactttttccaaggaacaagtgcaagactttcttggatgaggcaaaagagaacgtctgagccctttgctagataagctgaatttggacttcattcttaactccagcaatagcttgtcttttactttttttcttctgcagcattcaaactacactacgtttactttagattcctctaagctttaagcagacctgtttctggaggccagctgcagcacactgcctttggcagcagcatgagctgaagatgacgagctccaggaataagctaaatattaagttatcctytgctggcragcacaactgttcttgtctgtattaaagtttaaaataatggctggctagaagtgtttgaactgarcagcctgtatcagacttgtataagtcatgctttggctagtctgcctgatgtgcatgatakccagagatgttaccttcattctggctgcawgcagagcttctccttcattaccctccatgtttatataaatgaaggtacttgtcagttaagcagcaattacttgtgaattctgtagttgtcttcaagtcacattgctcacttacggttttctggttttgattttgggcctcaggtc

SEQ ID NO: 6608 - DNA, 600 bp, Chicken  19866894110886_3
gccctttgctagataagctgaatttggacttcattcttaactccagcaatagcttgtcttttactttttttcttctgcagcattcaaactacactacgtttactttagattcctctaagctttaagcagacctgtttctggaggccagctgcagcacactgcctttggcagcagcatgagctgaagatgacgagctccaggaataagctaaatattaagttatcctytgctggcragcacaactgttcttgtctgtattaaagtttaaaataatggctggctagaagtgtttgaactgarcagcctgtatcagacttgtataagtcatgctttggctagtctgcctgatgtgcatgatakccagagatgttaccttcattctggctgcawgcagagcttctccttcattaccctccatgtttatataaatgaaggtacttgtcagttaagcagcaattacttgtgaattctgtagttgtcttcaagtcacattgctcacttacggttttctggttttgattttgggcctcaggtcttgccaacaatcatagttccaaacaggtattttcatgcgccgtgtgcacacaaatctgctagcaa

SEQ ID NO: 6609 - DNA, 600 bp, Chicken  19866894110886_4
ttactttttttcttctgcagcattcaaactacactacgtttactttagattcctctaagctttaagcagacctgtttctggaggccagctgcagcacactgcctttggcagcagcatgagctgaagatgacgagctccaggaataagctaaatattaagttatcctytgctggcragcacaactgttcttgtctgtattaaagtttaaaataatggctggctagaagtgtttgaactgarcagcctgtatcagacttgtataagtcatgctttggctagtctgcctgatgtgcatgatakccagagatgttaccttcattctggctgcawgcagagcttctccttcattaccctccatgtttatataaatgaaggtacttgtcagttaagcagcaattacttgtgaattctgtagttgtcttcaagtcacattgctcacttacggttttctggttttgattttgggcctcaggtcttgccaacaatcatagttccaaacaggtattttcatgcgccgtgtgcacacaaatctgctagcaaatcaaattatattttggggatcaaacacacccttgtgccttttatcagtccttctctgga

SEQ ID NO: 6610 - DNA, 600 bp, Chicken  19866894110886_5
acactacgtttactttagattcctctaagctttaagcagacctgtttctggaggccagctgcagcacactgcctttggcagcagcatgagctgaagatgacgagctccaggaataagctaaatattaagttatcctytgctggcragcacaactgttcttgtctgtattaaagtttaaaataatggctggctagaagtgtttgaactgarcagcctgtatcagacttgtataagtcatgctttggctagtctgcctgatgtgcatgatakccagagatgttaccttcattctggctgcawgcagagcttctccttcattaccctccatgtttatataaatgaaggtacttgtcagttaagcagcaattacttgtgaattctgtagttgtcttcaagtcacattgctcacttacggttttctggttttgattttgggcctcaggtcttgccaacaatcatagttccaaacaggtattttcatgcgccgtgtgcacacaaatctgctagcaaatcaaattatattttggggatcaaacacacccttgtgccttttatcagtccttctctggaaacacagcacataccactatctgaatttgc

SEQ ID NO: 6611 - DNA, 599 bp, Chicken  19866894110889_1
  misc_feature (1)..(102): n is any nucleotide
nnnnnnnnnnnnnnnnnnnnnnnnnnnnnnnnnnnnnnnnnnnnnnnnnnnnnnnnnnnnnnnnnnnnnnnnnnnnnnnnnnnnnnnnnnnnnnnnnnnnnnatgaagaatgcctttatgttcccaggggtcttacctcaagcactttggtttgaggactggaagttctccttgggaatccccttggtgctggctagaggtcctgcaatcccagaatccactgacgttcagaagcagtgtcccgtatgtgttgccaaaaccactgccaaacaaacttcagcccaaataaaactccttaayaccaacatggtattaagaagcaggcattctttattaaggcactggatgcacaagggatccttccacttaacatgcaccccaacagaacagaggcacatcctgaatcatgagaacagatttgccatgttgagagaacagcctttcacataacttgagcgaatacaagctgaagaacggaaggcttgcataaatgtaagctcaagaatgaaatgcagaggccaagaaacttgttgtcaagcgaaggtaatgtagaatggatgtcctgttgttgaagttaagatggcaaaacagatrcctca

SEQ ID NO: 6612 - DNA, 600 bp, Chicken  19866894110889_2
cttaayaccaacatggtattaagaagcaggcattctttattaaggcactggatgcacaagggatccttccacttaacatgcaccccaacagaacagaggcacatcctgaatcatgagaacagatttgccatgttgagagaacagcctttcacataacttgagcgaatacaagctgaagaacggaaggcttgcataaatgtaagctcaagaatgaaatgcagaggccaagaaacttgttgtcaagcgaaggtaatgtagaatggatgtcctgttgttgaagttaagatggcaaaacagatrcctcagctcaatgtaacatcagtgggaactagtttgggataccccccccttaaaaggttggaaattcacagtgagaatgattactagccttcatcccatgaccaccagagacctgcaccacatattttcaggagggtgggacaatatgttaawtatttctcaaaattttggcctgttttcttagaatgcaatgtatatatatgttatgcctttaaatatgtagtcgtttctctcttcggggtgtatccttttctctttccttcccttccctcttctcttctccttctccttcttcttttc

SEQ ID NO: 6613 - DNA, 600 bp, Chicken  19866894110889_3
taacttgagcgaatacaagctgaagaacggaaggcttgcataaatgtaagctcaagaatgaaatgcagaggccaagaaacttgttgtcaagcgaaggtaatgtagaatggatgtcctgttgttgaagttaagatggcaaaacagatrcctcagctcaatgtaacatcagtgggaactagtttgggataccccccccttaaaaggttggaaattcacagtgagaatgattactagccttcatcccatgaccaccagagacctgcaccacatattttcaggagggtgggacaatatgttaawtatttctcaaaattttggcctgttttcttagaatgcaatgtatatatatgttatgcctttaaatatgtagtcgtttctctcttcggggtgtatccttttctctttccttcccttccctcttctcttctccttctccttcttcttttctctattttcttttcttcaaaaatggatttatgtctttatcttgacactgaaaagagatctgtaccaagcctctttgtgcctcragatttgttctgaattatcctataggcaaagtaattggccagtcagaagccttcagcaactacatgtatg

SEQ ID NO: 6614 - DNA, 600 bp, Chicken  19866894110889_4
ctagccttcatcccatgaccaccagagacctgcaccacatattttcaggagggtgggacaatatgttaawtatttctcaaaattttggcctgttttcttagaatgcaatgtatatatatgttatgcctttaaatatgtagtcgtttctctcttcggggtgtatccttttctctttccttcccttccctcttctcttctccttctccttcttcttttctctattttcttttcttcaaaaatggatttatgtctttatcttgacactgaaaagagatctgtaccaagcctctttgtgcctcragatttgttctgaattatcctataggcaaagtaattggccagtcagaagccttcagcaactacatgtatgtaagagcttcccccagacagctggcataagaaggagaaacatcctagaaaagcttattttctccaaatgtccactgttcccactccatctcatcaaagattttacatgcctggaagtacataaaattgaggcaattttgaaccaaagaaacagaatacattccagactcttacggtctagagaacatgcagctgcaagcactctttctctttgtaagggtggggtccatc

SEQ ID NO: 6615 - DNA, 600 bp, Chicken  19866894110890_1
tcagtaaatcttcattagagatcttcatatattaactgaatttcaaaaacaaaattatttttgaccaaggaataaagagtttcaaattgaaaatataaaaaaaatgagatgtttttagaaactgtgtaacatgtattaaccctagtctttcactgcaacactgactttcccgttatctaattttgtttggaatttcctaatgataaaatcatagaaaattccaacccaactctaatagtgacataaattcttagtgtctatgttaatatctggcaatgcttagctttaaggaaaaagaaygtaaacgaagatgaagagtctcatggctagggagagatgagaaggaaattgttgccagatttatctatgctgagataaatcagttgctcaagaagatacaagttccttaaatcagtatttagcatattcatgttagatcagaaccccaggaactctctttggtattgatatctcacattagtatctttttgaggtacggacttggggaaaaaaatggagaagccttttcttgtgaatcaactggtttattttcagtccttgttgccatggaatttgatgccctgttatgctgggttcagt

SEQ ID NO: 6616 - DNA, 600 bp, Chicken  19866894110890_2
tgttttgaaaataataggttaagtaggttttggacaagtatttgtgccttacaattgtctgaggttaaccatatcacattaactaacatgtttgaagtctaggctcaaggatgctgtaaacaacagctgtcattaagtgcccgtgagacaaggaattgtatcttggtgttacagatggagaacagctactgaggctgcatatttatttttactttttttgttctctttgcagtagagaaaatagcttttctaaaagcaatagaacaattctatggttcagccaggaataaagccaatgtyttctgcctgctagccttataaccttttcagtatgcatccctacaaaatacctaacctttatactgcttcgccaattttctgtatcagagctttgttacraagctcactttagctgcaagacaaccatgctggaagtctattatttttcagggctttgagatctgctttcgaataacctaaagttttcaaggaggaatcttgtatcatgtattactgtatgcttactcaaatgctattaagattaacttccatattccagatttcttctcagaaataacaaattaaaatcccccagctggt

SEQ ID NO: 6617 - DNA, 600 bp, Chicken  19866894110890_3
taggctcaaggatgctgtaaacaacagctgtcattaagtgcccgtgagacaaggaattgtatcttggtgttacagatggagaacagctactgaggctgcatatttatttttactttttttgttctctttgcagtagagaaaatagcttttctaaaagcaatagaacaattctatggttcagccaggaataaagccaatgtyttctgcctgctagccttataaccttttcagtatgcatccctacaaaatacctaacctttatactgcttcgccaattttctgtatcagagctttgttacraagctcactttagctgcaagacaaccatgctggaagtctattatttttcagggctttgagatctgctttcgaataacctaaagttttcaaggaggaatcttgtatcatgtattactgtatgcttactcaaatgctattaagattaacttccatattccagatttcttctcagaaataacaaattaaaatcccccagctggtagagcaaattacagattttcttttttctttttttccttcaatactttttaaaaacaggcatacacacaaactagtcaaatttttaatcccttctgaccc

SEQ ID NO: 6618 - DNA, 600 bp, Chicken  19866894110890_4
atgctattaagattaacttccatattccagatttcttctcagaaataacaaattaaaatcccccagctggtagagcaaattacagattttcttttttctttttttccttcaatactttttaaaaacaggcatacacacaaactagtcaaatttttaatcccttctgacccctactacactttagcaaaggcaagatacttgatatggctcacttgttgcatagaaaccaaccctctttgagaaatgtaatatacaagctgagaattaggactcattatgcctttgctgagggctcattargattgcatgctgagggtgccatcttaattagagataaacctgaccacctgaaagtaattcacactggcagccaactgtagtattttccaatttttgatttgtctgggttccatctgccagctttatcttagcagtaactcattctgttgacatcaacaatgatgtctgtaacatcatgaattgcctcttgtctcttgggtacaatcaagttagacagttcccttcacagtatgactctctgatgaacggggctgctggctatggagagtcacgatcaaggtaatgaaatgtgagacatca

SEQ ID NO: 6619 - DNA, 600 bp, Chicken  19866894110890_5
ctcattctgttgacatcaacaatgatgtctgtaacatcatgaattgcctcttgtctcttgggtacaatcaagttagacagttcccttcacagtatgactctctgatgaacggggctgctggctatggagagtcacgatcaaggtaatgaaatgtgagacatcaagtatatgacaagacatgtattaaatgactacaaaatccaaaattccaaagacgtattctcctatatctttcctaacaacaataaaaataaataaaattaaatgaacagaacatgcccttgcactttccaccatcaytgaatgtatactgtactgtttcactgattacttagcattgtacatccctatgattcctagcatctattggcacctatttcaaagatccttaaaagaatctrtgttggtataacccaccaaatgagcctttagggcttgaatttaaattcttctaatagattttcttagtgcatttttccctcttggcattcttatgcttgtaccagtaaaggcttagtacaaaataaaaataaaaataagaggttaagtacagatatgcaaatggttttgctgacagcacattgatctaagtatgtctac

SEQ ID NO: 6620 - DNA, 600 bp, Chicken  19866894110890_6
ctgatgaacggggctgctggctatggagagtcacgatcaaggtaatgaaatgtgagacatcaagtatatgacaagacatgtattaaatgactacaaaatccaaaattccaaagacgtattctcctatatctttcctaacaacaataaaaataaataaaattaaatgaacagaacatgcccttgcactttccaccatcaytgaatgtatactgtactgtttcactgattacttagcattgtacatccctatgattcctagcatctattggcacctatttcaaagatccttaaaagaatctrtgttggtataacccaccaaatgagcctttagggcttgaatttaaattcttctaatagattttcttagtgcatttttccctcttggcattcttatgcttgtaccagtaaaggcttagtacaaaataaaaataaaaataagaggttaagtacagatatgcaaatggttttgctgacagcacattgatctaagtatgtctacataagaaaacctacagattcaggagttttaatagaagtgagtgacttatattctgagcagaatgaaatacaaaatataagaaggttagaaattccctctct

SEQ ID NO: 6621 - DNA, 599 bp, Chicken  19866894110893_1
  misc_feature (1)..(79): n is any nucleotide
nnnnnnnnnnnnnnnnnnnnnnnnnnnnnnnnnnnnnnnnnnnnnnnnnnnnnnnnnnnnnnnnnnnnnnnnnnnnnnncctgctgcgtacgatggctcagtgagagaaactgatgccgaaacccacaggaaagaatctttcagatcttgactgctgtgggcagtgttttctgagattcttggaagaagacatatgacattttgcagtatcagaaatcctggtttacactggtgttaggtgctgctatgggtggaaaggaaaaaggcaatgggaaacctttagccctctatacactaagsgactacatttttaagcttatcagtacttaaagggttaatgaaaaaaacactcctccctggtgacctttcacttccctaacgtgtttgttgatttcttgtcctctaggcattatttttgtttgggaatgatatgtgcttactcactcatatgcatttattacacagacatcatggttgggtacatcatccatcagtggaaatgtcacactatgtaaaagctctgtatccagagtgacagctgagttactgctggtgttgtggaacagccctcttgccaagtttcagcagctggacatttt

SEQ ID NO: 6622 - DNA, 600 bp, Chicken  19866894110893_2
tggtgacctttcacttccctaacgtgtttgttgatttcttgtcctctaggcattatttttgtttgggaatgatatgtgcttactcactcatatgcatttattacacagacatcatggttgggtacatcatccatcagtggaaatgtcacactatgtaaaagctctgtatccagagtgacagctgagttactgctggtgttgtggaacagccctcttgccaagtttcagcagctggacatttttagacaaaactcgtgtacaaatagattcacaagcaaatgaatctgcaatggcacgttsctcttgtagatgttaccagcttccattggtcactagctaccctgcagggacaccaagatgtgcaggtggaacatggccaggggaagttcacagaagggaatgtgatcaaaagctgttctcagctgatcagcttttgacttctcctgcaaaatgactcattgcactcagctctgctaaatagattcaaaaggcactgttgctaattccgctgctgagctccaagctgaggattaaacggcacaaggacgtgtatccccatttctcttggatggagctcagactgaaggagcagtctttggt

SEQ ID NO: 6623 - DNA, 600 bp, Chicken  19866894110896_1
caaaggaaggacatgcaagacaaggccaggcaaggccaggcaaggcaatgtaaggcaaggcaaaacaaggcaaggcaaggcaaggcaaggccaggccatgccaggcaaggcaagtccaggccaggcaagacatggccaggcaaggcaaggacaggcaagaccaggccaggccaagtcaggccaggccgaggaaggccgaaccaggcaaggcatgtccaggccaggcagtggtaggctcggcaaggcaagtcctggcaaggccaggccatgccggacagggccatgccagacaagaccatkcaaggcaaaaaaagtcaaggcagtgtaaggcaagaaaaggcaaggcaaggacaagcaaggccaggcaaggcaaggccaggcaaggcaaggcaaggcaaggccaggccatggaaggctaggcaaggcaaggcaaggccaggcaaggacaagcaaggccacgccaggcatgcccagacaaggcaaggaaaggcaaggccagtccacaccaggttataccaggcaagggcaggcaaggcaaggccaggaaaggcaaagcaaggtagggcaaggcaaggcaaggcaaggcgaggcaaggcaagg

SEQ ID NO: 6624 - DNA, 600 bp, Chicken  19866894110915_1
tgcctttcttgtagaaatggctagaatacatagcttcaatgtaaaatagggtaactgctgggctttatgaacaccaaagtgtggttgcccatgttactgaggttaaagacatctgctctttgtaaggcattgcagagactcttctgtatgtaaagtgatagattaatgtgtacaactgtaaagtgatgcacatggaaaattatttcaaattttacttaaaaaaataattggctgtcaactaatttgttctactctaatgttaagccttggggttacaataaataactttctgaatatgtrcgtcgtcttgttagcaacaaaacaaattgtataatgggaattacttggacgtaagagtatccttatgctctcatgtacataatccatagctyatctcttccctgcacccagaatgttgtgcttaagtctggtctgctcaactcaaacaagttgcacagcttacagaagatcatctaggattcaccttaccataacgttggttttggtttatatgttggaaaccagttagtaagtgatctaaattgtatgcagagtaaaaggatagtggagttactggttcatgtcagtgtttcctctttc

SEQ ID NO: 6625 - DNA, 600 bp, Chicken  19866894110915_2
gttactgaggttaaagacatctgctctttgtaaggcattgcagagactcttctgtatgtaaagtgatagattaatgtgtacaactgtaaagtgatgcacatggaaaattatttcaaattttacttaaaaaaataattggctgtcaactaatttgttctactctaatgttaagccttggggttacaataaataactttctgaatatgtrcgtcgtcttgttagcaacaaaacaaattgtataatgggaattacttggacgtaagagtatccttatgctctcatgtacataatccatagctyatctcttccctgcacccagaatgttgtgcttaagtctggtctgctcaactcaaacaagttgcacagcttacagaagatcatctaggattcaccttaccataacgttggttttggtttatatgttggaaaccagttagtaagtgatctaaattgtatgcagagtaaaaggatagtggagttactggttcatgtcagtgtttcctctttcatgacctgatttccctcctttccagtcttctcattctcagtcctcctttactaaccttgtagaagcctggtgatttgatcggtttccattgc

SEQ ID NO: 6626 - DNA, 600 bp, Chicken  19866894110919_1
ttttcaaggagttttaacttctcaaactgcagcaagtacagaacgctgttctttccaaggtagctgaagctgaaatctgattttggtttatttgtatacagcaaatatacacatttccctttccctctgtcatcccagttctgtatttccaagaccacaaagactttgctaaggttaaaaaatataaatcttttaaaaagtaaaggagaaaaattaattttaagcattgctcatacaaagtttgagaagcagtgaagtgtacatacagagaaagactgcaaaaagtgactttaagatctraaactgtttgccatctttgttattgtacagctcatgttctgcaaaatcactactaccaactacgattgaattgctaagaccactcctttaactttgcagggtatataaatcttgtgatcctcttcggactctcataggaaaacttcaaaactaagaaaccagtagtatttataaattattccttatggctttcaagattttttttttaactttctttccttttttaacttgagttcaggttgatatgcaattgacaaatagtgatgatatttgcttaataacccttgacacacacccaag

SEQ ID NO: 6627 - DNA, 451 bp, Chicken  19866894110925_1
tggttttcctaaggtgctgggacactaaagtaattttgtttctagataagacatgagtgccaaaatctcttgaccattaaaaaaaaaaaaaaaaagaaaagaaaagaaataagacaaaataaacaaaataccaaaagcaactttaaggtcctacaacagccttttttgtttttgtttttgtttttactgtatattaagctctcattcaaagagggaaatcttaagatgatcaaaataaaggcctgggactgtaagtctgtaattgctttgcagattgtttatattttttcatgcataatyttaatgatatcttgcacaaatcatcactaatggcattccagagttcaaatgggaagaacacaaatgctgtgatatgattcatttatggcagtaggcaaatcttaaatcaagatccagacaattacataagcagagtggaaaatggcatgtg

SEQ ID NO: 6628 - DNA, 600 bp, Chicken  19866894110936_1
ctcttccctgccctgaacatctgttcaagatctttatgactcaagatctctgcacacgcactgttccacctctgaaacttcactgtcccacacattcaagaacgtggtcttaatctgcttttaaggagtgctgcattgcttgtcagtcttcccctccttgactgggagcttgacattagcaacaggatggtgtcttggcttggcagactattgcagcactgggtaaaggagtaatagaagactgagaaacttaatcagcatgtgggaacaacagcaaggacaacttttttggtagccttrgaagaacaagagattagagaacctaagaggagaggcatgcatatgtgacatggctctttttacagcaaaataagcactttgggatgtttcagaagttctcagtatttgaagaatctttttgtgtttagcctatgataaaggactgtactctgttgagacccaggcattgtttaacccagtaaggtttggaattcctcttttcaccatttggagtgaaattttcattttagtatcttctaaacagaattcttatgtgggccaaaactgcattttgaaccaccggggacagccagctggttt

SEQ ID NO: 6629 - DNA, 600 bp, Chicken  19866894190849_1
ttatgacctgaatttcatataaatatacatagctaacaaaattgcatactaaactaatcaagatggaacaatatttcaagaacatgcccaacctcagttatcatatcttgttaaatttctctctttactgttgcatacacaaaatgtattgcttaaggcaacactaataatgcatttgtagctatcactattcagaattttcagtgctgtgttttagagcctttaaaattaagtgctcaaacattagatgcttcctgatatcttatgataaaaatgcagcatctgtaatgtaatgaggaraatatttcacagcatcacagaatgacaggggttggaagggaccttgagagatcattgattccatcacacctgctcaagcaggtaccttacaacaggttacacaggtaggcacccaggtgagttttgagtagctccacagaagaagaatttacaacctctctgggcagcctgttccagtgctccatcaactttcccataaagttgttccatatttttgaatggaacttcatgtgttcaagttttcggccgttactccttgtcctgtcgctacacaccactgagaagagcctgccctcatcc

SEQ ID NO: 6630 - DNA, 467 bp, Chicken  19866894190849_2
caggggttggaagggaccttgagagatcattgattccatcacacctgctcaagcaggtaccttacaacaggttacacaggtaggcacccaggtgagttttgagtagctccacagaagaagaatttacaacctctctgggcagcctgttccagtgctccatcaactttcccataaagttgttccatatttttgaatggaacttcatgtgttcaagttttcggccgttactccttgtcctgtcgctacacaccactgagaagagcctgccctcatccatttgcctccacctccctgtagatrtttataaacrtcgatcagttcccctctcagtcttcttctccctagggtgaacacacccagcttactcaggctttcctcatacaggagatgctctaggccctctatcatctttgtggccctccactggactccttctagaagatccctgtcattttgcaactgcggag

SEQ ID NO: 6631 - DNA, 457 bp, Chicken  19866894190849_3
aagggaccttgagagatcattgattccatcacacctgctcaagcaggtaccttacaacaggttacacaggtaggcacccaggtgagttttgagtagctccacagaagaagaatttacaacctctctgggcagcctgttccagtgctccatcaactttcccataaagttgttccatatttttgaatggaacttcatgtgttcaagttttcggccgttactccttgtcctgtcgctacacaccactgagaagagcctgccctcatccatttgcctccacctccctgtagatrtttataaacrtcgatcagttcccctctcagtcttcttctccctagggtgaacacacccagcttactcaggctttcctcatacaggagatgctctaggccctctatcatctttgtggccctccactggactccttctagaagatccctgtcattttgcaactgcggag

SEQ ID NO: 6632 - DNA, 600 bp, Chicken  19866894190862_1
cgggaagcctttaagcaatttgccagctgcactggtactcagcaacccctcccggatgatccatggggagcacagtgtgatattcttggcagtgacagcagaataaataggaaatgctcaagattcccttcctgactggatcagagctgttttcctctagatgggagaggagctaaccttctgtgcaaggcttcctgcactgttctgtaacagcgggtgatatgtcagcactcagagggtgcatggttgcatcggtcactgctggcctagctccagtctgtacgctgcctgcagcactayttattgttagctcccacgatgtggtttgccgctccttggtgctgcgtgcatctgaagcatagcatgtaagtaagcagaggaaatggttgttggtggaaggagagctagatgctgacaagaaaaggtgaatatgaccatactgagagcctcctggcagagacgtgggagtccagagaagaaattctgctcattagagtggaccaatctttagaaatgcatacaagcccccagctctgatgcctctgaggaagtgatttatggctttgcgttgtgactgagaattctctccatccagctcca

SEQ ID NO: 6633 - DNA, 507 bp, Chicken  19866894190866_1
attaggagtgcagaaccataaaaaaaaaaaaggctggagaggactgtgaggggctgtctgttgtgtgtggaaggatcagctctacttaaatcattataaaaagatgtttgtcttatttcttcttaaagaaatctgtaagtgaagatttcacttcctcactaagcaatctattctgctactactgattctaattcttctcttaccgataagcttttcctaatgcctaatttaaacctatttccttgttcactatctcttgttccttcatgcaaagatagagattaccccatcctcagcaawattcaacataatttcatctctttccttctttctttctttccttctttctttctttcyttctttctttctttctttctttctttctttctttctttctttctttctttctttctttctttctttctttctttctttctttctttccttctttccttctttccttctttccttctttccttctttccttctttccttctttccttcttt

SEQ ID NO: 6634 - DNA, 450 bp, Chicken  19866894190866_2
ctgttgtgtgtggaaggatcagctctacttaaatcattataaaaagatgtttgtcttatttcttcttaaagaaatctgtaagtgaagatttcacttcctcactaagcaatctattctgctactactgattctaattcttctcttaccgataagcttttcctaatgcctaatttaaacctatttccttgttcactatctcttgttccttcatgcaaagatagagattaccccatcctcagcaawattcaacataatttcatctctttccttctttctttctttccttctttctttctttcyttctttctttctttctttctttctttctttctttctttctttctttctttctttctttctttctttctttctttctttctttctttccttctttccttctttccttctttccttctttccttctttccttctttccttctttccttcttt

SEQ ID NO: 6635 - DNA, 600 bp, Chicken  19866894190868_1
tccttcccactcccctttcttgctggttaatagccctgcatttccttgtgctttctcagggcgactcagagaagtggctgggatggcctgaacccctgaaacttctggaagtgatcaatcttgttgttgtggtcacattctgactttccccacatattccatttgctcccagtggtgtctggcaaacaccaaaggtacacagtggctgtgcaccaaggcaggaaggagggggaaggcaggagaagacagcctttcctcactggggtgggaagctgttctttcaactcaacctgaaaagcygtgcagtgagttgcagccatcaaagagctagatggagagtggtgcaaactagaagaggtaggaacagtttctctcacagacttcttgaggggcctgggggattatttttcttactttgttgacatcagttccatctgaggttgatgattgccctaagacactgtgactatgctgatttctttctttctttctttctttttttttttttttgtaacttcccacttcagtgaaacagatgtttcaaagtttcagcaccaaagagtttggacagagctcagatacaatcttaatgctggatcc

SEQ ID NO: 6636 - DNA, 600 bp, Chicken  19866894190870_1
gcttaaaatgtctcttgtgatgggaaatgatagacagccccaaggaaacacagcagtttctgctcctcccgtagccatctcactacagtcctcgaggcatgctttgtacctgccagaggcacctcctcccctttaatgaagcctcattatccctctccttactgctgatggggagagctccgtgcccacgggagtgcgatggcagcggcgcccagcccttgctcggatgggtgccatggggtgagctgtgcagtcaaagccacgggtgctgcagggctcgagtggggccagtctgcatgwgtgcatctcgggagctgtgcccccgtgcccagcagctgccgtgagggctcagcagcagtgccagtgcagggctggagggaaggcaaagaactggcacagagctctggctttttttccctgggttccctcttactgctcgcgcatcaattgggtaatgacagcatttgatgagatgccaatgcaccacacatgcagctatttcaggaacgcactcgctctgctaattctccctgctgtcactgggtgtttcattaggttccttcaactctgctttttcttaaagctctcaaaggtgcccgc

SEQ ID NO: 6637 - DNA, 600 bp, Chicken  19866894190870_2
tgcatctcgggagctgtgcccccgtgcccagcagctgccgtgagggctcagcagcagtgccagtgcagggctggagggaaggcaaagaactggcacagagctctggctttttttccctgggttccctcttactgctcgcgcatcaattgggtaatgacagcatttgatgagatgccaatgcaccacacatgcagctatttcaggaacgcactcgctctgctaattctccctgctgtcactgggtgtttcattaggttccttcaactctgctttttcttaaagctctcaaaggtgcccgcrctacaggcagcccctggcagagggaggtgctcagtgctccgcaggcagtggggctcagtgcttygagggcagcacagccctttggcagcggggtttccgtgcgggctcttaaggacacygtgtgtcacccgggagcacactgcagtcctgctgggctcggtgccctctgacgtgggcgagctttgcagagggaccggcgctgcctccctcacctgctgccgtgctcagggtgacagctgacagccggcacagtgccagcatcagctgcaccactcaccctggcagtcataatgccagatg

SEQ ID NO: 6638 - DNA, 600 bp, Chicken  19866894190870_3
gcagggctggagggaaggcaaagaactggcacagagctctggctttttttccctgggttccctcttactgctcgcgcatcaattgggtaatgacagcatttgatgagatgccaatgcaccacacatgcagctatttcaggaacgcactcgctctgctaattctccctgctgtcactgggtgtttcattaggttccttcaactctgctttttcttaaagctctcaaaggtgcccgcrctacaggcagcccctggcagagggaggtgctcagtgctccgcaggcagtggggctcagtgcttygagggcagcacagccctttggcagcggggtttccgtgcgggctcttaaggacacygtgtgtcacccgggagcacactgcagtcctgctgggctcggtgccctctgacgtgggcgagctttgcagagggaccggcgctgcctccctcacctgctgccgtgctcagggtgacagctgacagccggcacagtgccagcatcagctgcaccactcaccctggcagtcataatgccagatgctctgcatgactcgcagcagttccgatttttgctgcagaagtccatccccctgtttcagagctc

SEQ ID NO: 6639 - DNA, 600 bp, Chicken  19866894190870_4
ggttccctcttactgctcgcgcatcaattgggtaatgacagcatttgatgagatgccaatgcaccacacatgcagctatttcaggaacgcactcgctctgctaattctccctgctgtcactgggtgtttcattaggttccttcaactctgctttttcttaaagctctcaaaggtgcccgcrctacaggcagcccctggcagagggaggtgctcagtgctccgcaggcagtggggctcagtgcttygagggcagcacagccctttggcagcggggtttccgtgcgggctcttaaggacacygtgtgtcacccgggagcacactgcagtcctgctgggctcggtgccctctgacgtgggcgagctttgcagagggaccggcgctgcctccctcacctgctgccgtgctcagggtgacagctgacagccggcacagtgccagcatcagctgcaccactcaccctggcagtcataatgccagatgctctgcatgactcgcagcagttccgatttttgctgcagaagtccatccccctgtttcagagctccgcactgttgcagtgaggcagacggcttgcctgcagctctgcagctggatggaga

SEQ ID NO: 6640 - DNA, 600 bp, Chicken  19866894190881_1
tcttgtttctctcctcgctcagctctggtgcgtgggcttgctttgatgagttcaaccgcattgatatcgaggtgctgtctgtggtggcccagcagatcacaaccattcagaaagcacagcagcagagagtaagtaatgaacacaggaatgcaaaggcagacagctgtctttgcatgcactgtcacaaaggaccagcttctctgctcaggtgcagctcagagaggtataagtaatcccccagctgtggcacgttgtgtcaggttatcatgtgttcactgtaggtgagttttataccctcammttagcctttgctgccactwttgccyacactcaaagcctcagcttgagccgccgtgccagcagacttcagtgtgggagacgctccgttaaagatccactgagctgataaargttggagctgtgatacgaggcagccaccgctctgccgggagttgctcagcacatttatctaaatgcattatccaagctttagtgggttcacaaaacccagcgtgtgcaggaaaaaaaaggcatgctcatgcacacgcggttgcaatgtaaaatgaattgttggctgtagatggagactcagctgtcagc

SEQ ID NO: 6641 - DNA, 600 bp, Chicken  19866894190881_2
cttgtttctctcctcgctcagctctggtgcgtgggcttgctttgatgagttcaaccgcattgatatcgaggtgctgtctgtggtggcccagcagatcacaaccattcagaaagcacagcagcagagagtaagtaatgaacacaggaatgcaaaggcagacagctgtctttgcatgcactgtcacaaaggaccagcttctctgctcaggtgcagctcagagaggtataagtaatcccccagctgtggcacgttgtgtcaggttatcatgtgttcactgtaggtgagttttataccctcammttagcctttgctgccactwttgccyacactcaaagcctcagcttgagccgccgtgccagcagacttcagtgtgggagacgctccgttaaagatccactgagctgataaargttggagctgtgatacgaggcagccaccgctctgccgggagttgctcagcacatttatctaaatgcattatccaagctttagtgggttcacaaaacccagcgtgtgcaggaaaaaaaaggcatgctcatgcacacgcggttgcaatgtaaaatgaattgttggctgtagatggagactcagctgtcagcc

SEQ ID NO: 6642 - DNA, 600 bp, Chicken  19866894190881_3
agctctggtgcgtgggcttgctttgatgagttcaaccgcattgatatcgaggtgctgtctgtggtggcccagcagatcacaaccattcagaaagcacagcagcagagagtaagtaatgaacacaggaatgcaaaggcagacagctgtctttgcatgcactgtcacaaaggaccagcttctctgctcaggtgcagctcagagaggtataagtaatcccccagctgtggcacgttgtgtcaggttatcatgtgttcactgtaggtgagttttataccctcammttagcctttgctgccactwttgccyacactcaaagcctcagcttgagccgccgtgccagcagacttcagtgtgggagacgctccgttaaagatccactgagctgataaargttggagctgtgatacgaggcagccaccgctctgccgggagttgctcagcacatttatctaaatgcattatccaagctttagtgggttcacaaaacccagcgtgtgcaggaaaaaaaaggcatgctcatgcacacgcggttgcaatgtaaaatgaattgttggctgtagatggagactcagctgtcagccatctggcagtcaggccctg

SEQ ID NO: 6643 - DNA, 600 bp, Chicken  19866894190881_4
ggtgcgtgggcttgctttgatgagttcaaccgcattgatatcgaggtgctgtctgtggtggcccagcagatcacaaccattcagaaagcacagcagcagagagtaagtaatgaacacaggaatgcaaaggcagacagctgtctttgcatgcactgtcacaaaggaccagcttctctgctcaggtgcagctcagagaggtataagtaatcccccagctgtggcacgttgtgtcaggttatcatgtgttcactgtaggtgagttttataccctcammttagcctttgctgccactwttgccyacactcaaagcctcagcttgagccgccgtgccagcagacttcagtgtgggagacgctccgttaaagatccactgagctgataaargttggagctgtgatacgaggcagccaccgctctgccgggagttgctcagcacatttatctaaatgcattatccaagctttagtgggttcacaaaacccagcgtgtgcaggaaaaaaaaggcatgctcatgcacacgcggttgcaatgtaaaatgaattgttggctgtagatggagactcagctgtcagccatctggcagtcaggccctgctttgc

SEQ ID NO: 6644 - DNA, 600 bp, Chicken  19866894190881_5
aagcacagcagcagagagtaagtaatgaacacaggaatgcaaaggcagacagctgtctttgcatgcactgtcacaaaggaccagcttctctgctcaggtgcagctcagagaggtataagtaatcccccagctgtggcacgttgtgtcaggttatcatgtgttcactgtaggtgagttttataccctcammttagcctttgctgccactwttgccyacactcaaagcctcagcttgagccgccgtgccagcagacttcagtgtgggagacgctccgttaaagatccactgagctgataaargttggagctgtgatacgaggcagccaccgctctgccgggagttgctcagcacatttatctaaatgcattatccaagctttagtgggttcacaaaacccagcgtgtgcaggaaaaaaaaggcatgctcatgcacacgcggttgcaatgtaaaatgaattgttggctgtagatggagactcagctgtcagccatctggcagtcaggccctgctttgctcctctggaggctcgcaggggttaagacctgaatctgtttgactttgacttggaattagaaacctgctgtctgtgaattcttctg

SEQ ID NO: 6645 - DNA, 600 bp, Chicken  19866894190881_6
attgttggctgtagatggagactcagctgtcagccatctggcagtcaggccctgctttgctcctctggaggctcgcaggggttaagacctgaatctgtttgactttgacttggaattagaaacctgctgtctgtgaattcttctgcgctgctttatcacccagctgaaattactgaaattacatgggtctaaaaggatttcagtttcttttttgcctcctctaccacaaattaattcagatccaaactctcctgcagaaaaggaaagagaagatgttgtctgtttatagctggaggagcwgaagtctgttcaaaaaaggtgtactatcagtaaatcttctctgagcctgatttcttaaacagagaaaaggcattgctggtaagagtggattcctgcagtaggactggattgcatcgctacagttgtgtgcagctgtgcttcatgatttgactactgaaagtcgttgctttccttgttggagattcggctaccttttgctaagtcaggctttgagactgatggcagtttttatttcctaggtggatcgcttcatgtttgagggaaaggagatccctctggtcccatcctgtgcagtcttca

SEQ ID NO: 6646 - DNA, 600 bp, Chicken  19866894190899_1
aaggagaaaaacagggaaaaacagggaaagcaatagcaagagttgtattctctagaatatttttttcatctgcatatctttcttttgaaatactttggaatatgaacgtaagagtgtcttgatttaagaaattccatttccttttcgtttagcagagacatgaatagcattcctcagtatcctgataccttgtgtccaaatttcactgatatagctgcagatcctgaaaagaataaaggtcagttactgaattaacaacttcagttggctttgcagtcttcgccaagcagtgtcaatagwgttgctaacattctctgtatatgcagagttcatacacacgttgttagatcttgacttctaggcaagttaagattaaagtcagcaagcaaaatcttacagctttgatattcttctgtatcttctctgtgtgaatacagcattttgctttcagctctcatttttaggtattttttttctcttgctttgaggtttaagtctaaaagtaatgtggctgggatatgagaacaccagttccatatgttaaaatgaagttcagcattgggtcagatgtgaccactttttcctctccaaacttccagt

SEQ ID NO: 6647 - DNA, 599 bp, Chicken  19866894190902_1
  misc_feature (1)..(74): n is any nucleotide
nnnnnnnnnnnnnnnnnnnnnnnnnnnnnnnnnnnnnnnnnnnnnnnnnnnnnnnnnnnnnnnnnnnnnnnnnncgtatgtatgtagagcaatcatacgctgcaggacacatacacataggctctttgtgcagcattgctgtagagaaagaagcagaagtaaatgctagctaatcccaaacaaacagaacaaccaacaaagagtaggcactgtttaaaaataattcttttccagatccacgcattccattattgctttggaaaaaaaggactgatagcgcaatatgtggctgcagttccraactataaccttatcagtgccgtggaagttgaaacacrcagatgtgttcagaatgacttaagtatgatagagttaagcctgcatggtctgtgattttatcagctgggaattgattcctggtgtgttaatgaagacctacgtatagttttcttgattaacttaaggcttagaacttgttactttagcactaaacaagatttaggtttttgagctgttgcatctgatacctcaattattcatcctcrgaattaatgtacaattagcatgaattcctgctcacatggaaatagatggttatg

SEQ ID NO: 6648 - DNA, 599 bp, Chicken  19866894190902_2
  misc_feature (1)..(36): n is any nucleotide
nnnnnnnnnnnnnnnnnnnnnnnnnnnnnnnnnnnncgtatgtatgtagagcaatcatacgctgcaggacacatacacataggctctttgtgcagcattgctgtagagaaagaagcagaagtaaatgctagctaatcccaaacaaacagaacaaccaacaaagagtaggcactgtttaaaaataattcttttccagatccacgcattccattattgctttggaaaaaaaggactgatagcgcaatatgtggctgcagttccraactataaccttatcagtgccgtggaagttgaaacacrcagatgtgttcagaatgacttaagtatgatagagttaagcctgcatggtctgtgattttatcagctgggaattgattcctggtgtgttaatgaagacctacgtatagttttcttgattaacttaaggcttagaacttgttactttagcactaaacaagatttaggtttttgagctgttgcatctgatacctcaattattcatcctcrgaattaatgtacaattagcatgaattcctgctcacatggaaatagatggttatgttaatttggatgcagttactgaaggagttctgaataat

SEQ ID NO: 6649 - DNA, 600 bp, Chicken  19866894190902_3
ccattattgctttggaaaaaaaggactgatagcgcaatatgtggctgcagttccraactataaccttatcagtgccgtggaagttgaaacacrcagatgtgttcagaatgacttaagtatgatagagttaagcctgcatggtctgtgattttatcagctgggaattgattcctggtgtgttaatgaagacctacgtatagttttcttgattaacttaaggcttagaacttgttactttagcactaaacaagatttaggtttttgagctgttgcatctgatacctcaattattcatcctcrgaattaatgtacaattagcatgaattcctgctcacatggaaatagatggttatgttaatttggatgcagttactgaaggagttctgaataatgaaaagactggtattaatatctttgtatgggatacagatcagactgagtaagtaaccattttttaatataaaactgtctttgcagtttgttttatttcttccattctctgttatgttctaggctattcagcacatctgccaatgacttcrgataattatgatactgttaaatatttttttgactacaaatatatataartatttggcc

SEQ ID NO: 6650 - DNA, 600 bp, Chicken  19866894190902_4
ctaaacaagatttaggtttttgagctgttgcatctgatacctcaattattcatcctcrgaattaatgtacaattagcatgaattcctgctcacatggaaatagatggttatgttaatttggatgcagttactgaaggagttctgaataatgaaaagactggtattaatatctttgtatgggatacagatcagactgagtaagtaaccattttttaatataaaactgtctttgcagtttgttttatttcttccattctctgttatgttctaggctattcagcacatctgccaatgacttcrgataattatgatactgttaaatatttttttgactacaaatatatataartatttggcctacttccatactgatttatacacttctgactgagggtaaaagtcctttgaagtgtctggaattaccccattataaagtcatttaaggaagatcgtaggtaggtcagttcttcccggagctctttcctccaacgtgtcatacttgagttttgccagtgagttactggtactgtaaataattggttcatccaaaaacaaggtaacaaagtggagttgctaagaacactggaatgtcttttcatg

SEQ ID NO: 6651 - DNA, 600 bp, Chicken  19866894190902_5
tcatcctcrgaattaatgtacaattagcatgaattcctgctcacatggaaatagatggttatgttaatttggatgcagttactgaaggagttctgaataatgaaaagactggtattaatatctttgtatgggatacagatcagactgagtaagtaaccattttttaatataaaactgtctttgcagtttgttttatttcttccattctctgttatgttctaggctattcagcacatctgccaatgacttcrgataattatgatactgttaaatatttttttgactacaaatatatataartatttggcctacttccatactgatttatacacttctgactgagggtaaaagtcctttgaagtgtctggaattaccccattataaagtcatttaaggaagatcgtaggtaggtcagttcttcccggagctctttcctccaacgtgtcatacttgagttttgccagtgagttactggtactgtaaataattggttcatccaaaaacaaggtaacaaagtggagttgctaagaacactggaatgtcttttcatgggagaactacttcatcctcagcttttaaatgcagcagattcaccagaag

SEQ ID NO: 6652 - DNA, 600 bp, Chicken  19866894190908_1
cagagagaggaaaccatcatgtgtcaccttggtgctgaggctctgacctgaaatgtccttttcctcttgcagcctttgtccccaccgtaacagccaggatggaggcccccctcaccaccacacggtgcacctgggctccacgcaagccccctgcatccactgcagcaaaaggaggaggcacccactgcaccgccagggccggtccaaggatggcaaaggccggatgcaccccggagagaccactgtcttctcagtgggcaggtactgctcagatggagcactgctccatgaagtcttctytgtccyccttgtccacttgccccatgctcttccccatctcatgccccgggttggccctgctgttgggtcctctcacaccttgaaagtcccgtggtgtgtggctgtgacacatgggtttcctccctcctcctccctcsggtggctcaggctggggttgtcccgctggctcagagcagggcagcaccaaacccatgtcccttctgagcctatagcagggtagggggcagccttcctgyggggcaggttgcagggatctcatgaagwggggggacagcaggttcctgttgcaagtaactccca

SEQ ID NO: 6653 - DNA, 600 bp, Chicken  19866894190908_2
gaggaaaccatcatgtgtcaccttggtgctgaggctctgacctgaaatgtccttttcctcttgcagcctttgtccccaccgtaacagccaggatggaggcccccctcaccaccacacggtgcacctgggctccacgcaagccccctgcatccactgcagcaaaaggaggaggcacccactgcaccgccagggccggtccaaggatggcaaaggccggatgcaccccggagagaccactgtcttctcagtgggcaggtactgctcagatggagcactgctccatgaagtcttctytgtccyccttgtccacttgccccatgctcttccccatctcatgccccgggttggccctgctgttgggtcctctcacaccttgaaagtcccgtggtgtgtggctgtgacacatgggtttcctccctcctcctccctcsggtggctcaggctggggttgtcccgctggctcagagcagggcagcaccaaacccatgtcccttctgagcctatagcagggtagggggcagccttcctgyggggcaggttgcagggatctcatgaagwggggggacagcaggttcctgttgcaagtaactcccaccagaa

SEQ ID NO: 6654 - DNA, 600 bp, Chicken  19866894190908_3
ccacgcaagccccctgcatccactgcagcaaaaggaggaggcacccactgcaccgccagggccggtccaaggatggcaaaggccggatgcaccccggagagaccactgtcttctcagtgggcaggtactgctcagatggagcactgctccatgaagtcttctytgtccyccttgtccacttgccccatgctcttccccatctcatgccccgggttggccctgctgttgggtcctctcacaccttgaaagtcccgtggtgtgtggctgtgacacatgggtttcctccctcctcctccctcsggtggctcaggctggggttgtcccgctggctcagagcagggcagcaccaaacccatgtcccttctgagcctatagcagggtagggggcagccttcctgyggggcaggttgcagggatctcatgaagwggggggacagcaggttcctgttgcaagtaactcccaccagaatgacaraacagctattttgctccaagtcttcgcctgcaataattatggtaataagatgctgtgggaggaaggtaagaatagggggagtgtactgacaaatcccacaaatagtctcccagtccctatctgtt

SEQ ID NO: 6655 - DNA, 528 bp, Chicken  19866894190908_4
agaccactgtcttctcagtgggcaggtactgctcagatggagcactgctccatgaagtcttctytgtccyccttgtccacttgccccatgctcttccccatctcatgccccgggttggccctgctgttgggtcctctcacaccttgaaagtcccgtggtgtgtggctgtgacacatgggtttcctccctcctcctccctcsggtggctcaggctggggttgtcccgctggctcagagcagggcagcaccaaacccatgtcccttctgagcctatagcagggtagggggcagccttcctgyggggcaggttgcagggatctcatgaagwggggggacagcaggttcctgttgcaagtaactcccaccagaatgacaraacagctattttgctccaagtcttcgcctgcaataattatggtaataagatgctgtgggaggaaggtaagaatagggggagtgtactgacaaatcccacaaatagtctcccagtccctatctgttcttacctcaagggacttcctgagttac

SEQ ID NO: 6656 - DNA, 500 bp, Chicken  19866894190908_5
ctgctcagatggagcactgctccatgaagtcttctytgtccyccttgtccacttgccccatgctcttccccatctcatgccccgggttggccctgctgttgggtcctctcacaccttgaaagtcccgtggtgtgtggctgtgacacatgggtttcctccctcctcctccctcsggtggctcaggctggggttgtcccgctggctcagagcagggcagcaccaaacccatgtcccttctgagcctatagcagggtagggggcagccttcctgyggggcaggttgcagggatctcatgaagwggggggacagcaggttcctgttgcaagtaactcccaccagaatgacaraacagctattttgctccaagtcttcgcctgcaataattatggtaataagatgctgtgggaggaaggtaagaatagggggagtgtactgacaaatcccacaaatagtctcccagtccctatctgttcttacctcaagggacttcctgagttac

SEQ ID NO: 6657 - DNA, 452 bp, Chicken  19866894190908_6
ccacttgccccatgctcttccccatctcatgccccgggttggccctgctgttgggtcctctcacaccttgaaagtcccgtggtgtgtggctgtgacacatgggtttcctccctcctcctccctcsggtggctcaggctggggttgtcccgctggctcagagcagggcagcaccaaacccatgtcccttctgagcctatagcagggtagggggcagccttcctgyggggcaggttgcagggatctcatgaagwggggggacagcaggttcctgttgcaagtaactcccaccagaatgacaraacagctattttgctccaagtcttcgcctgcaataattatggtaataagatgctgtgggaggaaggtaagaatagggggagtgtactgacaaatcccacaaatagtctcccagtccctatctgttcttacctcaagggacttcctgagttac

SEQ ID NO: 6658 - DNA, 599 bp, Chicken  19866894190917_1
  misc_feature (1)..(88): n is any nucleotide
nnnnnnnnnnnnnnnnnnnnnnnnnnnnnnnnnnnnnnnnnnnnnnnnnnnnnnnnnnnnnnnnnnnnnnnnnnnnnnnnnnnnnnnnattataacactcaagtgaaaatggcacaatttgctacaacagagttactcgtctgttaaaattgagtttatacactacctatactcagggtgatacaggcacagaacatctagattattaggaaagtttgttataaagcccaatcagaaatatattatatatataaatgtatgtatatattcagtgacagtaatatgtctcaaaaataatgkaactgtagcatttctcttgcagagttgtggagaagaactcttgaatcaaagtgttgttaaacgcctaaggaaactttaaaattaaatgccaaaaagaattttgaagttgccctggggcttaagagacaaatgaaaatttagatacattttgtacaattttgtatagatgatcctagagggaagcagagcataagcaatttttaaaatcaatagcttgataacatatcctatcagtacactaaattaaatttcatgctatcctcgttgcaaaaaatttacatttaaataagcaatgaaat

SEQ ID NO: 6659 - DNA, 600 bp, Chicken  19866894190917_2
ggaaactttaaaattaaatgccaaaaagaattttgaagttgccctggggcttaagagacaaatgaaaatttagatacattttgtacaattttgtatagatgatcctagagggaagcagagcataagcaatttttaaaatcaatagcttgataacatatcctatcagtacactaaattaaatttcatgctatcctcgttgcaaaaaatttacatttaaataagcaatgaaattagcatagtcaattgcggagctttacaattagctcctcttaatacatataatccataaaaagccacttmtttattgtcacacacccctttgcatctttctccgaccataatatttaaaattattaaaatatttgaagtttaaaagagtatctataaggcactcttattatacataactgtacctctggattccttaatatacattctataatatatctattgtgtttgagagaattaatagtggaagaggcttcaaggtgctaccagttgcaaaactgttcttttaayagtatggattctctgaacagaaactttattattttttaatatctatctatttttacattaacttagtgtaaaatattgcca

SEQ ID NO: 6660 - DNA, 600 bp, Chicken  19866894190917_3
aagcaatgaaattagcatagtcaattgcggagctttacaattagctcctcttaatacatataatccataaaaagccacttmtttattgtcacacacccctttgcatctttctccgaccataatatttaaaattattaaaatatttgaagtttaaaagagtatctataaggcactcttattatacataactgtacctctggattccttaatatacattctataatatatctattgtgtttgagagaattaatagtggaagaggcttcaaggtgctaccagttgcaaaactgttcttttaayagtatggattctctgaacagaaactttattattttttaatatctatctatttttacattaacttagtgtaaaatattgccaacagacaaaactttggatatatattttatgacaaggaatgcaaagatatattttagattaaaaagttttaacgtgcatagtacaaacacatatgaagaaatgtcaaattccagggaattatgttgacactatgtaatgaagaattctaagacagcaaccagactgatagctgaaattatttagcagggagcaaagacaaagctaacaaacagttcttca

SEQ ID NO: 6661 - DNA, 600 bp, Chicken  19866894190925_1
atttgaataatctgtgcttaaatctttttatttatatataacaagcataggctaactgccaagtatgagcaaaggaatagcttaggttaaacctagctgttaagaataaatattattgtgagaaggaaaaacttgtgaagcctgatgatatttgaatctgtagactttatctgtttgtctgttatcaacatgaaactggtgtgtgatcagaaatgaatccagagggttttcctcttctgtgagaaaatgaaaaatagaccttcaatttcataaaacaaacagaaaaaaaacccacaaaarccattttcttctkttatctgatctagcttaacagcagaaaaaatctgtatttcctgcacattctttgtctagcaataaataaatttagaacaatattaaagacccaaacstacatcctaaaggtaactttttgtttgttctacaagtgagtggttaaattcaaacttrcaagtcatataaatatagaaatagtatttttatttcatatcaattattttccaataaattgcactgtagctttcttcatatttttaatgttttaaggggaatagtgcaataaattttacaaacagaagcatg

SEQ ID NO: 6662 - DNA, 600 bp, Chicken  19866894190925_2
gtgcttaaatctttttatttatatataacaagcataggctaactgccaagtatgagcaaaggaatagcttaggttaaacctagctgttaagaataaatattattgtgagaaggaaaaacttgtgaagcctgatgatatttgaatctgtagactttatctgtttgtctgttatcaacatgaaactggtgtgtgatcagaaatgaatccagagggttttcctcttctgtgagaaaatgaaaaatagaccttcaatttcataaaacaaacagaaaaaaaacccacaaaarccattttcttctkttatctgatctagcttaacagcagaaaaaatctgtatttcctgcacattctttgtctagcaataaataaatttagaacaatattaaagacccaaacstacatcctaaaggtaactttttgtttgttctacaagtgagtggttaaattcaaacttrcaagtcatataaatatagaaatagtatttttatttcatatcaattattttccaataaattgcactgtagctttcttcatatttttaatgttttaaggggaatagtgcaataaattttacaaacagaagcatgtaccaagatcaaa

SEQ ID NO: 6663 - DNA, 600 bp, Chicken  19866894190925_3
tattattgtgagaaggaaaaacttgtgaagcctgatgatatttgaatctgtagactttatctgtttgtctgttatcaacatgaaactggtgtgtgatcagaaatgaatccagagggttttcctcttctgtgagaaaatgaaaaatagaccttcaatttcataaaacaaacagaaaaaaaacccacaaaarccattttcttctkttatctgatctagcttaacagcagaaaaaatctgtatttcctgcacattctttgtctagcaataaataaatttagaacaatattaaagacccaaacstacatcctaaaggtaactttttgtttgttctacaagtgagtggttaaattcaaacttrcaagtcatataaatatagaaatagtatttttatttcatatcaattattttccaataaattgcactgtagctttcttcatatttttaatgttttaaggggaatagtgcaataaattttacaaacagaagcatgtaccaagatcaaatagcgtgaaatggaacagtatcagaacagacaactggggctggtgtygaatggcatcattctgttagcagggtgcttcacagtcactgctggctgct

SEQ ID NO: 6664 - DNA, 600 bp, Chicken  19866894190925_4
atctgtttgtctgttatcaacatgaaactggtgtgtgatcagaaatgaatccagagggttttcctcttctgtgagaaaatgaaaaatagaccttcaatttcataaaacaaacagaaaaaaaacccacaaaarccattttcttctkttatctgatctagcttaacagcagaaaaaatctgtatttcctgcacattctttgtctagcaataaataaatttagaacaatattaaagacccaaacstacatcctaaaggtaactttttgtttgttctacaagtgagtggttaaattcaaacttrcaagtcatataaatatagaaatagtatttttatttcatatcaattattttccaataaattgcactgtagctttcttcatatttttaatgttttaaggggaatagtgcaataaattttacaaacagaagcatgtaccaagatcaaatagcgtgaaatggaacagtatcagaacagacaactggggctggtgtygaatggcatcattctgttagcagggtgcttcacagtcactgctggctgctttacagagctgagggtatttctgtgttaggtggaaaaggagtgttttgttttgttgtt

SEQ ID NO: 6665 - DNA, 600 bp, Chicken  19866894190925_5
ttctttgtctagcaataaataaatttagaacaatattaaagacccaaacstacatcctaaaggtaactttttgtttgttctacaagtgagtggttaaattcaaacttrcaagtcatataaatatagaaatagtatttttatttcatatcaattattttccaataaattgcactgtagctttcttcatatttttaatgttttaaggggaatagtgcaataaattttacaaacagaagcatgtaccaagatcaaatagcgtgaaatggaacagtatcagaacagacaactggggctggtgtygaatggcatcattctgttagcagggtgcttcacagtcactgctggctgctttacagagctgagggtatttctgtgttaggtggaaaaggagtgttttgttttgttgtttttatacctgaacatgagctgatatttggagggctgcattattgctgtctgtattgcccttgcctcatacatattcaggaaaataatatatgtaatatcatagaatcatagaatggcttaggttggagggaaccctaaagatcactgagctccaacccactgctgtgggtaagggttgctaccagccagatc

SEQ ID NO: 6666 - DNA, 599 bp, Chicken  19866894190926_1
  misc_feature (1)..(218): n is any nucleotide
nnnnnnnnnnnnnnnnnnnnnnnnnnnnnnnnnnnnnnnnnnnnnnnnnnnnnnnnnnnnnnnnnnnnnnnnnnnnnnnnnnnnnnnnnnnnnnnnnnnnnnnnnnnnnnnnnnnnnnnnnnnnnnnnnnnnnnnnnnnnnnnnnnnnnnnnnnnnnnnnnnnnnnnnnnnnnnnnnnnnnnnnnnnnnnnnnnnnnnnnnnnnnnnnnnnnnnnnnntgctctcaaaactgtgataatgtgaagcttttgttttttccaccccaagcaggtcatactgtattcttccctctctctaccrtttgtgaaaattaattgctgtttctatgtatgttttttgttgtaaattcaggtgatccatcagatggggaaagaaaaaggggaaaagttacattcattaatgtattataaatttaatgtatttttaacttctactctagaaaaaactagaagacttgaatgctgactggaaggcaataaaccacttaattctacaactgaaggagaagccaacatttggagagcctgcccttacctctccaggtgtctgtaagtctttcactgcatacatcttctaaaattagtaaagccacacagtta

SEQ ID NO: 6667 - DNA, 600 bp, Chicken  19866894190926_2
agacttgaatgctgactggaaggcaataaaccacttaattctacaactgaaggagaagccaacatttggagagcctgcccttacctctccaggtgtctgtaagtctttcactgcatacatcttctaaaattagtaaagccacacagttaaagtgaagatggcttgagacagtctaaattcattgtgcatctgttcacatttcagctttagcttgtaaatgggaggtgtgctggtatggcattcaacttgcttttttttccttcatttttgtgtaatgtttctccaaagacaaatttgttyacatatttgatgaaatgattgcaatgtggttttgaaattattacctgcttcaaagtcttgtttctttattctgtgtaragaaaacattatgactttctacattcattcattaagcaaatatgatgaragaaaaaaaatgtttaaattaaaaggtaatagtataggtccaatagatataaatttgttacaaaatgaaattctgaaaatactttttatatgtgatagaccaatgaactgggactgtttcaagacaaagcatccatattcatagaaaagattgtatggagttgaatgttacgg

SEQ ID NO: 6668 - DNA, 600 bp, Chicken  19866894190926_3
ccttacctctccaggtgtctgtaagtctttcactgcatacatcttctaaaattagtaaagccacacagttaaagtgaagatggcttgagacagtctaaattcattgtgcatctgttcacatttcagctttagcttgtaaatgggaggtgtgctggtatggcattcaacttgcttttttttccttcatttttgtgtaatgtttctccaaagacaaatttgttyacatatttgatgaaatgattgcaatgtggttttgaaattattacctgcttcaaagtcttgtttctttattctgtgtaragaaaacattatgactttctacattcattcattaagcaaatatgatgaragaaaaaaaatgtttaaattaaaaggtaatagtataggtccaatagatataaatttgttacaaaatgaaattctgaaaatactttttatatgtgatagaccaatgaactgggactgtttcaagacaaagcatccatattcatagaaaagattgtatggagttgaatgttacggctgtggtatacactgatgggtgtcctgagttcatgaatatgcaacaagagacttggtcttcatttaatttaaattatt

SEQ ID NO: 6669 - DNA, 600 bp, Chicken  19866894190926_4
aattagtaaagccacacagttaaagtgaagatggcttgagacagtctaaattcattgtgcatctgttcacatttcagctttagcttgtaaatgggaggtgtgctggtatggcattcaacttgcttttttttccttcatttttgtgtaatgtttctccaaagacaaatttgttyacatatttgatgaaatgattgcaatgtggttttgaaattattacctgcttcaaagtcttgtttctttattctgtgtaragaaaacattatgactttctacattcattcattaagcaaatatgatgaragaaaaaaaatgtttaaattaaaaggtaatagtataggtccaatagatataaatttgttacaaaatgaaattctgaaaatactttttatatgtgatagaccaatgaactgggactgtttcaagacaaagcatccatattcatagaaaagattgtatggagttgaatgttacggctgtggtatacactgatgggtgtcctgagttcatgaatatgcaacaagagacttggtcttcatttaatttaaattatttgaacaatgtttgtttgtttgttttttgttttgaaatacattttcctta

SEQ ID NO: 6670 - DNA, 600 bp, Chicken  19866894190942_1
ggacactggggttcctgctgctggaacggggtaacagcatcccggggcctcctgaactaacttctggtgataggaggatgcggagatggtctcagagggctgtgcagaggcctgacaaagatgatcagctcctccctgacagctcctgaggaatgaaaggaggggtatggtgtgcctaaatattgacacagagggttgcacaatgctgggagttatttctgtcaaaaacatccacgtggcaaagccgagagtcacgaccttagaatttcactgtgatgtgtgttacaccatggtgctgcraggcagccaccatccttaattcaattcagcgcctcgtagagttgatgctccggttcagaacagaaggcagtggctctacagaatgttcttctgctctggatggatgcgactgcgatgcgcagaagtctctgcattgtgcacttggagtttgatgtcctgtcccacgtcgcctgtgcaccccaaataagcaaacacctcctctggctgatgtcacctcgccattaaaycagaccaaactagaggggaagagagcagaagtatycacacacagtacaaggggcacagacaggacacggagca

SEQ ID NO: 6671 - DNA, 600 bp, Chicken  19866894190942_2
acatccacgtggcaaagccgagagtcacgaccttagaatttcactgtgatgtgtgttacaccatggtgctgcraggcagccaccatccttaattcaattcagcgcctcgtagagttgatgctccggttcagaacagaaggcagtggctctacagaatgttcttctgctctggatggatgcgactgcgatgcgcagaagtctctgcattgtgcacttggagtttgatgtcctgtcccacgtcgcctgtgcaccccaaataagcaaacacctcctctggctgatgtcacctcgccattaaaycagaccaaactagaggggaagagagcagaagtatycacacacagtacaaggggcacagacaggacacggagcatgaattccrtaccttcagctgaagatctaggggaagagcagctctcagccaggactccagcygaggccttagcagacaggcaagagttgctctggcctggccacgcaggatgtcctcagggtgcatggatgtgtacgaggactcctgagaaaccaaaacagcaacagtggtgctgaagatcaaagccccaaattgctgtagccaaacccaagggcaaccaaagtcca

SEQ ID NO: 6672 - DNA, 600 bp, Chicken  19866894190942_3
gaatttcactgtgatgtgtgttacaccatggtgctgcraggcagccaccatccttaattcaattcagcgcctcgtagagttgatgctccggttcagaacagaaggcagtggctctacagaatgttcttctgctctggatggatgcgactgcgatgcgcagaagtctctgcattgtgcacttggagtttgatgtcctgtcccacgtcgcctgtgcaccccaaataagcaaacacctcctctggctgatgtcacctcgccattaaaycagaccaaactagaggggaagagagcagaagtatycacacacagtacaaggggcacagacaggacacggagcatgaattccrtaccttcagctgaagatctaggggaagagcagctctcagccaggactccagcygaggccttagcagacaggcaagagttgctctggcctggccacgcaggatgtcctcagggtgcatggatgtgtacgaggactcctgagaaaccaaaacagcaacagtggtgctgaagatcaaagccccaaattgctgtagccaaacccaagggcaaccaaagtccatcgctgactcacgttgtagccttgcagtcacctcc

SEQ ID NO: 6673 - DNA, 600 bp, Chicken  19866894190942_4
ccatccttaattcaattcagcgcctcgtagagttgatgctccggttcagaacagaaggcagtggctctacagaatgttcttctgctctggatggatgcgactgcgatgcgcagaagtctctgcattgtgcacttggagtttgatgtcctgtcccacgtcgcctgtgcaccccaaataagcaaacacctcctctggctgatgtcacctcgccattaaaycagaccaaactagaggggaagagagcagaagtatycacacacagtacaaggggcacagacaggacacggagcatgaattccrtaccttcagctgaagatctaggggaagagcagctctcagccaggactccagcygaggccttagcagacaggcaagagttgctctggcctggccacgcaggatgtcctcagggtgcatggatgtgtacgaggactcctgagaaaccaaaacagcaacagtggtgctgaagatcaaagccccaaattgctgtagccaaacccaagggcaaccaaagtccatcgctgactcacgttgtagccttgcagtcacctcccttgttctttctgcctcttcaagatcttacactccaggatttgatgt

SEQ ID NO: 6674 - DNA, 600 bp, Chicken  19866894190942_5
gaaggcagtggctctacagaatgttcttctgctctggatggatgcgactgcgatgcgcagaagtctctgcattgtgcacttggagtttgatgtcctgtcccacgtcgcctgtgcaccccaaataagcaaacacctcctctggctgatgtcacctcgccattaaaycagaccaaactagaggggaagagagcagaagtatycacacacagtacaaggggcacagacaggacacggagcatgaattccrtaccttcagctgaagatctaggggaagagcagctctcagccaggactccagcygaggccttagcagacaggcaagagttgctctggcctggccacgcaggatgtcctcagggtgcatggatgtgtacgaggactcctgagaaaccaaaacagcaacagtggtgctgaagatcaaagccccaaattgctgtagccaaacccaagggcaaccaaagtccatcgctgactcacgttgtagccttgcagtcacctcccttgttctttctgcctcttcaagatcttacactccaggatttgatgtaatgtcacccccaaagcccatcaaccaggaacaaggaaaggatggacactgtt

SEQ ID NO: 6675 - DNA, 599 bp, Chicken  19866894190945_1
  misc_feature (1)..(49): n is any nucleotide
nnnnnnnnnnnnnnnnnnnnnnnnnnnnnnnnnnnnnnnnnnnnnnnnntacagtgtgcacatcagagaaaggacatctcaggtctgcaggtgccctatcgccacagactctttgaaacacccctgaaaaaaccatcctcagggcagacaactatcagtgcaaacagatctgcttagaagtcccatctgggggagagtttggaaaaggaatacagtgtcctcacgtgcatagagacgatcatataataaaatgatgccctatcatttggaaaagtgaaccaaatcaccaacatcagcacygcagagcaaacggaaagaccattcccacacaggaaaaggggaatttcatggtaattttctcattacatcatgactttgataagcaaagaattccaaaagcacagaaagttgagagcagccatgctgtgcatgctcatatcggctggatccaaacccactgaaacctccaggggttttccatcggctctagcaggcggtttgagctgtctcagctccccattgggggctgatgcggacacagttaaaccctccctcttccagtacggagtcatcaaacacttaaattcccctgggaccat

SEQ ID NO: 6676 - DNA, 600 bp, Chicken  19866894190946_1
agggtgggagattaggcaagtatcgactgtacatgatactgcacagatacagttaattctttacttccccgaggtgaaaggagacctctgaagatcttttccagtcccatggttctatgaggaaaatatgtatccttctaccatgttattctaattctcaaagcttacaaagaaacccttctacacaaacaattgcacatagctacacctagtgcaaccgcagatttttcatacagcaattccttccggacatcaataatcctgactatcgataaaattattgaaaccatttcagatttmaatggcaatacgcagcctttgcttcttgcaactgtaacctgtgactttctttcaasaacataaaacttccaaaatctctctctgcagcctaatacactctaatattctgttcttttcttcataaaactttgttgaccttctgtcaatttctaacctctggaactcacaaacaaaggacccactgtaccctttgattcagctgccaatctgattactttggctggaggaggcaggctgcttaggttgctgaatcagggcctttcattgaaatttctcttttccaacatctgcagcccctgg

SEQ ID NO: 6677 - DNA, 600 bp, Chicken  19866894190946_2
ttctttacttccccgaggtgaaaggagacctctgaagatcttttccagtcccatggttctatgaggaaaatatgtatccttctaccatgttattctaattctcaaagcttacaaagaaacccttctacacaaacaattgcacatagctacacctagtgcaaccgcagatttttcatacagcaattccttccggacatcaataatcctgactatcgataaaattattgaaaccatttcagatttmaatggcaatacgcagcctttgcttcttgcaactgtaacctgtgactttctttcaasaacataaaacttccaaaatctctctctgcagcctaatacactctaatattctgttcttttcttcataaaactttgttgaccttctgtcaatttctaacctctggaactcacaaacaaaggacccactgtaccctttgattcagctgccaatctgattactttggctggaggaggcaggctgcttaggttgctgaatcagggcctttcattgaaatttctcttttccaacatctgcagcccctggcaaccagttgaagagtgggcttggcagacctgtaaagggtggtgaatagtgtacaa

SEQ ID NO: 6678 - DNA, 600 bp, Chicken  19866894190947_1
tgctttgatcacttaacaagagactgcatttcatagaatcatagaatcacagaatcatagaatcatagaatggcctgggttgaaaaggaccacaatgatcatcgagttccaaccccctgctatgtgcagggttaccaaccagcagaccaggctgcccagagccacatccagcctggccttgactgcctccagggatggggcatccacaacctccttgggcaacctgttcagtgcatcaccaccctctgtgtttcaatctgtaactgttttcatacctggtcctctactgcaaatgtcctrttcccattaggcaacggcctcaagttgtgccaggggaggttcaggttsgatattaggaaacatttcttctgcaaaagcgtggtcaggtattggcacagctgcccagggggtggtggagtcagcatccctggaggtgttccagaactgtggagatgtggcactgaggcacgtggtcagtgggcagtattggtggtgggtggatggttggactagattattttagaggttttttccaaccttaatgattctatgattcgggagtgtgatgagttcccaagcaaagagcactgccagatgtgt

SEQ ID NO: 6679 - DNA, 600 bp, Chicken  19866894190947_2
acagaatcatagaatcatagaatggcctgggttgaaaaggaccacaatgatcatcgagttccaaccccctgctatgtgcagggttaccaaccagcagaccaggctgcccagagccacatccagcctggccttgactgcctccagggatggggcatccacaacctccttgggcaacctgttcagtgcatcaccaccctctgtgtttcaatctgtaactgttttcatacctggtcctctactgcaaatgtcctrttcccattaggcaacggcctcaagttgtgccaggggaggttcaggttsgatattaggaaacatttcttctgcaaaagcgtggtcaggtattggcacagctgcccagggggtggtggagtcagcatccctggaggtgttccagaactgtggagatgtggcactgaggcacgtggtcagtgggcagtattggtggtgggtggatggttggactagattattttagaggttttttccaaccttaatgattctatgattcgggagtgtgatgagttcccaagcaaagagcactgccagatgtgtcccctcggggtgtgactgctcacaatctgcatcattcccacacagcct

SEQ ID NO: 6680 - DNA, 600 bp, Chicken  19866894190949_1
agatccctggggtgacaggctgccctccctacctaagattggatatattgatccagaaactgctcttatcaactagagctgcatttgagactttctgggcatgttattacttctgagaattgcacatttgtctctcgagcactgtgtccagaaccctttggcacacagggcaaactcagcgaccccaaatgtctgaagcaaatatcagaacatgatctataattaacagaaatgaatttttagccacttaaatacccagagtatttacacttgactctggaactaaaagtgagattgtgwcatatacctcccacaactgttaataattttgcatgtaagtgcaagggtaaactttaactccgtctgcactgctccacattaaaatgcttttaaaacagtggattgcttagctattccttttgcaaataccaaaatattaaacacagagaatatttaaaaawaatgttttgcttttgaaaacaaatgctatgatgcatttgtaacaaacagaaggacctctttggaatctataggttacgtgtttaactcggactcagakgcgtaaagctgagatactgcagtgtttctactgaagtcggc

SEQ ID NO: 6681 - DNA, 600 bp, Chicken  19866894190949_10
tttcctttaagcttatacaaaatcccctagctataaaatcctgcataatgctctcctggatttatatgtagcaggcatataaattttaactatttcatcgcgggatgcagctttcctcagcaaaaggctcagtatcaatcggtgggaaaaggaaaaaaaagcccatctcctgtttaggtgactaattttaattaattaaccttcagcacaaaattaaaacaggggaagmgtcagcgaaaagccgcatttgccagatagatcactggaactttgcctattactttcggaacgcaacccttyagttgtctaaataatttgatagcataagggcaagcagttaaaaactagagataaagcccatgaattggcttgtaactcaccacagatactattaaaaaaagccagatattctcctatcctatccattattcaagcagattcttctgttcatgggtgtcagatggggaactgatgagtgtgttctggtgaagacagtaagcggatgttaacttcccactgagagaatttctccaggtcgaatagaaaacgttctactaatcatctaccccatgaaagtgccagctgcggcccgtagtagga

SEQ ID NO: 6682 - DNA, 600 bp, Chicken  19866894190949_11
acacccatgaattctgaggcaatgccttttttatactaaactctaaatctacactgtcataaataatggcttcttattctttggtgccaaaaaattatttagtgtcagtccaactggcacctatttatccatacccagaagttcaagccgtaaaatgtgctaacgtgatgtagtgattaagcaaagtagccgatcccatcaccctctccttccttttctattaattatttttacagttttgatttcaagactttggattaaaataaatgaccgggtggggcaggcagataagtgaagtgmaaaagctgatgggtcaaagcatgcttttagmttaatattttgcacatgaagcaacttaatacactatttttataatactcttatttccttaatagtgctaatctaattactgcatgtaaatatagacaaaagaagtgtgtggttatgatttatggtgaaacaccttgacctttattagttaaaataactacgcaagtgtcatgctgccatcaaactctactggagaagcagacagtttctgcaggcatttatgtctttgctcaatgacaggatagactaaacaatttatttgaaattatg

SEQ ID NO: 6683 - DNA, 600 bp, Chicken  19866894190949_12
tatactaaactctaaatctacactgtcataaataatggcttcttattctttggtgccaaaaaattatttagtgtcagtccaactggcacctatttatccatacccagaagttcaagccgtaaaatgtgctaacgtgatgtagtgattaagcaaagtagccgatcccatcaccctctccttccttttctattaattatttttacagttttgatttcaagactttggattaaaataaatgaccgggtggggcaggcagataagtgaagtgmaaaagctgatgggtcaaagcatgcttttagmttaatattttgcacatgaagcaacttaatacactatttttataatactcttatttccttaatagtgctaatctaattactgcatgtaaatatagacaaaagaagtgtgtggttatgatttatggtgaaacaccttgacctttattagttaaaataactacgcaagtgtcatgctgccatcaaactctactggagaagcagacagtttctgcaggcatttatgtctttgctcaatgacaggatagactaaacaatttatttgaaattatgcttcataagaaagaaagattttgaagggtaa

SEQ ID NO: 6684 - DNA, 600 bp, Chicken  19866894190949_13
ttgctcaatgacaggatagactaaacaatttatttgaaattatgcttcataagaaagaaagattttgaagggtaaaaagctcaaaagatgaggaagccaagcttgagcatctcctcctaaacagaaagaaaccaatgttctgtcactttttagcttctgtgcccactcacgtgggtatatataggtgaaatgaacagcataagcatttctaaacaaacatctactttttaagtttgcaatacctagttaaataactaacatttttgatggctgagggatgccgtgacagctccaccgctmccccctttgcacacagaatgctatacgtaaagctcacacaagacatgggagctgatgctcatgctgatggtgtattctcacttctgctattttttaaccccataaaactcactccaggttttagtgtccttaacaattatccagataccaaagcattaagaaagaggagattgacaacaaatcgtcagcttttcctaaggagaggaatggtaaaacaggcagcccgtgacccacctgtctccgtgggtctggtgctttggaccagcaaagctcmgagccagcagtgaggaggaggaggcc

SEQ ID NO: 6685 - DNA, 600 bp, Chicken  19866894190949_14
gggatgccgtgacagctccaccgctcccccctttgcacacagaatgctatacgtaaagctcacacaagacatgggagctgatgctcatgctgatggtgtattctcacttctgctattttttaaccccataaaactcactccaggttttagtgtccttaacaattatccagataccaaagcattaagaaagaggagattgacaacaaatcgtcagcttttcctaaggagaggaatggtaaaacaggcagcccgtgacccacctgtctccgtgggtctggtgctttggaccagcaaagctcmgagccagcagtgaggaggaggaggccaagtgactggtgaaggtcaaagcattcaaatgcaaccacgatgggcgtgtgagctcagcagggctgcaccaacggttcggctgtaattaatggagaaaacagcttcttgcacagattgcagaaagaaaagggtggaagaagtagctagaaagtatgcagctctgaagtcatagggtgtaaggagtaatcttgtcagcaayatcacataccaaacagttcagaagtttcaggaatcctataaaactacctaaagtgatgagcwcaggctggttgg

SEQ ID NO: 6686 - DNA, 600 bp, Chicken  19866894190949_15
agaggaatggtaaaacaggcagcccgtgacccacctgtctccgtgggtctggtgctttggaccagcaaagctcmgagccagcagtgaggaggaggaggccaagtgactggtgaaggtcaaagcattcaaatgcaaccacgatgggcgtgtgagctcagcagggctgcaccaacggttcggctgtaattaatggagaaaacagcttcttgcacagattgcagaaagaaaagggtggaagaagtagctagaaagtatgcagctctgaagtcatagggtgtaaggagtaatcttgtcagcaayatcacataccaaacagttcagaagtttcaggaatcctataaaactacctaaagtgatgagcwcaggctggttggggtctacgatggccttaagtgagccaattcctgctaaaaaacatatgtccctgttcgtaaacattagtcatttcagtgcratatcatgttcatgtgatcgtaagatttccatagcagatcttgcttcctcctaaccagcactgagcaaatgcagaagagctccaatctgtcaccaggcactcaaaaacacatacctaaacacaaggagctactaaaaacaccagtt

SEQ ID NO: 6687 - DNA, 600 bp, Chicken  19866894190949_16
cagcaaagctcmgagccagcagtgaggaggaggaggccaagtgactggtgaaggtcaaagcattcaaatgcaaccacgatgggcgtgtgagctcagcagggctgcaccaacggttcggctgtaattaatggagaaaacagcttcttgcacagattgcagaaagaaaagggtggaagaagtagctagaaagtatgcagctctgaagtcatagggtgtaaggagtaatcttgtcagcaayatcacataccaaacagttcagaagtttcaggaatcctataaaactacctaaagtgatgagcwcaggctggttggggtctacgatggccttaagtgagccaattcctgctaaaaaacatatgtccctgttcgtaaacattagtcatttcagtgcratatcatgttcatgtgatcgtaagatttccatagcagatcttgcttcctcctaaccagcactgagcaaatgcagaagagctccaatctgtcaccaggcactcaaaaacacatacctaaacacaaggagctactaaaaacaccagttccaagcccagtaaattgcagaggacaggaaatccattttataaagcatttcaagaggttaag

SEQ ID NO: 6688 - DNA, 561 bp, Chicken  19866894190949_17
tcagcagggctgcaccaacggttcggctgtaattaatggagaaaacagcttcttgcacagattgcagaaagaaaagggtggaagaagtagctagaaagtatgcagctctgaagtcatagggtgtaaggagtaatcttgtcagcaayatcacataccaaacagttcagaagtttcaggaatcctataaaactacctaaagtgatgagcwcaggctggttggggtctacgatggccttaagtgagccaattcctgctaaaaaacatatgtccctgttcgtaaacattagtcatttcagtgcratatcatgttcatgtgatcgtaagatttccatagcagatcttgcttcctcctaaccagcactgagcaaatgcagaagagctccaatctgtcaccaggcactcaaaaacacatacctaaacacaaggagctactaaaaacaccagttccaagcccagtaaattgcagaggacaggaaatccattttataaagcatttcaagaggttaagcaggagcaaaactgaccattaaagattttcaacagatggtctaaaaaaactta

SEQ ID NO: 6689 - DNA, 600 bp, Chicken  19866894190949_2
cacacagggcaaactcagcgaccccaaatgtctgaagcaaatatcagaacatgatctataattaacagaaatgaatttttagccacttaaatacccagagtatttacacttgactctggaactaaaagtgagattgtgwcatatacctcccacaactgttaataattttgcatgtaagtgcaagggtaaactttaactccgtctgcactgctccacattaaaatgcttttaaaacagtggattgcttagctattccttttgcaaataccaaaatattaaacacagagaatatttaaaaawaatgttttgcttttgaaaacaaatgctatgatgcatttgtaacaaacagaaggacctctttggaatctataggttacgtgtttaactcggactcagakgcgtaaagctgagatactgcagtgtttctactgaagtcggcgatgctgataatgtgggttaagttaagcggccgtttaagtcttagtgggatcaggatcctgcctgcaagtgttatcgcaagcacttctgagcagttcttttgacttcaggggtaagtctgattcacgataatggcagcaaacatttgctttaggaagataa

SEQ ID NO: 6690 - DNA, 600 bp, Chicken  19866894190949_3
agtatttacacttgactctggaactaaaagtgagattgtgwcatatacctcccacaactgttaataattttgcatgtaagtgcaagggtaaactttaactccgtctgcactgctccacattaaaatgcttttaaaacagtggattgcttagctattccttttgcaaataccaaaatattaaacacagagaatatttaaaaawaatgttttgcttttgaaaacaaatgctatgatgcatttgtaacaaacagaaggacctctttggaatctataggttacgtgtttaactcggactcagakgcgtaaagctgagatactgcagtgtttctactgaagtcggcgatgctgataatgtgggttaagttaagcggccgtttaagtcttagtgggatcaggatcctgcctgcaagtgttatcgcaagcacttctgagcagttcttttgacttcaggggtaagtctgattcacgataatggcagcaaacatttgctttaggaagataagactacgatcaaaattccagccttgccagcaccattgcaaatgggctttttcactacagtggctcacaccacgctggtgggaggacccaasgaggaca

SEQ ID NO: 6691 - DNA, 600 bp, Chicken  19866894190949_4
ctcagakgcgtaaagctgagatactgcagtgtttctactgaagtcggcgatgctgataatgtgggttaagttaagcggccgtttaagtcttagtgggatcaggatcctgcctgcaagtgttatcgcaagcacttctgagcagttcttttgacttcaggggtaagtctgattcacgataatggcagcaaacatttgctttaggaagataagactacgatcaaaattccagccttgccagcaccattgcaaatgggctttttcactacagtggctcacaccacgctggtgggaggacccaasgaggacacacatacacctgctctgccagtrgagaacctgacctgctgcagttactgtagattgaaaccccagcaaggagaacatggatctctgacattttacggatagaaaaacactgcacaaagactgacatgtatgytaaacagaggggaatgtgctttaacttgcatcccacgtgccgactctttcattaaaataaacaaagcgtgctcacaacgagctgttacacgttggcagaccctgtgttcaagctgcatggatgagctttatgtgtgccctgcaacatttccatacgccctt

SEQ ID NO: 6692 - DNA, 600 bp, Chicken  19866894190949_5
gtttctactgaagtcggcgatgctgataatgtgggttaagttaagcggccgtttaagtcttagtgggatcaggatcctgcctgcaagtgttatcgcaagcacttctgagcagttcttttgacttcaggggtaagtctgattcacgataatggcagcaaacatttgctttaggaagataagactacgatcaaaattccagccttgccagcaccattgcaaatgggctttttcactacagtggctcacaccacgctggtgggaggacccaasgaggacacacatacacctgctctgccagtrgagaacctgacctgctgcagttactgtagattgaaaccccagcaaggagaacatggatctctgacattttacggatagaaaaacactgcacaaagactgacatgtatgytaaacagaggggaatgtgctttaacttgcatcccacgtgccgactctttcattaaaataaacaaagcgtgctcacaacgagctgttacacgttggcagaccctgtgttcaagctgcatggatgagctttatgtgtgccctgcaacatttccatacgcccttatttacacctctctcaaggcatctttttga

SEQ ID NO: 6693 - DNA, 600 bp, Chicken  19866894190949_6
cagttcttttgacttcaggggtaagtctgattcacgataatggcagcaaacatttgctttaggaagataagactacgatcaaaattccagccttgccagcaccattgcaaatgggctttttcactacagtggctcacaccacgctggtgggaggacccaasgaggacacacatacacctgctctgccagtrgagaacctgacctgctgcagttactgtagattgaaaccccagcaaggagaacatggatctctgacattttacggatagaaaaacactgcacaaagactgacatgtatgytaaacagaggggaatgtgctttaacttgcatcccacgtgccgactctttcattaaaataaacaaagcgtgctcacaacgagctgttacacgttggcagaccctgtgttcaagctgcatggatgagctttatgtgtgccctgcaacatttccatacgcccttatttacacctctctcaaggcatctttttgaccagagttaaataatctgtcacagaaagactgtaaactttctgaaaaagttctggttattataatatttctgcatttatattccatcacatcagtattaaaggctttca

SEQ ID NO: 6694 - DNA, 600 bp, Chicken  19866894190949_7
tttgatattactcggtgtgcatatgctgaagtcattaggttttacactgtactcgaatgatagtaggtttcatattcctattgagttgctttcagtagtcaatgcttctgggtcaagtagtctgacatggggtgatgtgtctcaatacaggggatgagaaaacttctttaagcagctttacacaatgacaagtgcacttccctccacagctttattatgcaatataagcatcaggtcatagaacagtccacagtgtggggatcaaatagaactaaactaaaaaaaagggggggggaaggyaaaaaaaaaaaagatttaaggctaaattaggtgatttaaacattttcctttaagcttatacaaaatcccctagctataaaatcctgcataatgctctcctggatttatatgtagcaggcatataaattttaactatttcatcgcgggatgcagctttcctcagcaaaaggctcagtatcaatcggtgggaaaaggaaaaaaaagcccatctcctgtttaggtgactaattttaattaattaaccttcagcacaaaattaaaacaggggaagmgtcagcgaaaagccgcatttgccagata

SEQ ID NO: 6695 - DNA, 600 bp, Chicken  19866894190949_8
ttgatattactcggtgtgcatatgctgaagtcattaggttttacactgtactcgaatgatagtaggtttcatattcctattgagttgctttcagtagtcaatgcttctgggtcaagtagtctgacatggggtgatgtgtctcaatacaggggatgagaaaacttctttaagcagctttacacaatgacaagtgcacttccctccacagctttattatgcaatataagcatcaggtcatagaacagtccacagtgtggggatcaaatagaactaaactaaaaaaaagggggggggaaggayaaaaaaaaaaagatttaaggctaaattaggtgatttaaacattttcctttaagcttatacaaaatcccctagctataaaatcctgcataatgctctcctggatttatatgtagcaggcatataaattttaactatttcatcgcgggatgcagctttcctcagcaaaaggctcagtatcaatcggtgggaaaaggaaaaaaaagcccatctcctgtttaggtgactaattttaattaattaaccttcagcacaaaattaaaacaggggaagmgtcagcgaaaagccgcatttgccagatag

SEQ ID NO: 6696 - DNA, 600 bp, Chicken  19866894190949_9
taaactaaaaaaaagggggggggaaggaaaaaaaaaaaaagatttaaggctaaattaggtgatttaaacattttcctttaagcttatacaaaatcccctagctataaaatcctgcataatgctctcctggatttatatgtagcaggcatataaattttaactatttcatcgcgggatgcagctttcctcagcaaaaggctcagtatcaatcggtgggaaaaggaaaaaaaagcccatctcctgtttaggtgactaattttaattaattaaccttcagcacaaaattaaaacaggggaagmgtcagcgaaaagccgcatttgccagatagatcactggaactttgcctattactttcggaacgcaacccttyagttgtctaaataatttgatagcataagggcaagcagttaaaaactagagataaagcccatgaattggcttgtaactcaccacagatactattaaaaaaagccagatattctcctatcctatccattattcaagcagattcttctgttcatgggtgtcagatggggaactgatgagtgtgttctggtgaagacagtaagcggatgttaacttcccactgagagaatttc

SEQ ID NO: 6697 - DNA, 600 bp, Chicken  19866894190966_1
gacaaaacttatctaggacccgcacagaaactttactgtatccgtgtctgtatagcccgtgatacagtgctgttaaataagcatttacaaataccattgagtcaatctttccattggcttcaatttcttacagacaaaatcctggttaaacttcagccactctcatttagacatacaatcactaaaaggaccacagtttagaaagaaatactcagtcataccaagatcccttaagtgagggaaggaaaaaaaatgaagctttagtcttcctgattctgtaagcaatgtcaagaacgtctraagagtgaattttaaggctccttccaagttcagtctgaagcaaactaagcatggctgtcaccaaataagagataagaaatccatgtttaaaaattatttcagcttttcagattccaagggtttttatatgcaacagtgaagaaaaacatttttaaaatcaggaaaaatacctggacaagtgtccttttaaggtgcctgatgactggctcactctccaaagatactacagtggggtccaatatcgtgcgaactacatggtggggaagctgatgctactcccaggtacatcacacaaaagga

SEQ ID NO: 6698 - DNA, 599 bp, Chicken  19866894190972_1
  misc_feature (1)..(15): n is any nucleotide
nnnnnnnnnnnnnnnaatgctgcaaatctcgtttattagaagttgttgtatgtgaaacatctacaaaaccaaatagtgccaaagctgttaatccactctgaatttaataattgccttatttatatcccacactctaggaaaaatattgtaattgggatggattatgtagaacatgaggaattacataattaatggaataattaagaaaaacatctgccacaggtcttaccacactttcgctgtgaggacctgcctcagtggctgatttgccacaggcatccagaacatgaacaccatcaytcacactctgcaccacaacactttaaaactagccgtgagtatctgtgcagataagaaggaaaggaggctggtgtcttgaattccacagttcatcctgtctgggttttgcaggttaaggggatttgtgtgtccctgtcagtgagccatcttttgtcagcattaatcagacatggaaacaatgaaaagtatataaatatgtcaagacttgcataggtatctgatgcaatctaaattcgagacagtacatttgcattacctaatgtgtctaaacaaatgtcccataacctgcatttttatgc

SEQ ID NO: 6699 - DNA, 600 bp, Chicken  19866894190978_1
atataaatatatactgtacatctcctctgtataatgtgcaaactctaagcggctggcaagagggcagtggtgatttaatgtaagaaaactgcgctttgctgaaggggctatggactagatagcttgggctgtaacaagaagcctctttgacaaaggcgcagagtggcatcttttcacacaattatatgtgggtcacattaacctctgctgtgcaggattcccttgagctgcttctgtctgcacatcgctgcaaagaaacgaaagcagcaattcctctctccctctctctcacagcatagsgtgatgcagcaaagtgatggagagggagaagggctcccagcttgtcacagcgaacaggttggaaagggaaagagcttcctgctgaatgcaggggcaaactccaccctcagaccaagcactttcattaatcagacgtgttaatcagtgggcagatttgagatcttgagcwgtttagagcactatgatatttggatatacagttacatatagctggagacattttaagtttcactttcagcacatatgccagatgctgctgggaaactctttgaattctgttctgtgaatggagagatggat

SEQ ID NO: 6700 - DNA, 600 bp, Chicken  19866894190978_2
cttttcacacaattatatgtgggtcacattaacctctgctgtgcaggattcccttgagctgcttctgtctgcacatcgctgcaaagaaacgaaagcagcaattcctctctccctctctctcacagcatagsgtgatgcagcaaagtgatggagagggagaagggctcccagcttgtcacagcgaacaggttggaaagggaaagagcttcctgctgaatgcaggggcaaactccaccctcagaccaagcactttcattaatcagacgtgttaatcagtgggcagatttgagatcttgagcwgtttagagcactatgatatttggatatacagttacatatagctggagacattttaagtttcactttcagcacatatgccagatgctgctgggaaactctttgaattctgttctgtgaatggagagatggatggatggaggcaggggaggcattttttcacagactttggaggtacaaattttttcctgtcaagttcaactcaaatctgcaaacagaaatttcatcagagccctcgggatttattaaacagagcaaaggtttctttcacaaaatcagttggctattccacgattctgtttt

SEQ ID NO: 6701 - DNA, 600 bp, Chicken  19866894190980_1
aagatgaagagctattacagggaattatcacagaattaatgtgattctcttgaagaagagcaacatcaagtagaaagatctctacttccctctgtccacagcactggtccagtaaggcccacatgacagggctctgttcttaggtcctaattttactgatctgaacagaggagttcagagaagagctatgtaaaaatccagaagaggagaaagcagttttgagattggccatctgaagaacccaacctcttcgtgcactgcgagagaaggctggatcactgagcacaacatagaacctayagaaaatgacagccaaggaacttccagacttgccgactgagatgctgtacgacccagcagctgtacgctgagtgtaagcaaaattcaagcataattgcttagtgggaagaaagtttgacaagagaacagtttactagacggcagattcgccagtgctgagagactatgggaagattaattttcttctttaaaaaacaaaacaaaacacttttagtcatagatgtttaaggattgtaattgacgtttaactctagaattaatgaaattaatgtttagttccagaacgttcatgaagctaga

SEQ ID NO: 6702 - DNA, 600 bp, Chicken  19866894190982_1
ctgaccaaaatagagaaacctgggcagggcctgtgtgtgggacggggctccagacagcgctctgacagctcagccctgcgtccgttgcagcataagagcagactgtaactaattgtgggaaggtttcatctctaaagctcatgtgaggcgggcctgaattaccagcaatgcagccacagagagcaaaaccatctggagtccctgagaaaggcatcagctcgtgatgtgctgacagggcagaaaggattcctcattcccttatatgaagtactgtgatacaagtgggactgggaggtggarggggagacctgaggggctcacgctgatyttagcatcatcctctgcctccctgctcctgtgctgtgcagatcttttgccagtccttacactgctgggaggattcagtgcttttagcatgctggtggttatgggcttctaaccaccacggtctgcatgtaccatctgcctgaaaacaactccgtgtggctgagatgcttcagcgtggagtttccatagccctggccaggagcacgttccacaggagggagcagtttgaagccggtggtttgttttgattcaaattgagatttaaatcaaaac

SEQ ID NO: 6703 - DNA, 600 bp, Chicken  19866894190982_2
gcctgtgtgtgggacggggctccagacagcgctctgacagctcagccctgcgtccgttgcagcataagagcagactgtaactaattgtgggaaggtttcatctctaaagctcatgtgaggcgggcctgaattaccagcaatgcagccacagagagcaaaaccatctggagtccctgagaaaggcatcagctcgtgatgtgctgacagggcagaaaggattcctcattcccttatatgaagtactgtgatacaagtgggactgggaggtggarggggagacctgaggggctcacgctgatyttagcatcatcctctgcctccctgctcctgtgctgtgcagatcttttgccagtccttacactgctgggaggattcagtgcttttagcatgctggtggttatgggcttctaaccaccacggtctgcatgtaccatctgcctgaaaacaactccgtgtggctgagatgcttcagcgtggagtttccatagccctggccaggagcacgttccacaggagggagcagtttgaagccggtggtttgttttgattcaaattgagatttaaatcaaaacacggcatgcagggctggggcagagagca

SEQ ID NO: 6704 - DNA, 599 bp, Chicken  19866894190984_1
  misc_feature (1)..(62): n is any nucleotide
nnnnnnnnnnnnnnnnnnnnnnnnnnnnnnnnnnnnnnnnnnnnnnnnnnnnnnnnnnnnnnattttgctggcgcatcctattttactacagaaacaatctaacctaggagtgcgtggaattacctaaatgctgtgtagatgcactcactggaaagggagacgctgcttaattgtcagcatgcttttgcctctttgcttgagtttgaaacagtggtcaaacaccttcagatcaagttacttgttgaggtgatgagacaaaaaactagcctttagggtgaaaataaaagttttcactgaayttatcattctgcaagctgtgtaatgactgcatctggcatcakacacaaccagaagagrtgaagggtgccttacagtasaagtctgtaccttttggtgtagcgtcaaattgcagcttaagccttaaaaggaaagacttgtaaaacatgttttcttcaacatttcctaccacagttgctgttctctcacctcctgactcctgttccacatttgatttgatttcatgctctggatgacagcctgtcttctgttttgttttcagtgagggaaacagtttcaccatcaggtttgatggaggtcc

SEQ ID NO: 6705 - DNA, 599 bp, Chicken  19866894190984_2
  misc_feature (1)..(20): n is any nucleotide
nnnnnnnnnnnnnnnnnnnnattttgctggcgcatcctattttactacagaaacaatctaacctaggagtgcgtggaattacctaaatgctgtgtagatgcactcactggaaagggagacgctgcttaattgtcagcatgcttttgcctctttgcttgagtttgaaacagtggtcaaacaccttcagatcaagttacttgttgaggtgatgagacaaaaaactagcctttagggtgaaaataaaagttttcactgaayttatcattctgcaagctgtgtaatgactgcatctggcatcakacacaaccagaagagrtgaagggtgccttacagtasaagtctgtaccttttggtgtagcgtcaaattgcagcttaagccttaaaaggaaagacttgtaaaacatgttttcttcaacatttcctaccacagttgctgttctctcacctcctgactcctgttccacatttgatttgatttcatgctctggatgacagcctgtcttctgttttgttttcagtgagggaaacagtttcaccatcaggtttgatggaggtccatttgaatcgctgtccactacagactgcttagactgttcttc

SEQ ID NO: 6706 - DNA, 599 bp, Chicken  19866894190984_3
  misc_feature (1)..(4): n is any nucleotide
nnnnattttgctggcgcatcctattttactacagaaacaatctaacctaggagtgcgtggaattacctaaatgctgtgtagatgcactcactggaaagggagacgctgcttaattgtcagcatgcttttgcctctttgcttgagtttgaaacagtggtcaaacaccttcagatcaagttacttgttgaggtgatgagacaaaaaactagcctttagggtgaaaataaaagttttcactgaayttatcattctgcaagctgtgtaatgactgcatctggcatcakacacaaccagaagagrtgaagggtgccttacagtasaagtctgtaccttttggtgtagcgtcaaattgcagcttaagccttaaaaggaaagacttgtaaaacatgttttcttcaacatttcctaccacagttgctgttctctcacctcctgactcctgttccacatttgatttgatttcatgctctggatgacagcctgtcttctgttttgttttcagtgagggaaacagtttcaccatcaggtttgatggaggtccatttgaatcgctgtccactacagactgcttagactgttcttcccccctctttgaggca

SEQ ID NO: 6707 - DNA, 600 bp, Chicken  19866894190984_4
ctattttactacagaaacaatctaacctaggagtgcgtggaattacctaaatgctgtgtagatgcactcactggaaagggagacgctgcttaattgtcagcatgcttttgcctctttgcttgagtttgaaacagtggtcaaacaccttcagatcaagttacttgttgaggtgatgagacaaaaaactagcctttagggtgaaaataaaagttttcactgaayttatcattctgcaagctgtgtaatgactgcatctggcatcakacacaaccagaagagrtgaagggtgccttacagtasaagtctgtaccttttggtgtagcgtcaaattgcagcttaagccttaaaaggaaagacttgtaaaacatgttttcttcaacatttcctaccacagttgctgttctctcacctcctgactcctgttccacatttgatttgatttcatgctctggatgacagcctgtcttctgttttgttttcagtgagggaaacagtttcaccatcaggtttgatggaggtccatttgaatcgctgtccactacagactgcttagactgttcttcccccctctttgaggcaacttttctctttaatgtttta

SEQ ID NO: 6708 - DNA, 600 bp, Chicken  19866894190984_5
tcaaactcaaacttattcctgtttacacaagacatgcttctttggtgttctgaagcttttccaaccttctggtttggctgtgcactactatctttgtctgacaagtcaaggctggcactcccatttttgctttctttgctgatatttgtagcagaacttccataatctaacaattctggatcactttctctatggctcacaaaggatgtcttaacatcttcattttcatattttaaagtggtctcaaattcttgctcagaatctgtagtactatcaccattttcttcatctttgtcttcrttttcaatccactgagtactttttaaagcaggagctgctgtcatggaagaagctgaaaacattacactatctgctttattcaaaggatccttcagcctagaagctgtttctgaatttaagactgtatgcttaactgctttatcatttttatttcccwctgctacacattctgcctttttcttattaatgagtttaactgcaagctcctttacttgctgctgttttgccttgataggggtagaggacattctgcgtccttgtgaagtttgctgatcttgatctaagatcctttgcacaaat

SEQ ID NO: 6709 - DNA, 546 bp, Chicken  19866894190984_6
ttccataatctaacaattctggatcactttctctatggctcacaaaggatgtcttaacatcttcattttcatattttaaagtggtctcaaattcttgctcagaatctgtagtactatcaccattttcttcatctttgtcttcrttttcaatccactgagtactttttaaagcaggagctgctgtcatggaagaagctgaaaacattacactatctgctttattcaaaggatccttcagcctagaagctgtttctgaatttaagactgtatgcttaactgctttatcatttttatttcccwctgctacacattctgcctttttcttattaatgagtttaactgcaagctcctttacttgctgctgttttgccttgataggggtagaggacattctgcgtccttgtgaagtttgctgatcttgatctaagatcctttgcacaaatgaagaattacttgagaaagatatttcatctgcagcctgttctagaaacaaaaattcatctaattccagattctctttttccttttctttttcccagttttcca

SEQ ID NO: 6710 - DNA, 600 bp, Chicken  19866894190991_1
ctttcctgtccttcactcacttaatacttgcacaactttttgtgaagccacaccaccaagctgagcagaaaatgtttttctggcaaatcaaaccaaaaacacagcatggccccacaaagagctgcgcgagcacaagcaaagaggcagcgcaggaatggcagccaggggaggaaggaaaaaggacatgaattgctttgagctcatattgctgctgactactttctattctaaaaccataacctaatacactctcaagactacggctctgaactgcttcccatggtgcatctccctccctgygcagaaccctctgggctgcacgccgctgcagaracgtgcctgtgctgggaggcttgcaggctcgggcactgcactctgttatactttccattattcattgaggagaggataaccccagcagtgcttgtaaacacaacggcttccttgagaagcaacrgcaaaacccataaggaaggctttccttgtaagcgaaccgcctgccctgggagggctgtcctccccagggagctgggctgtgggaagcaggagcaaggaactgcctttttaggagcgtggctgagcagagccaggaagtgctgg

SEQ ID NO: 6711 - DNA, 600 bp, Chicken  19866894190991_2
aactttttgtgaagccacaccaccaagctgagcagaaaatgtttttctggcaaatcaaaccaaaaacacagcatggccccacaaagagctgcgcgagcacaagcaaagaggcagcgcaggaatggcagccaggggaggaaggaaaaaggacatgaattgctttgagctcatattgctgctgactactttctattctaaaaccataacctaatacactctcaagactacggctctgaactgcttcccatggtgcatctccctccctgygcagaaccctctgggctgcacgccgctgcagaracgtgcctgtgctgggaggcttgcaggctcgggcactgcactctgttatactttccattattcattgaggagaggataaccccagcagtgcttgtaaacacaacggcttccttgagaagcaacrgcaaaacccataaggaaggctttccttgtaagcgaaccgcctgccctgggagggctgtcctccccagggagctgggctgtgggaagcaggagcaaggaactgcctttttaggagcgtggctgagcagagccaggaagtgctggggcaggagtggggctcccgcagcagctggcaag

SEQ ID NO: 6712 - DNA, 600 bp, Chicken  19866894190991_3
gcagccaggggaggaaggaaaaaggacatgaattgctttgagctcatattgctgctgactactttctattctaaaaccataacctaatacactctcaagactacggctctgaactgcttcccatggtgcatctccctccctgygcagaaccctctgggctgcacgccgctgcagaracgtgcctgtgctgggaggcttgcaggctcgggcactgcactctgttatactttccattattcattgaggagaggataaccccagcagtgcttgtaaacacaacggcttccttgagaagcaacrgcaaaacccataaggaaggctttccttgtaagcgaaccgcctgccctgggagggctgtcctccccagggagctgggctgtgggaagcaggagcaaggaactgcctttttaggagcgtggctgagcagagccaggaagtgctggggcaggagtggggctcccgcagcagctggcaagccttttaaggacaaacacaggtatttctccagcctgctgttcgagctgtgctaggtagcacagcaaggtgtggaaggcttggccggccactggccgcagrgaccatcggccacagccatcctgc

SEQ ID NO: 6713 - DNA, 600 bp, Chicken  19866894190991_4
caacggcttccttgagaagcaacrgcaaaacccataaggaaggctttccttgtaagcgaaccgcctgccctgggagggctgtcctccccagggagctgggctgtgggaagcaggagcaaggaactgcctttttaggagcgtggctgagcagagccaggaagtgctggggcaggagtggggctcccgcagcagctggcaagccttttaaggacaaacacaggtatttctccagcctgctgttcgagctgtgctaggtagcacagcaaggtgtggaaggcttggccggccactggccgcagrgaccatcggccacagccatcctgcacactgcaaacctactggctggccgtgtggcacttccaataggccttattaggaaggcaagaagcttaattaatcattttcagatctgcaaagccagatggtttgtgggtgaactgtacgtgattttaatgtgacattttaaggcgttcaaggcaacattttggagtgcgtcaggagtctttctaactacctaaataagagggcagattttcagaggtgatgagcaactggattgtctttagactttaacagaaggggcaggatactcacagcctc

SEQ ID NO: 6714 - DNA, 599 bp, Chicken  19866894190994_1
  misc_feature (1)..(135): n is any nucleotide
nnnnnnnnnnnnnnnnnnnnnnnnnnnnnnnnnnnnnnnnnnnnnnnnnnnnnnnnnnnnnnnnnnnnnnnnnnnnnnnnnnnnnnnnnnnnnnnnnnnnnnnnnnnnnnnnnnnnnnnnnnnnnnnnnnnnnnntttatggtacgatacacagacaatccaatccgctcccgaaaacaaggttcgcgcagttgcactcctccacaacggtccctttaaactcgatagcttccttgtattttctttccccttgaattgagacacctctctgaggtgctgcgtcggggtcctcgaggaaawttcagaaaacccccgaggatggcccaggacagagcagcacggggcagtgccgtgcctgggagcagggcaggagcagtgcctckcttggggataaactcccaccaaagaacaaaaccagaatggggatatccgcatttcactcactctggaaaaaaaaaaccaccaaccctgaaacataggttttgtcattcaattacctgctgattccttgcaaggcaggtgagaaataaccggggagcaccagctggactctcgagccctaccagacaaccagcacaagtttcctaacacatacttca

SEQ ID NO: 6715 - DNA, 599 bp, Chicken  19866894190994_2
  misc_feature (1)..(52): n is any nucleotide
nnnnnnnnnnnnnnnnnnnnnnnnnnnnnnnnnnnnnnnnnnnnnnnnnnnntttatggtacgatacacagacaatccaatccgctcccgaaaacaaggttcgcgcagttgcactcctccacaacggtccctttaaactcgatagcttccttgtattttctttccccttgaattgagacacctctctgaggtgctgcgtcggggtcctcgaggaaawttcagaaaacccccgaggatggcccaggacagagcagcacggggcagtgccgtgcctgggagcagggcaggagcagtgcctckcttggggataaactcccaccaaagaacaaaaccagaatggggatatccgcatttcactcactctggaaaaaaaaaaccaccaaccctgaaacataggttttgtcattcaattacctgctgattccttgcaaggcaggtgagaaataaccggggagcaccagctggactctcgagccctaccagacaaccagcacaagtttcctaacacatacttcaacaagaacaaagtgtgtttttatctcaatttgaggcacgcattgaaaactaccttcacttgcgtaatgtgcacagcaaagtta

SEQ ID NO: 6716 - DNA, 600 bp, Chicken  19866894191015_1
catcagcatgctcaggattccgcaaggatcattaaggtgtcatactgacccactcacaccagcagaaagggacctctcagtgctcacagcagtgtgggcctttttctctgaatcctggaggctacttatctacagcttaagatccagggagatctgcacagattccctgaaatcacttctgccagaaaaactgccactggttaacaaaacgtgcatagcagctgtgacaaaactctttccttaagttgtatgtgttgattttttcaattattaatgaaatgcacaggcaaccttgtgccmaatttgcacaacattatcctattcacaacagcattattcttcaaagcaacaccagttgagcatgttagcaaacacagcaagtatccataattgtcagatcacctcatgccattcagcaggcaccaaagataataatacttaattcattatgagcaccaagagccaaaaaagaacatgactcacctttgaaaatactggcacaaggaatactgtacrgctctatggaaaaacagcttacaagtctatttaatatgttataggagtgctattacagaacactgtatatctttatacttatgc

SEQ ID NO: 6717 - DNA, 600 bp, Chicken  19866894191015_2
agcagctgtgacaaaactctttccttaagttgtatgtgttgattttttcaattattaatgaaatgcacaggcaaccttgtgccmaatttgcacaacattatcctattcacaacagcattattcttcaaagcaacaccagttgagcatgttagcaaacacagcaagtatccataattgtcagatcacctcatgccattcagcaggcaccaaagataataatacttaattcattatgagcaccaagagccaaaaaagaacatgactcacctttgaaaatactggcacaaggaatactgtacrgctctatggaaaaacagcttacaagtctatttaatatgttataggagtgctattacagaacactgtatatctttatacttatgcatccctttagaagacctagtctgaagcataaagggtcagcacactagtaaaaccaaagatctataggccaattacagattacaacccagaagggaaagaaagatcaattttagaccctgcattggctgctactggactctattcttcactgtttactttcagaatttcagtgattataaattcatatctgcatatgggaattaattaatatcactc

SEQ ID NO: 6718 - DNA, 600 bp, Chicken  19866894191016_1
gactgaaataagacattcttgaaatacttactaaaggcaaaggatagattcattctggcacaaagcctgtgaattcagcttgctggtgaaattgcataatgttcatttacagatagctgggaaaaataaattcaagttttataaaaggaattacttttctcctctctctacagaggaatttgggctaagtggccaaggcactcatattttaagaacatgcatttggtaatctgcaagtgtagaaaataatttatattggaaattctttatgctaaagaaccaataaggtatttcacatcryacaaagctttctgtatgcaaacgaggagaaaaatcacrtgcagtagaacaccagttccaatgaaatatgcttctcactccagctcctgtttcatgaatagaatccaggccctgagaaatgggctccatcttgtaagagagccatcatacaaaacacttttgtgccacttatagacattaagagaactaacagttcaaaccctactcacacttccagaaattaactccaagtcccaaagtggtgctgttacaaatctggaagtcaaactgtgtcctaaatttttctattcaggagttgga

SEQ ID NO: 6719 - DNA, 600 bp, Chicken  19866894191016_2
actgaaataagacattcttgaaatacttactaaaggcaaaggatagattcattctggcacaaagcctgtgaattcagcttgctggtgaaattgcataatgttcatttacagatagctgggaaaaataaattcaagttttataaaaggaattacttttctcctctctctacagaggaatttgggctaagtggccaaggcactcatattttaagaacatgcatttggtaatctgcaagtgtagaaaataatttatattggaaattctttatgctaaagaaccaataaggtatttcacatcryacaaagctttctgtatgcaaacgaggagaaaaatcacrtgcagtagaacaccagttccaatgaaatatgcttctcactccagctcctgtttcatgaatagaatccaggccctgagaaatgggctccatcttgtaagagagccatcatacaaaacacttttgtgccacttatagacattaagagaactaacagttcaaaccctactcacacttccagaaattaactccaagtcccaaagtggtgctgttacaaatctggaagtcaaactgtgtcctaaatttttctattcaggagttggac

SEQ ID NO: 6720 - DNA, 600 bp, Chicken  19866894191016_3
aaggatagattcattctggcacaaagcctgtgaattcagcttgctggtgaaattgcataatgttcatttacagatagctgggaaaaataaattcaagttttataaaaggaattacttttctcctctctctacagaggaatttgggctaagtggccaaggcactcatattttaagaacatgcatttggtaatctgcaagtgtagaaaataatttatattggaaattctttatgctaaagaaccaataaggtatttcacatcryacaaagctttctgtatgcaaacgaggagaaaaatcacrtgcagtagaacaccagttccaatgaaatatgcttctcactccagctcctgtttcatgaatagaatccaggccctgagaaatgggctccatcttgtaagagagccatcatacaaaacacttttgtgccacttatagacattaagagaactaacagttcaaaccctactcacacttccagaaattaactccaagtcccaaagtggtgctgttacaaatctggaagtcaaactgtgtcctaaatttttctattcaggagttggacctgatgatccttatgggtccctttcaactcaggatagc

SEQ ID NO: 6721 - DNA, 582 bp, Chicken  19866894191021_1
atgttcgcaggtgccttacactgtcatgctagttacactatgtataatcagctagggaagtgcgtgtgatgagaatctgagcacctacagaatacgtgctgttaatctctttggaatgacagtgtttgtgttgaaagatagcggaggagccttgtgtgcctgtcactagtcctctctacagaacctgtgctgctatattctagaaaatgcatttccattctgcagtcctacagtatggtactacttagcttgcttgcattactttatccccagatatttcataatgggcctcagagctgrgactgccgtacgatgaaaacatgtgatcttactggaagtctgtgaagagtctttacgtagttttaatgtggttgtccaaaatataaaaatttgcaaagctttcttcaccgtgagtgtgtaaatattataccactgtatttcatggatttgattatgatttaggtgcagtaaatcagcatgtcttgtattaaggagttatatatatgctgcagtggcttaataactctgaattagagaacttctggtgtatgatggggtgtttaaatttggattgtctcttta

SEQ ID NO: 6722 - DNA, 600 bp, Chicken  19866894191025_1
tttcttagactgtaaatggtccagattgttaaatggatttggtaatgaaaaaaaaaaaggagaatagatgtcaaccacatagcattttaagggtctgtagatctgctgtggagtttcagattactataaagataggaactacacatactatgattagacatgtcttttgtgttcttttctgaggttttggtgtttttatccatttttagtatgtgggagcttttggtgtctaaagctttttgtgtcttttggtgtctacaaaacatgataaactaatctggacgtggaagtaatttttgytttggttttaacttggtattaatattgtcattttcagctgcttagatgaagagtcctgtgtaatcataagttgctatattttaagccagggcacctctggtttttcaagcatatctatttaccttttctatacagaggcaagaacgatttaattaactctgcatcattcttgctgcatgactagtgtaagccttaaacatcttcaacggccttggattaacagagacaaagctacaattgaaaagtcgtaraaagttgacagtgaagtgctgactaatgtgttcttgggaaggttcctca

SEQ ID NO: 6723 - DNA, 466 bp, Chicken  19866894191025_2
gtgtctacaaaacatgataaactaatctggacgtggaagtaatttttgytttggttttaacttggtattaatattgtcattttcagctgcttagatgaagagtcctgtgtaatcataagttgctatattttaagccagggcacctctggtttttcaagcatatctatttaccttttctatacagaggcaagaacgatttaattaactctgcatcattcttgctgcatgactagtgtaagccttaaacatcttcaacggccttggattaacagagacaaagctacaattgaaaagtcgtaraaagttgacagtgaagtgctgactaatgtgttcttgggaaggttcctcaaactccaggcatgttgctagttggacagacatttaattttttctacatactttcagtgatctacagtgtatttaaggatatatttatcatattctttccagagtaggatacacattt

SEQ ID NO: 6724 - DNA, 600 bp, Chicken  19866894191026_1
tgtgatcttgctcaattttgtatgagatcatgtacggaataatagtgagggaattaatacacagcttatgtaaccctcagtcaacttgcctgcgctgtttctagtgtaagagctcattagcttaaaccagatagtattacacatgtatttctgtagagaattggactgcatttgccccagatcagcaacctgattccaaactgaaagctctttaagcagaagctctggttttattcgtgctgcaccaaacacaccacacaatctgtaactcagggggcggtgaggccctggcacagctgygatgccccatccttggaggcactccaggccaggttggatggggcctgggggggcagccctgcccgctgctgggggttggggctgggtgggcttcaaagtcccatccaacccaaaccgttccgtgacataacacttaatatttctagcatgctgtcagtcctgtaatctcctaagaattttgcctcttctgtgagagtasatagtggatgtgtggggggaaaaagaaaatagcatgacttttttggattgcagcctctacagtttggataaagggaagtatatgtactgtgtttgggtgtg

SEQ ID NO: 6725 - DNA, 600 bp, Chicken  19866894191026_2
gtgagggaattaatacacagcttatgtaaccctcagtcaacttgcctgcgctgtttctagtgtaagagctcattagcttaaaccagatagtattacacatgtatttctgtagagaattggactgcatttgccccagatcagcaacctgattccaaactgaaagctctttaagcagaagctctggttttattcgtgctgcaccaaacacaccacacaatctgtaactcagggggcggtgaggccctggcacagctgygatgccccatccttggaggcactccaggccaggttggatggggyctgggggggcagccctgcccgctgctgggggttggggctgggtgggcttcaaagtcccatccaacccaaaccgttccgtgacataacacttaatatttctagcatgctgtcagtcctgtaatctcctaagaattttgcctcttctgtgagagtasatagtggatgtgtggggggaaaaagaaaatagcatgacttttttggattgcagcctctacagtttggataaagggaagtatatgtactgtgtttgggtgtgctgagtgctatgtagtctgcattgccrcgctaggcactgctctt

SEQ ID NO: 6726 - DNA, 600 bp, Chicken  19866894191026_3
actgaaagctctttaagcagaagctctggttttattcgtgctgcaccaaacacaccacacaatctgtaactcagggggcggtgaggccctggcacagctgygatgccccatccttggaggcactccaggccaggttggatggggcctgggggggcagccctgcccgctgctgggggttggggctgggtgggcttcaaagtcccatccaacccaaaccgttccgtgacataacacttaatatttctagcatgctgtcagtcctgtaatctcctaagaattttgcctcttctgtgagagtasatagtggatgtgtggggggaaaaagaaaatagcatgacttttttggattgcagcctctacagtttggataaagggaagtatatgtactgtgtttgggtgtgctgagtgctatgtagtctgcattgccrcgctaggcactgctctttgcttcagttttcccgttgcattttataaatggtagctgtgggaactgtcgctaggcagtaggagggtttttttcttcctctaaggctgttagtgtttgtaaacaatgctttgtcagcagtgaaattcagaataggaaaggtggtgtgaggacta

SEQ ID NO: 6727 - DNA, 600 bp, Chicken  19866894191026_4
gccaggttggatggggcctgggggggcagccctgcccgctgctgggggttggggctgggtgggcttcaaagtcccatccaacccaaaccgttccgtgacataacacttaatatttctagcatgctgtcagtcctgtaatctcctaagaattttgcctcttctgtgagagtasatagtggatgtgtggggggaaaaagaaaatagcatgacttttttggattgcagcctctacagtttggataaagggaagtatatgtactgtgtttgggtgtgctgagtgctatgtagtctgcattgccrcgctaggcactgctctttgcttcagttttcccgttgcattttataaatggtagctgtgggaactgtcgctaggcagtaggagggtttttttcttcctctaaggctgttagtgtttgtaaacaatgctttgtcagcagtgaaattcagaataggaaaggtggtgtgaggactaaaagaactgcttaactctctgtgtttcttaagaagtgaaacacctctcttatgtaacacgagaccattttttttcaagaagactgttgctttgagccatctcaagaacagcaaaaacaaagcaaaaaa

SEQ ID NO: 6728 - DNA, 600 bp, Chicken  19866894191027_1
gcccgttattttatattctgttttatgactgtaagtagagtactgtttcctagaagttaagccatgcttttatttaaaacagacaaaatcggtatccattgaaaaaggttgtcagctggttgatcctaaataattccactgtttagttactcgttgctccttaggatcattgtgaatgaacaatacaggcaaccttcagactaagccttgtacttaaaatccatatctgatgctattctgtcccaaagctgatttacagaaagaattttagttttctgattttactgtcagtacacttakttgttagaagccacagtttgcagatgaactgcatgagagataaaagcccattgaagctactgtcacartgagcactgcactgttgttgatgctgtggatttggctttccagcagtttgtgtgctctattctttgtagatccaggaagggcgaaaccaaaatggagtgtttaaccatgtgaggaattcttaaaaataatacttcattattaaagatgaagcactgaagcactcggactgtttcattcttctagtgaggcagatggattaagataatgtggtaaacttagctaatgacaaat

SEQ ID NO: 6729 - DNA, 600 bp, Chicken  19866894191027_2
tttatttaaaacagacaaaatcggtatccattgaaaaaggttgtcagctggttgatcctaaataattccactgtttagttactcgttgctccttaggatcattgtgaatgaacaatacaggcaaccttcagactaagccttgtacttaaaatccatatctgatgctattctgtcccaaagctgatttacagaaagaattttagttttctgattttactgtcagtacacttakttgttagaagccacagtttgcagatgaactgcatgagagataaaagcccattgaagctactgtcacartgagcactgcactgttgttgatgctgtggatttggctttccagcagtttgtgtgctctattctttgtagatccaggaagggcgaaaccaaaatggagtgtttaaccatgtgaggaattcttaaaaataatacttcattattaaagatgaagcactgaagcactcggactgtttcattcttctagtgaggcagatggattaagataatgtggtaaacttagctaatgacaaatgcagacatgcatctgtttcttactcactttagatatttttccatgctcagcagcttacttagtgagct

SEQ ID NO: 6730 - DNA, 583 bp, Chicken  19866894191027_3
gtttcttactcactttagatatttttccatgctcagcagcttacttagtgagctacagaagggacagtgtgcaagttccacagattcatttccaaattcataagcacttctggactgtgtatactatgtatgcatgtgtatgctatggtatacatgctgtgacttagatgagtaagtgctgctcatggtgtgcacgctattaggttagatctccctctttgcttaacctgctttcccaaactgtgttcaatatgctctcatgagaagtgctccaatctctcttcagcatcttgaaaaaawgaatatggcagtcataacagctgtgataatgtgggtttttttggaaaacgtgatgccagtgctgcccatgccttctcttgatgttttacctactggtaatttcagtttatataatagtctgttttgaagagaaagtccttccgtaccgcacacatcaagactgtccttaacagcctgattttcctgtatctccagactgagattataccaattatgtaaataacagaactacaaaaaaaatcccaccttgctgaaggaacatgtttatactttgaatctacaa

SEQ ID NO: 6731 - DNA, 600 bp, Chicken  19866894191030_1
gtctccagtgctgtgctgggcatggaacaccttaaccagttagaggtgatttctctttgatagcatgagttgcaaatcatttcaaatctttcctgattatgtcttttatggtgtttttagtgagaacaggtgaactttgtagcccaaaccgaaaaaaacctgcacatttcctagaactctaggaaaacaagcgtaagaaaaaatggtacatgtttttaattaacgtaccctactccactcactgtaagaatcgggcccagagctcacgcttatgtcatgggccaccagaagctgaggccygcactggggggaggctgcaggtcaccaggcggccatgggtgccagcaagcagacacagtgctcctcagtactgctcagcactgccagcatgctgttgggaaatggctagcactgccacacctttgcaggcctgcaatgaaaccattgtccctgcatgccctgagccagagtctggattgcttagtggtgaacatcctcttcacctcctccacacaacgatttatgcaattatgttctattaggacactccaaacagacaaattatcatgagcacacgcagtgccctggatgaccctagtg

SEQ ID NO: 6732 - DNA, 600 bp, Chicken  19866894191038_1
aaagacagagcttttaaaagtgatgtctccgagggtatgtagcccctccctacttagaaggtaaataatacccctttaaaaatgccacactttggcataatttgaagtgactgttggcacttggtgcaaatgtgactacagatagggtgaacacttatactgaactgaattttcccatcaaaacagtaagtttgattaggcaataaatatgaagtaaagttgttaatagattaaaaaggattacctcattttcttggggagttcgagccatggttttgagccatgtgagagtcatctttkttatcatttcagtgcaaagggaaaccacagctcagtgactggaattaactaaaagaactcgattgtattcctgcctgtaacaaagttgaggcagcgttagcctgttgargatkggagtagaaagtaaaacaaaaaatatttccaagattcgctcttgagtgtttcagagcatgcttttaattctggaatgagctttcagaaatcactgtgatgtgctatattaagtggaaaaggaagggtatttaatgaaccccaaactatactgagtaaacctggtgcaatttctgcattgtccactag

SEQ ID NO: 6733 - DNA, 600 bp, Chicken  19866894191038_2
actgttggcacttggtgcaaatgtgactacagatagggtgaacacttatactgaactgaattttcccatcaaaacagtaagtttgattaggcaataaatatgaagtaaagttgttaatagattaaaaaggattacctcattttcttggggagttcgagccatggttttgagccatgtgagagtcatctttkttatcatttcagtgcaaagggaaaccacagctcagtgactggaattaactaaaagaactcgattgtattcctgcctgtaacaaagttgaggcagcgttagcctgttgargatkggagtagaaagtaaaacaaaaaatatttccaagattcgctcttgagtgtttcagagcatgcttttaattctggaatgagctttcagaaatcactgtgatgtgctatattaagtggaaaaggaagggtatttaatgaaccccaaactatactgagtaaacctggtgcaatttctgcattgtccactagatgatgcagctgtattacagagaaatagaatttacggcatagctatgtgcaactgtaattctatatactatattttagtagtagacaatgtagttttcaatgggtacac

SEQ ID NO: 6734 - DNA, 600 bp, Chicken  19866894191038_3
ttggcacttggtgcaaatgtgactacagatagggtgaacacttatactgaactgaattttcccatcaaaacagtaagtttgattaggcaataaatatgaagtaaagttgttaatagattaaaaaggattacctcattttcttggggagttcgagccatggttttgagccatgtgagagtcatctttkttatcatttcagtgcaaagggaaaccacagctcagtgactggaattaactaaaagaactcgattgtattcctgcctgtaacaaagttgaggcagcgttagcctgttgargatkggagtagaaagtaaaacaaaaaatatttccaagattcgctcttgagtgtttcagagcatgcttttaattctggaatgagctttcagaaatcactgtgatgtgctatattaagtggaaaaggaagggtatttaatgaaccccaaactatactgagtaaacctggtgcaatttctgcattgtccactagatgatgcagctgtattacagagaaatagaatttacggcatagctatgtgcaactgtaattctatatactatattttagtagtagacaatgtagttttcaatgggtacactgta

SEQ ID NO: 6735 - DNA, 600 bp, Chicken  19866894191048_1
ttcaaagatttgttttagtaaattagagtattgcccatgctattgcctagcataacttttactcagaggataaaaaatgatttttgctatgtatatttgtttcacaatagagtttaagcagatataaattaagaagagttgtatactgctttatgtggtaccacttccatttccataattataagttgaaactcctaataatgtgctagttactttattcgcttttatgatgtgctttgcacacaaaattatattctggttatgtaagtgacaagtacctcagaggctgaggttgttctsaaatgtacagtacctgygctatggctagaactgctgaccacaaaacacaggattttcctctaygtccatttccagtgagcagtgcagagcaagaatcaaaatctcttgtttaacttctaataataataaaaaagtggcttattttttaaataatcaacttttgtgyatttaaaaaaattgtggctgaactatttttggtagagtgaattttcaaactgtgagatgtagtctaggatttcactagaaatgtttacaggccttcagcctttggcaaaaatagcatcgttttgataagtagtc

SEQ ID NO: 6736 - DNA, 600 bp, Chicken  19866894191048_2
gtaaattagagtattgcccatgctattgcctagcataacttttactcagaggataaaaaatgatttttgctatgtatatttgtttcacaatagagtttaagcagatataaattaagaagagttgtatactgctttatgtggtaccacttccatttccataattataagttgaaactcctaataatgtgctagttactttattcgcttttatgatgtgctttgcacacaaaattatattctggttatgtaagtgacaagtacctcagaggctgaggttgttctsaaatgtacagtacctgygctatggctagaactgctgaccacaaaacacaggattttcctctaygtccatttccagtgagcagtgcagagcaagaatcaaaatctcttgtttaacttctaataataataaaaaagtggcttattttttaaataatcaacttttgtgyatttaaaaaaattgtggctgaactatttttggtagagtgaattttcaaactgtgagatgtagtctaggatttcactagaaatgtttacaggccttcagcctttggcaaaaatagcatcgttttgataagtagtcttaactgatagttctct

SEQ ID NO: 6737 - DNA, 600 bp, Chicken  19866894191048_3
cagaggataaaaaatgatttttgctatgtatatttgtttcacaatagagtttaagcagatataaattaagaagagttgtatactgctttatgtggtaccacttccatttccataattataagttgaaactcctaataatgtgctagttactttattcgcttttatgatgtgctttgcacacaaaattatattctggttatgtaagtgacaagtacctcagaggctgaggttgttctsaaatgtacagtacctgygctatggctagaactgctgaccacaaaacacaggattttcctctaygtccatttccagtgagcagtgcagagcaagaatcaaaatctcttgtttaacttctaataataataaaaaagtggcttattttttaaataatcaacttttgtgyatttaaaaaaattgtggctgaactatttttggtagagtgaattttcaaactgtgagatgtagtctaggatttcactagaaatgtttacaggccttcagcctttggcaaaaatagcatcgttttgataagtagtcttaactgatagttctctgaagtgctgctactgttttatttgatgttcattgttacagtaacaa

SEQ ID NO: 6738 - DNA, 600 bp, Chicken  19866894191048_4
ccatttccataattataagttgaaactcctaataatgtgctagttactttattcgcttttatgatgtgctttgcacacaaaattatattctggttatgtaagtgacaagtacctcagaggctgaggttgttctsaaatgtacagtacctgygctatggctagaactgctgaccacaaaacacaggattttcctctaygtccatttccagtgagcagtgcagagcaagaatcaaaatctcttgtttaacttctaataataataaaaaagtggcttattttttaaataatcaacttttgtgyatttaaaaaaattgtggctgaactatttttggtagagtgaattttcaaactgtgagatgtagtctaggatttcactagaaatgtttacaggccttcagcctttggcaaaaatagcatcgttttgataagtagtcttaactgatagttctctgaagtgctgctactgttttatttgatgttcattgttacagtaacaaacactttgttaactgcagcagtgtaccctaaataacagaaatgtccgtagttattttccaaatatatacgtattacatatgtagatatacacatgtgtgcatc

SEQ ID NO: 6739 - DNA, 600 bp, Chicken  19866894191049_1
cccggagaggctcggggatgcatacctagcagcagaggataagcatctaagaactggtatttaaaaatgaatgagtcgcggtgttcagatcaatcctgtgatatttagaagcccaattcctgaagtctcagcctgggagaaggacttggatggagctgggagagacctcccggggttgtccaaggcaagagccaagctttcatagaatcacagaagcattaaggttggaaaaggtgatgcagtccaaccacagccccactgtgcccactgaccacatcgaggaaacacatcagccaccaygagtagggtcagggcactgctgacacaaacaccacctgcagcagcacggggaaagcagaggactgcatttatttttagatgcaaagcatttgtgtttccctcttttatggagatgggctgaaaagagtgagaacagatgatggcgttgaattcccgatccaacacttcagatgtgtgccatcaaaatagcattgcaaacagaccctacccacagctctgggtccctctcaagaagccctgaacagaagctgctgtgctgcggggctgggagcagcgccctgcctgcacggaawgcatgga

SEQ ID NO: 6740 - DNA, 395 bp, Chicken  19866894191049_2
ccaccaygagtagggtcagggcactgctgacacaaacaccacctgcagcagcacggggaaagcagaggactgcatttatttttagatgcaaagcatttgtgtttccctcttttatggagatgggctgaaaagagtgagaacagatgatggcgttgaattcccgatccaacacttcagatgtgtgccatcaaaatagcattgcaaacagaccctacccacagctctgggtccctctcaagaagccctgaacagaagctgctgtgctgcggggctgggagcagcgccctgcctgcacggaawgcatggaaatgcattttgatgttccctttgaatcactcccctctcctccttctcatccttaaggtgctcttaataaagccagagggggaaaagct

SEQ ID NO: 6741 - DNA, 600 bp, Chicken  19866894191050_1
gtgaattgtagaatcacaaaaagtgaatgtacttacactgcacaaagatcttaccagcataacccagtggttctcaatctttacattacaggtataagcagcctgggacaacaccacagacaacttcaagtgttcactgactgcactggtagcatcagcgtgcggaataggaatagattactgacacaatcctcttctcaaaccatctgtactacaaggagactggtctcgtcttcaggagaatatttctaaacttcttttttaaacaacaagataaaaaccactcgggtttgtattctyatttctaactaaaaagcaggaaattaagacacagagtgaccagaaactgctgaaaaacaaaggcatgaattttaaaagcaaacacctggacaagaagccgatgtgcttattatcatctcagcaagtgaacagaaaactaaatgtcaagtattaccatagatataggtcagcagtttctactgttaatgtcattcagcaggtacccctggcaggaggtagagtcaccatcactatctcagttgcttcaaacaagccaaaccgctcccctcttctgctgcttggccactgaataaaattgct

SEQ ID NO: 6742 - DNA, 600 bp, Chicken  19866894191051_1
tgacctgcagggaaacctgctgttaaaccaggagagcgggtggcaccggcagcgacctggccctgcactctggggtgctttcatcccacgtggacgttgacttccgtcactccaggacctgctcagcccctgccccacgatgccctcctccctcctgccttaagtctgacgtttggtaagcctcaggacagctaatataagagcactcaagggaataggcctgtaaattccacctcctccactgcccccagggctgtcaaaactaaacggcccttttacaagcagggaagttttggaacrggttctgcccaaagctcaggccagctccaggacccacctgatgtgctgctgcgtggatgttgcgctgctcattaatgatgacgtggggcaaatgctggtccttcctgggaggcgccggggccggcttgatcagaaacctgccagacaggtgaggacatcagatgccggagcagggctgaggcacgttgctgcagcccatccacacataccgttttattttcttgttgctgggcttcaggccrgtgcctccccactcgccccagcctggcagaaccaagttcagtggctgtggcttcgcag

SEQ ID NO: 6743 - DNA, 600 bp, Chicken  19866894191051_2
tgcccccagggctgtcaaaactaaacggcccttttacaagcagggaagttttggaacrggttctgcccaaagctcaggccagctccaggacccacctgatgtgctgctgcgtggatgttgcgctgctcattaatgatgacgtggggcaaatgctggtccttcctgggaggcgccggggccggcttgatcagaaacctgccagacaggtgaggacatcagatgccggagcagggctgaggcacgttgctgcagcccatccacacataccgttttattttcttgttgctgggcttcaggccrgtgcctccccactcgccccagcctggcagaaccaagttcagtggctgtggcttcgcagcctgctctgctttgcgcttctcccgattgaagtcagcaaccacgtcgtccccagcgaaggcctctgtgatcactcctcgctggtcaaagccaccctcctgcagagatgggagttacagccccgcagccagcatggcccccagcccaggacagccccacgctgctcacctcttccaccacaaccacaggtaggctggggcactgagcctcctggagctttccagacagcacagactgcaagct

SEQ ID NO: 6744 - DNA, 600 bp, Chicken  19866894191059_1
tgctaagggaggtgttcaataagttacacaccagagtgatttaaggaagactttttattgactaagaggaaggatcaatgctagtcagtgatgtaaaaataaaactgttcagtcttcagagctgacagtcaatccgttgtaaccagcactgtattccatttataaaattaaacaagtagagaaattcatttgctttaaaaaatgccaacagcccaattccctcttgtcagtctttaaataaaggattgttttggtgatgtgtcctgctcctgggctcaggtgtgctgctcagagggctgyacattgctggttttgctgccgttctcattgttggtgcagggggtgtgctgtgcccgcattacttattcattgcagagtcactcccgtgcatcgaaaatgacatgcaaatgaattgaaactagtttaaagaaatgtgcatacattgtgcagtgacccacaaccccagtgattatgtgcgcttaatgatatgcagcttagcatggtgagaggaacgtgagaaacacccgtgtttaaaaggggtagatcccatttggaagtggcacrctgctaggggaagcgttgttaccttcctaaacataa

SEQ ID NO: 6745 - DNA, 600 bp, Chicken  19866894191059_2
tgctcctgggctcaggtgtgctgctcagagggctgyacattgctggttttgctgccgttctcattgttggtgcagggggtgtgctgtgcccgcattacttattcattgcagagtcactcccgtgcatcgaaaatgacatgcaaatgaattgaaactagtttaaagaaatgtgcatacattgtgcagtgacccacaaccccagtgattatgtgcgcttaatgatatgcagcttagcatggtgagaggaacgtgagaaacacccgtgtttaaaaggggtagatcccatttggaagtggcacrctgctaggggaagcgttgttaccttcctaaacataaccttgttttacagctgtagggggtaactgttaaaatacttcactccgacagagcagtgcgcatctacagtacccggtgagctctaccaaatggagagagttcgccctgttgtgcagatggtgaaaccaaggtgctgcccracacagagccccagttcctcccatccaccccagcacactccccatgttcttcacatctgtaaaggaacggcgtgagcttacgtcaattaagtgtttataataagcaacacagtgctgcaactaa

SEQ ID NO: 6746 - DNA, 600 bp, Chicken  19866894191059_3
cattgtgcagtgacccacaaccccagtgattatgtgcgcttaatgatatgcagcttagcatggtgagaggaacgtgagaaacacccgtgtttaaaaggggtagatcccatttggaagtggcacrctgctaggggaagcgttgttaccttcctaaacataaccttgttttacagctgtagggggtaactgttaaaatacttcactccgacagagcagtgcgcatctacagtacccggtgagctctaccaaatggagagagttcgccctgttgtgcagatggtgaaaccaaggtgctgcccracacagagccccagttcctcccatccaccccagcacactccccatgttcttcacatctgtaaaggaacggcgtgagcttacgtcaattaagtgtttataataagcaacacagtgctgcaactaaaatatccaggaatggtgcgcgtgagcagagctgcacttggcagtggttggyaccgcgtgctccacttctcagttctcctgttgtcgtagggaagggagagctcagagctgggagaagttggggttggctcagcgctgggcgtgggcagctttttggaagcaggtccacgcagggac

SEQ ID NO: 6747 - DNA, 451 bp, Chicken  19866894191059_4
gtagggggtaactgttaaaatacttcactccgacagagcagtgcgcatctacagtacccggtgagctctaccaaatggagagagttcgccctgttgtgcagatggtgaaaccaaggtgctgcccracacagagccccagttcctcccatccaccccagcacactccccatgttcttcacatctgtaaaggaacggcgtgagcttacgtcaattaagtgtttataataagcaacacagtgctgcaactaaaatatccaggaatggtgcgcgtgagcagagctgcacttggcagtggttggyaccgcgtgctccacttctcagttctcctgttgtcgtagggaagggagagctcagagctgggagaagttggggttggctcagcgctgggcgtgggcagctttttggaagcaggtccacgcagggacatgttgtataatcagagctctgggtg

SEQ ID NO: 6748 - DNA, 600 bp, Chicken  19866894191061_1
gaaggtatcagccagtaatgtaaacagtgaattgcttcactgcctttgatggctacatgaaaatagttcctaccacattttacattagttttcaatgtttcagttaaatgggggcaagaatggaaccatagagatacctgacattttcctcctccaaaaaaacatcccccaaaccaacccatttacaatacacagatgctaaacagattcatatttttcagaaaagaatgggaagaatccccatcacagaacgctcaggcatatatatgcatgcaatataaaatcttacacaaatgacasaaattctagatgcatatgcaaaatattataaatattatgaagtgtggaaagccaattattttaaagtctgcataatgcctgtgtgatcattatccattccccacgtgcatatacattccaattatctttaatcacatgaccacacagacactttttccataggctccygcctcattcagagcactgaagagttggtttgatgcaaagctacacagcttctcattttgtccctactgttctctccttgattattccacagtatttaggttccactctgaattataaaggcatttctgtctt

SEQ ID NO: 6749 - DNA, 600 bp, Chicken  19866894191061_2
ccaaaccaacccatttacaatacacagatgctaaacagattcatatttttcagaaaagaatgggaagaatccccatcacagaacgctcaggcatatatatgcatgcaatataaaatcttacacaaatgacasaaattctagatgcatatgcaaaatattataaatattatgaagtgtggaaagccaattattttaaagtctgcataatgcctgtgtgatcattatccattccccacgtgcatatacattccaattatctttaatcacatgaccacacagacactttttccataggctccygcctcattcagagcactgaagagttggtttgatgcaaagctacacagcttctcattttgtccctactgttctctccttgattattccacagtatttaggttccactctgaattataaaggcatttctgtcttttcctgttgcattcacaaaaaagaactcaagtgttctcattcttaattcattttacaagacccactggaaataagagggtgtcattctctcaactgaaagttccacagtgggaatttaaggaacaaagagattaagatcaaaagtatcgactaatttggtgcatctac

SEQ ID NO: 6750 - DNA, 539 bp, Chicken  19866894191062_1
acagacccatgcagcacaaagcctttgtgctgctccagacccttacttaggtctgaagccagtgctggctgccctctgcaccaaggactagcgcgcttaacttgagtgaattttaggtttcactaattcccaaagcaacagtttgtttccaaaacaagaggtatgctcattgacaaattgcatagcataatctttgagccaaaagtgctctcccatccacacattcccagctcttcaagccaataatgagggattattattatctttttacataattgtgtgttcctgatgcctaagtaygaatgttaacacagaaaggtcactccaatttaaaaaaattaaaaatattccttcctgtgaagtaggagcctgtttcctaatcggaggatgtaactttgaagtggtttttctttttctatttccataggcaatatacagaggctcaattattcataagagggactagtcatgtaaatagggtccggaagactgagcaccatgcttccaaagcacatcttcaggtgcaaaagaccatttca

SEQ ID NO: 6751 - DNA, 599 bp, Chicken  19866894191066_1
  misc_feature (1)..(20): n is any nucleotide
nnnnnnnnnnnnnnnnnnnncctctctcaggtgtttgtagtgtaggatgtatttagtcatgtatcccttggctaccacccctgctgcaaatatgtcaatatattacaattccttcatagaatcacagaatcagtcaggttggaaaagacgttaaagatcatcaagtccaaccacaacctaaccatactaccctaactaactaactatgctaaatcgtgtccctgagcaccacatccaaacggtttttaaacacatccagggatggtgactcaaccacctccctggggagcctattcctgygcttaacaaccctttctgtaaagaagtttttcctgatatccagcctaaacctcacctggcacaacttgaggccatttccccttgtcctgtcacctgtcaccagtgagaatagagaacccccctctcactgcaatcacctttcaggtatttgaagagatcaataaggtgtcccctcagcctctgcttccctagactaaacagctcctgttccttcagtcattcctcgcagggcatattctccaaacccttcaccagccttcttgcccttcatggcatggtggcagcagaaaacgatatgt

SEQ ID NO: 6752 - DNA, 600 bp, Chicken  19866894191070_1
gctgccttatttaaatcaccaagtatctaaaaaagcagttcccaggggcctatttttcaataccgattgtggaaaatattctgttttgaggcacagttgcctctagctaactgttgactggaatatctcagctagaacggcggttaagatagagtttttcagctggctggattatgtcttgtaattgctctagttgcgttatttgaattcatatatgcataatatgaaacagttctagttcttctgtgatgccctttctttgaaaacacaggcttcaaaaacccaggagcagttttgctyatcacattctgtctttctgctgtcaagtacaaaataacagaggcaacagtaatggttggagctggtgtctgcaaatggcaatgcctgccctgttagcaccactgtcatattgccttgttgtgtccttctgcacatcttcatcatgattaggacttgttcctttatttcatatactttagtacaagtgatctgtcctttacagaatacacttcatgatgctgaaagtactcattttgagacagaaaaatatctatggcaagattaattcatggaattagaattatttgaggattattgtag

SEQ ID NO: 6753 - DNA, 600 bp, Chicken  19866894191077_1
attatcatctcagtgctgagcatcagaacgcgtagggaagggagtttatttttagaaagtaagatctaaatacgcttttagtctctcccaattcctcttgacttctagagagtcactacttcaaacagctgtagaagttgagaactaaatatttctggtttgaggcaaatgcggtctctgtggagccaagctgtccttggatgcttatgtgctgctcccactggaggccagggccctcctgcctgcgaatgcaaagcagattttggtgcaacatagtggcttgagaaatgagcactttgwgttggcacttcagttcttactgcttttgtttaagacatagttgggagaaaatttaataagcggtgtgaggcttaggattcacttggcttttcatggagcagagtgcgtgtgcttacattttgaaataagtgacctaagctatatatccatgacagtccgtattactttataagagtcttgcccatcgccttcatattgcagcttctgctatactgttattcacrtggtgttagcagatcctcagtgaacacatctgattccatgccagttttctgtgaaattctttatggttagactgga

SEQ ID NO: 6754 - DNA, 600 bp, Chicken  19866894191077_2
aggccagggccctcctgcctgcgaatgcaaagcagattttggtgcaacatagtggcttgagaaatgagcactttgwgttggcacttcagttcttactgcttttgtttaagacatagttgggagaaaatttaataagcggtgtgaggcttaggattcacttggcttttcatggagcagagtgcgtgtgcttacattttgaaataagtgacctaagctatatatccatgacagtccgtattactttataagagtcttgcccatcgccttcatattgcagcttctgctatactgttattcacrtggtgttagcagatcctcagtgaacacatctgattccatgccagttttctgtgaaattctttatggttagactggaggctaaagcagcacatggcagatcaatggccataacttgaatcgtccttaattttaggagtgcagcctccgtgtygttyctcctttttccattcttattacagaagtcttttattggagaaagctcagcttggtgattgggcccctagacttgccgttccatgcttggccatgagaatgtcagtacccctgtcacaccgttttacctcttctgcctttgtttcc

SEQ ID NO: 6755 - DNA, 600 bp, Chicken  19866894191077_3
gattcacttggcttttcatggagcagagtgcgtgtgcttacattttgaaataagtgacctaagctatatatccatgacagtccgtattactttataagagtcttgcccatcgccttcatattgcagcttctgctatactgttattcacrtggtgttagcagatcctcagtgaacacatctgattccatgccagttttctgtgaaattctttatggttagactggaggctaaagcagcacatggcagatcaatggccataacttgaatcgtccttaattttaggagtgcagcctccgtgtygttyctcctttttccattcttattacagaagtcttttattggagaaagctcagcttggtgattgggcccctagacttgccgttccatgcttggccatgagaatgtcagtacccctgtcacaccgttttacctcttctgcctttgtttccgctgtctatatgaagagcagctgctgtatttatcggcrtcagtacctcctgcaactagttttgaaagctgcaggcgtggtgaaacagcctcagttgaatgggctcacattaagtcaacacgttgcactctcctgatggaagtatgcctttt

SEQ ID NO: 6756 - DNA, 600 bp, Chicken  19866894191077_4
cacttggcttttcatggagcagagtgcgtgtgcttacattttgaaataagtgacctaagctatatatccatgacagtccgtattactttataagagtcttgcccatcgccttcatattgcagcttctgctatactgttattcacrtggtgttagcagatcctcagtgaacacatctgattccatgccagttttctgtgaaattctttatggttagactggaggctaaagcagcacatggcagatcaatggccataacttgaatcgtccttaattttaggagtgcagcctccgtgtygttyctcctttttccattcttattacagaagtcttttattggagaaagctcagcttggtgattgggcccctagacttgccgttccatgcttggccatgagaatgtcagtacccctgtcacaccgttttacctcttctgcctttgtttccgctgtctatatgaagagcagctgctgtatttatcggcrtcagtacctcctgcaactagttttgaaagctgcaggcgtggtgaaacagcctcagttgaatgggctcacattaagtcaacacgttgcactctcctgatggaagtatgccttttcctt

SEQ ID NO: 6757 - DNA, 600 bp, Chicken  19866894191077_5
tgccagttttctgtgaaattctttatggttagactggaggctaaagcagcacatggcagatcaatggccataacttgaatcgtccttaattttaggagtgcagcctccgtgtygttyctcctttttccattcttattacagaagtcttttattggagaaagctcagcttggtgattgggcccctagacttgccgttccatgcttggccatgagaatgtcagtacccctgtcacaccgttttacctcttctgcctttgtttccgctgtctatatgaagagcagctgctgtatttatcggcrtcagtacctcctgcaactagttttgaaagctgcaggcgtggtgaaacagcctcagttgaatgggctcacattaagtcaacacgttgcactctcctgatggaagtatgccttttccttcctctgtaactcctgagtggtgttggtttgggcagtatttctcccaggcgagagtgctgctggctgagtgcaagaactgaacagcatgttcctataatactaggcttttaaaatattttatagggtatttgtatgggatggcataagaattgcatagcgcgttttctgcaaaatttgctataa

SEQ ID NO: 6758 - DNA, 600 bp, Chicken  19866894191078_1
tgtggggcagaaccataacacttctattacaagcaggtctcacaacagttttttctgactttaagtcaaatatagaattaaaataatttccaaaggaacgggataaggagataacctcattagagaagacatcagacctgagccgtaagcttggggtttgctggcctatgaattcttatgattctttatcccggacctgcattatgtacctgcataaagtaaagatatttggattgcactgaagtgtttccaaacaccttaatgttaatagcacttcaagtccagagccttacaaccacraaaactattcaagaaaaaaaaaaaaaaggaaaaaacccaccatttccaacactcccaacaccaaaccagcccaatcaaaaaagccccagcacttacacaacaaaagccattgtmcatcacgtgtaatataaatattgtgaatatattctgcaaaaaaatactgattaaaaaaaaaacaacagagaaatgtagtatcaatttgcagtagaaatttaggtattcaaacttttggtcaaacatagaaggcaatggctttctttttataaaaaaaaatgggttaatttccactgaataaatagc

SEQ ID NO: 6759 - DNA, 600 bp, Chicken  19866894191078_2
cctcattagagaagacatcagacctgagccgtaagcttggggtttgctggcctatgaattcttatgattctttatcccggacctgcattatgtacctgcataaagtaaagatatttggattgcactgaagtgtttccaaacaccttaatgttaatagcacttcaagtccagagccttacaaccacraaaactattcaagaaaaaaaaaaaaaaggaaaaaacccaccatttccaacactcccaacaccaaaccagcccaatcaaaaaagccccagcacttacacaacaaaagccattgtmcatcacgtgtaatataaatattgtgaatatattctgcaaaaaaatactgattaaaaaaaaaacaacagagaaatgtagtatcaatttgcagtagaaatttaggtattcaaacttttggtcaaacatagaaggcaatggctttctttttataaaaaaaaatgggttaatttccactgaataaatagcagacatggaaaatacaaacccagcattctctccagcactttgctatatctgaggtgatgttctccagtccctattgataaacctccccactttccaattgccgagcctagaggc

SEQ ID NO: 6760 - DNA, 600 bp, Chicken  19866894191082_1
atttgcccttcccaaaaagcagcaggtgctcctgaagacgttgccctgcatccccgcagaatgcatctgcagaggcacagggagaaatggccagaagcagccacttctctgctggctttgggcaaggcctgacctcagggccagcaggagaacccccacgtcttctaaaacagccatatagaaaatgttggagaattatttctacccatagtcttcctaccaacacttctggtcctggagcaagtggtgctcctctgactgcctccaccacagctggttgctgtgacacagccagaacgrcccgtgctgctggagaccctctggtaccaacatgtaaattagaaccgagtcatgcaatcagcataaaccccaccccgtgatgaaaaacgaccagaggatgttgaggaattactcagtcattcagtttgtaaattcagtcatttacgaagcagcaaaaacaatcagtgtaattgtgtcacttactgcagtgctgcctttgacagctgtaaacagtttggtattgcacaacctgggagcagtgattcacatttgcagaagtaatatctggcaggaagcatttcttgaacttacttaaactct

SEQ ID NO: 6761 - DNA, 599 bp, Chicken  19866894191084_1
  misc_feature (1)..(53): n is any nucleotide
nnnnnnnnnnnnnnnnnnnnnnnnnnnnnnnnnnnnnnnnnnnnnnnnnnnnncttacttttttatggcgaattgctatgaataaagcattgctactaccagaaaatgagttcacctagattaaatccatgatagctataaattaccgtgggctgcttctatgccttccagataggcaaaaaccccaacaaaggtgttcttgctcctctggcttagaagaacatcatccttgttaggaatggccaaggtgctacaaacacaattggcattcgtaatggtgagaaatgtcttgctcttttrgtgctcttaagtggtaatactgattattggtgggcgtatgttagtccatttatagtcagtgcttgaacaaagagcaggtaattggtacaagagatgacaaaaagcaaagggaaccaaatatgtcattgcgtctcagactgttccactgccttctggtgccgagcccccagtaaggctcttctgtgtatacttgcatttcaggctaatatcgggaaacttgcttgtggttggtttttgataagtaatcgataccatctttttgaagtaagactacaagggagggaaagtggaggcattag

SEQ ID NO: 6762 - DNA, 600 bp, Chicken  19866894191084_2
gagcaggtaattggtacaagagatgacaaaaagcaaagggaaccaaatatgtcattgcgtctcagactgttccactgccttctggtgccgagcccccagtaaggctcttctgtgtatacttgcatttcaggctaatatcgggaaacttgcttgtggttggtttttgataagtaatcgataccatctttttgaagtaagactacaagggagggaaagtggaggcattagaaggcgttatctaagtttcttgtttaactgtgaacaaaagaatcatgttccagggcctctgcagtgtactcratgaagatatccttaaaagtgttaggtttaaatcagtttgccttctcatacgtgatcatatcaagattctagaagtgagtcagcacccaggctagggactgagtagtgcaaggatgcaggcagcaatagagaaaatctggatgagctaagaggggggtttatgcaccagcacagtaatctctgcttcctgttctggtgtattaattgcagaagttgaaattatgaatggttaaaaaggtaaccaactcttgcttatgtattttttgattctcctgcaatgagagcatacctacaatttac

SEQ ID NO: 6763 - DNA, 600 bp, Chicken  19866894191084_3
ttctcatacgtgatcatatcaagattctagaagtgagtcagcacccaggctagggactgagtagtgcaaggatgcaggcagcaatagagaaaatctggatgagctaagaggggggtttatgcaccagcacagtaatctctgcttcctgttctggtgtattaattgcagaagttgaaattatgaatggttaaaaaggtaaccaactcttgcttatgtattttttgattctcctgcaatgagagcatacctacaatttacctgtaaaattttcttgctcctctcagtctagatatgctgtcragtttctaagacacgacagtgatgcaaagctgggcattgcagctgctacattgaagtcatagcaaaagtgaaagaaatacctgtcttgtttgtgaagatcaatctataagtactactttttgacccagacatttacaacagcgccttctacttctttatctttatctgtagctgtccaaccttgtccagggcagacagcgtgactgtgtggttcagtagatgggacaggaggcaggagttttgggttcttgtccgtgtcctagtgagtattcagtacggtaagaaggaaagccacagtga

SEQ ID NO: 6764 - DNA, 600 bp, Chicken  19866894191088_1
aaggcttagtcaaattaaagcagtcagacttggggatgacttccctgtgtttgtgaataaggatatgttttggcatgatatgtttttcaatacaagttctagaatctttacttttagtgctcatgtacaaccgtaagaagtcagtgtttgatttttagtccttagatataggttacaatgctgacatctgtaggaaaaaatacgttttcattttgctgaactggaaaattaaatatggaaattagaactttagaaagatctgtgcctcagctgtggtttgaggtgaaaaacattgtagartttttttctaggactttattattcaccacaggtcaaaacaatttaagtttttagggtttgttagaaagctttgagtgaaatcttggaaaatactctatcaagaataatgtaatattcaagtcaactttttaaaattattattctaggttaaagactgtgatggtattttgtggtcagaagatgagatcagtgtttttaacgtatcagagaatttgagaaatatgatatgctgcaattgactgcttatttattctgttccattcttattcttgcaattttcttgttactactacatctagt

SEQ ID NO: 6765 - DNA, 600 bp, Chicken  19866894191091_1
atatgcatggtactttcaccttgaaaataaagccagaatagtaacagaggagcaagaggatgaggctcaaccaccacaccgatgttccacaaggaagagcaaagctccttttgcagcactgctcagagtctgttcctttattttggcttcagatcacttcagctcacccactagacttttaaaattgatgtcaaactacttggccaaaagaaacagcgaagtctgccatcaggattattctccactacttctccatctgtctcttccatttacatttcttgactgtctttcggaactggrgtgtcctsgataaaataaggatcacacaacagatgctgtttctgtcaaggcaccagcaaccagacttaggtgcagacacagaagcctccatctcaaccttatgatctgcagttacctatcccatacttctcagrtgaagaaataaatcagaccgtctctgggcccaggtcgcaaattgcagccactggtacaacacaggttcttcatgrtgagaagcaatccagcctgatctggcaaatgtctgagtcccagaagggtgaaatcttcccatatgcttatcccaggagaagctcctcgcta

SEQ ID NO: 6766 - DNA, 600 bp, Chicken  19866894191091_2
ggtactttcaccttgaaaataaagccagaatagtaacagaggagcaagaggatgaggctcaaccaccacaccgatgttccacaaggaagagcaaagctccttttgcagcactgctcagagtctgttcctttattttggcttcagatcacttcagctcacccactagacttttaaaattgatgtcaaactacttggccaaaagaaacagcgaagtctgccatcaggattattctccactacttctccatctgtctcttccatttacatttcttgactgtctttcggaactggrgtgtcctsgataaaataaggatcacacaacagatgctgtttctgtcaaggcaccagcaaccagacttaggtgcagacacagaagcctccatctcaaccttatgatctgcagttacctatcccatacttctcagrtgaagaaataaatcagaccgtctctgggcccaggtcgcaaattgcagccactggtacaacacaggttcttcatgrtgagaagcaatccagcctgatctggcaaatgtctgagtcccagaagggtgaaatcttcccatatgcttatcccaggagaagctcctcgctaccagaaag

SEQ ID NO: 6767 - DNA, 600 bp, Chicken  19866894191091_3
cctttattttggcttcagatcacttcagctcacccactagacttttaaaattgatgtcaaactacttggccaaaagaaacagcgaagtctgccatcaggattattctccactacttctccatctgtctcttccatttacatttcttgactgtctttcggaactggrgtgtcctsgataaaataaggatcacacaacagatgctgtttctgtcaaggcaccagcaaccagacttaggtgcagacacagaagcctccatctcaaccttatgatctgcagttacctatcccatacttctcagrtgaagaaataaatcagaccgtctctgggcccaggtcgcaaattgcagccactggtacaacacaggttcttcatgrtgagaagcaatccagcctgatctggcaaatgtctgagtcccagaagggtgaaatcttcccatatgcttatcccaggagaagctcctcgctaccagaaagaaggagaaagcaaggagggagcacccaggtgactttctggctgggccatagcaagagaagcacacagtgctccgtgcacacagagctctcacacagaggtcaggggaggcctgggcctgcctcaga

SEQ ID NO: 6768 - DNA, 600 bp, Chicken  19866894191091_4
gaaacagcgaagtctgccatcaggattattctccactacttctccatctgtctcttccatttacatttcttgactgtctttcggaactggrgtgtcctsgataaaataaggatcacacaacagatgctgtttctgtcaaggcaccagcaaccagacttaggtgcagacacagaagcctccatctcaaccttatgatctgcagttacctatcccatacttctcagrtgaagaaataaatcagaccgtctctgggcccaggtcgcaaattgcagccactggtacaacacaggttcttcatgrtgagaagcaatccagcctgatctggcaaatgtctgagtcccagaagggtgaaatcttcccatatgcttatcccaggagaagctcctcgctaccagaaagaaggagaaagcaaggagggagcacccaggtgactttctggctgggccatagcaagagaagcacacagtgctccgtgcacacagagctctcacacagaggtcaggggaggcctgggcctgcctcagaggtactggcaccacacagccagatccatcaataacggacatgaaacagcaccagagaggcagactgaatcctgcc

SEQ ID NO: 6769 - DNA, 600 bp, Chicken  19866894191091_5
cctgcctcagaggtactggcaccacacagccagatccatcaataacggacatgaaacagcaccagagaggcagactgaatcctgcctgtcacagagctcttccatttatgtcaccgtatttcttgaccacttccttcgtgacacaagactacttcagagctcaaaggattgcactacagttgatacagcattaagcaaactaacagaatgcagcgctttagatgaagaatgctctacacaaagaaataagctgctgagaaaacacggacacaaccttaaaatgagacagaatatatttcyatgtgtatttccattccgaaaagctcaggttaaaactgtaaaatgaatgctttcctcacacagataaaatacccttctttagaaaaggctaatttcagaagcatctaatttctctctgaaataatttctgcacacatttaaataattcgtaagaaaaaatcgctgtctagtgacacagtgataacactggcttagaccaacaaaaagccagacttgagcaatactgcaccacagcaaaaagaaatggatttggttaatttctctcatttggactggatctctttcatcaggtcatttcct

SEQ ID NO: 6770 - DNA, 600 bp, Chicken  19866894191100_1
ttttgctgagtctcagtgattaataaaatacaataacactacaaaattactgtaatttggggcttgaatctatgacacaactcttctacttgcttttctttggggctggaaaggttagatgcctataaatagtacatgatccaataatctgtagaattgtctgtcctttgcttttgagagtctgtgacattttcttttgatgataacagattcagtagctttagagaagtacaattgtgctggaagaaaacatttccaagactgatttcagttccatttccctttttctgttaatacttkctatttatttatttctagatggcatatgttctgtcagggataggggtaaacatcaagtctaatgatgtggtcatacgcactcccataaacagcatctactgtcctagtagtaacctgaaaactcttttgtcccaagaatgggtttcatgaatttatgcatcaatctcaaatatttcctcttattttttttttccataaaaataacttgcattaggcagcttccactaaaatcaatattcaaattatcatcaaatagttttgattttgttagtgacaattagtttatatccagaagtttta

SEQ ID NO: 6771 - DNA, 599 bp, Chicken  19866894191105_1
  misc_feature (1)..(11): n is any nucleotide
nnnnnnnnnnncatgggaatcaggaagtgaagatgacatcccccagcaaaagtttctaggattcagtaaggactgaatcagagttaatttgtatcatgtcttttgatttttaggttatcccacaaaaatgtaagtcatttacaacaatataagtgatagacaaaattcacagtcttatgtaggctttccaaactagaaatctgatatagggaaaatccatagggagtgttagaaatttaaaccattctcagaatatacgcggtagagaaggggtgtagcttttacttaatgccttatgtrtttgttggagttgtaattcagctgcctgagggctgtagtgaccactgttggtataaatgtaaattatgacttgcctcaagaaaagagaaggcaagaaggctactattatccagaaggataatattaaattgtcttgatcattccttaaaaaacagtgggtaggcacatctagtgactgtgcctgcccaaaataaggttgctttttatgtgcacccagtgactagaccgagaatctcactgctttacaaaggattattttccaaatctctggcatgtcacaacagcaggtaacgtcatgt

SEQ ID NO: 6772 - DNA, 600 bp, Chicken  19866894191106_1
cagtttttggcatgggcaaaaatcacagcgatattgcatgcctgtaagtaatcaggaggcttgcagttaggtaactacatggatattttcatgcatctttccttttagaatgtattaatcaatgatgtaacatctttcttagtgtaatataaacaatcttattaaattacttgtgctttaccacatatgtctattcataaagtttgtgtggataattaattttatttacacaacagtgcactagatgttactttttgttgtccctgtgcacttccacatgtatgatataacagccatgaytggcatgttaccatatgcaaaataattggaccccatttcagttttgcacacaattaccaatgtcatcaaaggagttcagctgggttcagtattcctccgtattattataaaaaattgctttaagagacaccaaaacaatacaaatataattcttcaggtaatcacaaatattgtatttcatttctatttaactaaaataaaagcaaacagacacgcaaacaaaaacatcgttcagttagcgcatgcagcagattagcctgaagtcctaatgtggtaatcagaaaatgaaacagtatctta

SEQ ID NO: 6773 - DNA, 554 bp, Chicken  19866894191112_1
gtagaaaaatctcagccacagtttctagaatctgataatattttgtgacctatgagacatacagctggcatcagtaattccaacagtattttcaatcagctgtgacattctgtcaggtctctggctgaattcaagatgtgctgccaatctcccttacctgtctggaggtctctcaggcaaaccgcaaagaggaatctattttagaagacaggcagttgaacagccatttgcatgcacctttcccctgcagcagcccaaccttgctgaccagctgggcacagagggaaggtcagcattccycattctctggggaaagaaactkcaagcactggaaactcttgatggttgagatctctgtggctgtttgtgaactgtctggtgatgagttacatttaagaatagcacggctcttaaagtctattgttaattgcattgaacagttggaaaaaaaaaccaaaaacaaccccaaaaaaaccctcagtgcttccgaagactttgcaagggcatctcgtccacttacctacccctgaatcaataaacacaatgtaatctgt

SEQ ID NO: 6774 - DNA, 532 bp, Chicken  19866894191112_2
ttctagaatctgataatattttgtgacctatgagacatacagctggcatcagtaattccaacagtattttcaatcagctgtgacattctgtcaggtctctggctgaattcaagatgtgctgccaatctcccttacctgtctggaggtctctcaggcaaaccgcaaagaggaatctattttagaagacaggcagttgaacagccatttgcatgcacctttcccctgcagcagcccaaccttgctgaccagctgggcacagagggaaggtcagcattccycattctctggggaaagaaactkcaagcactggaaactcttgatggttgagatctctgtggctgtttgtgaactgtctggtgatgagttacatttaagaatagcacggctcttaaagtctattgttaattgcattgaacagttggaaaaaaaaaccaaaaacaaccccaaaaaaaccctcagtgcttccgaagactttgcaagggcatctcgtccacttacctacccctgaatcaataaacacaatgtaatctgt

SEQ ID NO: 6775 - DNA, 600 bp, Chicken  19866894191114_1
aattcaagttcaacagcaacgttagcccctgttaattaacttaagaacaaccctcttaggaaggcaaagcctgcgcatcacctgccaagcacctcgtttgtcatttggaaagcaaaggccaggccttcttcattaaaaaacacattaaacaaacaaagggccacaggacgctctctggtcagtgctatccctgggaacaaaccctcgtggctgtgggtcacgcacctctcgacccactcatgtgaagctctgcctgcaggctgctgtttacctggatggagaagcattccctaaatcacrgagcaggggagcactgtccctcactgagctccccaaactgctgcagtgtcacaccacggtgcacggaagcagccagccctgtggtttcccatycactgcttcacccctctcccgccacaacaggacggtgctgtcagaacccgtgagaggtttggggagaaaactgctggttctgaacacatcaggccaactaygaggtgtggaagggctgagctgagttgtgtaccccaaaggggcacccagcagcacagcaaagggatcctgagtgcctctgccagaggtgtgctgccatgctttgtt

SEQ ID NO: 6776 - DNA, 600 bp, Chicken  19866894191114_2
tcgtttgtcatttggaaagcaaaggccaggccttcttcattaaaaaacacattaaacaaacaaagggccacaggacgctctctggtcagtgctatccctgggaacaaaccctcgtggctgtgggtcacgcacctctcgacccactcatgtgaagctctgcctgcaggctgctgtttacctggatggagaagcattccctaaatcacrgagcaggggagcactgtccctcactgagctccccaaactgctgcagtgtcacaccacggtgcacggaagcagccagccctgtggtttcccatycactgcttcacccctctcccgccacaacaggacggtgctgtcagaacccgtgagaggtttggggagaaaactgctggttctgaacacatcaggccaactaygaggtgtggaagggctgagctgagttgtgtaccccaaaggggcacccagcagcacagcaaagggatcctgagtgcctctgccagaggtgtgctgccatgctttgttctactgtgcaacaggargcaccagagctggagcagggatgtggggggatccccaggagatgaagggcagccagcacggtgatgggagcccaca

SEQ ID NO: 6777 - DNA, 600 bp, Chicken  19866894191114_3
gaacaaaccctcgtggctgtgggtcacgcacctctcgacccactcatgtgaagctctgcctgcaggctgctgtttacctggatggagaagcattccctaaatcacrgagcaggggagcactgtccctcactgagctccccaaactgctgcagtgtcacaccacggtgcacggaagcagccagccctgtggtttcccatycactgcttcacccctctcccgccacaacaggacggtgctgtcagaacccgtgagaggtttggggagaaaactgctggttctgaacacatcaggccaactaygaggtgtggaagggctgagctgagttgtgtaccccaaaggggcacccagcagcacagcaaagggatcctgagtgcctctgccagaggtgtgctgccatgctttgttctactgtgcaacaggargcaccagagctggagcagggatgtggggggatccccaggagatgaagggcagccagcacggtgatgggagcccacaaaagaaccaattgctcagcgtgcagctgctccagaagtcacctctccgcctccctcactgctcagccctgtgcctgctccactgccacagccctccaggag

SEQ ID NO: 6778 - DNA, 600 bp, Chicken  19866894191114_4
ccctcactgagctccccaaactgctgcagtgtcacaccacggtgcacggaagcagccagccctgtggtttcccatycactgcttcacccctctcccgccacaacaggacggtgctgtcagaacccgtgagaggtttggggagaaaactgctggttctgaacacatcaggccaactaygaggtgtggaagggctgagctgagttgtgtaccccaaaggggcacccagcagcacagcaaagggatcctgagtgcctctgccagaggtgtgctgccatgctttgttctactgtgcaacaggargcaccagagctggagcagggatgtggggggatccccaggagatgaagggcagccagcacggtgatgggagcccacaaaagaaccaattgctcagcgtgcagctgctccagaagtcacctctccgcctccctcactgctcagccctgtgcctgctccactgccacagccctccaggagacgctgactgccagcaggaagcacgagcatccgttctaattaagaaaataaacagataaattagaaatcccactatttataagcacacaaggtgctggctccacgcacacaagggattcctgt

SEQ ID NO: 6779 - DNA, 600 bp, Chicken  19866894191129_1
ggtgaagtcagtcagaaatcatcgcctgccctattgaatctaccctaccgattggtgtttgctgttgcttcggaagactctgtgcttttttatgatactgagcagtctttcccttttggttacgtttctaacatacattatcacaccctcagtgacatttcatggtaggtcattgttacattcttcacatctgtcgtgtggggggaaaatgccctgtttttgtgttgaagctttgcactgcatcttgtgtcctgctttatttttgagtttcgttcatgacacatctttggtcacagtcaytgtgatatctgaacagyaagtcatcttgtttgctctctaaactggagaattacagttccttgatcagttgggaaccaaggtgccagcagccaaacgacaagcaggtgatatttgtatagatagatgcacagtaaagagcccattgtccagggagtgtaagtggtaacagtgatgttattggaagttatgaaggtcatctctaagtttaggtgtctgtatcgtggccaagtaatgttttatctatataattcttcatggtggttctttatacgtagtagctgatctggcttgatgtgggaa

SEQ ID NO: 6780 - DNA, 600 bp, Chicken  19866894191129_2
atcatcgcctgccctattgaatctaccctaccgattggtgtttgctgttgcttcggaagactctgtgcttttttatgatactgagcagtctttcccttttggttacgtttctaacatacattatcacaccctcagtgacatttcatggtaggtcattgttacattcttcacatctgtcgtgtggggggaaaatgccctgtttttgtgttgaagctttgcactgcatcttgtgtcctgctttatttttgagtttcgttcatgacacatctttggtcacagtcaytgtgatatctgaacagyaagtcatcttgtttgctctctaaactggagaattacagttccttgatcagttgggaaccaaggtgccagcagccaaacgacaagcaggtgatatttgtatagatagatgcacagtaaagagcccattgtccagggagtgtaagtggtaacagtgatgttattggaagttatgaaggtcatctctaagtttaggtgtctgtatcgtggccaagtaatgttttatctatataattcttcatggtggttctttatacgtagtagctgatctggcttgatgtgggaagtcagaactggagctga

SEQ ID NO: 6781 - DNA, 600 bp, Chicken  19866894191134_1
tggtcacaggtgttccttaggattcagattgcactgcaccaatcatcacatacctgccatcacttcttgagtgtcaaaggctctttttgtctcctctgtctcttctctctctctctacttgcacataaatcactcctatgttagcagtacaaaaacaacctgcaagatttttgttgtgatgtttctcagatgccagtttgcaataagcttagggaaataaacaggtagaaaattaattaattaagacaaagatctttagccagcacatctaggagctggtctaaatttataaagtgaaaktcccgtatagcaagataggattaaacacacaagagatctctctggcatttgttttccagatatcttttgagacagaaggaactccacactgccagtgacttccagagtctgaaggcagattgcatttctcttgctttccctatcaatcacggatgctgcagatgctttgtgcccacccaccacccagcaggtgttcccagtgaacctcctcyccgttccagatgggcttgatttgaattaactgtgacctccttggcaccagtgaatgtacccctttgggtgttagtgcaggtgatcaga

SEQ ID NO: 6782 - DNA, 600 bp, Chicken  19866894191134_2
ggaaataaacaggtagaaaattaattaattaagacaaagatctttagccagcacatctaggagctggtctaaatttataaagtgaaaktcccgtatagcaagataggattaaacacacaagagatctctctggcatttgttttccagatatcttttgagacagaaggaactccacactgccagtgacttccagagtctgaaggcagattgcatttctcttgctttccctatcaatcacggatgctgcagatgctttgtgcccacccaccacccagcaggtgttcccagtgaacctcctcyccgttccagatgggcttgatttgaattaactgtgacctccttggcaccagtgaatgtacccctttgggtgttagtgcaggtgatcagaacagctgaaatttggtttatagaaatgaggatatacaatstcatctcctttctcaagtcagtaatgaatctcaaatgyattcacwgtcccctatwctgacaacaacatattgtatttcaaagagtaatctgatagggaaaaaacaaatacataaagactgttacagtactaaaaataaaaggggggaatcaatgtttcccttacaggactag

SEQ ID NO: 6783 - DNA, 600 bp, Chicken  19866894191134_3
tctggcatttgttttccagatatcttttgagacagaaggaactccacactgccagtgacttccagagtctgaaggcagattgcatttctcttgctttccctatcaatcacggatgctgcagatgctttgtgcccacccaccacccagcaggtgttcccagtgaacctcctcyccgttccagatgggcttgatttgaattaactgtgacctccttggcaccagtgaatgtacccctttgggtgttagtgcaggtgatcagaacagctgaaatttggtttatagaaatgaggatatacaatstcatctcctttctcaagtcagtaatgaatctcaaatgyattcacwgtcccctatwctgacaacaacatattgtatttcaaagagtaatctgatagggaaaaaacaaatacataaagactgttacagtactaaaaataaaaggggggaatcaatgtttcccttacaggactagtcacctgtttctagaatttacatgtaaggatctattgtttgctcaaattccaaaactgaccaagaggtaacaacagctttgacattcttggccctttaaaggaggaatcacactagaattactgacaa

SEQ ID NO: 6784 - DNA, 600 bp, Chicken  19866894191134_4
gaactccacactgccagtgacttccagagtctgaaggcagattgcatttctcttgctttccctatcaatcacggatgctgcagatgctttgtgcccacccaccacccagcaggtgttcccagtgaacctcctcyccgttccagatgggcttgatttgaattaactgtgacctccttggcaccagtgaatgtacccctttgggtgttagtgcaggtgatcagaacagctgaaatttggtttatagaaatgaggatatacaatstcatctcctttctcaagtcagtaatgaatctcaaatgyattcacwgtcccctatwctgacaacaacatattgtatttcaaagagtaatctgatagggaaaaaacaaatacataaagactgttacagtactaaaaataaaaggggggaatcaatgtttcccttacaggactagtcacctgtttctagaatttacatgtaaggatctattgtttgctcaaattccaaaactgaccaagaggtaacaacagctttgacattcttggccctttaaaggaggaatcacactagaattactgacaactgcacacacagcttcccaagagctaggtctttctttt

SEQ ID NO: 6785 - DNA, 600 bp, Chicken  19866894191134_5
acactgccagtgacttccagagtctgaaggcagattgcatttctcttgctttccctatcaatcacggatgctgcagatgctttgtgcccacccaccacccagcaggtgttcccagtgaacctcctcyccgttccagatgggcttgatttgaattaactgtgacctccttggcaccagtgaatgtacccctttgggtgttagtgcaggtgatcagaacagctgaaatttggtttatagaaatgaggatatacaatstcatctcctttctcaagtcagtaatgaatctcaaatgyattcacwgtcccctatwctgacaacaacatattgtatttcaaagagtaatctgatagggaaaaaacaaatacataaagactgttacagtactaaaaataaaaggggggaatcaatgtttcccttacaggactagtcacctgtttctagaatttacatgtaaggatctattgtttgctcaaattccaaaactgaccaagaggtaacaacagctttgacattcttggccctttaaaggaggaatcacactagaattactgacaactgcacacacagcttcccaagagctaggtctttcttttaaggtaa

SEQ ID NO: 6786 - DNA, 600 bp, Chicken  19866894191134_6
tgacttccagagtctgaaggcagattgcatttctcttgctttccctatcaatcacggatgctgcagatgctttgtgcccacccaccacccagcaggtgttcccagtgaacctcctcyccgttccagatgggcttgatttgaattaactgtgacctccttggcaccagtgaatgtacccctttgggtgttagtgcaggtgatcagaacagctgaaatttggtttatagaaatgaggatatacaatstcatctcctttctcaagtcagtaatgaatctcaaatgyattcacwgtcccctatwctgacaacaacatattgtatttcaaagagtaatctgatagggaaaaaacaaatacataaagactgttacagtactaaaaataaaaggggggaatcaatgtttcccttacaggactagtcacctgtttctagaatttacatgtaaggatctattgtttgctcaaattccaaaactgaccaagaggtaacaacagctttgacattcttggccctttaaaggaggaatcacactagaattactgacaactgcacacacagcttcccaagagctaggtctttcttttaaggtaagaaaaaatat

SEQ ID NO: 6787 - DNA, 599 bp, Chicken  19866894191139_1
  misc_feature (1)..(78): n is any nucleotide
nnnnnnnnnnnnnnnnnnnnnnnnnnnnnnnnnnnnnnnnnnnnnnnnnnnnnnnnnnnnnnnnnnnnnnnnnnnnnngaaaaaaaaataagacagcaaccaaaaaccttttcctttttgacctcgccttctgtgacattaacacacagatatacgcctgaaatatgtatcatgcttattatgatgcataaaaaaccaaaaatagttgttgtcatgtattttacagaaacaagtaccagaatgcatttaacaccgtaatatcctaatagaaattccaaaaccagagttgatgaacaggayataggaattcacaaagaataaaacaagcttatatctagttactatattatgctgagagatttgggtcttttcagcctgaagagaaggtttctaagggatgttatagcagccttccagtacatcaagggggcctacaggaaagctgcagcaggacttactagaagggcatgtaacaacatgacaacgggaatggctttaaactggaataggagagatttagactaggtatttaggaaggaattctttactgggagggtgatgagacactggaacaggttgcccagagaggttgcggatgc

SEQ ID NO: 6788 - DNA, 581 bp, Chicken  19866894191140_1
tatgtgatggtgactgtgttgtgaacatggatctagttcacagataggaatactctgaaatgatttttcactctgtaattttcagtgtagaaatgaagggtgatactttcatggtgacatctgttgctgtgcacataggctgctgtgtgctacaggacctgtttctgggtgtgtattctttctctgcttcaaagcactcctactatttcatttgccaattaacagaaactggaagaaaagagattacatattaatgttcagtaaacactggggcatttctttctgccataccagtccatwctggtggaataactgcgcactgacttttgattctctgggagctacaaatctcacctgactttgctgatgacactgatccctctaaaatggagtacctgccaccataaacatcaatataatccttttttttttttctgttctcctgcaattcatttatctgaaaataggatcacaaaaacaaagggaaaagccttagcatttgttacgtgtgattttctctgtcttcacagaagtgtttgattttatagccacaaaggcagctccaaaaatgacgtaggaaa

SEQ ID NO: 6789 - DNA, 600 bp, Chicken  19866894191141_1
agtgtcccctctgggtagtgaccccagctgtggctttgggggaagaggttaggcactgcaggaatgctcatggaaatacaaagtgcactaggaaactcgagtccactgtcaattgcttatgtgcaataaccaaataaagtgcttacagagacacaccggctcacactgtcactgcttggcatgggggaggaggtggagggatgcagggaaggcttgtgccacggctgctgggcattgtcacgcagggctggggcacacagagggtgacatggggcttcccaaagtgcgtggcagtccttyayctccttgcctgcagtggggaacactcacaggcgggcacgaagggctgcatgtcctgcacaggggatggaaacagggccagtcctcaccacactccacaaaggcgatttttgaattccttccctttttaagtcacggctccccaaggactgccagtgcctggattaacccaagggctgcagtacagccctgcactgcagcaccacacctgtagtgcctgcatgagaggggaaaaggctccacgagccttcctcagggagttgctttggcatgaagtacccccggtgttgaagcaggagg

SEQ ID NO: 6790 - DNA, 600 bp, Chicken  19866894191141_2
tgtcccctctgggtagtgaccccagctgtggctttgggggaagaggttaggcactgcaggaatgctcatggaaatacaaagtgcactaggaaactcgagtccactgtcaattgcttatgtgcaataaccaaataaagtgcttacagagacacaccggctcacactgtcactgcttggcatgggggaggaggtggagggatgcagggaaggcttgtgccacggctgctgggcattgtcacgcagggctggggcacacagagggtgacatggggcttcccaaagtgcgtggcagtccttyayctccttgcctgcagtggggaacactcacaggcgggcacgaagggctgcatgtcctgcacaggggatggaaacagggccagtcctcaccacactccacaaaggcgatttttgaattccttccctttttaagtcacggctccccaaggactgccagtgcctggattaacccaagggctgcagtacagccctgcactgcagcaccacacctgtagtgcctgcatgagaggggaaaaggctccacgagccttcctcagggagttgctttggcatgaagtacccccggtgttgaagcaggaggga

SEQ ID NO: 6791 - DNA, 600 bp, Chicken  19866894191154_1
gctctgtttacagtgcactgctccccaggccaggctgccctccctttacactcagtgtggtgaaactccatttgggtgaaaagcatcacactgcgcttcgcttcagcacagcagttgaccctccccaaaggtcccctgtgcggcataaagtgtttgcatccttgggaagagcttaatgaaaatggacagtaaatcacttgatttcaggtttgcatttgtttatttggcacctgattataacctgctcattgaccttgcttgataggtgatgggacacgagctctgactgatgccgacgakccctgagcacagcaaaggcttttaaaactttacaaaataaggaacggacaaacaaataaatcatcccatcctatggctcctgtcctgtaaacatgtgtgtggcccttaatcacactaataaaagcactgaagccaaagggaatacctgagtgagagcgagtttgcaaggccagggcttattcctgtagstttgtcagagggagcttgtcaaataaaccaaagactgatagctgctatattttcacttattataatccagaaacaacatacttgtctgaacaaaataaaaataagtcctct

SEQ ID NO: 6792 - DNA, 600 bp, Chicken  19866894191154_2
taaatcacttgatttcaggtttgcatttgtttatttggcacctgattataacctgctcattgaccttgcttgataggtgatgggacacgagctctgactgatgccgacgakccctgagcacagcaaaggcttttaaaactttacaaaataaggaacggacaaacaaataaatcatcccatcctatggctcctgtcctgtaaacatgtgtgtggcccttaatcacactaataaaagcactgaagccaaagggaatacctgagtgagagcgagtttgcaaggccagggcttattcctgtagstttgtcagagggagcttgtcaaataaaccaaagactgatagctgctatattttcacttattataatccagaaacaacatacttgtctgaacaaaataaaaataagtcctctttgaggctactctgtttgtcttgacagcaaacttgggttttaagccaagattccagattgtttttgtgaaaacatttccacttgtctgaaagagtatatataatggatatgtgatagcggtaatgcaatgctgaagtaatctccggagaatggccacatctccggggacgccgcgctgcactgggtact

SEQ ID NO: 6793 - DNA, 600 bp, Chicken  19866894191154_3
aacatttccacttgtctgaaagagtatatataatggatatgtgatagcggtaatgcaatgctgaagtaatctccggagaatggccacatctccggggacgccgcgctgcactgggtactacataccaggaaaataaaattggtattctaacaatatggagaatgcctccgatttgtacctcgcgaaaataccaagcctcatttataattcagctgtaatgtgcgcttcccttgtaggaagtgtttcgctttggtaggaactggaagtgacagctgtgaaggctctttctgacttcatacrggatcagagcacactgccacggcaccgcgtgctggaagcagctgatgggacgggcaaggtgctgcaaaaaaagccctaatctggaaaatggcttcatgcatttcctcccaatcattcttcacaacctttgaaatgcaatgacagaacttgtgcaagaacaagaggaaaagatgcaggggtgggagcaaatccgtcttcacataggggatgtttcaaaacccagggcagcacayggggtgtcagtgaggggctgaagatctctttgatccctgcattgacgcacaggacataggccagtga

SEQ ID NO: 6794 - DNA, 600 bp, Chicken  19866894191154_4
taggaagtgtttcgctttggtaggaactggaagtgacagctgtgaaggctctttctgacttcatacrggatcagagcacactgccacggcaccgcgtgctggaagcagctgatgggacgggcaaggtgctgcaaaaaaagccctaatctggaaaatggcttcatgcatttcctcccaatcattcttcacaacctttgaaatgcaatgacagaacttgtgcaagaacaagaggaaaagatgcaggggtgggagcaaatccgtcttcacataggggatgtttcaaaacccagggcagcacayggggtgtcagtgaggggctgaagatctctttgatccctgcattgacgcacaggacataggccagtgaatgactttttgggctgctggtggggttctggatcctctggtgcctgcatggagcaggtccaaaacacactcgtacaaaggcaagggtgttgatagtagagggctcttccaccctctagatgaagagctgtgccttgtgcacagcgtgaagatggaatcaggcttcattttattaataagagtaaatgaatactggagcagtagatttagtgaattttccaaatactttctcaa

SEQ ID NO: 6795 - DNA, 599 bp, Chicken  19866894191156_1
  misc_feature (1)..(225): n is any nucleotide
nnnnnnnnnnnnnnnnnnnnnnnnnnnnnnnnnnnnnnnnnnnnnnnnnnnnnnnnnnnnnnnnnnnnnnnnnnnnnnnnnnnnnnnnnnnnnnnnnnnnnnnnnnnnnnnnnnnnnnnnnnnnnnnnnnnnnnnnnnnnnnnnnnnnnnnnnnnnnnnnnnnnnnnnnnnnnnnnnnnnnnnnnnnnnnnnnnnnnnnnnnnnnnnnnnnnnnnnnnnnnnnnncattttgagtacatcaaaatacttttcatcagtgtacatttacatcagtgtacatttggtagttggtttgaaacygatctgacccaacagaatgtagtttacataacrctggcatccctatctttcccatttaaaggtgtgttggctgtttctttcatatcctctttttggctatttgagtgaccgaattgcagttagaaggtcaagaaagcattccacagagacacaagcacaggaaggaagacagcaaggatgggacttactttatcagtgctccctgtaattcttacaagcatctcttggtccttatgtggttgccaggccactctccatcatatttgaaaagttgtggcttccagttgaactctctagtg

SEQ ID NO: 6796 - DNA, 599 bp, Chicken  19866894191156_2
  misc_feature (1)..(192): n is any nucleotide
nnnnnnnnnnnnnnnnnnnnnnnnnnnnnnnnnnnnnnnnnnnnnnnnnnnnnnnnnnnnnnnnnnnnnnnnnnnnnnnnnnnnnnnnnnnnnnnnnnnnnnnnnnnnnnnnnnnnnnnnnnnnnnnnnnnnnnnnnnnnnnnnnnnnnnnnnnnnnnnnnnnnnnnnnnnnnnnnnnnnnnnnnnnnnnnncattttgagtacatcaaaatacttttcatcagtgtacatttacatcagtgtacatttggtagttggtttgaaacygatctgacccaacagaatgtagtttacataacrctggcatccctatctttcccatttaaaggtgtgttggctgtttctttcatatcctctttttggctatttgagtgaccgaattgcagttagaaggtcaagaaagcattccacagagacacaagcacaggaaggaagacagcaaggatgggacttactttatcagtgctccctgtaattcttacaagcatctcttggtccttatgtggttgccaggccactctccatcatatttgaaaagttgtggcttccagttgaactctctagtgacgagaaaaagggaaacatcacttccattttta

SEQ ID NO: 6797 - DNA, 600 bp, Chicken  19866894191156_3
tagaaggtcaagaaagcattccacagagacacaagcacaggaaggaagacagcaaggatgggacttactttatcagtgctccctgtaattcttacaagcatctcttggtccttatgtggttgccaggccactctccatcatatttgaaaagttgtggcttccagttgaactctctagtgacgagaaaaagggaaacatcacttccatttttaagaaagggagaaagaaagacctggagaaccactggccagtgagcctcaaatctgttcccagaaagatcatggagcagatccttctcaragaaggcacatggaacacaaggaggtgctctgagactgccagcaagccttcaccaaggcagagtatacagccttcggcatgggtccacatcatatccttgtacctaagttggagagatatagatttgaaggctggactattaggtggacacagcattggttgaatggtcacagccagagggttgtggtcaatggctctatgtgctggtggaggcctgtcacgagtggtgatccccagggatctatcctgctcctcaacatctttatcaaaggcatagacagcgggatcgagtgtatccct

SEQ ID NO: 6798 - DNA, 600 bp, Chicken  19866894191160_1
ctctattgattcatcacattagagacaatgcaggagtatctgcagaggatatgtcattctctgtcattgcagattaagcttaagaaaacatttatgataaattgtgatatgctgcgaaatactggctctggaagtttgaaagagtattcctctatgcttctttacttacacttctttttcctatgcatatctgctgtcgcagaacaggagtctaaaaagtcccttggtctgaccagtggggccattcatatgttctcttctagcagataatttcagtttatggcactctcatcaatctcmtgttgttgcttcatgatacagtaaagaaagtgatcattggcagatatgtgcgaaagtgcaattacaattgcatctcataaaatttgaaggagggatagctaatggagttcatagcagtcttttttgccaatgatactttaagaaagaaagctctcttgagcaaagagctattaaatgaaactttacatgagcttatcaatgtattactactgtgtaaaacgaaaagaaaaatcaaatagtatccctatttttttaaatgaagacaaacataactttgttttccatttgtattttgtttaa

SEQ ID NO: 6799 - DNA, 600 bp, Chicken  19866894191165_1
tgatggacacacaggtgctatctcaaactgagatctccccacctttctttcacaagtggctcttttcaacagggaatgctgcctgcctgggcatcgtttcttaaaaaaatagataacaaaaacgtgatctaaaactactgaaatgaagaactctgtgaggctggcctctgagagaaacgaagtataatattaccctcataaaaccaagggactctgagctcaacccccttgcgttgcccaagatccccctgacgcttacaagcgtagggagctacctgaactctctcttcgatttgggascgagtgctgagggagaaccgagcccttccgcgaggcgctgcccttcaggtcctctgcctcggaggagcggacggcgccgggctcttcgcttcaggacgcgtttcccgccttgcggcggtacctgaggagcgctgagggaccgcgggccgccgcctgccccacccgccgcccgagctccgcccgccgtcgccccacctccctcccgtgtgccgccggagccgaggcggcgggcagccccgccacagcgcgatgagctccgagtgcagcagctacctcaacgctgacagggtgctggtgagc

SEQ ID NO: 6800 - DNA, 600 bp, Chicken  19866894191168_1
ggagccactgcagtcattttagccaccttgtctccacagcgctgctctggaggtgcgcagcctagagctgagtgctcaaggtgcagggcaatgttttacgcagtggcaaaatgatgccttcagtcttggcctcaaaatccttcagtttgatggcaagcatcagatgtctgcagatgtccgtggttcttgctgcaggttgacactgattttattgaactgtcactcagacttttctctcaagttcagaactggcagttctgagtttatttttagctactttgtgtatgtcgaaagtcatcrgcattgctttagaccacttgcttggttttctgagagttgtctggcactccttgccttcatagtgtttaattgcttggaaaagaggctcaggatcatgatctgccggttgacatgtcctagactccatcaggttggtgaggtggtactgtctccttacaacggtgctccctgctttacacaagtttgtgactggaaaaacagcttcttgaggctagaaaatgtargaaggtggctggggatggcagccccaccagcaagggacctggccattgattccaggcggaatgagcagggcaggcc

SEQ ID NO: 6801 - DNA, 600 bp, Chicken  19866894191168_2
cagacttttctctcaagttcagaactggcagttctgagtttatttttagctactttgtgtatgtcgaaagtcatcrgcattgctttagaccacttgcttggttttctgagagttgtctggcactccttgccttcatagtgtttaattgcttggaaaagaggctcaggatcatgatctgccggttgacatgtcctagactccatcaggttggtgaggtggtactgtctccttacaacggtgctccctgctttacacaagtttgtgactggaaaaacagcttcttgaggctagaaaatgtargaaggtggctggggatggcagccccaccagcaagggacctggccattgattccaggcggaatgagcagggcaggcctggctgtggtgggctaggcacagtagccagggtcagacacaaccctgcaactgctggacaagtccacagctgtggtgcatgcccaagggcaagctggaaagtcaagtgaggagttcaggggtacgtctggagatggtaaccagtcaggcataggccactggttcctactaggcatgtccatggtcaaatcaggaggtaaatttgtgagcaagcacctggatgca

SEQ ID NO: 6802 - DNA, 599 bp, Chicken  19866894191170_1
  misc_feature (1)..(6): n is any nucleotide
nnnnnnaagagtttcattaactctgtgtttcctttctgctcataagccgggctgtggatcctctgactcaaaccgagcatttttgcaccaggaggtaggctggggtaggtgtggagccctggacaggaaccaagagctggcaagacaccaggaaaatatctactcatcttcactgccttcggtgcagctattctaacttgtcccgactgatgatctgtccccggagtcacagggagcatctgaacaatgctttcaaacgtggggtttggattttgggtcgccctgtgcggagccaggagytggactcgatgatccttgggggtcatygaggtggctgtgtgcagccctgcaggctgcctgtcccgtggccgcgtgcctccccggggagctgcaccagggatgtgggagctgcgtgccgaggcacggcgtgtgagtcacccaagggaacgtgtcttacataaccctgcacacgtttttggagcatgctgcagctgaaagggctgccaggagtcctgacagggacggggaggtgcagacagaagaaagcaaaggctgcttttcctttgcccctttaggtatgacccctctgatgcaggagg

SEQ ID NO: 6803 - DNA, 600 bp, Chicken  19866894191170_2
tttcctttctgctcataagccgggctgtggatcctctgactcaaaccgagcatttttgcaccaggaggtaggctggggtaggtgtggagccctggacaggaaccaagagctggcaagacaccaggaaaatatctactcatcttcactgccttcggtgcagctattctaacttgtcccgactgatgatctgtccccggagtcacagggagcatctgaacaatgctttcaaacgtggggtttggattttgggtcgccctgtgcggagccaggagytggactcgatgatccttgggggtcatygaggtggctgtgtgcagccctgcaggctgcctgtcccgtggccgcgtgcctccccggggagctgcaccagggatgtgggagctgcgtgccgaggcacggcgtgtgagtcacccaagggaacgtgtcttacataaccctgcacacgtttttggagcatgctgcagctgaaagggctgccaggagtcctgacagggacggggaggtgcagacagaagaaagcaaaggctgcttttcctttgcccctttaggtatgacccctctgatgcaggaggccacatgtggctggaggtcctgtggtgt

SEQ ID NO: 6804 - DNA, 599 bp, Chicken  19866894191175_1
  misc_feature (1)..(25): n is any nucleotide
nnnnnnnnnnnnnnnnnnnnnnnnnaattcaagaaagatcatgctttaaaaacctccaaaggaattactgaaagatgatgtctgggaattgatctatgtatgtctacaatctctagttcatatatgacaaggcattacagcatttttcacaatgaatacaagggaatttaaaagagtgcagtaagagattaaataataaacaattgctttaatgtaagtttcaagaatgcaaatgttgccaaagtcatatagttgcattctgataaaatacacaaaaaatgtacagtagctgagcaagaraagaaaaaaaatggcattcctgctcttctcatttaagaaaaagattcccctttgagctgagtaatgtcaagtttttagctgctgctaacaaatgaaatactgaatttctttcctttattcttttttkaattatgcttagtataaatgcacgatttcgttagtagttgccactaytagtaactacgagtaattgcaaaggtcttctttgcatttattctcattttgcaaggcatgtgacaaaacaaagggctgcatgttttatgacttctacacaattaaactgcatgttttgagagart

SEQ ID NO: 6805 - DNA, 600 bp, Chicken  19866894191175_2
caaggcattacagcatttttcacaatgaatacaagggaatttaaaagagtgcagtaagagattaaataataaacaattgctttaatgtaagtttcaagaatgcaaatgttgccaaagtcatatagttgcattctgataaaatacacaaaaaatgtacagtagctgagcaagaraagaaaaaaaatggcattcctgctcttctcatttaagaaaaagattcccctttgagctgagtaatgtcaagtttttagctgctgctaacaaatgaaatactgaatttctttcctttattcttttttkaattatgcttagtataaatgcacgatttcgttagtagttgccactaytagtaactacgagtaattgcaaaggtcttctttgcatttattctcattttgcaaggcatgtgacaaaacaaagggctgcatgttttatgacttctacacaattaaactgcatgttttgagagartgtaataataactgatgcatttccataatatagtatgtaattctatgaagagagrcattttccattaatatgacagcttcaaaaaatatgtcaataactactgaagcaataacacgtaactgctagcaa

SEQ ID NO: 6806 - DNA, 600 bp, Chicken  19866894191175_3
agtgcagtaagagattaaataataaacaattgctttaatgtaagtttcaagaatgcaaatgttgccaaagtcatatagttgcattctgataaaatacacaaaaaatgtacagtagctgagcaagaraagaaaaaaaatggcattcctgctcttctcatttaagaaaaagattcccctttgagctgagtaatgtcaagtttttagctgctgctaacaaatgaaatactgaatttctttcctttattcttttttkaattatgcttagtataaatgcacgatttcgttagtagttgccactaytagtaactacgagtaattgcaaaggtcttctttgcatttattctcattttgcaaggcatgtgacaaaacaaagggctgcatgttttatgacttctacacaattaaactgcatgttttgagagartgtaataataactgatgcatttccataatatagtatgtaattctatgaagagagrcattttccattaatatgacagcttcaaaaaatatgtcaataactactgaagcaataacacgtaactgctagcaaacaaatgtttattgtgtcatcatctatcatctttagtcattgtgtca

SEQ ID NO: 6807 - DNA, 600 bp, Chicken  19866894191175_4
araagaaaaaaaatggcattcctgctcttctcatttaagaaaaagattcccctttgagctgagtaatgtcaagtttttagctgctgctaacaaatgaaatactgaatttctttcctttattcttttttkaattatgcttagtataaatgcacgatttcgttagtagttgccactaytagtaactacgagtaattgcaaaggtcttctttgcatttattctcattttgcaaggcatgtgacaaaacaaagggctgcatgttttatgacttctacacaattaaactgcatgttttgagagartgtaataataactgatgcatttccataatatagtatgtaattctatgaagagagrcattttccattaatatgacagcttcaaaaaatatgtcaataactactgaagcaataacacgtaactgctagcaaacaaatgtttattgtgtcatcatctatcatctttagtcattgtgtcatattgatttgtgttagtactgtctagctaggcactatctagcttgttttataggtgaaaaataattgccaaggagaatttcctattctattcagtgcacattcttacacttaaatccatcgtgt

SEQ ID NO: 6808 - DNA, 600 bp, Chicken  19866894191175_5
gagctgagtaatgtcaagtttttagctgctgctaacaaatgaaatactgaatttctttcctttattcttttttkaattatgcttagtataaatgcacgatttcgttagtagttgccactaytagtaactacgagtaattgcaaaggtcttctttgcatttattctcattttgcaaggcatgtgacaaaacaaagggctgcatgttttatgacttctacacaattaaactgcatgttttgagagartgtaataataactgatgcatttccataatatagtatgtaattctatgaagagagrcattttccattaatatgacagcttcaaaaaatatgtcaataactactgaagcaataacacgtaactgctagcaaacaaatgtttattgtgtcatcatctatcatctttagtcattgtgtcatattgatttgtgttagtactgtctagctaggcactatctagcttgttttataggtgaaaaataattgccaaggagaatttcctattctattcagtgcacattcttacacttaaatccatcgtgttttgcttagggggactaaagctgttttctaaagcatgttcttaccatgttctaaa

SEQ ID NO: 6809 - DNA, 600 bp, Chicken  19866894191197_1
agaaacagggctcatattttggtggttagctcttctttgccttaacagatctagagctaaaaatttatttgaaagcatcatttccagaaaatggaatagcattgtttttcagcttcaaccaccacaaggaacttcataaagaaagataccttagcactgtaaggcagctaattattttctgcaggtatactggtaatgctgtacatatcttttcagtcactttaacaaattgcagtattaagttcttgagtttgagtgtcaattgttatattcaaatattgtttatatgtgaaaatcaarccttgaaaaatcgcgtggtttgttctgctgagatgtctaactatttacatcccccaggtattttgaagtcatcgtaggagtcattcatttttcacttcatttaacagattttacacacattttttcacctcaattaatatcgcctagaatttcacagtttatctttttttccatgttagagagaaagcaaatattataaatattcccaaccagcctgcaactgtcacctttatacatactcttagcagcatttcatgttttgcaatgagaaagcatattttattcagtctatcacgtctt

SEQ ID NO: 6810 - DNA, 600 bp, Chicken  19866894191203_1
tacccttgagtcacctgtgtactaaggacacagagcagctgaatgcaataaccacccagttaccaaaaagaggaatacataattcttccatgcttcttcacgcaatgaaaaacttaccagtgcaccacagtcccttttggggataagtacatcagttctaatttgtaatttgccagtcttctatccagtttctagaatttgtttttggcagaaacagtttatcgccaaccagcaaacaaaattcctgaagccttctcatgacatcttgtgtccctgttcttggtgctggacaactagacraagcaattacaacttcaattggtactgcctgattctgtctgaaccagctgcagtctatggtaattttgcttcatattactaagacagtctcacctctcccttgartaaaaagatgttctaaataatactgcaggagaatgacttcattcataaataacactcgtgtatcatgaagtttaaacaggtttatacagaaagaaaacaagagccttcttgaaaccyttcatatgaacaaaatgctctcctcctcaggagtgatacagacttgcaggcctgtgaaggggcaaggattaatctcta

SEQ ID NO: 6811 - DNA, 600 bp, Chicken  19866894191203_2
tgaaaaacttaccagtgcaccacagtcccttttggggataagtacatcagttctaatttgtaatttgccagtcttctatccagtttctagaatttgtttttggcagaaacagtttatcgccaaccagcaaacaaaattcctgaagccttctcatgacatcttgtgtccctgttcttggtgctggacaactagacraagcaattacaacttcaattggtactgcctgattctgtctgaaccagctgcagtctatggtaattttgcttcatattactaagacagtctcacctctcccttgartaaaaagatgttctaaataatactgcaggagaatgacttcattcataaataacactcgtgtatcatgaagtttaaacaggtttatacagaaagaaaacaagagccttcttgaaaccyttcatatgaacaaaatgctctcctcctcaggagtgatacagacttgcaggcctgtgaaggggcaaggattaatctctattttcagaactgatgtcagatcaggagttattatttgcacaagttactgttttatagtttgaaatcacgtggatcatctgaagtggagatccagagacatgttta

SEQ ID NO: 6812 - DNA, 600 bp, Chicken  19866894191203_3
cgccaaccagcaaacaaaattcctgaagccttctcatgacatcttgtgtccctgttcttggtgctggacaactagacraagcaattacaacttcaattggtactgcctgattctgtctgaaccagctgcagtctatggtaattttgcttcatattactaagacagtctcacctctcccttgartaaaaagatgttctaaataatactgcaggagaatgacttcattcataaataacactcgtgtatcatgaagtttaaacaggtttatacagaaagaaaacaagagccttcttgaaaccyttcatatgaacaaaatgctctcctcctcaggagtgatacagacttgcaggcctgtgaaggggcaaggattaatctctattttcagaactgatgtcagatcaggagttattatttgcacaagttactgttttatagtttgaaatcacgtggatcatctgaagtggagatccagagacatgtttagtcttctcttagttttgcattggataacagggtaagttcacttttctgcttaaaattaaaggtagtatttatttacttaaaaaaaaccatttacaacatttaattaaaaccaaatat

SEQ ID NO: 6813 - DNA, 600 bp, Chicken  19866894191205_1
tgattgtatagagcttgctttcaagcaaggggaagttcacctttccggtggtgttaggctattgggctgctcaggtttctcacggatcctttttcatttcaaacagcaggttttctaagggtgtgggatatcaaagtgtttccaagtggcatagatctttcttataacgtgtagaactttttaatgttcgtagctgattcaagtcacaaattagaaccactgaatttctgtttaatctttgtccatacttcacaatgagtttgcatttaggagagtctccagaagtgttgcaacgtaccrtaatgcactggctgagttgtgtccaggaccttagttgtcatgtattcatgttctctaccaagtgcctcttgcattaataataaagttagctcatttcagtttgaatagcaacttggcatgtaatcagggtctaagaaatattgagctgttctcttccttcacagttgtgaaggagaagctaccaggagggctccacttgtatgagagaagctgtgtaggcaggtgggcagcgctgagccaggtgttgctggaagatgcttgaggtcagggtactgcatttgcctggtgcaggtcctggtc

SEQ ID NO: 6814 - DNA, 600 bp, Chicken  19866894191205_2
ttagactgtcagacggttctgaatgtctcctcattttggagaagattctgggtgttgaagaatctctttcaacagaagaaccagatgttatatcagtgttttgtgactgttttcattccattgacacattttgtctgtccttttatcataaggctctgttaattctgcagtggtttctttttttaattgttgtttggttgttggtttcttttgctattagtctttttcagcaaaggaatatactcactgatatggcattgcattctactacctcctggtctttcgacttgccagagaatkaaagtgaattttttttccttagctgaagtttgttttttgcctgaatggatactaaacattaactacagtcagtattaacagcacttcttgaataactaagaaaacatttttacacaaatatgaaagattmatctagtactttgtctaattactaaagcaaaatmtaatgtactaatcccaatcttcctcctgtgtttctagtgtcaaaacttccacattctccctacaaatctattgtagtctgtattagcatgggcttcatggttgacgcagaaatcttcagcagatagagaatctagg

SEQ ID NO: 6815 - DNA, 600 bp, Chicken  19866894191205_3
ttgtctgtccttttatcataaggctctgttaattctgcagtggtttctttttttaattgttgtttggttgttggtttcttttgctattagtctttttcagcaaaggaatatactcactgatatggcattgcattctactacctcctggtctttcgacttgccagagaatkaaagtgaattttttttccttagctgaagtttgttttttgcctgaatggatactaaacattaactacagtcagtattaacagcacttcttgaataactaagaaaacatttttacacaaatatgaaagattmatctagtactttgtctaattactaaagcaaaatmtaatgtactaatcccaatcttcctcctgtgtttctagtgtcaaaacttccacattctccctacaaatctattgtagtctgtattagcatgggcttcatggttgacgcagaaatcttcagcagatagagaatctagggagaaaaagtaaagcatttaaataaagcaagggatgttggcctgactcagaatatggaaaagttttatctgaactcctttggagctctgcagtggtttcattttgtcacacaaaaatgcaacataatggt

SEQ ID NO: 6816 - DNA, 600 bp, Chicken  19866894191205_4
ctgcagtggtttctttttttaattgttgtttggttgttggtttcttttgctattagtctttttcagcaaaggaatatactcactgatatggcattgcattctactacctcctggtctttcgacttgccagagaatkaaagtgaattttttttccttagctgaagtttgttttttgcctgaatggatactaaacattaactacagtcagtattaacagcacttcttgaataactaagaaaacatttttacacaaatatgaaagattmatctagtactttgtctaattactaaagcaaaatmtaatgtactaatcccaatcttcctcctgtgtttctagtgtcaaaacttccacattctccctacaaatctattgtagtctgtattagcatgggcttcatggttgacgcagaaatcttcagcagatagagaatctagggagaaaaagtaaagcatttaaataaagcaagggatgttggcctgactcagaatatggaaaagttttatctgaactcctttggagctctgcagtggtttcattttgtcacacaaaaatgcaacataatggtgaacttttaaacccagtttgcaacagaggaggca

SEQ ID NO: 6817 - DNA, 599 bp, Chicken  19866894191211_1
  misc_feature (1)..(142): n is any nucleotide
nnnnnnnnnnnnnnnnnnnnnnnnnnnnnnnnnnnnnnnnnnnnnnnnnnnnnnnnnnnnnnnnnnnnnnnnnnnnnnnnnnnnnnnnnnnnnnnnnnnnnnnnnnnnnnnnnnnnnnnnnnnnnnnnnnnnnnnnnnnnnnattgcgtggcctcaagcaagtcacttcacttttctctttcagttctccaacagactacaattatttatctctcaggaatgctatcataattaacaaactccttcattagccactgctgtttttcaaaaatgccgtttaaacctgcccatgaagaagaratttacagccatgagattttgcttccagctctcatgtccttgttggtaaaggctctagcatcagcccctcaccctagagcccattgcttgtaatgaggtgcacatgcacatcycaagcaaacacaagactgaaggtatggcagctcaaagtgcaaaacaattccattatytgtggctcttgaataaagctcggagagtgaaagctgtacaaattccaagcaaaagactgaaatctatctttgtgaagcagaacttcccagtaacacgatcttgtttttatttttataatttcctttttc

SEQ ID NO: 6818 - DNA, 599 bp, Chicken  19866894191211_2
  misc_feature (1)..(29): n is any nucleotide
nnnnnnnnnnnnnnnnnnnnnnnnnnnnnattgcgtggcctcaagcaagtcacttcacttttctctttcagttctccaacagactacaattatttatctctcaggaatgctatcataattaacaaactccttcattagccactgctgtttttcaaaaatgccgtttaaacctgcccatgaagaagaratttacagccatgagattttgcttccagctctcatgtccttgttggtaaaggctctagcatcagcccctcaccctagagcccattgcttgtaatgaggtgcacatgcacatcycaagcaaacacaagactgaaggtatggcagctcaaagtgcaaaacaattccattatytgtggctcttgaataaagctcggagagtgaaagctgtacaaattccaagcaaaagactgaaatctatctttgtgaagcagaacttcccagtaacacgatcttgtttttatttttataatttcctttttctctggtctcagtatcatgaggatttgctttaatttgtaccagctcccactgacacacaagtttacacaaacaaatttttttctggaagggacagctcagcaccaaacaagtcc

SEQ ID NO: 6819 - DNA, 600 bp, Chicken  19866894191211_3
cttttctctttcagttctccaacagactacaattatttatctctcaggaatgctatcataattaacaaactccttcattagccactgctgtttttcaaaaatgccgtttaaacctgcccatgaagaagaratttacagccatgagattttgcttccagctctcatgtccttgttggtaaaggctctagcatcagcccctcaccctagagcccattgcttgtaatgaggtgcacatgcacatcycaagcaaacacaagactgaaggtatggcagctcaaagtgcaaaacaattccattatytgtggctcttgaataaagctcggagagtgaaagctgtacaaattccaagcaaaagactgaaatctatctttgtgaagcagaacttcccagtaacacgatcttgtttttatttttataatttcctttttctctggtctcagtatcatgaggatttgctttaatttgtaccagctcccactgacacacaagtttacacaaacaaatttttttctggaagggacagctcagcaccaaacaagtcctcacgtatacagacgcatctgacttaagtttcaaaaccttacaacaaatacacgagaa

SEQ ID NO: 6820 - DNA, 600 bp, Chicken  19866894191212_1
actacactgacttctctgccagaccaggtcatcttccaatactgaaagactgaacaagtttttggatgttaaaatccacagagaagttgaggatatttttagattcataatatctaaaaatatttttgctttttgtatattctgtaaaaatcactgccatggaaaattagaaagtactaaagggattaaattactataatatgttctcaaagaagcatttatcaattcacaagaagacaatagcacggacacttccacagtctgctcaacatgagagcataatttaattttatacaagaygtgcaatgtataggtaaaataataacagatctgaaaaarttagacaatgttactggcaatcacttgtaaatgagagaaaagatggggaagactcaaaatagggacagtagccatgggtgagatttatagtcatactctaytgacagtgttaacggtgtcttttgcctcactctgtattgaattttgaccagtttatttatgcaatgccaatgatttattcttcagactgtaccacttcatgtaacaacacttcggctataaaacaatctgatccagtgaaccaggtatccaagagagaaa

SEQ ID NO: 6821 - DNA, 600 bp, Chicken  19866894191212_2
tactgaaagactgaacaagtttttggatgttaaaatccacagagaagttgaggatatttttagattcataatatctaaaaatatttttgctttttgtatattctgtaaaaatcactgccatggaaaattagaaagtactaaagggattaaattactataatatgttctcaaagaagcatttatcaattcacaagaagacaatagcacggacacttccacagtctgctcaacatgagagcataatttaattttatacaagaygtgcaatgtataggtaaaataataacagatctgaaaaarttagacaatgttactggcaatcacttgtaaatgagagaaaagatggggaagactcaaaatagggacagtagccatgggtgagatttatagtcatactctaytgacagtgttaacggtgtcttttgcctcactctgtattgaattttgaccagtttatttatgcaatgccaatgatttattcttcagactgtaccacttcatgtaacaacacttcggctataaaacaatctgatccagtgaaccaggtatccaagagagaaactcagacaaataaagtttatctgtttctcatttgggcaa

SEQ ID NO: 6822 - DNA, 600 bp, Chicken  19866894191212_3
tctgtaaaaatcactgccatggaaaattagaaagtactaaagggattaaattactataatatgttctcaaagaagcatttatcaattcacaagaagacaatagcacggacacttccacagtctgctcaacatgagagcataatttaattttatacaagaygtgcaatgtataggtaaaataataacagatctgaaaaarttagacaatgttactggcaatcacttgtaaatgagagaaaagatggggaagactcaaaatagggacagtagccatgggtgagatttatagtcatactctaytgacagtgttaacggtgtcttttgcctcactctgtattgaattttgaccagtttatttatgcaatgccaatgatttattcttcagactgtaccacttcatgtaacaacacttcggctataaaacaatctgatccagtgaaccaggtatccaagagagaaactcagacaaataaagtttatctgtttctcatttgggcaatagagaatcacacagtccagcctgggtcatcacaccagtaaacttactaacttttctaggtataccaatatcactgatccaaactgtgccaagagttctcc

SEQ ID NO: 6823 - DNA, 599 bp, Chicken  19866894191213_1
  misc_feature (1)..(23): n is any nucleotide
nnnnnnnnnnnnnnnnnnnnnnnatctttctgtgaacactcctacaagtcaatttgcagattctgttaacagtgttaacactgttactctgagtagagcactgataatgtgaaaaattcatggcaaaacagctctttcagttcatgatgttgattctaacgttgcagcccatttttgtcaaaaataatatggaacgtgctattaaacacaacctaaaattaaagaagaaaaaagatgagcagtggtaattccattttatacttgattaatgaatgcaaagacatggtatctgatgccaamgctctggattgtggttgcgaggcaattctgatggaatatttgtcattaaattacctcatcccagatgttacttaaagattgagggttttcacagttaaataagtgaagtcttttaatatcataatgtctgtgttttgcaggctagaacactgagtatttatttttgttttctgtagcacttgtgtttgtctttcaatcaaagcgttgtttccaaagagacagtcttgaatatagcrtgacagaatcctgttccaactaatgtttattgcaatgtaaacatctcttatgaggagctgcat

SEQ ID NO: 6824 - DNA, 600 bp, Chicken  19866894191213_2
gagcagtggtaattccattttatacttgattaatgaatgcaaagacatggtatctgatgccaamgctctggattgtggttgcgaggcaattctgatggaatatttgtcattaaattacctcatcccagatgttacttaaagattgagggttttcacagttaaataagtgaagtcttttaatatcataatgtctgtgttttgcaggctagaacactgagtatttatttttgttttctgtagcacttgtgtttgtctttcaatcaaagcgttgtttccaaagagacagtcttgaatatagcrtgacagaatcctgttccaactaatgtttattgcaatgtaaacatctcttatgaggagctgcattctctgagaagctagagagaaatgaacttaccacttaaaaattctgcttatatagttgsagtgcttttccagctatgtattcaatgaattcagcactctttgggtctaagtggggaggaactttaatggtgaaagtaggcgaagtcaaaatattcacatctaccacagtttcatttgcaccagaagcatccccaggtatcaccttgaagagagcaaatcagttatttagcactacaa

SEQ ID NO: 6825 - DNA, 600 bp, Chicken  19866894191213_3
tcccagatgttacttaaagattgagggttttcacagttaaataagtgaagtcttttaatatcataatgtctgtgttttgcaggctagaacactgagtatttatttttgttttctgtagcacttgtgtttgtctttcaatcaaagcgttgtttccaaagagacagtcttgaatatagcrtgacagaatcctgttccaactaatgtttattgcaatgtaaacatctcttatgaggagctgcattctctgagaagctagagagaaatgaacttaccacttaaaaattctgcttatatagttgsagtgcttttccagctatgtattcaatgaattcagcactctttgggtctaagtggggaggaactttaatggtgaaagtaggcgaagtcaaaatattcacatctaccacagtttcatttgcaccagaagcatccccaggtatcaccttgaagagagcaaatcagttatttagcactacaaatagctgtgtgcctttcagttttgtttatggttacttccatattcaataagggaaaatgaaataaaaaaaatattttaatcttgtctaccttcttgaaattactttcttatgaaataacagt

SEQ ID NO: 6826 - DNA, 600 bp, Chicken  19866894191214_1
gcatgcctatgtggcaaatacattggcagaatttgaagactttcttttttcttgacagcgcaactaaggaagaacaaaaaccagataaaacagctgttctaactcaaggaaaaaaatgccattaaagggaacaggcttatgcttatttggatgaaatgtattctactttgtttcatcatagtgagtgatttagagacttcttttaagcagtcactgctacccaagcataagataacatgtaaaacagaactggataaaagtagttattataattgcaccaaatgcagttctggttgggtytgtaaaggacaaagaagcaaaaataacagcttaggcagagttcataaagtttgggcctggaattaaatcagtattctagtctgaaagcattctcttctatagcaataaatatacagaacaattagtgtaggtatttaaggcagaatatatctaactttccaataggtttttttttttttttaaatacatgtaggcacatagcatttccaggctttggatatgtacaaatttcatgttacacaaaaaatgctagatttcaaaatctgaccaagaaaaaaataaaaagaaacctttgcttct

SEQ ID NO: 6827 - DNA, 599 bp, Chicken  19866894191225_1
  misc_feature (1)..(195): n is any nucleotide
nnnnnnnnnnnnnnnnnnnnnnnnnnnnnnnnnnnnnnnnnnnnnnnnnnnnnnnnnnnnnnnnnnnnnnnnnnnnnnnnnnnnnnnnnnnnnnnnnnnnnnnnnnnnnnnnnnnnnnnnnnnnnnnnnnnnnnnnnnnnnnnnnnnnnnnnnnnnnnnnnnnnnnnnnnnnnnnnnnnnnnnnnnnnnnnnnnnctgggacagagttggttttcttcatttaactgtttacatttgtttatgtaatagcactgtaatttggtggaaggaaaaagatgttagaagttctacagtctagtytgatgaatgttgcatgtgtagttctgaagaaagcatagaagcaaagcataaaaaacactgtatttgcatggtggtgtgtttcggagttagtttgacttttgaaaagtgttttatgagaaaatactctgttctgtatcttgaagagagctgtttaactctagaatggaagtaaacttgcaaaggattcagaaaaggagtctaatgatactgggagtgagaagagaggcaaaaagtcctgcatgaggctgacgaagtgaagagactgatctagaacagttctggatggtagatgtgattgg

SEQ ID NO: 6828 - DNA, 600 bp, Chicken  19866894191225_2
atgatactgggagtgagaagagaggcaaaaagtcctgcatgaggctgacgaagtgaagagactgatctagaacagttctggatggtagatgtgattggaaaactagagaggctgagagtgggatctgagaaattaaagaagttggtaccatttggccatggaagtaagactggaagttgaagggaaagctggaactgtatgtggaagctacctgagtctgggggccattaaggtatctggagaagacaaaggggctgtcaacctgcaagtaaggactggaagggttagaactgaggacargcaaatagggaatgagacagtaagccagtggtgttgtagacagataaatgaacaaggcagagaagtgaaatggattctactcttgtgagttacatacacactaacaaagagtttggtgcagcagaaaaaaggaaagagatcagaacagttggtgcttaggctccccatatttctattagatacagcacagtaatgtcagggtatgagccacctctgattgcataatacagagagtcatctgagttctgcaaacagccttattcttgcttgggaagaatgtattggtatcccttttgaata

SEQ ID NO: 6829 - DNA, 600 bp, Chicken  19866894191229_1
gcacttcttatattcctcagattataaaagtgacactttttttctacacttcagtttctttggcatacgtatgtatgtgccagatgctaaaaaatcaataagcaaagagtcaaggcattcgaacctctgggaaactgactgtttggagttcctgcaacacactttgaaaatcaggtcatgtcagggttggattacaagccaataaataagaaatctagagacaggctctcattttttccttttgtacatctttttctgtatcaccataaaacatgatttaaaaatatgccaacatcttayatgctcctattattatagcaatcaaaatgcaggagttttgcagtgtacttagttagaaatgtgatgaaaccacttactgccaaaacaaagtrattctctcaggggtactatcacactgtgcttggtccaaattgaagttctcaaaccccaaaagccaggagtttttccctctgacattatcacagcctaaactatttcctcccttctgttttggcttttttttttatttcttttttctatttttactaattttttaataactgatataactctgcctgaagagtttacaattcagacact

SEQ ID NO: 6830 - DNA, 600 bp, Chicken  19866894191229_2
aatcaataagcaaagagtcaaggcattcgaacctctgggaaactgactgtttggagttcctgcaacacactttgaaaatcaggtcatgtcagggttggattacaagccaataaataagaaatctagagacaggctctcattttttccttttgtacatctttttctgtatcaccataaaacatgatttaaaaatatgccaacatcttayatgctcctattattatagcaatcaaaatgcaggagttttgcagtgtacttagttagaaatgtgatgaaaccacttactgccaaaacaaagtrattctctcaggggtactatcacactgtgcttggtccaaattgaagttctcaaaccccaaaagccaggagtttttccctctgacattatcacagcctaaactatttcctcccttctgttttggcttttttttttatttcttttttctatttttactaattttttaataactgatataactctgcctgaagagtttacaattcagacactgccctagcatatgaagaactgattaaatgtacgtcaaaatcaatggacgacctcatccctccagtgtaagctaaaaatcccttgagcattag

SEQ ID NO: 6831 - DNA, 600 bp, Chicken  19866894191240_1
cataaaatacaatcttgtgatctaaactgtccttcttaaaagggatgatgcataatgtgatcaatatttttttagactgatagaaacagctaattacaagtaaatcttttatatgtgacagacccacagtaaatgagaaaaacatttttttctacccataatgtctgaaatgtacactttttaaatgaagaaaatggagggaagaatcacttcagcctgctaaaggagcttgaggaacacctaggatgctttgtccttgctcttccctattgattaacagtagaagaattttgaatgcgrgctggaaaaaaaatcttatgtaaatcacattgaatcaatgcctcctacaaccgcaacatggaactgaactgtggatagaacagatactgcttaatttctgatagcaaaggaatggtactggcaatacattccaagacagacacaagatgcagctgaaagatgcatggacttagccgaaaaaaagtaaagagtaattcataaggaccgggtttcgccccattttactgaggtctcaacttttcagagtgaatgggtacttggtgtaaacatgaccttgcaaactacagcttcttcrtgatt

SEQ ID NO: 6832 - DNA, 600 bp, Chicken  19866894191240_2
tgcgrgctggaaaaaaaatcttatgtaaatcacattgaatcaatgcctcctacaaccgcaacatggaactgaactgtggatagaacagatactgcttaatttctgatagcaaaggaatggtactggcaatacattccaagacagacacaagatgcagctgaaagatgcatggacttagccgaaaaaaagtaaagagtaattcataaggaccgggtttcgccccattttactgaggtctcaacttttcagagtgaatgggtacttggtgtaaacatgaccttgcaaactacagcttcttcrtgatttgccatcttaggacacctttcaatggatggccctgaggaccattactgaaaggagctatgctcgtgctgtagggaagtcaggaattctttttaaaatgaatgaatgaatatataaatacatggattgaacatcttgatggctttttttcatgattttaagtatttttaaaagagcaatgcattttattagcaggaaagtgaaagtgtttccagaaaatcagcacgttttgctaacgtgctgtttaaaaaaaacataattggcaaagaaattcaccaataaccaaaggaaacaatt

SEQ ID NO: 6833 - DNA, 600 bp, Chicken  19866894191240_3
actgaagcatgtcagcatggagcactggcatttcaactcaattttgcaaacaaaaagaatgattagagaaggaaagcatttagaagtaagcaatgaaggaaaagaggcatttattacaaacgccattgtgcaatgccagatctggttaagtatagtgtgtcactccctctatggttagatgctattcagtttaaatcaagctgacttatgacaaccatgagtggaaattcttataaggtgccacagaaatataatcagcctccagaaacactcactcaactacctataaagcagcacagyrgactaatrtgagttgaggatgagcaaggccatgatgatgtgaaggaccaccatgcagagtttctggagcacgcacagcacgtctcatcaaactgtaacagaatttggagtacaaagttcactcaytctgtatttctaagtgaacattttttttcccccaaggatgctcatttcagcctcaggaattaacttctgcatacctgaaccaatgcattttttaattcctcaatgtcaagcacacctgaagtggaagcctggatgcaagtactctcgtaccttgaggaaaccacacaacatgtt

SEQ ID NO: 6834 - DNA, 600 bp, Chicken  19866894191240_4
ctgaagcatgtcagcatggagcactggcatttcaactcaattttgcaaacaaaaagaatgattagagaaggaaagcatttagaagtaagcaatgaaggaaaagaggcatttattacaaacgccattgtgcaatgccagatctggttaagtatagtgtgtcactccctctatggttagatgctattcagtttaaatcaagctgacttatgacaaccatgagtggaaattcttataaggtgccacagaaatataatcagcctccagaaacactcactcaactacctataaagcagcacagyrgactaatrtgagttgaggatgagcaaggccatgatgatgtgaaggaccaccatgcagagtttctggagcacgcacagcacgtctcatcaaactgtaacagaatttggagtacaaagttcactcaytctgtatttctaagtgaacattttttttcccccaaggatgctcatttcagcctcaggaattaacttctgcatacctgaaccaatgcattttttaattcctcaatgtcaagcacacctgaagtggaagcctggatgcaagtactctcgtaccttgaggaaaccacacaacatgttt

SEQ ID NO: 6835 - DNA, 600 bp, Chicken  19866894191240_5
tgtcagcatggagcactggcatttcaactcaattttgcaaacaaaaagaatgattagagaaggaaagcatttagaagtaagcaatgaaggaaaagaggcatttattacaaacgccattgtgcaatgccagatctggttaagtatagtgtgtcactccctctatggttagatgctattcagtttaaatcaagctgacttatgacaaccatgagtggaaattcttataaggtgccacagaaatataatcagcctccagaaacactcactcaactacctataaagcagcacagyrgactaatrtgagttgaggatgagcaaggccatgatgatgtgaaggaccaccatgcagagtttctggagcacgcacagcacgtctcatcaaactgtaacagaatttggagtacaaagttcactcaytctgtatttctaagtgaacattttttttcccccaaggatgctcatttcagcctcaggaattaacttctgcatacctgaaccaatgcattttttaattcctcaatgtcaagcacacctgaagtggaagcctggatgcaagtactctcgtaccttgaggaaaccacacaacatgtttttgttttt

SEQ ID NO: 6836 - DNA, 600 bp, Chicken  19866894191240_6
tgtgcaatgccagatctggttaagtatagtgtgtcactccctctatggttagatgctattcagtttaaatcaagctgacttatgacaaccatgagtggaaattcttataaggtgccacagaaatataatcagcctccagaaacactcactcaactacctataaagcagcacagyrgactaatrtgagttgaggatgagcaaggccatgatgatgtgaaggaccaccatgcagagtttctggagcacgcacagcacgtctcatcaaactgtaacagaatttggagtacaaagttcactcaytctgtatttctaagtgaacattttttttcccccaaggatgctcatttcagcctcaggaattaacttctgcatacctgaaccaatgcattttttaattcctcaatgtcaagcacacctgaagtggaagcctggatgcaagtactctcgtaccttgaggaaaccacacaacatgtttttgtttttctcccattcctcctgtgctcacggtggttggggtttacaagtagctctggcttttaaaaccaagccatgcaacttgattcataaagtgctgaaatgtcagagaaaatgggacaaaga

SEQ ID NO: 6837 - DNA, 600 bp, Chicken  19866894191244_1
gtttgcctttctcgtctgagtgcagaaacaatggggaaccgacttgagcacgaaagcagaaactgcggtcatggcagctgggagagcagcggggcagccaggagaaggggaggaagctggagagctggagagggaaagcagacagcctgagcaagctgggcaagttccccacactcactgcatccagcttctcaagggacagcgtgactgagatgtcagcaagcacacctgtggacagagctggtcggttcttagagaggcgtgaaagctgtgcagaagcagtctgctgccccctgtcaygtgcccagcaagccatcgctgcgagtggcttttgcagctcaaatcctccctgctcttctttttcctagcaaaataacctggcttgcacacrctgttagaccaagcaggcagtggtgccaggtgcagggcctcagacctgcccagtggggtgcctgccaggtcccagcaaggggtcygtgttccatgtggaaatctctygtttcaaatatggttgttttgctttcatgttttgttctttcttgatggaaacagcccacgccccgtgaatcatcatctgcrctgatttgtttttcccaccgt

SEQ ID NO: 6838 - DNA, 600 bp, Chicken  19866894191244_2
gggcagccaggagaaggggaggaagctggagagctggagagggaaagcagacagcctgagcaagctgggcaagttccccacactcactgcatccagcttctcaagggacagcgtgactgagatgtcagcaagcacacctgtggacagagctggtcggttcttagagaggcgtgaaagctgtgcagaagcagtctgctgccccctgtcaygtgcccagcaagccatcgctgcgagtggcttttgcagctcaaatcctccctgctcttctttttcctagcaaaataacctggcttgcacacrctgttagaccaagcaggcagtggtgccaggtgcagggcctcagacctgcccagtggggtgcctgccaggtcccagcaaggggtcygtgttccatgtggaaatctctygtttcaaatatggttgttttgctttcatgttttgttctttcttgatggaaacagcccacgccccgtgaatcatcatctgcrctgatttgtttttcccaccgtgcgcggctcccagacgagtccttttggtcacataagccttacaaatctgaaccaaatgttgacatgcacgaacgtgtgtgtgagcaggatg

SEQ ID NO: 6839 - DNA, 600 bp, Chicken  19866894191244_3
actgcatccagcttctcaagggacagcgtgactgagatgtcagcaagcacacctgtggacagagctggtcggttcttagagaggcgtgaaagctgtgcagaagcagtctgctgccccctgtcaygtgcccagcaagccatcgctgcgagtggcttttgcagctcaaatcctccctgctcttctttttcctagcaaaataacctggcttgcacacrctgttagaccaagcaggcagtggtgccaggtgcagggcctcagacctgcccagtggggtgcctgccaggtcccagcaaggggtcygtgttccatgtggaaatctctygtttcaaatatggttgttttgctttcatgttttgttctttcttgatggaaacagcccacgccccgtgaatcatcatctgcrctgatttgtttttcccaccgtgcgcggctcccagacgagtccttttggtcacataagccttacaaatctgaaccaaatgttgacatgcacgaacgtgtgtgtgagcaggatgagtgtcttactactgcacatataaatacacaaacacatttaatagaaaagaagattcttttcaagacctgctgccacgctgtggg

SEQ ID NO: 6840 - DNA, 600 bp, Chicken  19866894191244_4
acagcgtgactgagatgtcagcaagcacacctgtggacagagctggtcggttcttagagaggcgtgaaagctgtgcagaagcagtctgctgccccctgtcaygtgcccagcaagccatcgctgcgagtggcttttgcagctcaaatcctccctgctcttctttttcctagcaaaataacctggcttgcacacrctgttagaccaagcaggcagtggtgccaggtgcagggcctcagacctgcccagtggggtgcctgccaggtcccagcaaggggtcygtgttccatgtggaaatctctygtttcaaatatggttgttttgctttcatgttttgttctttcttgatggaaacagcccacgccccgtgaatcatcatctgcrctgatttgtttttcccaccgtgcgcggctcccagacgagtccttttggtcacataagccttacaaatctgaaccaaatgttgacatgcacgaacgtgtgtgtgagcaggatgagtgtcttactactgcacatataaatacacaaacacatttaatagaaaagaagattcttttcaagacctgctgccacgctgtgggtatccggtgggcttacttctag

SEQ ID NO: 6841 - DNA, 600 bp, Chicken  19866894191244_5
agcgtgactgagatgtcagcaagcacacctgtggacagagctggtcggttcttagagaggcgtgaaagctgtgcagaagcagtctgctgccccctgtcaygtgcccagcaagccatcgctgcgagtggcttttgcagctcaaatcctccctgctcttctttttcctagcaaaataacctggcttgcacacrctgttagaccaagcaggcagtggtgccaggtgcagggcctcagacctgcccagtggggtgcctgccaggtcccagcaaggggtcygtgttccatgtggaaatctctygyttcaaatatggttgttttgctttcatgttttgttctttcttgatggaaacagcccacgccccgtgaatcatcatctgcrctgatttgtttttcccaccgtgcgcggctcccagacgagtccttttggtcacataagccttacaaatctgaaccaaatgttgacatgcacgaacgtgtgtgtgagcaggatgagtgtcttactactgcacatataaatacacaaacacatttaatagaaaagaagattcttttcaagacctgctgccacgctgtgggtatccggtgggcttacttctaggc

SEQ ID NO: 6842 - DNA, 600 bp, Chicken  19866894191244_6
cagtctgctgccccctgtcaygtgcccagcaagccatcgctgcgagtggcttttgcagctcaaatcctccctgctcttctttttcctagcaaaataacctggcttgcacacrctgttagaccaagcaggcagtggtgccaggtgcagggcctcagacctgcccagtggggtgcctgccaggtcccagcaaggggtcygtgttccatgtggaaatctctygtttcaaatatggttgttttgctttcatgttttgttctttcttgatggaaacagcccacgccccgtgaatcatcatctgcrctgatttgtttttcccaccgtgcgcggctcccagacgagtccttttggtcacataagccttacaaatctgaaccaaatgttgacatgcacgaacgtgtgtgtgagcaggatgagtgtcttactactgcacatataaatacacaaacacatttaatagaaaagaagattcttttcaagacctgctgccacgctgtgggtatccggtgggcttacttctaggctctcgcccatagaagagtgttatgttgtatcagaaactgaccccaacctcatgcttgggtaattatgcatcatgtggga

SEQ ID NO: 6843 - DNA, 600 bp, Chicken  19866894191247_1
ttgaaaacagccgttccccctcctgtttatatgctcccttaaacatcactgctttctgtaaggttggttggtttgattttttgaaagaaatgtccattggtgctcagtgtgctcaattctcaggtaaagatgcaggcaaagggtggggggcaaagaaatggtgactgagagcgctgttcacacatggaactgctctgaaaagccacccactgcagggagcacctcaacatgcagctctgtcattgcactcagcaattagtgccataaacagagaggaaggccctgtgctcagtcccagcragtccacccctcatagtgcaaatttctgaaccaaagcagcagggagcagcctggtttgtccaaagatgttgcttttttgccaaatggttttctctgtctcctttatccaagcctcttccagaaaggatggatcaaaatcatatcatagaaccatagaatggcctgggttgaaaaggaccacaatgaccatcagttccaacaccctgctatgtgcagggttgccaaccaccagaccaggctgcccagagccacatccagccttggcctgcaggtttggtcacttctgagatgcaaggaaac

SEQ ID NO: 6844 - DNA, 600 bp, Chicken  19866894191247_2
tcatagaattactcaggttggaaaggacctcaaagatcatcaagtccaaagcttgatgggctggactgggcattgtgtgtgtggagctgtcatttccgaaacagcaggaggcaaagcagagccttccatacagaaggcgctttgagaagggtgcagctacctgctggacagcatcacagtttctctggtggcagctggtacacccccagtcagctgttctcccattgaattgctttcaccaggttaacgtttccagagtgaatgatggtagcactaatgaagaggaatgtgccgttaaamtcctgtttggtgcaagtgtaatccagctgtcttgagggtactttatttccaattgaggctaattaacctgagccaaaagcattaatatcttcccccctccccatctccctgggaaaatgaaacctaatggatagccaatggcacgaatagccctcccttctgtacaagaaggaggggattcttctccccttcctgccagcactggtacatccttgttattctactgaccctcagggttgggctgatcctatttataataccccaatgctcagcagccacctacagcatgcattcatgaag

SEQ ID NO: 6845 - DNA, 599 bp, Chicken  19866894191254_1
  misc_feature (1)..(92): n is any nucleotide
nnnnnnnnnnnnnnnnnnnnnnnnnnnnnnnnnnnnnnnnnnnnnnnnnnnnnnnnnnnnnnnnnnnnnnnnnnnnnnnnnnnnnnnnnnnncacacattctttagctttaagtagcattccatgtttaaaaagaaaggattattataaatcaattatgatataatacataaggataagctacaacaacacaaaatggtataaatttaacaaagaaaagaatgtaggaaagctgagcctactgtaagtctggattcacttctgttgtcactatgctctgtttgctaagataaaacggaarcagaagggttttggagataaaagatattttcctcatttagagaagaaaaaaatgatgtaaagtgagggattttctcaagagtaatctttacagaggtttttgttttggtttggtttttgtttgtttgtttcctttgaagccagacagcaaaaacctcatgcaagcagcttgttttggaagaatcgtagagtactacatctcattctgccttctgatcagctttgtagtaactttctgtcatcttcagcaagtagccatgtcctagacaatgcctacccctttgagtagccacattttga

SEQ ID NO: 6846 - DNA, 600 bp, Chicken  19866894191255_1
gcaggtgtgccaagtccctcttctcctctcctccccagccctctctgttcaccacgctgtgcctctctggccttcttagcctatggtttccagtttctggaggtttacagattaaaaaatacttttctcctcttggacttcacagtgtttcttttggtctcttttcaacttcaggtgaagttcataatcagaacgttatcagattttccaaactatgtgaaaccttcctgttctttaccaggtaaataagtaggtgtgtaagacatataaatgaggagtaaaagtacagtccatttccaraaccagttcagtgacctaagaagccatttgattataaaatcacaagtaaaactgccaggagggcagaattcaaagggtaaatcacttgtaggtgagctgtaccatgttatctaatttttgtcaactgtgaggttttttttctcaaagagaattaaagaatcagtgtatggttaggttcttctagggagatagctgtgttttatcaaatcctctagataacagtgttatctctatttttcgcttttcattttcttcttaatataagcaactggcttgttcttactgcttatcttacttgtg

SEQ ID NO: 6847 - DNA, 599 bp, Chicken  19866894191268_1
  misc_feature (1)..(80): n is any nucleotide
nnnnnnnnnnnnnnnnnnnnnnnnnnnnnnnnnnnnnnnnnnnnnnnnnnnnnnnnnnnnnnnnnnnnnnnnnnnnnnnnccgagtacgtagctttgggagccagggagaggggaagcccgggagcagggagcagctggcactggttcccagtcacagggagggctggtgcggaggaggcctgggcaggttgcttggcagccctgtgacactgccaaatccagcagccggtggctcacattcccctaccgtggggtggcacttggaatggttgggaaccacaggttaacttctctagttytagtactgtgaagagaagtactgtttctcttacgtattctgttgtaatatttgtattactgcaacgtaggcactctatttaatttccctctaggtactctgttgtagggcaaaggagcatcaaaccgcaagttaaagatattccatataaaattaaaatatgttaaaacaatataatataacttaatgtacctttctaaataattatgatcctgagcaagaggcagtcacttctgagaagctggaatacagttacttgtccttccagctgacatctcttttcttgctcagaaaaagggt

SEQ ID NO: 6848 - DNA, 599 bp, Chicken  19866894191271_1
  misc_feature (1)..(211): n is any nucleotide
nnnnnnnnnnnnnnnnnnnnnnnnnnnnnnnnnnnnnnnnnnnnnnnnnnnnnnnnnnnnnnnnnnnnnnnnnnnnnnnnnnnnnnnnnnnnnnnnnnnnnnnnnnnnnnnnnnnnnnnnnnnnnnnnnnnnnnnnnnnnnnnnnnnnnnnnnnnnnnnnnnnnnnnnnnnnnnnnnnnnnnnnnnnnnnnnnnnnnnnnnnnnnnnnnnntacattcaaatctcattaacagtaagtacatttttaaaaaccaatcattcatagtccctcacccaagtgaagcctacaagaagtagggmgcacacacatggttttcaaaagcaactttcagtgactttaaatgaagtttttgctccagaacttcctatctgaactaactttatcagcttgtgaggacagctggtgtttgtttcattattttggtcccaaataaagagtcacacaatgacgacaattaacaaattaagcagcacagtragtaaaaaatccaagttaacctcccttgcagatgatctccctacactaaacttctcacaytgtatttcagtttaagtgctttgtttactttcagtaatgattgatcaataaagaatcatct

SEQ ID NO: 6849 - DNA, 587 bp, Chicken  19866894191271_2
  misc_feature (1)..(33): n is any nucleotide
nnnnnnnnnnnnnnnnnnnnnnnnnnnnnnnnntacattcaaatctcattaacagtaagtacatttttaaaaaccaatcattcatagtccctcacccaagtgaagcctacaagaagtagggmgcacacacatggttttcaaaagcaactttcagtgactttaaatgaagtttttgctccagaacttcctatctgaactaactttatcagcttgtgaggacagctggtgtttgtttcattattttggtcccaaataaagagtcacacaatgacgacaattaacaaattaagcagcacagtragtaaaaaatccaagttaacctcccttgcagatgatctccctacactaaacttctcacaytgtatttcagtttaagtgctttgtttactttcagtaatgattgatcaataaagaatcatctttcagaattagaaatcagtccattttctacactaacaataaccaaagtatataaaaacaccaccaaagtcgcttggaagcaaataaaacatatgcttctttcttgtaagaacgttacactccagagcaaactgttacacgtctaagaaattgcatttaagtactca

SEQ ID NO: 6850 - DNA, 527 bp, Chicken  19866894191271_3
tacattcaaatctcattaacagtaagtacatttttaaaaaccaatcattcatagtccctcacccaagtgaagcctacaagaagtagggmgcacacacatggttttcaaaagcaactttcagtgactttaaatgaagtttttgctccagaacttcctatctgaactaactttatcagcttgtgaggacagctggtgtttgtttcattattttggtcccaaataaagagtcacacaatgacgacaattaacaaattaagcagcacagtragtaaaaaatccaagttaacctcccttgcagaytgtatttcagtttaagtgctttgtttactttcagtaatgattgatcaataaagaatcatctttcagaattagaaatcagtccattttctacactaacaataaccaaagtatataaaaacaccaccaaagtcgcttggaagcaaataaaacatatgcttctttcttgtaagaacgttacactccagagcaaactgttacacgtctaagaaattgcatttaagtactca

SEQ ID NO: 6851 - DNA, 600 bp, Chicken  19866894191273_1
ttacatgtaatgctttgatgaatacattatgatatcataaacaggatatacatgtaatggctacagatatagaagataagaaagacaaagtagaagaattgttagtaggtatttttgctaacagaagaggttttagagtgaatttataggtacatgtttattttgtttttaggcacagagctggaagcctccagcactgccaggtgttgcagtcatttttcattttcattcttcattttccctcagcaatcaaaggcaagtcatgacattgggaaactcgggattatgcttgagagaaartcaaaacctccaagcattccttgatgttgtaaaaagcttgaaaacgtaattcaagtgcaatttgatagctcaaagaaaccaagacctagaactaacccaggctttctctttctaaatgtcttggccccatgtttttatctaacatgtggccttctggctgtgtatccagagctattctttgctgggctgggtttgcagcaccccaraacgcagcgcagggatggcctctgggsactgacctctccgcagcagagggaatgggagagcacagatcctgtgcaaaagcatgacggatcctaa

SEQ ID NO: 6852 - DNA, 600 bp, Chicken  19866894191273_2
ttgcagtcatttttcattttcattcttcattttccctcagcaatcaaaggcaagtcatgacattgggaaactcgggattatgcttgagagaaartcaaaacctccaagcattccttgatgttgtaaaaagcttgaaaacgtaattcaagtgcaatttgatagctcaaagaaaccaagacctagaactaacccaggctttctctttctaaatgtcttggccccatgtttttatctaacatgtggccttctggctgtgtatccagagctattctttgctgggctgggtttgcagcaccccaraacgcagcgcagggatggcctctgggsactgacctctccgcagcagagggaatgggagagcacagatcctgtgcaaaagcatgacggatcctaaaatgcaccgagtgagttttaaatggtgacttctaatctattatcatagcttaaacaacaacagtaaagtgtttgggaagtgtatgtgtgcaccgggagaactgggaaatatctggacctagagctgttctatctgtagcttattcaactaattcagtgggaataaaaacagcttatcaaacttgagcaacctgttagaagctggaa

SEQ ID NO: 6853 - DNA, 600 bp, Chicken  19866894191273_3
cattttccctcagcaatcaaaggcaagtcatgacattgggaaactcgggattatgcttgagagaaartcaaaacctccaagcattccttgatgttgtaaaaagcttgaaaacgtaattcaagtgcaatttgatagctcaaagaaaccaagacctagaactaacccaggctttctctttctaaatgtcttggccccatgtttttatctaacatgtggccttctggctgtgtatccagagctattctttgctgggctgggtttgcagcaccccaraacgcagcgcagggatggcctctgggsactgacctctccgcagcagagggaatgggagagcacagatcctgtgcaaaagcatgacggatcctaaaatgcaccgagtgagttttaaatggtgacttctaatctattatcatagcttaaacaacaacagtaaagtgtttgggaagtgtatgtgtgcaccgggagaactgggaaatatctggacctagagctgttctatctgtagcttattcaactaattcagtgggaataaaaacagcttatcaaacttgagcaacctgttagaagctggaaaaggatatttttcttctccagcctgtg

SEQ ID NO: 6854 - DNA, 388 bp, Chicken  19866894191282_1
ctttagatctgagactttgaatctttggatttcttaggcagagtgtaagagaaattgatggaatcttccccccattatgttgaataagatgtctaacctaccgctcagcttcccagtttctcttttatgttgtataaggtttgacaaactagtttcgtaaacacaaatactgatttattttattttgttttatttttaacagataaaccactctgacagtaagaagaacagatacaatggctggccagctgaaatacagatagagggctgtatcccaagaaacctgatgtaaacaaatgyatacgttcttagcaaagattcttctgtatgttttatacacataactctggtagtttgcatccagagccaaataagcacctgaacaata

SEQ ID NO: 6855 - DNA, 599 bp, Chicken  19866894191285_1
  misc_feature (1)..(71): n is any nucleotide
nnnnnnnnnnnnnnnnnnnnnnnnnnnnnnnnnnnnnnnnnnnnnnnnnnnnnnnnnnnnnnnnnnnnnnncaattattttataacacagactgaataatattctctcaaacctaacctaagcataataatgcatttctagctttctctattttcttgttcctaaattgatgagaaaaaaatgcaagatgcctggcaaacagtctgcatcatccctaactcttggaatctcaggttcttcctgatactgtatcacgcttctctacagctgtaataacttacttctataaggcactcttcrtgtattttaaaattatagaaaactgtttaaaaacaagaggggtaactccacaaaagtgggcagctccctctcccgccatacttcctgtaaagcttccttttttacttcgagaaagcaaaaagtacacttcaaagcccacttatgtacaaaaatggaagagtttgagaattgttttcttgtgatacaaaagcatttttacagcacctcattagatcatttatttgaaatactccagtaaaaaataattctcaagcatattatggaagttgatgactttgctgaactcacagatgtaagag

SEQ ID NO: 6856 - DNA, 600 bp, Chicken  19866894191286_1
caaataacgcttctgcactcagtattgcaagtcattgtaaattgcatcgtataaatagcaagaagcgttgcatttaaaaagcaaacaaacaaaaaaaaagcctgctgctcaccctttgtgctttacaggcttgttgcttctctttgtagcacagaacagcgctaacattgcaggcttttcttgtcctttgcagatggacttcattgctggtgactgtgccttatctttgtttatcaatgtaaatcaccagcgctattcctgagcaatggagatagcagtgacattccttctgaagctacwctcagccygagaaactgtgttgtacagaaacatgttgggaaagataacccgcgtgggttatcggagagggctctgctcagcccttgtggatgaggtgatggaaaagggctgtgttactgctttctaaaaggttccagagcagctgccagggctctccgtggaaaggactgagatttcttaagctttcaagyattacttaagttgctgttgttttctggagatgaccaccatcctctgtgtgttaggtctgtctgtcmtccaaaacccagcctgtatcacccccatgcaaggctgacttgg

SEQ ID NO: 6857 - DNA, 600 bp, Chicken  19866894191286_2
gcttctgcactcagtattgcaagtcattgtaaattgcatcgtataaatagcaagaagcgttgcatttaaaaagcaaacaaacaaaaaaaaagcctgctgctcaccctttgtgctttacaggcttgttgcttctctttgtagcacagaacagcgctaacattgcaggcttttcttgtcctttgcagatggacttcattgctggtgactgtgccttatctttgtttatcaatgtaaatcaccagcgctattcctgagcaatggagatagcagtgacattccttctgaagctacwctcagccygagaaactgtgttgtacagaaacatgttgggaaagataacccgcgtgggttatcggagagggctctgctcagcccttgtggatgaggtgatggaaaagggctgtgttactgctttctaaaaggttccagagcagctgccagggctctccgtggaaaggactgagatttcttaagctttcaagyattacttaagttgctgttgttttctggagatgaccaccatcctctgtgtgttaggtctgtctgtcmtccaaaacccagcctgtatcacccccatgcaaggctgacttggaggccttc

SEQ ID NO: 6858 - DNA, 600 bp, Chicken  19866894191286_3
agatggacttcattgctggtgactgtgccttatctttgtttatcaatgtaaatcaccagcgctattcctgagcaatggagatagcagtgacattccttctgaagctacwctcagccygagaaactgtgttgtacagaaacatgttgggaaagataacccgcgtgggttatcggagagggctctgctcagcccttgtggatgaggtgatggaaaagggctgtgttactgctttctaaaaggttccagagcagctgccagggctctccgtggaaaggactgagatttcttaagctttcaagyattacttaagttgctgttgttttctggagatgaccaccatcctctgtgtgttaggtctgtctgtcmtccaaaacccagcctgtatcacccccatgcaaggctgacttggaggccttcacatggaaattgtgatcatccgaaccaaatgcagcatgtagaatggagaagggaatgtgaatccatgtaacgaataatgttctcttcagtggtgagtgctgcttcccgggcagtacttactgtgtcagccagtagtccttcatgttgtattatatgggttgtatgatgcatgcttttaggtag

SEQ ID NO: 6859 - DNA, 600 bp, Chicken  19866894191286_4
cctgagcaatggagatagcagtgacattccttctgaagctacwctcagccygagaaactgtgttgtacagaaacatgttgggaaagataacccgcgtgggttatcggagagggctctgctcagcccttgtggatgaggtgatggaaaagggctgtgttactgctttctaaaaggttccagagcagctgccagggctctccgtggaaaggactgagatttcttaagctttcaagyattacttaagttgctgttgttttctggagatgaccaccatcctctgtgtgttaggtctgtctgtcmtccaaaacccagcctgtatcacccccatgcaaggctgacttggaggccttcacatggaaattgtgatcatccgaaccaaatgcagcatgtagaatggagaagggaatgtgaatccatgtaacgaataatgttctcttcagtggtgagtgctgcttcccgggcagtacttactgtgtcagccagtagtccttcatgttgtattatatgggttgtatgatgcatgcttttaggtagcgctggccacaagagctgctgttccttttccatgtttatagtgtatatatagagaggaacgttcat

SEQ ID NO: 6860 - DNA, 600 bp, Chicken  19866894191291_1
tcttattttatcactaagtacagttgtgtaaatgtagagtcaaaacatttttgcctgctctgtcctcatgaggacattaaggcatgtgtttgataacagtatttgggtctgtaactctgaacccatctacctcccttgcagtgaaacaggagttgcagaacttctaacattgtttctttttcctctggctgtagcttttttgtgcagtgaaatcagtaccaccttctgtagaacagaggagaggtggcatatgccagccacgtgacagccagtccattagggagcgttgggttttctttycatctctagaacagcaggagcttgtccttcgttctgaaagcatgyccaccaggacatgtaattggccttcagatactttgactgtattttgaatattttattaatctggaaggctctaaataatccattatgtgtcattttkggggctgggagaggggagaggcagcacagtgtgttatttacataaaacttgcttctgccaaataaaacgtctgtattcctacctttcttgctaaactaccattaatacaaactcagatacttcaatcaaattgatgtagcttttaaaactaatttgtt

SEQ ID NO: 6861 - DNA, 600 bp, Chicken  19866894191291_2
catttttgcctgctctgtcctcatgaggacattaaggcatgtgtttgataacagtatttgggtctgtaactctgaacccatctacctcccttgcagtgaaacaggagttgcagaacttctaacattgtttctttttcctctggctgtagcttttttgtgcagtgaaatcagtaccaccttctgtagaacagaggagaggtggcatatgccagccacgtgacagccagtccattagggagcgttgggttttctttycatctctagaacagcaggagcttgtccttcgttctgaaagcatgyccaccaggacatgtaattggccttcagatactttgactgtattttgaatattttattaatctggaaggctctaaataatccattatgtgtcattttkggggctgggagaggggagaggcagcacagtgtgttatttacataaaacttgcttctgccaaataaaacgtctgtattcctacctttcttgctaaactaccattaatacaaactcagatacttcaatcaaattgatgtagcttttaaaactaatttgttgtctgcagtaaaaatggtcactgtagaatttcttaaagctttttc

SEQ ID NO: 6862 - DNA, 600 bp, Chicken  19866894191291_3
gaaacaggagttgcagaacttctaacattgtttctttttcctctggctgtagcttttttgtgcagtgaaatcagtaccaccttctgtagaacagaggagaggtggcatatgccagccacgtgacagccagtccattagggagcgttgggttttctttycatctctagaacagcaggagcttgtccttcgttctgaaagcatgyccaccaggacatgtaattggccttcagatactttgactgtattttgaatattttattaatctggaaggctctaaataatccattatgtgtcattttkggggctgggagaggggagaggcagcacagtgtgttatttacataaaacttgcttctgccaaataaaacgtctgtattcctacctttcttgctaaactaccattaatacaaactcagatacttcaatcaaattgatgtagcttttaaaactaatttgttgtctgcagtaaaaatggtcactgtagaatttcttaaagctttttcttattcctacagtggtgtttttgtaaggagaaattaatatcacttgtaaaagccaaaaatgggttgcagcagttgtgtcgaattatttgagccctaa

SEQ ID NO: 6863 - DNA, 600 bp, Chicken  19866894191294_1
cagctgtactcagcctttgatttcaactgtccctgcctgccacgctacaacctggcctacgggctgggcgtcctcctggtgcctcccctcatcctgttcctgctgggctttgtgctgaacaacaacgtgtccatgctggctgaggagtggaggcggccccagggccagcggcagaaggatgcagccgtcctgcgctacatgttctgctccatggtgcagcgggccatgatcgccccggccgtctgggtgtcagtgacactgctggacgggaagtgcatcacgtgtgctttctgcacctcwctgcccgtggaggccctgggcaatgccagccaccgtggcctcccccagggagaggtgaagcgggtcctcgcccgcatcccctgcaaggagatctacgatgggcaggagctcatcgccaatgaagtggccgtcaggtacctgcgctgcatctcacaggtaaggggcatcacagccatgccctctctgatggcttagggttaggtgctgacagccttagctcttccttagggggggggcttttcactgaaataaagctgcaggaggagatgggcagttttgcagggtgacaagttgtaccct

SEQ ID NO: 6864 - DNA, 600 bp, Chicken  19866894191308_1
taaaggatacctgcatttgggaattcaagggtctcattgtacagttgatttgagcaacttctcttcttgcagaggaatccaattttactttgactttactttgatgttttcaccagcactatgaaatgtttacctacatctccaagggtttgtgatggcttaaagcagtactttcctacattcatttgaatgtacagtgaaggatgatgtatacatctacagaacttataggaggatttacactgttataatcttttttttttcccttccagagatacttagttaccataacaatgcaargcaagtgttaaatgcaagctgaggattcctctttttctgttacttctttgttgttcatgtttgaaagtgtattgtatgtagaataaagcctcctcagatgcatagaggcaatacagtatttctgttaatggtttttttctgggacaaaaatattgaattgrtaaacatgaggacgtatttaggaatagcaccttgtttctttctattgtgaagttaacccrtgacgtagtgcatatcgatgtgtaaatctctactgaacccaaacaaacagaaaarcaggacacatgagatactgcgtct

SEQ ID NO: 6865 - DNA, 600 bp, Chicken  19866894191308_2
aaagcagtactttcctacattcatttgaatgtacagtgaaggatgatgtatacatctacagaacttataggaggatttacactgttataatcttttttttttcccttccagagatacttagttaccataacaatgcaargcaagtgttaaatgcaagctgaggattcctctttttctgttacttctttgttgttcatgtttgaaagtgtattgtatgtagaataaagcctcctcagatgcatagaggcaatacagtatttctgttaatggtttttttctgggacaaaaatattgaattgrtaaacatgaggacgtatttaggaatagcaccttgtttctttctattgtgaagttaacccrtgacgtagtgcatatcgatgtgtaaatctctactgaacccaaacaaacagaaaarcaggacacatgagatactgcgtctgttgtcagtccttgaaaaaagtacagttgtaaactatctgaaatgcttctggtttttatgtagccataacactgtgacatattgcagcttgcatacttagctcgctgagtgtgcttttcagcagtgagaactrtgggtctaaaatacctgtccaagaaaag

SEQ ID NO: 6866 - DNA, 600 bp, Chicken  19866894191308_3
gaacttataggaggatttacactgttataatcttttttttttcccttccagagatacttagttaccataacaatgcaargcaagtgttaaatgcaagctgaggattcctctttttctgttacttctttgttgttcatgtttgaaagtgtattgtatgtagaataaagcctcctcagatgcatagaggcaatacagtatttctgttaatggtttttttctgggacaaaaatattgaattgrtaaacatgaggacgtatttaggaatagcaccttgtttctttctattgtgaagttaacccrtgacgtagtgcatatcgatgtgtaaatctctactgaacccaaacaaacagaaaarcaggacacatgagatactgcgtctgttgtcagtccttgaaaaaagtacagttgtaaactatctgaaatgcttctggtttttatgtagccataacactgtgacatattgcagcttgcatacttagctcgctgagtgtgcttttcagcagtgagaactrtgggtctaaaatacctgtccaagaaaagtgaagaaatacaattccaatttcctccracttcctgtgcgtgttatctgcttgtgtgttg

SEQ ID NO: 6867 - DNA, 600 bp, Chicken  19866894191308_4
acttagttaccataacaatgcaargcaagtgttaaatgcaagctgaggattcctctttttctgttacttctttgttgttcatgtttgaaagtgtattgtatgtagaataaagcctcctcagatgcatagaggcaatacagtatttctgttaatggtttttttctgggacaaaaatattgaattgrtaaacatgaggacgtatttaggaatagcaccttgtttctttctattgtgaagttaacccrtgacgtagtgcatatcgatgtgtaaatctctactgaacccaaacaaacagaaaarcaggacacatgagatactgcgtctgttgtcagtccttgaaaaaagtacagttgtaaactatctgaaatgcttctggtttttatgtagccataacactgtgacatattgcagcttgcatacttagctcgctgagtgtgcttttcagcagtgagaactrtgggtctaaaatacctgtccaagaaaagtgaagaaatacaattccaatttcctccracttcctgtgcgtgttatctgcttgtgtgttgtagtgtgctgggctagaaattgtaagtaatgaacaatacgtgtttgctgatgagc

SEQ ID NO: 6868 - DNA, 600 bp, Chicken  19866894191308_5
tttttctgggacaaaaatattgaattgrtaaacatgaggacgtatttaggaatagcaccttgtttctttctattgtgaagttaacccrtgacgtagtgcatatcgatgtgtaaatctctactgaacccaaacaaacagaaaarcaggacacatgagatactgcgtctgttgtcagtccttgaaaaaagtacagttgtaaactatctgaaatgcttctggtttttatgtagccataacactgtgacatattgcagcttgcatacttagctcgctgagtgtgcttttcagcagtgagaactrtgggtctaaaatacctgtccaagaaaagtgaagaaatacaattccaatttcctccracttcctgtgcgtgttatctgcttgtgtgttgtagtgtgctgggctagaaattgtaagtaatgaacaatacgtgtttgctgatgagcaaacatttgtgtttatgtactgaactctgtctctggcactgacttctgaaagtgaaggggaacacaaatgtttaccaaacttcacagtagttaaaacaatccacaacttggttgagcagagcagaatacggcgacaggaaatgcatctgtttttctt

SEQ ID NO: 6869 - DNA, 600 bp, Chicken  19866894191308_6
accttgtttctttctattgtgaagttaacccrtgacgtagtgcatatcgatgtgtaaatctctactgaacccaaacaaacagaaaarcaggacacatgagatactgcgtctgttgtcagtccttgaaaaaagtacagttgtaaactatctgaaatgcttctggtttttatgtagccataacactgtgacatattgcagcttgcatacttagctcgctgagtgtgcttttcagcagtgagaactrtgggtctaaaatacctgtccaagaaaagtgaagaaatacaattccaatttcctccracttcctgtgcgtgttatctgcttgtgtgttgtagtgtgctgggctagaaattgtaagtaatgaacaatacgtgtttgctgatgagcaaacatttgtgtttatgtactgaactctgtctctggcactgacttctgaaagtgaaggggaacacaaatgtttaccaaacttcacagtagttaaaacaatccacaacttggttgagcagagcagaatacggcgacaggaaatgcatctgtttttctttgtatgactttgtagtggatagaaagcactgttttggcttaacttcaaactccaga

SEQ ID NO: 6870 - DNA, 600 bp, Chicken  19866894191308_7
gcagagcagaatacggcgacaggaaatgcatctgtttttctttgtatgactttgtagtggatagaaagcactgttttggcttaacttcaaactccagaaaggacgtaactatttagaatttaagccaaaaatgcttagttatttctgtaggaaagaaagtaaccattgcacttcaatttgtgggggggtgctgaggctgaggagctgacatttcagcagcagagtgatgtcttcttagcgatgatgaatacaggctgagtcatgtaatcctcagcttcagaaatgaaaattaatctgctrtatgtcaagtgtttttcattgctgccagcctactccaaaaatttagttatactgtatttgccagtgcaactgcagcaattctggctggattttctctttttgtttgttgtttggcttttgtttctttctctcagaaagtgtttctagcagcttgccagcactttgtatctaagcaatcacagtgttactttttctcccagttactgtctgtgccagttctttatgatggtcagactccggggagacctcattgcggccttccagtgcttgaagggagtgtataaacaggagggggaacgg

SEQ ID NO: 6871 - DNA, 600 bp, Chicken  19866894191313_1
ttgatttatgctgctctatgattgacctgccttaaatgaagtcgttttctccggtactgataattggggaggagaaaaaaggtcttgttacagcagcatcccgagcagaggggagctttattaggccctgagcctgtgagtgtgcatatgtataaatccagcagtgtgaagaatttccttagagctgtgggtgaagccatccatacctgtaagacgtggaactttaaatgcagtgatctcggagaagaggttgtgttgcagcagagtgggtaaatcctgtgatgcaagctgattgtgtgygttagatttactcagcagttcaggaggtaataactacgtgaacctgtgggaagctgcatccattataggccattaccatttatactgttggtctaaaagctgctatggatttatggayttaaagcacctctaagcatgcagttctgttcataacatgcaccccgaaccctccaagcaaacaagcagaaacctcagaacaaaccctctcatacgtatttagcaatttggtctctgtgaacacagaacttcagcctcgattcatctcaaatcagagagaattaaaccattcatagtgctata

SEQ ID NO: 6872 - DNA, 600 bp, Chicken  19866894191313_2
tattaggccctgagcctgtgagtgtgcatatgtataaatccagcagtgtgaagaatttccttagagctgtgggtgaagccatccatacctgtaagacgtggaactttaaatgcagtgatctcggagaagaggttgtgttgcagcagagtgggtaaatcctgtgatgcaagctgattgtgtgygttagatttactcagcagttcaggaggtaataactacgtgaacctgtgggaagctgcatccattataggccattaccatttatactgttggtctaaaagctgctatggatttatggayttaaagcacctctaagcatgcagttctgttcataacatgcaccccgaaccctccaagcaaacaagcagaaacctcagaacaaaccctctcatacgtatttagcaatttggtctctgtgaacacagaacttcagcctcgattcatctcaaatcagagagaattaaaccattcatagtgctataaactttcccaaggggttttggtcccagagtttgtgtggacagtctgaaaacacagatgtaatattgaagcaaatgtggtggctggaaacaaatcctttattgacatgagtagcgttta

SEQ ID NO: 6873 - DNA, 600 bp, Chicken  19866894191322_1
accttcctctccaagccccgctgcatttttctgttcttgcacaaagcacagacaacacgggagggttttcgtatcgatctgagctgataaaaagaaaaggactcgagggggtttcgcgtctctgtttgcatgccagtcgcctttcatcagcttctttgtgaggacgttccttcaggatgggctgtgctggggtctttctgtgccccgtggtgggctgtgctgtgcccggctctgcccggctcttggcaggcagcgctgcagcgacctgctgaattgcagaggcaattattttgatatgtwaatgaaacgatgggaggaagaaggtacccgttttgaaatgcaatcgaggccaaagataaaaaagcatttctcatccgctctgcagtaattgttttttaaatgatgcccctggcatgggatacctggctgtttcttcagctgactgcagggaaagctgcttctaccattactccaaggctgggaggatggtcatgtaatttgctcctgcgatggcaaaaaaatggtggtaaaatctctattgagcgcacttaatggctcgacagattattaatgagatatggagcttttcaaatctaattc

SEQ ID NO: 6874 - DNA, 600 bp, Chicken  19866894191324_1
cagtattatcagtaccaaagccaatgaactgcacacctatcttgtacatctggataaacatagaatagcactaagctagctacaaaaaccgaagtggacattctgatctagggaaaatgggcttgtcagcttctgatgggactgtatcttcctgatgcaaacttagcagacattagctacatcaaagagaaaaaaataaataaaatcagtaagcgcagcatcagtgccctacaaacagatacaactattttttattgcatgcagtgatgattttcattcttctgtaaatatttttgagcrtacacgtggtcatttggcatttctaaccactctgctgagattaagttattgcccagtcttagacaagatggggcacaagaatggcttacttaagaataaagcaaagagagcaattttatgcagtacatgtcctttatcacgctgccaagccattgtaactgctacatgcttgtcctggaggagctagagagcaagccagattagaaggctcttgtttcaaatcagaactcarttgtaaatttggttctcctctttgcatccatgcaaccaacacaaaagattccagaaccttgcggttta

SEQ ID NO: 6875 - DNA, 600 bp, Chicken  19866894191324_2
aaacagatacaactattttttattgcatgcagtgatgattttcattcttctgtaaatatttttgagcrtacacgtggtcatttggcatttctaaccactctgctgagattaagttattgcccagtcttagacaagatggggcacaagaatggcttacttaagaataaagcaaagagagcaattttatgcagtacatgtcctttatcacgctgccaagccattgtaactgctacatgcttgtcctggaggagctagagagcaagccagattagaaggctcttgtttcaaatcagaactcarttgtaaatttggttctcctctttgcatccatgcaaccaacacaaaagattccagaaccttgcggtttaataggcagaagcaacagctctgctcatagcagtgtgttccaacacacacagcagcctgagagatcacaaagccaagggcagctgagtttcctgtatgtcaagatcaagacagagtcctgccattatagctgcaagaactaacttgctgcaaagccaaattcttgcagtggttgcactcagtgattccgctaaaaacaactgagagcagctgtcagggataagagaagttact

SEQ ID NO: 6876 - DNA, 600 bp, Chicken  19866894191326_1
ctttatttagagccaccagtggttcccactgggatgttgccaggcaaggaattactttgtttagatggagatatgaggggttaatgtgactgtcaccaattcagacaaagctcggatcttggcctggctgctgataacatctggctgtaatggactggactgcatttttctttagaaattctttgtgttgaaaaaggggcaacctgggggaaaataaatggcagaaaaagcaaggatctatctgttctcatacacctctaacagcagactttctcatatctcaagggtatctggcactcyagtttgtaagtgtccctgccctatatatttcttctagcaagtgttacttccatcagagcctcagcctgctgcctgactgttataactcacttgtctggataatattttaatgaagaggtgacagatgatgctgaagtctgtctcctttgtcaggtgatctgccaaagaacaaaactttgctctgacaagctgtcagatggctcttctgcacaatttcagtcctaaccattgaaacacgtggctgacagcatctgcccaccaagtcagtttctgaaggaggcaatcatacagtgagactct

SEQ ID NO: 6877 - DNA, 600 bp, Chicken  19866894191326_2
tggttcccactgggatgttgccaggcaaggaattactttgtttagatggagatatgaggggttaatgtgactgtcaccaattcagacaaagctcggatcttggcctggctgctgataacatctggctgtaatggactggactgcatttttctttagaaattctttgtgttgaaaaaggggcaacctgggggaaaataaatggcagaaaaagcaaggatctatctgttctcatacacctctaacagcagactttctcatatctcaagggtatctggcactcyagtttgtaagtgtccctgycctatatatttcttctagcaagtgttacttccatcagagcctcagcctgctgcctgactgttataactcacttgtctggataatattttaatgaagaggtgacagatgatgctgaagtctgtctcctttgtcaggtgatctgccaaagaacaaaactttgctctgacaagctgtcagatggctcttctgcacaatttcagtcctaaccattgaaacacgtggctgacagcatctgcccaccaagtcagtttctgaaggaggcaatcatacagtgagactctgcacagcttcactttagtc

SEQ ID NO: 6878 - DNA, 600 bp, Chicken  19866894191331_1
tataggaccaagctctctgcaaggcatggagagctaaggacaggaactggggctatagcttcagacagtgaaggtgaatgcaacagctgtatgatgagggaatccaactcagtctgctctgtgccctggagagcccgatgtgctatgaacacagccccaacagaccctctgtctctaaatgctgttgccttgtgcgcagcctctctgcttctttccaggtattgtgttctctgccatttgcatcgcatcactggaaaagcagatgaaattgcaaaatctgagccttcattttaattttarttaggcttttgattgctgcagtaaagccagtggaaacctctggtgcagacatagctctgcaccccgcatgcaggaaggacatcacattgtgcaccctgccagctccaagagttcctggcaaagaccttctggtccctgcagctgggagcaataaacttttgagctgctttggctaaatacgaataagttccagccctccccatttgtcaccatgtgtagccacagtacattgatgtggatggaaattgatgtcaaaacagcagcaccttaaacagcccagctgaatccgcaggaatccct

SEQ ID NO: 6879 - DNA, 600 bp, Chicken  19866894191339_1
cttgggttgacttgattatgttagcctaaatgatggtatgtggtagaatagaagtgagctgacatctggcttgtgtgagcatcagagatgatcactgtaaagtgatgagaatgaaggaaagtagttaggatagataataaacttggcaattgtgagatatgtaaagttgtagattaatttcacgtatgaagttagagaatccccattactgaacagttttaaaactgattccccagaataaagatctggaggagatattctctccataaattaggagattagggagactgcaatgcctgytggaacctgagcaagatgtgatacattaactactgtatgttcatgcccacatttactgaggagtgattttcttggcaatgcatctaattttccttgttgtggtccacctaagtagataattaattatggtaagtatttttaattgttaattgttaatttttaacttgtaataacttgatgttttaaaagtacaaatattttgctttatagtataatcctacaactgtacttctgttataaattattttctgatagtggtgtaggtttttaaaaattacatcatgtgccatcaagcacttg

SEQ ID NO: 6880 - DNA, 600 bp, Chicken  19866894191343_1
tgttgtgtgtactgtaattcctctgaaaaatgtgttcctctttgtagcatgcgtgctcagatatgttatgttcccttttcacattgccttcctctctggtcaattcccaggagcactcaaatactcctatgtattgtactcaatactatatgaatccccagtgctttagttgcacttatgaaggcatggcaaatgtgatgttgtgtgagttgtgtctatagccctttaaatagtagggtgccgtagattgaatgaatgactggttattattggtctatgtggtactatgtggatagagarttaagaattatttgcgaaaaagttgtatgaggagcacgctatcctgtttgcaatccaaagttcaagttcagtgaggaggtgctcagcgtaataaaatatttttttctgaaggtcctgaagctgcatgcattgaacgtgtggttaatattctatatatgaataatttaatcactttcaattagattttaaacatatacttaaagtaaatgcctgaatacttcactgaattgagtactacataatgttcctagtaatcagtgatgaatgtaagaaaccaatgtgttttccttaatctgagac

SEQ ID NO: 6881 - DNA, 599 bp, Chicken  19866894191344_1
  misc_feature (1)..(21): n is any nucleotide
nnnnnnnnnnnnnnnnnnnnnaggtgttcagggaacgtgtagatgtggtactgagggacatggttcggtggccagtgttggtggtaggcggatggttggactagatgatcgtggaggtgttttcctaccttaatgattctatgattctgtgattctatgattccactttgttaattttactgtcctggtacactagatggccataattttttttttaccaagttctatttcgtgtgtttgagtggaaaaacatcttcatattccagtcatgctcttgatttgctctttgtgcttcttggmtggtgccagagagcagtgacagaaagacctagcctggccaggaacagtccctgtccctccagagcctgttttgaaggatgtggtgctaagcggcagagatgcaggagaggccaaggatttctgtagtaacatgttctttccaaaacactgctttagacttctactgtctcagtcattagcatagccagactggcctgattctgctatgcctattyaaatgaaatttgccttatgctgcagagcatgtatattttacaactcaattctataacagtaacagaatcagagcctaaaatgaa

SEQ ID NO: 6882 - DNA, 600 bp, Chicken  19866894191344_2
taccaagttctatttcgtgtgtttgagtggaaaaacatcttcatattccagtcatgctcttgatttgctctttgtgcttcttggmtggtgccagagagcagtgacagaaagacctagcctggccaggaacagtccctgtccctccagagcctgttttgaaggatgtggtgctaagcggcagagatgcaggagaggccaaggatttctgtagtaacatgttctttccaaaacactgctttagacttctactgtctcagtcattagcatagccagactggcctgattctgctatgcctattyaaatgaaatttgccttatgctgcagagcatgtatattttacaactcaattctataacagtaacagaatcagagcctaaaatgaaatgtctgcgttaaagcaacagggtaccagaggaattgttttggtctccttacaatacatgtagaatatggttattgaaccttatagctgccttgagggtaagtctacttttctcttttaaaaatatgcaaatccataaagccattaggacagaatgatgcctttcagtagagtgagctagacaattgcatgcaactttgcttggctgtgaagtcaa

SEQ ID NO: 6883 - DNA, 600 bp, Chicken  19866894191345_1
atcctcctgtttatacgctcccatctgtagtactggaaggccacaatgaagtctctctggagccttctcttctccaaactaaacaaccccaggtccctcaacctttcctcaaaggagaggtgttccagccctctgatcatcagaagctttcttcagcttacattcagcactcttttatttcttttacaagaataatcatttctgctgacaatttttttttatcaataaaaccgatgagacagcagatttgttcaggaaggacaagtttgtgagtcaaatcaaggagatcaaaaaggaatrggctgtgtggttgtttggaaggaggcacacagccaaggaaaaactgcaggttactggaagctgttattatgacagggaggtgyaaaacagtgtactgcatgttgaggcaataacacaatgacaaatggagatgcaggaggtgtgagatacccggcctgcaccgtgaattctgatggaatgatctgaggagccaaatgcatgttagctcccctggccatgtccctggggatgaaaacaacaaggcatcaactgttttgacctaaacaagcatagcccatatcttttcctttaacactaagg

SEQ ID NO: 6884 - DNA, 600 bp, Chicken  19866894191345_2
caaccccaggtccctcaacctttcctcaaaggagaggtgttccagccctctgatcatcagaagctttcttcagcttacattcagcactcttttatttcttttacaagaataatcatttctgctgacaatttttttttatcaataaaaccgatgagacagcagatttgttcaggaaggacaagtttgtgagtcaaatcaaggagatcaaaaaggaatrggctgtgtggttgtttggaaggaggcacacagccaaggaaaaactgcaggttactggaagctgttattatgacagggaggtgyaaaacagtgtactgcatgttgaggcaataacacaatgacaaatggagatgcaggaggtgtgagatacccggcctgcaccgtgaattctgatggaatgatctgaggagccaaatgcatgttagctcccctggccatgtccctggggatgaaaacaacaaggcatcaactgttttgacctaaacaagcatagcccatatcttttcctttaacactaaggcactaagacagagggaaactgatggaaaagtgcattagacatgagctccaaccacaggctagggggaaaagccwstgaatgca

SEQ ID NO: 6885 - DNA, 600 bp, Chicken  19866894191345_3
gggaggtgyaaaacagtgtactgcatgttgaggcaataacacaatgacaaatggagatgcaggaggtgtgagatacccggcctgcaccgtgaattctgatggaatgatctgaggagccaaatgcatgttagctcccctggccatgtccctggggatgaaaacaacaaggcatcaactgttttgacctaaacaagcatagcccatatcttttcctttaacactaaggcactaagacagagggaaactgatggaaaagtgcattagacatgagctccaaccacaggctagggggaaaagccwstgaatgcagtggagctgttctgctttactaacagaatactaaagcaaacatctattttgatctgtttttgatggttggactgggtgatcctgtgggtcttttccaaccttggtgattctatgattctgttattttaatgtggaatgcaaaaaacaccagtaaaatcagtggagttctgctggtgtaatccaacctgggatgtgatttgtgcctttatggatgtgttttttctgccattatgtgtttgtgctgaatttctccacttggctaaactgcatccacctctatatgctgtgaag

SEQ ID NO: 6886 - DNA, 600 bp, Chicken  19866894191345_4
ggaggtgyaaaacagtgtactgcatgttgaggcaataacacaatgacaaatggagatgcaggaggtgtgagatacccggcctgcaccgtgaattctgatggaatgatctgaggagccaaatgcatgttagctcccctggccatgtccctggggatgaaaacaacaaggcatcaactgttttgacctaaacaagcatagcccatatcttttcctttaacactaaggcactaagacagagggaaactgatggaaaagtgcattagacatgagctccaaccacaggctagggggaaaagccwstgaatgcagtggagctgttctgctttactaacagaatactaaagcaaacatctattttgatctgtttttgatggttggactgggtgatcctgtgggtcttttccaaccttggtgattctatgattctgttattttaatgtggaatgcaaaaaacaccagtaaaatcagtggagttctgctggtgtaatccaacctgggatgtgatttgtgcctttatggatgtgttttttctgccattatgtgtttgtgctgaatttctccacttggctaaactgcatccacctctatatgctgtgaagg

SEQ ID NO: 6887 - DNA, 599 bp, Chicken  19866894191358_1
  misc_feature (1)..(82): n is any nucleotide
nnnnnnnnnnnnnnnnnnnnnnnnnnnnnnnnnnnnnnnnnnnnnnnnnnnnnnnnnnnnnnnnnnnnnnnnnnnnnnnnnnaggacgctcttgacttttgtccttttgaggaaaatatgttttctcggggggaaaaaaaagaacagcttttcttcagaaaattctcaacatttagttatgtttttaaggaagttaagcgtaacaaaactggagacagagaaaattgacagtgcatgtttcttaaggttttttaaaaatgaaattacattcaaacataaacttgcaaaaaactgttgaargctctgcactcctatccaacaaagagttttcagaagcctgctgtagagctaggggcttagatatgaataatgcaacaatgtttatatacataaaatataaactcaacagtacattttaaattatttgtactctttttcaaaagtagaattactgtttatactatgtttagaagatttacctcagctttatctgttgaagaaagcrtggttctttggtaccttgtacatgacatgtaaagcttgagaagtaaaataaggccatggcaattttgttagtttatagagcttgcaagatgtgc

SEQ ID NO: 6888 - DNA, 600 bp, Chicken  19866894191358_2
aaactggagacagagaaaattgacagtgcatgtttcttaaggttttttaaaaatgaaattacattcaaacataaacttgcaaaaaactgttgaargctctgcactcctatccaacaaagagttttcagaagcctgctgtagagctaggggcttagatatgaataatgcaacaatgtttatatacataaaatataaactcaacagtacattttaaattatttgtactctttttcaaaagtagaattactgtttatactatgtttagaagatttacctcagctttatctgttgaagaaagcrtggttctttggtaccttgtacatgacatgtaaagcttgagaagtaaaataaggccatggcaattttgttagtttatagagcttgcaagatgtgctggtcttgttgctgaactatttttttccttgcatatgtttcaattataragacactagaactccttgttctgtttgtgcaagtttaatttcatatcaagctgttgaatgaagaaaagctcattgtaagaaaactggccatatctttgttaaatccatcttttttttttcttgctaagttaaaaagtcaaatagtttgctgtagtct

SEQ ID NO: 6889 - DNA, 600 bp, Chicken  19866894191358_3
ctaggggcttagatatgaataatgcaacaatgtttatatacataaaatataaactcaacagtacattttaaattatttgtactctttttcaaaagtagaattactgtttatactatgtttagaagatttacctcagctttatctgttgaagaaagcrtggttctttggtaccttgtacatgacatgtaaagcttgagaagtaaaataaggccatggcaattttgttagtttatagagcttgcaagatgtgctggtcttgttgctgaactatttttttccttgcatatgtttcaattataragacactagaactccttgttctgtttgtgcaagtttaatttcatatcaagctgttgaatgaagaaaagctcattgtaagaaaactggccatatctttgttaaatccatcttttttttttcttgctaagttaaaaagtcaaatagtttgctgtagtctcactcagaatcctttctgtaagagaagtaagtcagtgattgccatcactcccaagtgaaaaaccatcttttcttttttcagtcatgtgactactgctatacatactttcttgaaatgcccacagaagaaaaaagtattctgtc

SEQ ID NO: 6890 - DNA, 600 bp, Chicken  19866894191361_1
ctgtgcagtgagaagctgagagtcgaccagcatttctcccagccctgagacagtgcaaagggaagaagcattcatcagcccacagctgatgaaggacccacgagtcccaaaaagtgcagagctgagcaaaccctgcaatgccatgacttgggtgttagaaatgtgactgctcagaagagaagccagcttgtttctaaacagccagccaatacagtttggcttgccctttacacacctggcagttttgcaagcctttccctttgagcagagccaggagccctacagaagctcagcccaaayaggacacatggcattgcccagcaaatgccatcctcaaattcccctccacgcaaagtggctctgcataagaactgctcctccaaagctcaaaggggtagaattacctgctactacattaagtaccagccttttaagggggaaacacaagcagcaccattataaaaccccttcttttcccagaaagctttgacgacctgtttcctggagaatttagacaaaaagaacctcagccaaatgcatgcaatcagtacaggtactccatacatgcatcaccagaatgtctggaactggccctggtct

SEQ ID NO: 6891 - DNA, 600 bp, Chicken  19866894191362_1
attggaattcacttccctcaaacacagctgctcctcaaggccaaccttcacattgacacagcactctctaatggtttttcctccatctccagcagccctggctttctgctctaccattaacataaaccttacatccacattttttgttaaatccatcctgctgcccagaccttataaggagtggggacagagcatctggacacaacctagaaatggtttccagacttaaaggcttcatttcaaaagcactcggctgcctttgataagacacaacgctcgggctcggcaattgcttctatytgagtgagagaccacagataaagcagctatttaagcaaagccatgtagatcgttctggagggggcgagagcccagagtttgacttgtgcactgccacagcatctaccagagctgggaaaagaacccagagagctggttctccatccccatcatcaaacacaaagctctttcttacatttccttcagcgttcctctccattaaactttgatgtagtttgcatcataagtctttccccagcaaatctggtgtcctttcatttttactgtggcagattatttatagcgcagaggcagagtcac

SEQ ID NO: 6892 - DNA, 600 bp, Chicken  19866894191362_2
agaccacagataaagcagctatttaagcaaagccatgtagatcgttctggagggggcgagagcccagagtttgacttgtgcactgccacagcatctaccagagctgggaaaagaacccagagagctggttctccatccccatcatcaaacacaaagctctttcttacatttccttcagcgttcctctccattaaactttgatgtagtttgcatcataagtctttccccagcaaatctggtgtcctttcatttttactgtggcagattatttatagcgcagaggcagagtcacccagctgygaggtgatataaaaacgtcactaatgctaaagaaatggatcccacatcattagctttcccgatggctctcattttgagtcagcagtgtgtcctgcacttttggaccttttttttatgtgagatgcgtggagattttgggataatcagcaagcaccatgcaggcatgagaaagctgccatagtggttatgtctactgtctaccagggtgcatggagtaaggcccaggtggagtgtgggacctggcacagagtgccactcttggtgtcattattatgtgatgcatctcaacacccatctggg

SEQ ID NO: 6893 - DNA, 600 bp, Chicken  19866894191364_1
cccagggacacgtcctatgctctcgggccacttacctacactcagatcacgcgctgccagttcaagagctccacagcagggagggaaaagcatgcccttgtcacccccagcaacctgcctgccgtcacaccagctctgctctgctgaaagaggaggaatgcttcccgcatctcccccacgcgatgctccaattagggactggagcctcagctttggctgagttcctcctcgctgagccccaggcaagcgcctgtgaatccagcagcaaacaagtttcatccatcctccctttaattacaygttgtatcagcacaataagtatttgaaagtagctttatgcctagccgtcaacagcaactgctaccaatccaaaggagctgcctattctatatggcaatatctacaatgctcttcaacatgataaaataaaacactgttagtgcaaatgtcatccagcgtcctgagtgcaagcagggagaaagaaaggctggtgaaatatttatcagaaagaggcatgaagaatttgagacacctgcattcattcccgttgtctgcagaatcgagcttatatctaaaaaaaaccaaaacagtcattagcta

SEQ ID NO: 6894 - DNA, 600 bp, Chicken  19866894191364_2
atccaaaggagctgcctattctatatggcaatatctacaatgctcttcaacatgataaaataaaacactgttagtgcaaatgtcatccagcgtcctgagtgcaagcagggagaaagaaaggctggtgaaatatttatcagaaagaggcatgaagaatttgagacacctgcattcattcccgttgtctgcagaatcgagcttatatctaaaaaaaaccaaaacagtcattagctaaactgacatggagaatttagtattcgagagaagggtcagggtttgggatctataaagagaagctgrgaacatctgcagggacaggaagaatatgcataaacacacagtgtgaastaaaatacacagtgtggcaatgcktgcaatcttaccatgagaatatgaatatttggagttcttccccatctaaaaatgcccttcagacagctgattatgtatgtatttcatatggaaatgcatctaatgatgtaaatggaaagggaacctaagaataagtggagcacatccaaagactttagatagcaaaaggcataaaatcgactacttttaaaacatttcaacatatgcatagcctaggagaagattgga

SEQ ID NO: 6895 - DNA, 600 bp, Chicken  19866894191364_3
aacatgataaaataaaacactgttagtgcaaatgtcatccagcgtcctgagtgcaagcagggagaaagaaaggctggtgaaatatttatcagaaagaggcatgaagaatttgagacacctgcattcattcccgttgtctgcagaatcgagcttatatctaaaaaaaaccaaaacagtcattagctaaactgacatggagaatttagtattcgagagaagggtcagggtttgggatctataaagagaagctgrgaacatctgcagggacaggaagaatatgcataaacacacagtgtgaastaaaatacacagtgtggcaatgcktgcaatcttaccatgagaatatgaatatttggagttcttccccatctaaaaatgcccttcagacagctgattatgtatgtatttcatatggaaatgcatctaatgatgtaaatggaaagggaacctaagaataagtggagcacatccaaagactttagatagcaaaaggcataaaatcgactacttttaaaacatttcaacatatgcatagcctaggagaagattggaaatgagcagtgtaaaatatatagcttaaaaccttgttttcactttaat

SEQ ID NO: 6896 - DNA, 600 bp, Chicken  19866894191364_4
agtgcaaatgtcatccagcgtcctgagtgcaagcagggagaaagaaaggctggtgaaatatttatcagaaagaggcatgaagaatttgagacacctgcattcattcccgttgtctgcagaatcgagcttatatctaaaaaaaaccaaaacagtcattagctaaactgacatggagaatttagtattcgagagaagggtcagggtttgggatctataaagagaagctgrgaacatctgcagggacaggaagaatatgcataaacacacagtgtgaastaaaatacacagtgtggcaatgcktgcaatcttaccatgagaatatgaatatttggagttcttccccatctaaaaatgcccttcagacagctgattatgtatgtatttcatatggaaatgcatctaatgatgtaaatggaaagggaacctaagaataagtggagcacatccaaagactttagatagcaaaaggcataaaatcgactacttttaaaacatttcaacatatgcatagcctaggagaagattggaaatgagcagtgtaaaatatatagcttaaaaccttgttttcactttaatttcttctttaactcttgacaaaga

SEQ ID NO: 6897 - DNA, 600 bp, Chicken  19866894191384_1
taagatggtggcatcttttcagttgcaggcagagagatatccacaacacaattcatcagacccttatacagagcaccggaaatcagcccatgctctttcagttcaagctgggagtgcgaaagggagtggagaagaaaacttgcatttctcttctccattctatctgcattagaaaaaaaaagaaaaagaaaaaaatgcatacacatctctttccagagcactgctccagcctcaccaattgggagcaaattccttcttaggaaagcgtaactgagaagtactggaaagagaagtgtgttsagacagatgtgttcttgtatggaaaatgcatttttctttgaataattcagtgtaacttgcagttgtgcgcagaggtgctcctcaatagtaggtacctgatgggttttgtggactcagtttggtgtgatggacatatgaaaggcactgttatgttaymtttggcccctcctactgcccttaattttgacatgccattgtaaaaacctttagtakgtgctagatcaagtggttagctgattgacatctttgttccagcaatgaaactgtggtctttttcatcacttttccatttactgctcc

SEQ ID NO: 6898 - DNA, 600 bp, Chicken  19866894191384_2
attctatctgcattagaaaaaaaaagaaaaagaaaaaaatgcatacacatctctttccagagcactgctccagcctcaccaattgggagcaaattccttcttaggaaagcgtaactgagaagtactggaaagagaagtgtgttsagacagatgtgttcttgtatggaaaatgcatttttctttgaataattcagtgtaacttgcagttgtgcgcagaggtgctcctcaatagtaggtacctgatgggttttgtggactcagtttggtgtgatggacatatgaaaggcactgttatgttaymtttggcccctcctactgcccttaattttgacatgccattgtaaaaacctttagtakgtgctagatcaagtggttagctgattgacatctttgttccagcaatgaaactgtggtctttttcatcacttttccatttactgctccgtatgctgtttatggcagcaraggcaaaccttttcagtgtgtctgccaggtttattttaaaatcatggtgtttggtgccaactcttgtctctcctggtgccagacttggctctagtagcagctgtttgacattgttaggcttcttcaacagttgga

SEQ ID NO: 6899 - DNA, 600 bp, Chicken  19866894191384_3
ttctatctgcattagaaaaaaaaagaaaaagaaaaaaatgcatacacatctctttccagagcactgctccagcctcaccaattgggagcaaattccttcttaggaaagcgtaactgagaagtactggaaagagaagtgtgttsagacagatgtgttcttgtatggaaaatgcatttttctttgaataattcagtgtaacttgcagttgtgcgcagaggtgctcctcaatagtaggtacctgatgggttttgtggactcagtttggtgtgatggacatatgaaaggcactgttatgttaymtttggcccctcctactgcccttaattttgacatgccattgtaaaaacctttagtakgtgctagatcaagtggttagctgattgacatctttgttccagcaatgaaactgtggtctttttcatcacttttccatttactgctccgtatgctgtttatggcagcaraggcaaaccttttcagtgtgtctgccaggtttattttaaaatcatggtgtttggtgccaactcttgtctctcctggtgccagacttggctctagtagcagctgtttgacattgttaggcttcttcaacagttggat

SEQ ID NO: 6900 - DNA, 600 bp, Chicken  19866894191384_4
cagagcactgctccagcctcaccaattgggagcaaattccttcttaggaaagcgtaactgagaagtactggaaagagaagtgtgttsagacagatgtgttcttgtatggaaaatgcatttttctttgaataattcagtgtaacttgcagttgtgcgcagaggtgctcctcaatagtaggtacctgatgggttttgtggactcagtttggtgtgatggacatatgaaaggcactgttatgttaymtttggcccctcctactgcccttaattttgacatgccattgtaaaaacctttagtakgtgctagatcaagtggttagctgattgacatctttgttccagcaatgaaactgtggtctttttcatcacttttccatttactgctccgtatgctgtttatggcagcaraggcaaaccttttcagtgtgtctgccaggtttattttaaaatcatggtgtttggtgccaactcttgtctctcctggtgccagacttggctctagtagcagctgtttgacattgttaggcttcttcaacagttggattacatcatggtgaaaggaggaatagggatttttaaaaatttcagttattcaaatgc

SEQ ID NO: 6901 - DNA, 600 bp, Chicken  19866894191384_5
gaaaatgcatttttctttgaataattcagtgtaacttgcagttgtgcgcagaggtgctcctcaatagtaggtacctgatgggttttgtggactcagtttggtgtgatggacatatgaaaggcactgttatgttaymtttggcccctcctactgcccttaattttgacatgccattgtaaaaacctttagtakgtgctagatcaagtggttagctgattgacatctttgttccagcaatgaaactgtggtctttttcatcacttttccatttactgctccgtatgctgtttatggcagcaraggcaaaccttttcagtgtgtctgccaggtttattttaaaatcatggtgtttggtgccaactcttgtctctcctggtgccagacttggctctagtagcagctgtttgacattgttaggcttcttcaacagttggattacatcatggtgaaaggaggaatagggatttttaaaaatttcagttattcaaatgcaattgtcacagggggaaaaacaaagaggaaaacaaaactcctgcagttcaaatgtcagtgtccctctgtactttggcaagtcaactgaagcctgcttagtgtcatata

SEQ ID NO: 6902 - DNA, 600 bp, Chicken  19866894191389_1
gtacactcctgaaactccctgtggtacataatatactgttggacaagaacttttgtctgtgtggctcatcattccaaaccctagatggggataagaagttgcaacatgcttggaattagtattgtataattacaaattatcactaatattgctattattactaatgttcatgcttgtaagctaagaggatccttcagttttggtaaatctgcttaatgaggcatagagctcttcttttgccagtacactttcaacctcaaatcctattaagtggcatttatgtgcttttgcttctagtayaaaatgggaaatctaacattacattttgtacaacaattcagacaactactgtcttgctggttacgtagtgtaatttatatgctacttcaatcattatccaatttaatgttaaaagtgagaagaatcrgtaatccaaattctgtctcaaaaatcattggcacaactctgttaatttcaatgaggcttgcagcaaatgtaatcagggcagaagtttgtccaaaatgtacacatatttaagagaatgttagtagctgcttctgctctttgttttccttgggctatgatgtagactcaggggaa

SEQ ID NO: 6903 - DNA, 600 bp, Chicken  19866894191389_2
aattacaaattatcactaatattgctattattactaatgttcatgcttgtaagctaagaggatccttcagttttggtaaatctgcttaatgaggcatagagctcttcttttgccagtacactttcaacctcaaatcctattaagtggcatttatgtgcttttgcttctagtayaaaatgggaaatctaacattacattttgtacaacaattcagacaactactgtcttgctggttacgtagtgtaatttatatgctacttcaatcattatccaatttaatgttaaaagtgagaagaatcrgtaatccaaattctgtctcaaaaatcattggcacaactctgttaatttcaatgaggcttgcagcaaatgtaatcagggcagaagtttgtccaaaatgtacacatatttaagagaatgttagtagctgcttctgctctttgttttccttgggctatgatgtagactcaggggaatcgcctctgtcagatgcttatttatactgggaataagaggattctctaagatttaattacaacgggattccccccacaaaccagaagctgaagaatggaaactcagtcatctgcttttaagcaggat

SEQ ID NO: 6904 - DNA, 600 bp, Chicken  19866894191390_1
cagggcagctggcatcttcccttatacccccccccccccaaaagagtgtagaacataaacagtgacaagaggacagcaaagacccaactgcagcatctgcattcccccgcagagtacaggttacgtggaaaaagatcatttttttacccagcctgtgtacatggtatgtattggcattctttagtattctttttgtgtacaaaatccttcagttaaactccagttgaagcctccttctactttccttccttttgttgaggatttttgcttgggacagatagaatttgggcatgcaaaaakggaaggttttcttctgtttatatgccagccttgatgtggaaaaagcgctaacaggcatcagcatgtgtgcaaaaatgtgtaagttaaaagcaatggtaacaagccccttcttgctgatgattgaaagcaaaggtactaacacatctgctagcatgagcactgcagtgcatgcttccggtcactggatacaggccctgaccaaatccaatgcccaagcttttttctgtagaagagtaratgttatcttaacactcaattaagtcttaaacttaagaagcattctgttaaatctgcagacta

SEQ ID NO: 6905 - DNA, 600 bp, Chicken  19866894191390_2
tactttccttccttttgttgaggatttttgcttgggacagatagaatttgggcatgcaaaaakggaaggttttcttctgtttatatgccagccttgatgtggaaaaagcgctaacaggcatcagcatgtgtgcaaaaatgtgtaagttaaaagcaatggtaacaagccccttcttgctgatgattgaaagcaaaggtactaacacatctgctagcatgagcactgcagtgcatgcttccggtcactggatacaggccctgaccaaatccaatgcccaagcttttttctgtagaagagtaratgttatcttaacactcaattaagtcttaaacttaagaagcattctgttaaatctgcagactacttcaatgcatggcttmatgcatggctttgcttcataattgatttagtcttcctttagtttctgactattaactcttggttagcaaggccagcctcaaaagaaaggggacaaatttcttccttctatgctttgcaaaaatcttttccctggaaattagatcaagatccttcagcccttgtaatctacgctgctgttctttgacacttgtttggcaactgagacaggcaggattcaaa

SEQ ID NO: 6906 - DNA, 600 bp, Chicken  19866894191390_3
ttatatgccagccttgatgtggaaaaagcgctaacaggcatcagcatgtgtgcaaaaatgtgtaagttaaaagcaatggtaacaagccccttcttgctgatgattgaaagcaaaggtactaacacatctgctagcatgagcactgcagtgcatgcttccggtcactggatacaggccctgaccaaatccaatgcccaagcttttttctgtagaagagtaratgttatcttaacactcaattaagtcttaaacttaagaagcattctgttaaatctgcagactacttcaatgcatggcttmatgcatggctttgcttcataattgatttagtcttcctttagtttctgactattaactcttggttagcaaggccagcctcaaaagaaaggggacaaatttcttccttctatgctttgcaaaaatcttttccctggaaattagatcaagatccttcagcccttgtaatctacgctgctgttctttgacacttgtttggcaactgagacaggcaggattcaaaacattatcttagaggtgaaaggctacatatcctgttagtgggaaaactttcatctacaaaaagcagtggtatttgtctag

SEQ ID NO: 6907 - DNA, 600 bp, Chicken  19866894191394_1
ttgttaatggcactgaaagtaaaacgttcattgagaaagataatcctcacacagaaggatgtaggaacctgtaatttgcagtcaggaggttaaaagagacttgacaagattttgcaggattaaaaaagctaatccatcaagaagcatacccacctctactcccaaaagggttgtgttccagttacaatttgccacaaggtttttgtcaatagtcctgtcacccttccacttttgcccagcagagcaatttgcccatccagtaatcctggcaacgtaacatgtgtagtgatgaaatacacratgacatgatgtcattgtccgtaggtcctacattgtgtcattctgctgtcatactgcaatgtatggttccttttcaaactatgaatggtgtttccaggaatactggtgtctttcaagcatgttacatggagatgtgcttccttctgtgtttcttctggaatattctggaagacccacaaattgtagcaattattcagcctaatgacaggtacttgagaaatgtagttaaattatactggttactcttttgttttaataacaaacttagagtaatttggaggtatacttcctgtttttatc

SEQ ID NO: 6908 - DNA, 600 bp, Chicken  19866894191394_2
aatattaagcatatgtagtacttcaaatttatgtttaagatattttgtgaaatagaggtgaaattactcagatgattttaattgtttgtagatataagatttacagacctcttctctttgctcattaatttctgatttgtatttatgaaggaaaaagctggcccttacagatgtgctatccacacacagatgtgttagctgaattacagtacatattaaagcagtagtttagcatcaaaattgcttctcttatctttaagttgcagtcctttattgaatcttgtgaagaaaactgctttytctggttttaaatgctttaaaaaaaatcattctgttaaaacacctgacttagataagaattttgtgaatctgtgagtaaaaaagccaagtacgtgtgtccaaacttggtgtgagcaatctatttggtattacatctgtggctcagatggcaagtacatgtggcttttaatgcaggtgtacttcccccactgtagcgattaattaagcatgcaagttatgggtcctccatagtgaacaggaaccattaaaaacaagagcctatattttcacatgcatgctatttcagaagacttcattcac

SEQ ID NO: 6909 - DNA, 600 bp, Chicken  19866894191397_1
tctaagacaaacaataaacctgttacttttagtatctcattctatgattttatttatttatccagttgctttcagatgcttttaatctgcccagacggtgtatggccagccaggcccacatggcacaaaggagattatccacaaaattagaactctttgcaaaaaaagacctcctgaataaaatgtgttgttgatgagcgcagtgtggttacccttaaggaaatcctcagctgtccccgggactctgtcctcccgtcacctctccagcatcttgaggcttgtatcaaactggtcttctcrggccaaaaatgatcaggtgttgccttgccttttgctttcacctgcgtatgttcctgtaaattctaccataattaaagaaaactgtgggcttattcaattatgccrtaggttagcgcttttaggtgcattttgactgacgttaccaataactgtaggtgtagcattgcactctaggaactagctgtagagaaattataatacatttttagtgaagtgaatgtcccataaatgccgttgaggaaatagaagctaaaagtgtaagcggataaggagctgagagttaaagagagccaacaaggg

SEQ ID NO: 6910 - DNA, 600 bp, Chicken  19866894191397_2
ccagccaggcccacatggcacaaaggagattatccacaaaattagaactctttgcaaaaaaagacctcctgaataaaatgtgttgttgatgagcgcagtgtggttacccttaaggaaatcctcagctgtccccgggactctgtcctcccgtcacctctccagcatcttgaggcttgtatcaaactggtcttctcrggccaaaaatgatcaggtgttgccttgccttttgctttcacctgcgtatgttcctgtaaattctaccataattaaagaaaactgtgggcttattcaattatgccrtaggttagcgcttttaggtgcattttgactgacgttaccaataactgtaggtgtagcattgcactctaggaactagctgtagagaaattataatacatttttagtgaagtgaatgtcccataaatgccgttgaggaaatagaagctaaaagtgtaagcggataaggagctgagagttaaagagagccaacaaggggctgatgagatgtctttgtagggagcaacgaggaagtcagcctgaagctctgtagtgaaaaccagaaacagggggaatgggtagcttgaaggcggtgttgcgtgg

SEQ ID NO: 6911 - DNA, 600 bp, Chicken  19866894191398_1
actattcttacctgaacacaaggcctgctgcgccatgtcaccccaggatgagcccatggctcgcctctgctgacacctggcagggtcaaaccttgatggagggagctttgcggcaagtgaggttttgctgaggctgtgactgtggctacaagctgttgctggcacacaaataagggctcactgtgctctgagttgtctgggcacccagagagcaaaactgtactgagagttggaagctacatgctgcatgaagggctctgtgagctgtggtctctgccctcattgcccgtgctccagcasctccagtctgcatcctcatgagtccaaaaggtccgtgcagccgtaacgaggacagcactgagttccttggtttgtgatgtgactgcagtggtacaaataggatttgataatgccggtgagtatcttgcatcgtctcccgcactgagtgacatctagaattagtgattgagacccctgcggagtatggaagagcaagaaaaattagatactcaaatgtgcaagtctrgcctgatgcaagttgaaggtttctgtttgatagataaactgatatcaaatccaagtgaatggccttgaactgac

SEQ ID NO: 6912 - DNA, 600 bp, Chicken  19866894191398_2
gagttggaagctacatgctgcatgaagggctctgtgagctgtggtctctgccctcattgcccgtgctccagcasctccagtctgcatcctcatgagtccaaaaggtccgtgcagccgtaacgaggacagcactgagttccttggtttgtgatgtgactgcagtggtacaaataggatttgataatgccggtgagtatcttgcatcgtctcccgcactgagtgacatctagaattagtgattgagacccctgcggagtatggaagagcaagaaaaattagatactcaaatgtgcaagtctrgcctgatgcaagttgaaggtttctgtttgatagataaactgatatcaaatccaagtgaatggccttgaactgacacccctacagatgattctatcagcagagaaataaaaatgaagatggaaacatggctcatgtgctgtatgaaattatggttttttaaatagtttgcacttgcgatgcttgaggtgcaaaagaactgcatattggatatttaagtctacatctaagaattgaagtatctattagtgttgacttcagtgttctggagcccctgcttggcttccattctagcaaaccttt

SEQ ID NO: 6913 - DNA, 600 bp, Chicken  19866894191404_1
aagttccagagtaagtgacttgatatggattcttgtatgtacttgaaattgtagcttagccaagctgagtgatgctttctcttgtagcagatgtccagcaaaatctcagtagactttaattgagagcacctgccacttcatttggatagtgcagcggctgccaaagtgtccacacaagagcagtattttagattgcatgcatgtatccttgagagtggaaatgctcctgcaggaccatgccaggagatgcactttggctgatggcctttgtgttctccctggagcaccacgtccgtgggwggatggcagtgggaaagagaggatgtgagacataaagaggaacatggaataaatggagaaatgggacattatggtggagcaagggaaaatagcatgtgctagaaagtgttgcttctgtggatgggagtagagagagtgcggtctgtaggcagcctagcccgtggcatcctgcgtaatgtgttgctccttcatatggctgggctggacccagtagctgttgctctccatcgtgttccctgagcaaaagaaatgagggatggcacaagctcctggcaagctgccagccaagccctcagttag

SEQ ID NO: 6914 - DNA, 600 bp, Chicken  19866894191406_1
aataagcctggtggaccatagtatgtgactgtgggactgcctatgaagattcttgtcctgcgcaggctttgggacaccatcacctctgtgactggtggggtgtgttcttgaggatgctctacacagacaggttgcatttcccctattcttgtgaaaccctccgcgaaacctgttgctgatactctgacaacgatgatttcatactaaagggaggcctcatggtggcctacagcttcctcacaaggagcagtgctgatctctgctgtctgtggtgacagggacagggtctgagggaaaggsrtggagctgtgtcaggggagggtcagctgggtgttagggaaaggttctgcaccgaagtacaaggggcatggccctgagcttgccagagctaaaggagcatttggacaatgctctcagacatggggtttggattttgggtggtgctatgtagagccaggagctggactcagtgacccttgtgggtccctccagcatagactattctatgattttataacttgtaactgggtatttgtagctatatcgataccaggggctggccctggtgatgtgcctggcagcctctgtccatgttgcgcc

SEQ ID NO: 6915 - DNA, 600 bp, Chicken  19866894191406_2
ataagcctggtggaccatagtatgtgactgtgggactgcctatgaagattcttgtcctgcgcaggctttgggacaccatcacctctgtgactggtggggtgtgttcttgaggatgctctacacagacaggttgcatttcccctattcttgtgaaaccctccgcgaaacctgttgctgatactctgacaacgatgatttcatactaaagggaggcctcatggtggcctacagcttcctcacaaggagcagtgctgatctctgctgtctgtggtgacagggacagggtctgagggaaaggsrtggagctgtgtcaggggagggtcagctgggtgttagggaaaggttctgcaccgaagtacaaggggcatggccctgagcttgccagagctaaaggagcatttggacaatgctctcagacatggggtttggattttgggtggtgctatgtagagccaggagctggactcagtgacccttgtgggtccctccagcatagactattctatgattttataacttgtaactgggtatttgtagctatatcgataccaggggctggccctggtgatgtgcctggcagcctctgtccatgttgcgccg

SEQ ID NO: 6916 - DNA, 599 bp, Chicken  19866894191407_1
  misc_feature (1)..(184): n is any nucleotide
nnnnnnnnnnnnnnnnnnnnnnnnnnnnnnnnnnnnnnnnnnnnnnnnnnnnnnnnnnnnnnnnnnnnnnnnnnnnnnnnnnnnnnnnnnnnnnnnnnnnnnnnnnnnnnnnnnnnnnnnnnnnnnnnnnnnnnnnnnnnnnnnnnnnnnnnnnnnnnnnnnnnnnnnnnnnnnnnnnnnnnnntggcatggggcagcgctgccctgcggcgggttagtgctggcaccaagcacgtctccttgctgcgtgcacgggcattcagcgggcagtcacagagcagccccatccccatcccaacsccaacccatcacatccccatccctgctggaagagccgtccttgagcagccaggagagctcacaccgctgctgttctgcctctcccggaggcggtcactgcagcctcgctgccgtcactctgtccatccgcagcacggagcccgtagggcagaaaggagccaacacctctgcccagcgtgtggctccgagtgccgtcctcgcaggcgggagggctcctcctcatcctctccgtgctcgtggcagtgggggatcggtggatgcggggaggctgggatgggggcagggctccgcagggaaag

SEQ ID NO: 6917 - DNA, 599 bp, Chicken  19866894191408_1
  misc_feature (1)..(145): n is any nucleotide
nnnnnnnnnnnnnnnnnnnnnnnnnnnnnnnnnnnnnnnnnnnnnnnnnnnnnnnnnnnnnnnnnnnnnnnnnnnnnnnnnnnnnnnnnnnnnnnnnnnnnnnnnnnnnnnnnnnnnnnnnnnnnnnnnnnnnnnnnnnnnnnnncccctccttcttgtaagatcccttcgagtactgggagaagtattaacattaaacacaacctgaaaaacacttttctgtcaccaagacagtgcagttagtgagatgagtacctgatttacatcagacacattcagggatgtcatgctaacactggycttttagataagaaagcagaaaactcagcttttctgaacaaaagtgtcactggcctgaacataatatggtggatttaaaccgggatggagatgtgcataccttacctagtgtggtgtgatctttcactggagcatgaacagagactgtattatcctgttttctctcttggcatcttttcttatttgtgtcctcagatactacagatagattacagggtgagacaaggcatttgctagccatttttcagcctgcttcatggrcacaggctctgttacataatactcctcataaagcctgt

SEQ ID NO: 6918 - DNA, 600 bp, Chicken  19866894191408_2
tacatcagacacattcagggatgtcatgctaacactggycttttagataagaaagcagaaaactcagcttttctgaacaaaagtgtcactggcctgaacataatatggtggatttaaaccgggatggagatgtgcataccttacctagtgtggtgtgatctttcactggagcatgaacagagactgtattatcctgttttctctcttggcatcttttcttatttgtgtcctcagatactacagatagattacagggtgagacaaggcatttgctagccatttttcagcctgcttcatggrcacaggctctgttacataatactcctcataaagcctgtgtacatgtattctgctttaatttttttttcccaagaatagtttgaattatctatttgtcttacttattggcaactacattccaattgaaagctggttgtttttttccccaccatatgttccagatagatgttcacaaatggcatatttcatatttgggaaagggaaagccaagggaaagtattttttcatgagattatcatatcttttgtttgttgatttttctaagcattggatagtttcaaatgctagagaggttttatg

SEQ ID NO: 6919 - DNA, 600 bp, Chicken  19866894191438_1
ctttccatcaagcatctctcaagtgtcattactgaagcctcagacagggagacagggaacaggcatgagctgcttgagggacttggataggggctaaaatcttctgggggcaggaagtaaaatgctgtcatgtacatctagggcatctgtccttgttttgggagatcctgaacttgttggtgaaagaggagaaaagggacaccatgccatccagaggaacatggacaggcttgaaaagtgggaccacgtgaaccaaatgaggttcaacaaggccaagtgcaaggtctaagtgattagacrttaggaagaaattctttactcagagagtggtgaggcactagaacaggttgcccagagaagttgtggatgccccaatcctggatgtgttcaaggccaggttggatggggtcctgggcagcctgatctggtgagtgtcaaccctgcctgcagamaaagggctggaactagatgatctttaaggtctcttccaacctaagccagtctatgattctatggtgatgcctgccttgtttaacagttggaaacctgcaggacacaaggttgtattttcctttatcctctctgaggtgaaaagtgagt

SEQ ID NO: 6920 - DNA, 600 bp, Chicken  19866894191438_2
ttgttttgggagatcctgaacttgttggtgaaagaggagaaaagggacaccatgccatccagaggaacatggacaggcttgaaaagtgggaccacgtgaaccaaatgaggttcaacaaggccaagtgcaaggtctaagtgattagacrttaggaagaaattctttactcagagagtggtgaggcactagaacaggttgcccagagaagttgtggatgccccaatcctggatgtgttcaaggccaggttggatggggtcctgggcagcctgatctggtgagtgtcaaccctgcctgcagamaaagggctggaactagatgatctttaaggtctcttccaacctaagccagtctatgattctatggtgatgcctgccttgtttaacagttggaaacctgcaggacacaaggttgtattttcctttatcctctctgaggtgaaaagtgagtgcattggaggaaaaaggtttgctcaggatcaggacccaaagcttgttgggtaggaaaccaggtttattctgcatcagcaaagccagcaggatcccatgggcacctcattgcttgtggagtgcccataatcttggtgaatcctgatgagcatt

SEQ ID NO: 6921 - DNA, 600 bp, Chicken  19866894191438_3
ctgatgagcattggtagtaggagaaaggagagagtcacggaacaaagtcactcaaggtcagagcaaatgcaggagaaaagcccactcaagcttaggctttagaattccctgagaggaagctgtagcgtggtggaggtcagcctcttttcccaggtaactaatggtaagacaagaggaaatggcattaaattgtgccaggagaggttcaggttggatattaggtaaaatttcttctcagaaagagtggtgaggcattggaacaggctgcccagggaggtggtggagtcactgcccctggcrttgttcaagaagagggcagatgtggcactgaaggacatggtttagtgggcatgaatgtgatgggttgatgactggactggatgatctcaagaggtcttttccaatctctatgattctatgatggacacaggccctggacatggtcttctgggtgttgtgacctgtgaaatcccagcagatcctacagtatagtggggcagtaccacacgggtcccttgggcatgtgggcaacggggatggtagacctgtcttcaacccaggaggcagccgtgggcatgtttgtttgcaggactaaaccta

SEQ ID NO: 6922 - DNA, 600 bp, Chicken  19866894191446_1
tgtgttctgaatgcaaaaacttgacataggaactcagagatctgataaccaacatttgcaggaaacttgctgtcttgactctcagaagtgtagtttcaggtgattgaggcctaatgaagatggatgtaggaacaacctaacatttttcattagtctattaagagtaatcgtaattagagataacttcagcatacgcctgtaagagctgaagtcttctacacgtagatggcatagtaagacatgaaaagagtgaattgtttctggaaatgctgccttcagtcagaattagagttcctgagragaactgaattgttcatataaattggtgctgtggaattaatcatctttgaagttaccctgaggagtgcacttattccttacaaattctctctcttgtttacagactctgccaaggactcgaatggatgatgtcaaggctaaagatcagatgatttttaatgacccctttgcacagacattgcttttaaaaaaaaaaagctgtacccgtggttaccctcacagtggcagaattgctgggttaggtgtatttataatgaactgatttcaactttattttctacgtagatacacacacataca

SEQ ID NO: 6923 - DNA, 600 bp, Chicken  19866894191466_1
tatggagatcaaggagtggatgtgcacacagcgagccggtgggtggtgcgtttcagccgtggcaacagtgacatgaaatacaaccatgttccagacagccatgcacagctgtctcatcacaaaacaaagagcacctcgatcagctcatccattcacagccacagaattccccactgaagaaaaagctcaagacgcagccctaagtagataaaatgatgggcactgtcttttgagataggaaaggggtgatcttttgggcattcctagaacctggacaaaccatcgactctgctacatcgygatgctgactaagctgaggatttgaacttccagagggaggccagagaagamgacaacctttctcttgcaactaaataacaccaggttccataccagtgtgaagacgatagagcacactgcccatcttggctgaactatcctaccacacgcactgtacaggccagatttggtgccttctaaattccatctgtttggaccagtaaaagatgtactggataggcaacacttaccctcacaacaccaccactgtgtcagctttgaaatagggaatcacctctgctgctgcagatttttacaagc

SEQ ID NO: 6924 - DNA, 600 bp, Chicken  19866894191466_2
ttcagccgtggcaacagtgacatgaaatacaaccatgttccagacagccatgcacagctgtctcatcacaaaacaaagagcacctcgatcagctcatccattcacagccacagaattccccactgaagaaaaagctcaagacgcagccctaagtagataaaatgatgggcactgtcttttgagataggaaaggggtgatcttttgggcattcctagaacctggacaaaccatcgactctgctacatcgygatgctgactaagctgaggatttgaacttccagagggaggccagagaagamgacaacctttctcttgcaactaaataacaccaggttccataccagtgtgaagacgatagagcacactgcccatcttggctgaactatcctaccacacgcactgtacaggccagatttggtgccttctaaattccatctgtttggaccagtaaaagatgtactggataggcaacacttaccctcacaacaccaccactgtgtcagctttgaaatagggaatcacctctgctgctgcagatttttacaagcatggcatgcaggcccttgttcgtcactagcaaaaaatgcagagctaatggt

SEQ ID NO: 6925 - DNA, 600 bp, Chicken  19866894191466_3
cacacgcactgtacaggccagatttggtgccttctaaattccatctgtttggaccagtaaaagatgtactggataggcaacacttaccctcacaacaccaccactgtgtcagctttgaaatagggaatcacctctgctgctgcagatttttacaagcatggcatgcaggcccttgttcgtcactagcaaaaaatgcagagctaatggtggtgaatatgttgaaggataatgttttgtagtggataatttaccaaaaagtactattgcgctctttgtacctgttgtaatttccatggaaaygaataggaggcattacttttggagcaacctacataattactctggatcttggaagcaagagattctttcacaccaaaacttcttagccctttcaccaaacagctagggaacgcaacgaggctactacacagaacagtttcagtcaaacagttgtcagttcagcaatgaaaaagccaactgttgacaactgacaaaacagctgtgttctggagttctactcttcttcccttcaacctccttttgatactagaggcaatattcctagctacactccctatctctcttcggatgccctgtcag

SEQ ID NO: 6926 - DNA, 599 bp, Chicken  19866894191468_1
  misc_feature (1)..(253): n is any nucleotide
nnnnnnnnnnnnnnnnnnnnnnnnnnnnnnnnnnnnnnnnnnnnnnnnnnnnnnnnnnnnnnnnnnnnnnnnnnnnnnnnnnnnnnnnnnnnnnnnnnnnnnnnnnnnnnnnnnnnnnnnnnnnnnnnnnnnnnnnnnnnnnnnnnnnnnnnnnnnnnnnnnnnnnnnnnnnnnnnnnnnnnnnnnnnnnnnnnnnnnnnnnnnnnnnnnnnnnnnnnnnnnnnnnnnnnnnnnnnnnnnnnnnnnnnnnnnncccttggtgtcccaccagtccccttctcatctcctttacctctcccygtataaccaaaccggctgcaaggatcaccacttctgcaccatttccccatcgatgtggtttctggcgcggttcggatcgatgcttgcttaaactcttagggtttcccagtatcacggaactgcgccaggctcccctccaacctctgcatcctcactcaggcaaaaagaagtgccgatttcatttaaaaaaggactttcccctcggttttaatgcaagactcggtggtttccaaccctcctcccagctggcacctgggggcttcccattcctcccagcatccgcccgatgctcgcccatg

SEQ ID NO: 6927 - DNA, 600 bp, Chicken  19866894191469_1
ctgtttatctgtttgccgccaggtgagcaagtgaaaccggttcagcacagggtctgacacgtgtcagggctgggagcaaagcaggacttccccttctggcaccaacgcggggcagtcagctcggctggggcagctgcctctcaaaatagcccgcacattttgacacccaagttaatttacaacctgataaatgggggagaacgcacagctcttaaggcttactcacaatttctacgcaattggctggaatgacggaagacctgacaaggcaaatgtgttcaggcaggagcacccaggcakctgcgccattggtggggcrcagacgagtgcagaggagcrtggccacasgttcgaragccatccatgttttcacagctctaacaaatctgcttcaggcagaagaaatactcggtgagactgaaggaagcaggtaacaagtacacaagcctccttacaggccactgtcaaaagaagcaccgaattttaaaaaatattagcagaggcttagtatttaatgctttaagtggcaaatccacagcaaatcctcccgaattaaactcagaaggtatgcacaaaaggtatttaacttattttttaaag

SEQ ID NO: 6928 - DNA, 600 bp, Chicken  19866894191469_2
caggtgagcaagtgaaaccggttcagcacagggtctgacacgtgtcagggctgggagcaaagcaggacttccccttctggcaccaacgcggggcagtcagctcggctggggcagctgcctctcaaaatagcccgcacattttgacacccaagttaatttacaacctgataaatgggggagaacgcacagctcttaaggcttactcacaatttctacgcaattggctggaatgacggaagacctgacaaggcaaatgtgttcaggcaggagcacccaggcakctgcgccattggtggggcrcagacgagtgcagaggagcrtggccacasgttcgaragccatccatgttttcacagctctaacaaatctgcttcaggcagaagaaatactcggtgagactgaaggaagcaggtaacaagtacacaagcctccttacaggccactgtcaaaagaagcaccgaattttaaaaaatattagcagaggcttagtatttaatgctttaagtggcaaatccacagcaaatcctcccgaattaaactcagaaggtatgcacaaaaggtatttaacttattttttaaaggcctctcgagtgctgtctt

SEQ ID NO: 6929 - DNA, 600 bp, Chicken  19866894191469_3
gttcagcacagggtctgacacgtgtcagggctgggagcaaagcaggacttccccttctggcaccaacgcggggcagtcagctcggctggggcagctgcctctcaaaatagcccgcacattttgacacccaagttaatttacaacctgataaatgggggagaacgcacagctcttaaggcttactcacaatttctacgcaattggctggaatgacggaagacctgacaaggcaaatgtgttcaggcaggagcacccaggcakctgcgccattggtggggcrcagacgagtgcagaggagcrtggccacasgttcgaragccatccatgttttcacagctctaacaaatctgcttcaggcagaagaaatactcggtgagactgaaggaagcaggtaacaagtacacaagcctccttacaggccactgtcaaaagaagcaccgaattttaaaaaatattagcagaggcttagtatttaatgctttaagtggcaaatccacagcaaatcctcccgaattaaactcagaaggtatgcacaaaaggtatttaacttattttttaaaggcctctcgagtgctgtcttttgctctctaacagtgcacc

SEQ ID NO: 6930 - DNA, 600 bp, Chicken  19866894191469_4
agggtctgacacgtgtcagggctgggagcaaagcaggacttccccttctggcaccaacgcggggcagtcagctcggctggggcagctgcctctcaaaatagcccgcacattttgacacccaagttaatttacaacctgataaatgggggagaacgcacagctcttaaggcttactcacaatttctacgcaattggctggaatgacggaagacctgacaaggcaaatgtgttcaggcaggagcacccaggcakctgcgccattggtggggcrcagacgagtgcagaggagcrtggccacasgttcgaragccatccatgttttcacagctctaacaaatctgcttcaggcagaagaaatactcggtgagactgaaggaagcaggtaacaagtacacaagcctccttacaggccactgtcaaaagaagcaccgaattttaaaaaatattagcagaggcttagtatttaatgctttaagtggcaaatccacagcaaatcctcccgaattaaactcagaaggtatgcacaaaaggtatttaacttattttttaaaggcctctcgagtgctgtcttttgctctctaacagtgcacccaacacgat

SEQ ID NO: 6931 - DNA, 600 bp, Chicken  19866894191469_5
gacacgtgtcagggctgggagcaaagcaggacttccccttctggcaccaacgcggggcagtcagctcggctggggcagctgcctctcaaaatagcccgcacattttgacacccaagttaatttacaacctgataaatgggggagaacgcacagctcttaaggcttactcacaatttctacgcaattggctggaatgacggaagacctgacaaggcaaatgtgttcaggcaggagcacccaggcakctgcgccattggtggggcrcagacgagtgcagaggagcrtggccacasgttcgaragccatccatgttttcacagctctaacaaatctgcttcaggcagaagaaatactcggtgagactgaaggaagcaggtaacaagtacacaagcctccttacaggccactgtcaaaagaagcaccgaattttaaaaaatattagcagaggcttagtatttaatgctttaagtggcaaatccacagcaaatcctcccgaattaaactcagaaggtatgcacaaaaggtatttaacttattttttaaaggcctctcgagtgctgtcttttgctctctaacagtgcacccaacacgatgctggct

SEQ ID NO: 6932 - DNA, 583 bp, Chicken  19866894191470_1
atgtgctcctcacacaaagcagagtgaaattgggctaatgcttaggcttgctaatcccccttggcgtaatcctcctcccaaactctctgttctcaccccgtttctcagcagggctcaaaggactcagggctgactgctccacgatgggtgctgtgggatgggggttgggtgaacccatcagggtttggcagcactacatgcactatcagcccctcagatcccccacatcgttccactgtgcaattcagagcacagtgagggtctttggtatatcccatccctttgggtaatcaatgctcygtctttgcagcaccaatatcaaccccccagatataaatatattcaatccatctgctgcttatgactgatagttgctcaactatctcacaagatacgtcccaacccagcattgtcccctacgggatcgtcaccaacgcygtcctgcctggctcctacatcatcaggtagtgtctatagtaatgcgggtcatccatctacatcagcgttccccgattcaagacattcaagtttaatcaggttaattttaaaaccacagctttttttttttttcccctctttccaa

SEQ ID NO: 6933 - DNA, 445 bp, Chicken  19866894191470_2
ccacgatgggtgctgtgggatgggggttgggtgaacccatcagggtttggcagcactacatgcactatcagcccctcagatcccccacatcgttccactgtgcaattcagagcacagtgagggtctttggtatatcccatccctttgggtaatcaatgctcygtctttgcagcaccaatatcaaccccccagatataaatatattcaatccatctgctgcttatgactgatagttgctcaactatctcacaagatacgtcccaacccagcattgtcccctacgggatcgtcaccaacgcygtcctgcctggctcctacatcatcaggtagtgtctatagtaatgcgggtcatccatctacatcagcgttccccgattcaagacattcaagtttaatcaggttaattttaaaaccacagctttttttttttttcccctctttccaa

SEQ ID NO: 6934 - DNA, 600 bp, Chicken  19866894191471_1
aaaacttataattttctttatatttttctggagatgttaagaatatagtgctacatttagagatgtaattaaaactgaaacaatgtaacctgtatttttagtggttctttcgttgatatatgtatattatcatactttcatatattatatacacatagaatactatgacttaccttataatagacttttttttttttttaaatgcctagctagattggaagctttttcctacatatccactagatgggagttcttgatcttacagcaaacccagctgctcttaggtagaggtctgcagcycttttttccccagcatcatccggttctggactggtgcaggatttcgtgctgcttgcatccacracacacactgggaagagtcactgtaggaaggatccaacccagcaagggtgggcatattccaggctaaagaaagtccagcatgacactgtgggactaggaggtgtaatatgtaacaaattttttatggcagccatggtatggggatagtrgtgccaaatgaaccattttcaaaagaatttccagtggaaaacgtgtggaaagcagtaaatttcagttccacaccaagaacatctgtga

SEQ ID NO: 6935 - DNA, 600 bp, Chicken  19866894191471_2
tgtaattaaaactgaaacaatgtaacctgtatttttagtggttctttcgttgatatatgtatattatcatactttcatatattatatacacatagaatactatgacttaccttataatagacttttttttttttttaaatgcctagctagattggaagctttttcctacatatccactagatgggagttcttgatcttacagcaaacccagctgctcttaggtagaggtctgcagcycttttttccccagcatcatccggttctggactggtgcaggatttcgtgctgcttgcatccacracacacactgggaagagtcactgtaggaaggatccaacccagcaagggtgggcatattccaggctaaagaaagtccagcatgacactgtgggactaggaggtgtaatatgtaacaaattttttatggcagccatggtatggggatagtrgtgccaaatgaaccattttcaaaagaatttccagtggaaaacgtgtggaaagcagtaaatttcagttccacaccaagaacatctgtgaattttaagaccaagtggagcaaaggcatgtgaaatgtctcctcattgttccctaatggaatca

SEQ ID NO: 6936 - DNA, 600 bp, Chicken  19866894191471_3
gattggaagctttttcctacatatccactagatgggagttcttgatcttacagcaaacccagctgctcttaggtagaggtctgcagcycttttttccccagcatcatccggttctggactggtgcaggatttcgtgctgcttgcatccacracacacactgggaagagtcactgtaggaaggatccaacccagcaagggtgggcatattccaggctaaagaaagtccagcatgacactgtgggactaggaggtgtaatatgtaacaaattttttatggcagccatggtatggggatagtrgtgccaaatgaaccattttcaaaagaatttccagtggaaaacgtgtggaaagcagtaaatttcagttccacaccaagaacatctgtgaattttaagaccaagtggagcaaaggcatgtgaaatgtctcctcattgttccctaatggaatcaccaggcagccaatttaaaataaagtgccattttgtataaatcctaacttcaggggaaaaaaaaaaaggaaaaaaaaaaaaggaaaaagagcagttaatgtagaataaattcattggtgaacattttactcagtgtcatgaacacaagcc

SEQ ID NO: 6937 - DNA, 600 bp, Chicken  19866894191475_1
cacaactaaaccttcccgtagaccatgcagctgattttaatatcataaaatcagctttgtttggtggatgctaaaaatgttcctgcagatgtaacaatatcttagagactcttctagatccaaattccctggctttcatagagatgcaagtaataggtattacttatttgattttcatccttagagagcacttcagaattacttacattttaaggggctgaaataattcaaatagatgtattagcaacatcaatctgattagaactgttcccaacaaatacagctacaagttcactaagyctgttactggagcggacaatatctgcctgtcagaacctggctttaaattgctaagatgtgattttattttgctgccattattctcctgatctgtcaagacttgtactctgattttggcatttgcttagtttgccttcactgtatggcctcttgccacagcctgcatctctcattcttcggacaaaaagtctgagctgctttatacaggctcatggagaagcagcagcagaatggcactgccgagcattgtagcctgtggtgccctgtgaaactgtgccacgcagggccttcagggagtga

SEQ ID NO: 6938 - DNA, 600 bp, Chicken  19866894191475_2
ggacaatatctgcctgtcagaacctggctttaaattgctaagatgtgattttattttgctgccattattctcctgatctgtcaagacttgtactctgattttggcatttgcttagtttgccttcactgtatggcctcttgccacagcctgcatctctcattcttcggacaaaaagtctgagctgctttatacaggctcatggagaagcagcagcagaatggcactgccgagcattgtagcctgtggtgccctgtgaaactgtgccacgcagggccttcagggagtgaaactgagccaacrgcctgcagttccgtactcagtctcatggtctgacaagactgagacaacacctgtcacttgaatccagtatacttcctaytctttctgtttccaaacacagtgtcttgcacatcagcattcagacagtgagacagaattcatataaaatcttgtaagcctcatttcttctgatacgatcctgattttacataaaagaaaattcatctcaactgctcggagaggtccctaagttggggtaagcgttcaaaatttacacagatcttcctctcaactgcaccagatgtcaaagtggcatgaaca

SEQ ID NO: 6939 - DNA, 600 bp, Chicken  19866894191475_3
gtcaagacttgtactctgattttggcatttgcttagtttgccttcactgtatggcctcttgccacagcctgcatctctcattcttcggacaaaaagtctgagctgctttatacaggctcatggagaagcagcagcagaatggcactgccgagcattgtagcctgtggtgccctgtgaaactgtgccacgcagggccttcagggagtgaaactgagccaacrgcctgcagttccgtactcagtctcatggtctgacaagactgagacaacacctgtcacttgaatccagtatacttcctaytctttctgtttccaaacacagtgtcttgcacatcagcattcagacagtgagacagaattcatataaaatcttgtaagcctcatttcttctgatacgatcctgattttacataaaagaaaattcatctcaactgctcggagaggtccctaagttggggtaagcgttcaaaatttacacagatcttcctctcaactgcaccagatgtcaaagtggcatgaacacagccagaaacataagatgagctggctaacgaggtttttatgataggatggtaggtgataaattagttagcagcattac

SEQ ID NO: 6940 - DNA, 600 bp, Chicken  19866894191479_1
aaaaaggaaggactgctgagcaatcccactccacaggcaatacgcaagtaaagcttttgctatttgcatagccacaatgtaagctagctgttttttattagccacctgcagtacgtgcacatgacatggggaggctacagggcttgctgctcttagcaaggcagccttggagtaacacaaaatatcgatttcggccagcacagcaagagggtttagttgtgtccatgtgctgcttatgaacgtgctcaggtaagttcctgccacaacaatattattaatgggggtttttatgtttgcttstttataaaagaaaaagggggggacagcagaagccgttcagtcaagcytcagcatccacccaggtaaatggcaggatgcagtggcagctgaaaaggaaatgcaatcgtgcatcagcctattagcacaccagtattccaacgcctcgaagctggctgtgcctcagtcccactcatgtcctcaggcttcagtctaagaagcactttccctcatcatacaaatacattccatttgtaagggtgccagaattcttaatgatcttaattacacaagttatgcgcaggaaattgctacacccaagaa

SEQ ID NO: 6941 - DNA, 600 bp, Chicken  19866894191479_2
gtaaagcttttgctatttgcatagccacaatgtaagctagctgttttttattagccacctgcagtacgtgcacatgacatggggaggctacagggcttgctgctcttagcaaggcagccttggagtaacacaaaatatcgatttcggccagcacagcaagagggtttagttgtgtccatgtgctgcttatgaacgtgctcaggtaagttcctgccacaacaatattattaatgggggtttttatgtttgcttstttataaaagaaaaagggggggacagcagaagccgttcagtcaagcytcagcatccacccaggtaaatggcaggatgcagtggcagctgaaaaggaaatgcaatcgtgcatcagcctattagcacaccagtattccaacgcctcgaagctggctgtgcctcagtcccactcatgtcctcaggcttcagtctaagaagcactttccctcatcatacaaatacattccatttgtaagggtgccagaattcttaatgatcttaattacacaagttatgcgcaggaaattgctacacccaagaagtgttgcatcagaaacctaggtgccaagccccacatttctgagacgt

SEQ ID NO: 6942 - DNA, 600 bp, Chicken  19866894191479_3
gaaatgcaatcgtgcatcagcctattagcacaccagtattccaacgcctcgaagctggctgtgcctcagtcccactcatgtcctcaggcttcagtctaagaagcactttccctcatcatacaaatacattccatttgtaagggtgccagaattcttaatgatcttaattacacaagttatgcgcaggaaattgctacacccaagaagtgttgcatcagaaacctaggtgccaagccccacatttctgagacgtacggctctaacaacaggtacatgcaggtttgtgccagtacaaacacytaacagasgtgctaccgagcggcaagatgaccttacagcaactcaggcagagcagtggggatttcttggatgcagacaacctctagttctcacgggacatacgctccagatcaccatttacagctctgccaattaagtatggaagagaactaacatgagtaccaaccaagagtacatactgaatgtaagtaattctgtatgttgtccagccctagaaacccactgcatttcattgtctgcagctacaaactggagctggcacacaacagctgcgaggtgggtgaggttgcagagacaggc

SEQ ID NO: 6943 - DNA, 600 bp, Chicken  19866894191479_4
atcgtgcatcagcctattagcacaccagtattccaacgcctcgaagctggctgtgcctcagtcccactcatgtcctcaggcttcagtctaagaagcactttccctcatcatacaaatacattccatttgtaagggtgccagaattcttaatgatcttaattacacaagttatgcgcaggaaattgctacacccaagaagtgttgcatcagaaacctaggtgccaagccccacatttctgagacgtacggctctaacaacaggtacatgcaggtttgtgccagtacaaacacytaacagasgtgctaccgagcggcaagatgaccttacagcaactcaggcagagcagtggggatttcttggatgcagacaacctctagttctcacgggacatacgctccagatcaccatttacagctctgccaattaagtatggaagagaactaacatgagtaccaaccaagagtacatactgaatgtaagtaattctgtatgttgtccagccctagaaacccactgcatttcattgtctgcagctacaaactggagctggcacacaacagctgcgaggtgggtgaggttgcagagacaggcatttggag

SEQ ID NO: 6944 - DNA, 600 bp, Chicken  19866894191481_1
ctttggggaaatcactgcggcaagcgctgaatgatgatggatggtggaggaaaggggggaaaaggagagcaaaaacagcagtctgcagaaacagggggacaatttgccagcttgagtagagtcacacctccttgctccagtgacaaatttgctccattaggcctataaaccatactttgccaccactgcactgcaaagcacaggctcgagctccgtaatgggcctccaaaggcaaatgcgtgccccaaacgctttcctaaatgcctcatcactttgttccaaccgcgcgtgaggagcgcmckgctgctgcaaagctgagcccacccctctgcaccccttccacccgctgcaacgctccgtaacaacctgctgctgacgtcccatgccgtggctgtgagctgcgcgcttggatacggtgagagaaaaggctaaaggcagctggaggagcgttttcaatcctgtgatgccataatttaaggggatgccaagggagggattgcagcagccagtaaagaatgggcaggaatgggacttccggtcccatccctcttactgaccacctgcttgcaacaagtgatttctccccttatgcccaattct

SEQ ID NO: 6945 - DNA, 599 bp, Chicken  19866894191481_2
ttggggaaatcactgcggcaagcgctgaatgatgatggatggtggaggaaaggggggaaaaggagagcaaaaacagcagtctgcagaaacagggggacaatttgccagcttgagtagagtcacacctccttgctccagtgacaaatttgctccattaggcctataaaccatactttgccaccactgcactgcaaagcacaggctcgagctccgtaatgggcctccaaaggcaaatgcgtgccccaaacgctttcctaaatgcctcatcactttgttccaaccgcgcgtgaggagcgcmckgctgctgcaaagctgagcccacccctctgcaccccttccacccgctgcaacgctccgtaacaacctgctgctgacgtcccatgccgtggctgtgagctgcgcgcttggatacggtgagagaaaaggctaaaggcagctggaggagcgttttcaatcctgtgatgccataatttaaggggatgccaagggagggattgcagcagccagtaaagaatgggcaggaatgggacttccggtcccatccctcttactgaccacctgcttgcaacaagtgatttctccccttatgcccaattctc

SEQ ID NO: 6946 - DNA, 600 bp, Chicken  19866894191482_1
taatcctgctttccccagtgctgttaataaattactagaagagctaaatgatttaaacaatgcagtttcacagtgagcttgctaagtagaccacagcaagtccataatttcttcagcctctccttacaaccagcataagataatttcagggaaaggccttatggtttctaagataaatctccaggggaaaaacatgcttgtgattattgtaaaagcaccagagtggggatcacagagaatggctggactgagttcatggtagtgaacagttaagatggaaaactatgttctacacccccrgagttccatgtccccattcagatcctcccttctcacatggtgctaaccattatgacctgcttgtttaagcgactgttcacacgtaaaatggttcacatctgcagtggtgtaaatccaggtacctcatcagattctagacttaaaccaatttgattccagataagaagtatgtccacctgacacaccctgaatcacatcagaaaaaaacaaataaaacttctagaagaagagtatcactcacctcgactttggcttcgccctcgtgtggaggcagatgctgtgaatataagagaaagaaaa

SEQ ID NO: 6947 - DNA, 600 bp, Chicken  19866894191483_1
caaccaagtgcagatcccaacacatggccttgttgaacttcattccccccggcctcagcccaacgatccagcctgttcagatccctctgaatggccttcctaagtccacacagatcgacaattcctccaacttggtgtcatctgggaacttactgagggtgcattcatccagctcatcaataaagatgactcaataaagatgacaggagaggacccaataccaacccctggggaacaacactggtgaccagttgccagctggatttaacaccattcaccattctctgggcccaaccctcyagccagttctttacccagcaaagagtgtacctgtccaagccatagggacctctctggttggccaggaggcaaccagaggttgactggaggctgctcctgcatctctaagacctccttcttgagaagtgtccagtcttcctggacctggtggatggcaatcctgcccgtggcagaggggtggaactctacrggcgttaaggtctcttccaacccataccattctgtgattcatctctactgcctacagatgtcctgatgttcctgaaactcccaagagacaccccatctcmggttggtcac

SEQ ID NO: 6948 - DNA, 600 bp, Chicken  19866894191483_10
tgatgaaacgagcaacaagctcttgtaaaagccaaacagtatccacaaggagcagctgggctttttttttcttgttacaaagcaaagaagcttcatgccattgtgctaaaatacatgcaatgctcaacactgtataaaagactgctgtaattaacagtactttttgtttgcttttggctaggacacctcgcaagacagaaagcctgacaaaaaaactyccattggctagttaatgcttttaacatttgatgaccttcaaggaaaaataattatgttctaagaaggtaaaatgatgagcarcacrtttgatatttggattttttaaggaaaagttccaccttaggtttaatataatgaaataatatatttcctatacatttctctatataactctatttgtttgcaactacaccatcctcacgttagtcacagcacagaaacattccttccacgtgcaggagtactctcaacttgaagaaaaactctccggaacacttttaagtcacagaagtgtcactaactttgaatgctgtagaactactgctgctgggaacgaggaagaagacattttgaaatctgcagcttcccaaggagtcactg

SEQ ID NO: 6949 - DNA, 600 bp, Chicken  19866894191483_11
gaaacgagcaacaagctcttgtaaaagccaaacagtatccacaaggagcagctgggctttttttttcttgttacaaagcaaagaagcttcatgccattgtgctaaaatacatgcaatgctcaacactgtataaaagactgctgtaattaacagtactttttgtttgcttttggctaggacacctcgcaagacagaaagcctgacaaaaaaactyccattggctagttaatgcttttaacatttgatgaccttcaaggaaaaataattatgttctaagaaggtaaaatgatgagcarcacrtttgatatttggattttttaaggaaaagttccaccttaggtttaatataatgaaataatatatttcctatacatttctctatataactctatttgtttgcaactacaccatcctcacgttagtcacagcacagaaacattccttccacgtgcaggagtactctcaacttgaagaaaaactctccggaacacttttaagtcacagaagtgtcactaactttgaatgctgtagaactactgctgctgggaacgaggaagaagacattttgaaatctgcagcttcccaaggagtcactgctag

SEQ ID NO: 6950 - DNA, 600 bp, Chicken  19866894191483_12
ctcaacttgaagaaaaactctccggaacacttttaagtcacagaagtgtcactaactttgaatgctgtagaactactgctgctgggaacgaggaagaagacattttgaaatctgcagcttcccaaggagtcactgctagtggaaacaagcttcacaactgctccatcccaaatggaagatcattaaactgtgaactcagtaaaaagcaacaaaagcaaacagttccaaaggtcagcctgccttttccagtaaccagctggtgtgcaaactgggataatcttttagaattctctccccctyccccttaccttgaactttccatcactctatgtcacaaaatttaaatttttgcttttagatgtacttcatatacttttttttttaatatttttttttttataaaacagtataaaaataaaagcaatggtgaagagcwacyggggagattatgcagggcacagaggactaaaatcctatgttggataccaagggaaggacagaactagcacttgtgtggggcgaaggcctttgaaagagatagcaatgacatcttcagttcagggcctagagaaagctgatagacaactacaggcgcaatgc

SEQ ID NO: 6951 - DNA, 600 bp, Chicken  19866894191483_13
tagtggaaacaagcttcacaactgctccatcccaaatggaagatcattaaactgtgaactcagtaaaaagcaacaaaagcaaacagttccaaaggtcagcctgccttttccagtaaccagctggtgtgcaaactgggataatcttttagaattctctccccctyccccttaccttgaactttccatcactctatgtcacaaaatttaaatttttgcttttagatgtacttcatatacttttttttttaatatttttttttttataaaacagtataaaaataaaagcaatggtgaagagcwacyggggagattatgcagggcacagaggactaaaatcctatgttggataccaagggaaggacagaactagcacttgtgtggggcgaaggcctttgaaagagatagcaatgacatcttcagttcagggcctagagaaagctgatagacaactacaggcgcaatgcttttctacctaacaatttgctttacactgtaacagtacaaaggattatctcaggacatgaatargaaaaaggagcactatgataccaagtcaatttaaaagcaacactctgaaacatatcaccagtttgtacatta

SEQ ID NO: 6952 - DNA, 600 bp, Chicken  19866894191483_14
tggaaacaagcttcacaactgctccatcccaaatggaagatcattaaactgtgaactcagtaaaaagcaacaaaagcaaacagttccaaaggtcagcctgccttttccagtaaccagctggtgtgcaaactgggataatcttttagaattctctccccctyccccttaccttgaactttccatcactctatgtcacaaaatttaaatttttgcttttagatgtacttcatatacttttttttttaatatttttttttttataaaacagtataaaaataaaagcaatggtgaagagcwacyggggagattatgcagggcacagaggactaaaatcctatgttggataccaagggaaggacagaactagcacttgtgtggggcgaaggcctttgaaagagatagcaatgacatcttcagttcagggcctagagaaagctgatagacaactacaggcgcaatgcttttctacctaacaatttgctttacactgtaacagtacaaaggattatctcaggacatgaatargaaaaaggagcactatgataccaagtcaatttaaaagcaacactctgaaacatatcaccagtttgtacattaaat

SEQ ID NO: 6953 - DNA, 546 bp, Chicken  19866894191483_15
ttcatatacttttttttttaatatttttttttttataaaacagtataaaaataaaagcaatggtgaagagcwacyggggagattatgcagggcacagaggactaaaatcctatgttggataccaagggaaggacagaactagcacttgtgtggggcgaaggcctttgaaagagatagcaatgacatcttcagttcagggcctagagaaagctgatagacaactacaggcgcaatgcttttctacctaacaatttgctttacactgtaacagtacaaaggattatctcaggacatgaatargaaaaaggagcactatgataccaagtcaatttaaaagcaacactctgaaacatatcaccagtttgtacattaaatatagtaaaaacaatttccattcaccagtgtctgggtgtttcttatggcaactttagagtaggcacctttttttttcagttcttctttaaattcttcaccccccagtatcacttctaacaaacagaagcaagagcaacataatgcatacgatctgctgcccatcacatctag

SEQ ID NO: 6954 - DNA, 600 bp, Chicken  19866894191483_2
tcaataaagatgacaggagaggacccaataccaacccctggggaacaacactggtgaccagttgccagctggatttaacaccattcaccattctctgggcccaaccctcyagccagttctttacccagcaaagagtgtacctgtccaagccatagggacctctctggttggccaggaggcaaccagaggttgactggaggctgctcctgcatctctaagacctccttcttgagaagtgtccagtcttcctggacctggtggatggcaatcctgcccgtggcagaggggtggaactctacrggcgttaaggtctcttccaacccataccattctgtgattcatctctactgcctacagatgtcctgatgttcctgaaactcccaagagacaccccatctcmggttggtcacactgcccttgggtccttctctccagaaaacagattgtgaccaaagtactacatttcttttctcccacagatcttcacatgcctcctggtctcacctccattcctttgtgacccagcaatcagcagggggtacactgctgagtgtcccagtagctctgactgtaactcgatttctcctccttcctacatca

SEQ ID NO: 6955 - DNA, 600 bp, Chicken  19866894191483_3
ccaaccctcyagccagttctttacccagcaaagagtgtacctgtccaagccatagggacctctctggttggccaggaggcaaccagaggttgactggaggctgctcctgcatctctaagacctccttcttgagaagtgtccagtcttcctggacctggtggatggcaatcctgcccgtggcagaggggtggaactctacrggcgttaaggtctcttccaacccataccattctgtgattcatctctactgcctacagatgtcctgatgttcctgaaactcccaagagacaccccatctcmggttggtcacactgcccttgggtccttctctccagaaaacagattgtgaccaaagtactacatttcttttctcccacagatcttcacatgcctcctggtctcacctccattcctttgtgacccagcaatcagcagggggtacactgctgagtgtcccagtagctctgactgtaactcgatttctcctccttcctacatcagggctccccagcaaccaacactccctccttgccagccttttctcctaatctcctagcagttctgggggtttgcgttcattttcacagctgcatcaaagaa

SEQ ID NO: 6956 - DNA, 600 bp, Chicken  19866894191483_4
ttttcacagctgcatcaaagaacgctgacctcagatcggaggaggaagataaagggattccacaggaaaagctcttgctgcaaaagaaaatgccaaaatactgaagcataaagctccgtgccactataaagacgaaaacagtatattgtgctctagatttcaaagcatttatcctcggtgtgaacacaaaaaagctgatacgatgaacaaaacaacagaaatgagggtcacaagacagggaggagttctgcagtttctgcactgccacctgggctattccaagcaaaacatttatcatcrtctgtacttgcatcccagcaacaaagtggggaagacaattggtactcctacagctgctgagggctacgagggcacggggaaggatggtgacaccttgggctggagatgctctctgcaatggggacagatgttgctcgtcctctgacaccctaagagggctcactgaggggcagacaaggggctgggacacacctccttgtcacacatgcccagtaacccagtgtgctctacatgtggatctcaaaaatcagcaaaaaagactgcgtatttgttggctgttacctgactcttcctcctggc

SEQ ID NO: 6957 - DNA, 600 bp, Chicken  19866894191483_5
tccttgtcacacatgcccagtaacccagtgtgctctacatgtggatctcaaaaatcagcaaaaaagactgcgtatttgttggctgttacctgactcttcctcctggcaccctcaacagatgaactggtgaatccagcctgtgattttgtttgccccttgtccctcatcttttaagtagaatgaaatgagcttcctaggaagtcaaaaaaaaagaaattagggatgcattacaaaaagcaaaacaaaacaaaacaaaaaccaacaaaacttaccagaagcagttggcattttccacagatytttattggattttacatggcaatacacagtagttacgttgccctcttcaaaaacacaaaataccacaatggtatcagctttgtgcacatgcacgcataaatctcccactgttaccaatgctttcctaacagccccccgcaaaaccaccatggttcagctgataggcagctctgaatgacaacctgytctccaaccaggagacccagaaacagggtgtttggagtagaactttacttacaccggacttaaaaagaaatgatcatctgctgctgctgataggcttgttaacagcagcagagt

SEQ ID NO: 6958 - DNA, 600 bp, Chicken  19866894191483_6
gagcttcctaggaagtcaaaaaaaaagaaattagggatgcattacaaaaagcaaaacaaaacaaaacaaaaaccaacaaaacttaccagaagcagttggcattttccacagatytttattggattttacatggcaatacacagtagttacgttgccctcttcaaaaacacaaaataccacaatggtatcagctttgtgcacatgcacgcataaatctcccactgttaccaatgctttcctaacagccccccgcaaaaccaccatggttcagctgataggcagctctgaatgacaacctgytctccaaccaggagacccagaaacagggtgtttggagtagaactttacttacaccggacttaaaaagaaatgatcatctgctgctgctgataggcttgttaacagcagcagagtgagaaaaaatctgagcstttgcttgtacctgtttcagcacatagcactgtgtcactagcccctttgttcctgtgaatattcattcactgtgcccactagccagtatctgctcaggagaatctgaaggaatacttctgctcagaagcctgcacaatgtcttccggtgcctctgctgcgtgtggcaga

SEQ ID NO: 6959 - DNA, 600 bp, Chicken  19866894191483_7
ggcaatacacagtagttacgttgccctcttcaaaaacacaaaataccacaatggtatcagctttgtgcacatgcacgcataaatctcccactgttaccaatgctttcctaacagccccccgcaaaaccaccatggttcagctgataggcagctctgaatgacaacctgytctccaaccaggagacccagaaacagggtgtttggagtagaactttacttacaccggacttaaaaagaaatgatcatctgctgctgctgataggcttgttaacagcagcagagtgagaaaaaatctgagcstttgcttgtacctgtttcagcacatagcactgtgtcactagcccctttgttcctgtgaatattcattcactgtgcccactagccagtatctgctcaggagaatctgaaggaatacttctgctcagaagcctgcacaatgtcttccggtgcctctgctgcgtgtggcagagcggggttttgagcccaccattgcagagcattcacagaaagcaagccctgaacccacaccacgaggatttgtacctgacagtggcaagcaggcgttacagaacgggggtggttctgcctggtcggaatagc

SEQ ID NO: 6960 - DNA, 600 bp, Chicken  19866894191483_8
gtgctccacagtcagagttctgaataaagcaccaggtgtgatctgtctgtagaaaaatgggaagtggcacaaactgtttcacgaatacaacgtggctcatttgcctggctccagctactgaagagagtatggcagcacttgatattgtatataacacaactggtccacatcacagttttcatctttgcacatgaaaattagcccaaactgcatacctttcaaaagaaaacaacaacaacaaaaaaaccaaccaacaaaaaaaccaacctgactggtaacagctcgtaaggctatagcagyagagtgctagaacacatctctggtctacccccaacacctgctgcaaggtccatggaatccccttccttcctttcctacccacaggaccagcacaaatccatgatccattaaaccacacatcagtgtgtcagcaatggtctcacttccagcacgggcagtgatgaaacgagcaacaagctcttgtaaaagccaaacagtatccacaaggagcagctgggctttttttttcttgttacaaagcaaagaagcttcatgccattgtgctaaaatacatgcaatgctcaacactgtataaaagac

SEQ ID NO: 6961 - DNA, 600 bp, Chicken  19866894191483_9
acccacaggaccagcacaaatccatgatccattaaaccacacatcagtgtgtcagcaatggtctcacttccagcacgggcagtgatgaaacgagcaacaagctcttgtaaaagccaaacagtatccacaaggagcagctgggctttttttttcttgttacaaagcaaagaagcttcatgccattgtgctaaaatacatgcaatgctcaacactgtataaaagactgctgtaattaacagtactttttgtttgcttttggctaggacacctcgcaagacagaaagcctgacaaaaaaactyccattggctagttaatgcttttaacatttgatgaccttcaaggaaaaataattatgttctaagaaggtaaaatgatgagcarcacrtttgatatttggattttttaaggaaaagttccaccttaggtttaatataatgaaataatatatttcctatacatttctctatataactctatttgtttgcaactacaccatcctcacgttagtcacagcacagaaacattccttccacgtgcaggagtactctcaacttgaagaaaaactctccggaacacttttaagtcacagaagtgtcact

SEQ ID NO: 6962 - DNA, 600 bp, Chicken  19866894191484_1
gaaaatagagactagtgacctcctgcaaatgtcttgggtcctaaaactatgtgacgagtaaaaatctgttttctgttgtatttctctgtctatattcagatatgttgctaaaacttacagaagcaactgaaaacaaaaggacagtagaactcatagagctatgttttgtgcagagaaaactattggtatgtttcagcaccagagaatgtaattaaatgcttctttgcattatctggttgatctctggtagattaatcactgcaatggcaaatgacaaagaaaaaaacctgattagactaygatacacatatttatgaaaaaataaagcctacatttggttaggaaaagagcgaaatgaaataaaatattattttgtaaatcgaataacatactagtgcaaattaataaatctgttagactctttgagaccttttaccctagcttgatgagtaagttggtgttgcatctgatacacaagtagagaatataagctctgtgttacatctcactcttacaaaatatcctctgtaaagttgtagcatttaatcttttaatgcaaaatgaatttcctgagattctacagccaaatctgtaaataac

SEQ ID NO: 6963 - DNA, 600 bp, Chicken  19866894191485_1
ttgctcctgaaggaagaagcgttcccattgccatgaatgcgtggcccaaacgggttaaagtggcacagtttgcatctcatgtgggttgggagagcatgtttgccaactggaagtagctgggaacaaaacatcgttgggcaagagcaaagtatgtacatgcttcagtgcttgcacagggggtggaaagagaaagccttcccaaggtggtgtgcgggacccagcgctgcctggggaggctgtgctgtgctgtgtgcttgggcttgtcccagtgtgtcaccagcaccaaacaggagtgacaamgtggaaacacaactgctgctttagtagtgctctgggtgaaagcagggctctgcgtaaagctgttttcctccatatgttggagtgtgtgcacccagagatgtgcagagaatttgggtcctggtgcgtgatggggaaaggcagcacgaccacagattcttttgcatctttttaaagcttattttcttgtttttttttaatgctccacttactttttattcctttttgccactcctgttcagcagttaggtgagagttccttctttttatgtacatccttcactggtttcttttgacactgat

SEQ ID NO: 6964 - DNA, 600 bp, Chicken  19866894191485_2
tacatcacgaaatgttctgtatgcaggattgcttaattagcatagtgttattctaataaggaactaaatcagactacagtggataatagcgaggatgtgctataaagacagtaggaattatcacctgtgtatctatagctaatcaagttttgaagagcagcacctaaaactgataattagagtgatttcctcatgcctttggcagctcatcacggtaatgttcttagccgaggattaatgagatctctgatttgaaacttataattaggagtctttaatatagctacagttgaacataaygaacattaaggagcttctgggaaggggggatctgcctcatattggatttgttggcatgaatggagacacatagagtcataaaggttggaaaagaccaacaagatcatctagyccaaccatcagcccatgcctgtgaccactaaacaaygtccctcagtgccacatctccatggctcttgaacaccaccatggatggtgattccacccyctctctgggcagcctgtgccaatgcctcaccactctgtctgagaagaattttttcctaatatccaccctgaatctcccctggcacaaccgaa

SEQ ID NO: 6965 - DNA, 600 bp, Chicken  19866894191485_3
aggaattatcacctgtgtatctatagctaatcaagttttgaagagcagcacctaaaactgataattagagtgatttcctcatgcctttggcagctcatcacggtaatgttcttagccgaggattaatgagatctctgatttgaaacttataattaggagtctttaatatagctacagttgaacataaygaacattaaggagcttctgggaaggggggatctgcctcatattggatttgttggcatgaatggagacacatagagtcataaaggttggaaaagaccaacaagatcatctagyccaaccatcagcccatgcctgtgaccactaaacaaygtccctcagtgccacatctccatggctcttgaacaccaccatggatggtgattccacccyctctctgggcagcctgtgccaatgcctcaccactctgtctgagaagaattttttcctaatatccaccctgaatctcccctggcacaaccgaaggccattacctcttgccctgtcaaaaacctcagaagtaatgtttgaggggcygtggttgytctgctatttgtgtgggggggttttgtttgtttgactttgtcttgttttgtt

SEQ ID NO: 6966 - DNA, 600 bp, Chicken  19866894191485_4
tttgaagagcagcacctaaaactgataattagagtgatttcctcatgcctttggcagctcatcacggtaatgttcttagccgaggattaatgagatctctgatttgaaacttataattaggagtctttaatatagctacagttgaacataaygaacattaaggagcttctgggaaggggggatctgcctcatattggatttgttggcatgaatggagacacatagagtcataaaggttggaaaagaccaacaagatcatctagyccaaccatcagcccatgcctgtgaccactaaacaaygtccctcagtgccacatctccatggctcttgaacaccaccatggatggtgattccacccyctctctgggcagcctgtgccaatgcctcaccactctgtctgagaagaattttttcctaatatccaccctgaatctcccctggcacaaccgaaggccattacctcttgccctgtcaaaaacctcagaagtaatgtttgaggggcygtggttgytctgctatttgtgtgggggggttttgtttgtttgactttgtcttgttttgttaaagctctctttagagagtaagygttgagaagttca

SEQ ID NO: 6967 - DNA, 600 bp, Chicken  19866894191485_5
atcacggtaatgttcttagccgaggattaatgagatctctgatttgaaacttataattaggagtctttaatatagctacagttgaacataaygaacattaaggagcttctgggaaggggggatctgcctcatattggatttgttggcatgaatggagacacatagagtcataaaggttggaaaagaccaacaagatcatctagyccaaccatcagcccatgcctgtgaccactaaacaaygtccctcagtgccacatctccatggctcttgaacaccaccatggatggtgattccacccyctctctgggcagcctgtgccaatgcctcaccactctgtctgagaagaattttttcctaatatccaccctgaatctcccctggcacaaccgaaggccattacctcttgccctgtcaaaaacctcagaagtaatgtttgaggggcygtggttgytctgctatttgtgtgggggggttttgtttgtttgactttgtcttgttttgttaaagctctctttagagagtaagygttgagaagttcagagtgaaggagagcagagttctgcagccagaactcaggagtcccagcaatgtggaaatgt

SEQ ID NO: 6968 - DNA, 600 bp, Chicken  19866894191485_6
ggcatgaatggagacacatagagtcataaaggttggaaaagaccaacaagatcatctagyccaaccatcagcccatgcctgtgaccactaaacaaygtccctcagtgccacatctccatggctcttgaacaccaccatggatggtgattccacccyctctctgggcagcctgtgccaatgcctcaccactctgtctgagaagaattttttcctaatatccaccctgaatctcccctggcacaaccgaaggccattacctcttgccctgtcaaaaacctcagaagtaatgtttgaggggcygtggttgytctgctatttgtgtgggggggttttgtttgtttgactttgtcttgttttgttaaagctctctttagagagtaagygttgagaagttcagagtgaaggagagcagagttctgcagccagaactcaggagtcccagcaatgtggaaatgtggtgtcataagatgctgccttcattgtgaaggtctccaacacaccctccttcctcagccacccgttctgagaatctgaatcacctggcttggaaaggaccttcaggaccatcaacttctgtagctgcactacatttcacctcct

SEQ ID NO: 6969 - DNA, 600 bp, Chicken  19866894191485_7
tggagacacatagagtcataaaggttggaaaagaccaacaagatcatctagyccaaccatcagcccatgcctgtgaccactaaacaaygtccctcagtgccacatctccatggctcttgaacaccaccatggatggtgattccacccyctctctgggcagcctgtgccaatgcctcaccactctgtctgagaagaattttttcctaatatccaccctgaatctcccctggcacaaccgaaggccattacctcttgccctgtcaaaaacctcagaagtaatgtttgaggggcygtggttgytctgctatttgtgtgggggggttttgtttgtttgactttgtcttgttttgttaaagctctctttagagagtaagygttgagaagttcagagtgaaggagagcagagttctgcagccagaactcaggagtcccagcaatgtggaaatgtggtgtcataagatgctgccttcattgtgaaggtctccaacacaccctccttcctcagccacccgttctgagaatctgaatcacctggcttggaaaggaccttcaggaccatcaacttctgtagctgcactacatttcacctcctaatttcat

SEQ ID NO: 6970 - DNA, 600 bp, Chicken  19866894191485_8
accactaaacaaygtccctcagtgccacatctccatggctcttgaacaccaccatggatggtgattccacccyctctctgggcagcctgtgccaatgcctcaccactctgtctgagaagaattttttcctaatatccaccctgaatctcccctggcacaaccgaaggccattacctcttgccctgtcaaaaacctcagaagtaatgtttgaggggcygtggttgytctgctatttgtgtgggggggttttgtttgtttgactttgtcttgttttgttaaagctctctttagagagtaagygttgagaagttcagagtgaaggagagcagagttctgcagccagaactcaggagtcccagcaatgtggaaatgtggtgtcataagatgctgccttcattgtgaaggtctccaacacaccctccttcctcagccacccgttctgagaatctgaatcacctggcttggaaaggaccttcaggaccatcaacttctgtagctgcactacatttcacctcctaatttcatctgtatggctacatgtggcactgagctgcaggacatagcagcaaagaagtctggggtaaaaataacctccagact

SEQ ID NO: 6971 - DNA, 600 bp, Chicken  19866894191488_1
taaacatctccagggagttggagaacttgtagatactctgtggggaaaaaaataaaattccaaaagtatgcaactattacacatgcatcagtgattttatgacaggcattctagtagtcatgggaaaaagaagcgtcaaatgtcttatgggacgatatgtgcattagaaaggaaactattgcctcttggtaactctaccataagtaacatcttcatagagatataagatagaaatgagaaaaagaacaactggtaaaacttcgtactactgcaagaattactaataccaattgcaatccmtttgatatttgctataaaatcttcattgtacaacaaaacaaatcaaagtacttcattgtttctccccatcttaaactcataagcactgaaggtgaaaatataaagtagcagtcatacaaggttttatccaagagatccaatacaactgttactaaattaaacttcaaaagtctagtacttaaaaaaaattaaaggataaaatataatttttaatattccgttttatacatgaatgttagaacaaattttatcagagccattcaacaagtagcaaggaaagcaactccacaaaacagaggg

SEQ ID NO: 6972 - DNA, 600 bp, Chicken  19866894191492_1
aagaacacaaaatttttttgttgttgttcttcttgaaaaaaataaagaaaaacatggaatgaattttggaagttttaagatcaggagaattttacaaatgttttatatgcatgtttttatttatgatacatatacaaaaaaattatttatatatgaatgataatcaggtattaaggatgaggaaggcagggcaatattttttcaccagcactccgcgacctatggaaagattttctgaataattaagttcaatgtatattttaggttccaagatgctgctgattattatccttagaaacmagcgctttggttcctagtcaaacataaaacttgtctgcacagtaaaaaagttgattgycatagcaatttcattataaaggagtaatgatgagaagaattactaatctggaataaagttattttaaaatgaagtgtccacaggagagttgttctagtcacacatggaggcacgtttttggaatcttaagctaacagtaactactgaaaaatacagtgatgttgcaaactcagatgggtgctttcacaaagctgaaattaatcccaccataacaaaaacaacatcaagaaaatgaatagaga

SEQ ID NO: 6973 - DNA, 600 bp, Chicken  19866894191492_2
atgaattttggaagttttaagatcaggagaattttacaaatgttttatatgcatgtttttatttatgatacatatacaaaaaaattatttatatatgaatgataatcaggtattaaggatgaggaaggcagggcaatattttttcaccagcactccgcgacctatggaaagattttctgaataattaagttcaatgtatattttaggttccaagatgctgctgattattatccttagaaacmagcgctttggttcctagtcaaacataaaacttgtctgcacagtaaaaaagttgattgycatagcaatttcattataaaggagtaatgatgagaagaattactaatctggaataaagttattttaaaatgaagtgtccacaggagagttgttctagtcacacatggaggcacgtttttggaatcttaagctaacagtaactactgaaaaatacagtgatgttgcaaactcagatgggtgctttcacaaagctgaaattaatcccaccataacaaaaacaacatcaagaaaatgaatagagatgctacttattaaaaatttatatatataaaaaacttttcaaggcccatgacaaaaatt

SEQ ID NO: 6974 - DNA, 600 bp, Chicken  19866894191499_1
tggctctgggcagcctggtctagtggttggtaaccatgcccatggcagggggcttgaaactagatgatcactgcagctattttcaacccaggccattctatgattctatgatatgattctatgacctgctggtcacacttctcttgatgcagcccagaatacagttggccttctgagctgcaaatgtgcatcaacactcccaaatccttcttctcagggctgctctcaagtcattctctgcccaacctgtatctgtggttgcagttgctctgacccacatgcaggaccttgtacttggcyttgttgaacttcatgaagttgttatggacccacctctcaagcctgtccaggtccctctgcataatgtcctttccctgtagcatgtcaactgcaccrttcaccttggtgtcatctgcaagcttactgagggtrcacatgatcccactgtccatgatgcctaaaaagtcccaacattaatccctgaggagtgacactcatcacctgtctccatctgagatagattgagctattgactgcaactctctgtgtgcagtcatccaaccagttccttatccagcgagcggtccattcatcaaatcc

SEQ ID NO: 6975 - DNA, 600 bp, Chicken  19866894191499_2
tctatgattctatgatatgattctatgacctgctggtcacacttctcttgatgcagcccagaatacagttggccttctgagctgcaaatgtgcatcaacactcccaaatccttcttctcagggctgctctcaagtcattctctgcccaacctgtatctgtggttgcagttgctctgacccacatgcaggaccttgtacttggcyttgttgaacttcatgaagttgttatggacccacctctcaagcctgtccaggtccctctgcataatgtcctttccctgtagcatgtcaactgcaccrttcaccttggtgtcatctgcaagcttactgagggtrcacatgatcccactgtccatgatgcctaaaaagtcccaacattaatccctgaggagtgacactcatcacctgtctccatctgagatagattgagctattgactgcaactctctgtgtgcagtcatccaaccagttccttatccagcgagcggtccattcatcaaatccatttttctccaacttggcaaccaggatgtcatgaaagacagtgtcaaatgctttgcataagtccaggtagatgatatcagttgttcttccattatc

SEQ ID NO: 6976 - DNA, 600 bp, Chicken  19866894191499_3
tcacacttctcttgatgcagcccagaatacagttggccttctgagctgcaaatgtgcatcaacactcccaaatccttcttctcagggctgctctcaagtcattctctgcccaacctgtatctgtggttgcagttgctctgacccacatgcaggaccttgtacttggcyttgttgaacttcatgaagttgttatggacccacctctcaagcctgtccaggtccctctgcataatgtcctttccctgtagcatgtcaactgcaccrttcaccttggtgtcatctgcaagcttactgagggtrcacatgatcccactgtccatgatgcctaaaaagtcccaacattaatccctgaggagtgacactcatcacctgtctccatctgagatagattgagctattgactgcaactctctgtgtgcagtcatccaaccagttccttatccagcgagcggtccattcatcaaatccatttttctccaacttggcaaccaggatgtcatgaaagacagtgtcaaatgctttgcataagtccaggtagatgatatcagttgttcttccattatctactgaatctgtaactccatcataaaaggccaccaa

SEQ ID NO: 6977 - DNA, 600 bp, Chicken  19866894191500_1
catagttacttctgcaaatttcagaaggtatttatttgcacagtgccaccagttacagcaacactgttgcagccacctgtcatgtaatgggccagacaggcattgctccagcacccaaaggcacactgtgctgcaggtcaggatctacacatggaggtgtaaacacgcaggaagagttgtactgcaaagagggccactcttagcagcaagctgactgcaaggcatctgccggtagtaaacagtgcaccaaaactctatagttatttgaaatctttgcataaaagaacgaagctcatgtcyaagcacaaattgatttttatcattcagactgcaatgcatgcacaaagctctaagacagcccaaataaattaattcattactacagactcatacacattataattagattacttcagggtttctcgctggccacagcaacactatgcctcaggaatgtctacacttagaagtcacaagaaccaaatgaaggttaacctcttaagaggctttctacttactcttgtttggtttatgtaagtctagaatgtgaaatttaatctacaacgcattcattctgaaagcttagaacagcttccgtag

SEQ ID NO: 6978 - DNA, 600 bp, Chicken  19866894191500_2
ttcactgccgtattaactgtaggcgtaagaggaagacttgacagcccctgcggcactgtggcccgtgaaggacttgtgggagggggcggtgaagtcatcccaaatgcaccagggcctccaacaccggctattaatcccccagaagccctgtcatagccaatgggtctgctcagctgctgtccttgaagcacttgttgctgctgttgcataagttgcccttggataatattgctgatttggggtggcaagctcgttgttgtaatatggcccgggctagtcaaggactgcatgtttgccccrctagctacaggactctgaggaccaagatgatgaatggtgccaccagactgcgaatgaggttgcgaaagccggcgctcccttaccgtagcaggtgtcccagaagatggaagttgcacctgtgctgcagctccttgagcaatctgtgcaattcctggcccttcttgatacacaaagtgcccaccatttgaaggactcaagctgatttgcctcacaagcacgctggcatccacaaatcctctagtagggctctggctgcacatacccaagccggggcctggagtacctgcccgaacgttcggt

SEQ ID NO: 6979 - DNA, 600 bp, Chicken  19866894191500_3
ccttcttgatacacaaagtgcccaccatttgaaggactcaagctgatttgcctcacaagcacgctggcatccacaaatcctctagtagggctctggctgcacatacccaagccggggcctggagtacctgcccgaacgttcggtaacgtctgcactggcacagggctgggctgtgtggggctctgggactgaacctgctggggcagcggtgacgtgacttgaatatacgatggggatccatgctcaaaccgtctctgctgagggctgaactgaaaacttggcgatgtcgggtttggaatyggcagtggtgtgagtgttatctgctggtttcctgaagccaccggtccaacgttctgcagcgtgatgttcacattctgaccagccactgggcttctactcattataaactgctgaatttggtagctgggggactggggtgcagatggactcgcagaaggtgcgaaagaagctgcaggggactggggtagatttgcttgttgctcttctccctcactgcccgtgaaggacctggaccgctggagctggcgctgggcattctgaggaccattaccatggtgcatcctcaatagtatatggtgt

SEQ ID NO: 6980 - DNA, 600 bp, Chicken  19866894191503_1
ttgtttttgagttgtatttaatgcatattgctacatttttacacaacctacagaaactgggggctaattttgtttgacttacataggaacaggcatttaattttgtatgcagttcatattgactctcttaaacatgttttaaagtagcagattttagtatgagtcagccaatgtaaaatgttaaattgaaggttttactgaaggtattattgttctgttctggaagaatatagagttgaaagatgttcgtttacatttagaaatgaaaaatgtccttctgtttatggtgaagctgctttwttgatcgcttacttgattttaatttttaatgttcttaatttcttaaagccaaagccaactgaaacagtcacaactgatgagtctggggtaagattagtaaactgaccccagtggtkttacctctacttgagttattctttttaccatgtctctattttccaccaatttttttcygtatttttcataactgtcctattacaaaggtgtatgcagtggtttgcattcattgtcaatgtattattgaagtctactrcaaccaaacccaatatgatccctattaacaaaccagaaaacttggaa

SEQ ID NO: 6981 - DNA, 600 bp, Chicken  19866894191503_2
tattgactctcttaaacatgttttaaagtagcagattttagtatgagtcagccaatgtaaaatgttaaattgaaggttttactgaaggtattattgttctgttctggaagaatatagagttgaaagatgttcgtttacatttagaaatgaaaaatgtccttctgtttatggtgaagctgctttwttgatcgcttacttgattttaatttttaatgttcttaatttcttaaagccaaagccaactgaaacagtcacaactgatgagtctggggtaagattagtaaactgaccccagtggtkttacctctacttgagttattctttttaccatgtctctattttccaccaatttttttcygtatttttcataactgtcctattacaaaggtgtatgcagtggtttgcattcattgtcaatgtattattgaagtctactrcaaccaaacccaatatgatccctattaacaaaccagaaaacttggaaatgcatgtgatgtgtgaagcatttctacaggtcctgtgtttttagcatgtaatttttcctttcatatcattcttaccaaggtgaaaaggccctcaagatacattttcaaatcttgc

SEQ ID NO: 6982 - DNA, 587 bp, Chicken  19866894191503_3
aaaatgttaaattgaaggttttactgaaggtattattgttctgttctggaagaatatagagttgaaagatgttcgtttacatttagaaatgaaaaatgtccttctgtttatggtgaagctgctttwttgatcgcttacttgattttaatttttaatgttcttaatttcttaaagccaaagccaactgaaacagtcacaactgatgagtctggggtaagattagtaaactgaccccagtggtkttacctctacttgagttattctttttaccatgtctctattttccaccaatttttttcygtatttttcataactgtcctattacaaaggtgtatgcagtggtttgcattcattgtcaatgtattattgaagtctactrcaaccaaacccaatatgatccctattaacaaaccagaaaacttggaaatgcatgtgatgtgtgaagcatttctacaggtcctgtgtttttagcatgtaatttttcctttcatatcattcttaccaaggtgaaaaggccctcaagatacattttcaaatcttgcctcttccacctctgcatttgatgttgtttttctgaaagtgttgca

SEQ ID NO: 6983 - DNA, 508 bp, Chicken  19866894191503_4
catttagaaatgaaaaatgtccttctgtttatggtgaagctgctttwttgatcgcttacttgattttaatttttaatgttcttaatttcttaaagccaaagccaactgaaacagtcacaactgatgagtctggggtaagattagtaaactgaccccagtggtkttacctctacttgagttattctttttaccatgtctctattttccaccaatttttttcygtatttttcataactgtcctattacaaaggtgtatgcagtggtttgcattcattgtcaatgtattattgaagtctactrcaaccaaacccaatatgatccctattaacaaaccagaaaacttggaaatgcatgtgatgtgtgaagcatttctacaggtcctgtgtttttagcatgtaatttttcctttcatatcattcttaccaaggtgaaaaggccctcaagatacattttcaaatcttgcctcttccacctctgcatttgatgttgtttttctgaaagtgttgca

SEQ ID NO: 6984 - DNA, 600 bp, Chicken  19866894191508_1
atcctcagcttcccctgtgtgctgcaggagcctttggaaggatgcgggctgcttctgcgcagcacagagccctgagccggggtccatctgctgctgctgcgggcctgaatgcctcctgtccccatttgtggtgctggctgccaaatagcacacagagccttatttcagcgttcccttttcaggctctctgtgacagctgcgggtgacccataacagtcagtagggcaaaataagaaagataaatgggcaagctgtatggttaaagtagtcattgctggaggaagaagtcttccggcctcwtccatatcctgrctgtgagaagaatgaacgctcagaatggatgactatctcccttgtctacagaaccaaagctggtgtaggagttggtggttgtacacgtgagatgctgctctcggaaggccatctgaatgcacatctagatggccacgatgctcacactgcccttgttgtaatcagagacaaaaagaacctttggtcttctctaaaacaacgtgctgggagtgtcaacaacacagaagcgttgctatgtttagagaataaaaatggcttcagctcattctggaccactgtttcctggaa

SEQ ID NO: 6985 - DNA, 600 bp, Chicken  19866894191508_2
ccctgtgtgctgcaggagcctttggaaggatgcgggctgcttctgcgcagcacagagccctgagccggggtccatctgctgctgctgcgggcctgaatgcctcctgtccccatttgtggtgctggctgccaaatagcacacagagccttatttcagcgttcccttttcaggctctctgtgacagctgcgggtgacccataacagtcagtagggcaaaataagaaagataaatgggcaagctgtatggttaaagtagtcattgctggaggaagaagtcttccggcctcwtccatatcctgrctgtgagaagaatgaacgctcagaatggatgactatctcccttgtctacagaaccaaagctggtgtaggagttggtggttgtacacgtgagatgctgctctcggaaggccatctgaatgcacatctagatggccacgatgctcacactgcccttgttgtaatcagagacaaaaagaacctttggtcttctctaaaacaacgtgctgggagtgtcaacaacacagaagcgttgctatgtttagagaataaaaatggcttcagctcattctggaccactgtttcctggaaaatgtaccaaag

SEQ ID NO: 6986 - DNA, 600 bp, Chicken  19866894191508_3
aataaaaatggcttcagctcattctggaccactgtttcctggaaaatgtaccaaagcttgcaagaaggccggttatgaagtttgtttcactagagaagtacgagccggtgatcacagagactcgttaagcctgaagatgatacatatttaaagtactttgcagcatggcagggagaccataatgttatgactctgcattttcctccatctgctgctgaacgcgtgcaaagcagggcttggagaagcagagctgaggtggggatttaccctttgctgtaagaatgaaaaacgattaattgygagattccccacggttgtgatgcaagtacatacttcacatcagatccaaacaaatcctaaaagcgttcactcaaagcaaggctcgagcaattcccattcagaaagcatttaatgtagcatatcaccagcagaagattttgaagcaaatctgcagattatgctttaaggtggaagggraaygtcctggggatggaagttggtggctgtgtgtctgtgtaggttggaggaggaagaatcgcagcacatctcacttgatgtaatgcacttgagcgtgttctctcccttgcagagcttctacay

SEQ ID NO: 6987 - DNA, 600 bp, Chicken  19866894191508_4
cataatgttatgactctgcattttcctccatctgctgctgaacgcgtgcaaagcagggcttggagaagcagagctgaggtggggatttaccctttgctgtaagaatgaaaaacgattaattgygagattccccacggttgtgatgcaagtacatacttcacatcagatccaaacaaatcctaaaagcgttcactcaaagcaaggctcgagcaattcccattcagaaagcatttaatgtagcatatcaccagcagaagattttgaagcaaatctgcagattatgctttaaggtggaagggraaygtcctggggatggaagttggtggctgtgtgtctgtgtaggttggaggaggaagaatcgcagcacatctcacttgatgtaatgcacttgagcgtgttctctcccttgcagagcttctacaygtttctgtagcctcctcaggcttctatgagtagttgtactgctcaggagcagcagcatttgtatttgttctgatctgctaagagagcaagactgacgtggtcttgccgtgcatgcttatcatcccccatcacttctgaacccgtcagccagctggagctgaactggagggcgcaggg

SEQ ID NO: 6988 - DNA, 600 bp, Chicken  19866894191508_5
aatgttatgactctgcattttcctccatctgctgctgaacgcgtgcaaagcagggcttggagaagcagagctgaggtggggatttaccctttgctgtaagaatgaaaaacgattaattgygagattccccacggttgtgatgcaagtacatacttcacatcagatccaaacaaatcctaaaagcgttcactcaaagcaaggctcgagcaattcccattcagaaagcatttaatgtagcatatcaccagcagaagattttgaagcaaatctgcagattatgctttaaggtggaagggraaygtcctggggatggaagttggtggctgtgtgtctgtgtaggttggaggaggaagaatcgcagcacatctcacttgatgtaatgcacttgagcgtgttctctcccttgcagagcttctacaygtttctgtagcctcctcaggcttctatgagtagttgtactgctcaggagcagcagcatttgtatttgttctgatctgctaagagagcaagactgacgtggtcttgccgtgcatgcttatcatcccccatcacttctgaacccgtcagccagctggagctgaactggagggcgcagggggt

SEQ ID NO: 6989 - DNA, 600 bp, Chicken  19866894191508_6
gagattccccacggttgtgatgcaagtacatacttcacatcagatccaaacaaatcctaaaagcgttcactcaaagcaaggctcgagcaattcccattcagaaagcatttaatgtagcatatcaccagcagaagattttgaagcaaatctgcagattatgctttaaggtggaagggraaygtcctggggatggaagttggtggctgtgtgtctgtgtaggttggaggaggaagaatcgcagcacatctcacttgatgtaatgcacttgagcgtgttctctcccttgcagagcttctacaygtttctgtagcctcctcaggcttctatgagtagttgtactgctcaggagcagcagcatttgtatttgttctgatctgctaagagagcaagactgacgtggtcttgccgtgcatgcttatcatcccccatcacttctgaacccgtcagccagctggagctgaactggagggcgcagggggtgctcccagcctcagtgacgtgacgaccctgtgagtgtaatggaaacgagcagttgtaataggggagggaggcctgattagcggccccatggagagaaaagctgcagcatgagcgcaaccc

SEQ ID NO: 6990 - DNA, 599 bp, Chicken  19866894191510_1
  misc_feature (1)..(27): n is any nucleotide
nnnnnnnnnnnnnnnnnnnnnnnnnnnaaaatggttgcttagatgtaagatgttttcatcacctcatataattcatgatccaaggtttccactacaacattttcacccgactggtcaatgcggactactggtttcttcagcttcactcggcctcccaagcgttccattattttctcactgatctgtccagagcctccaacaaacttcctctcctgaaacacagaaaacaacaacacagcagagagaaatcagcagagcagtgcctgcaaagtgactttgtgtacgattgcaagtcttttscttgggattcaaaccaaactctattctccagttgttaccaaaccctcttaagtaagtttagcagtttcacttggaaaatgtttccacattactttttccttcagtgaacttctgtacctcccatgtttgactaccagccaaaactagaagtaccagtaatgtcatgagaaaaacttattctcatgcagtttccaaatggattccacagatatgtgtgaataagcaacatttcctataaggatttaaacttttaaatctttctctgagttcactcttttcattgcttaagtctgtgcatg

SEQ ID NO: 6991 - DNA, 600 bp, Chicken  19866894191516_1
cattcagtatgaatgcccgtagtggcaagagacggaatgtgttaaaagcatccttaatatgcttgttcttcacaacagtggtaaactactttgttcctcaaactgtccagccttgtggtcttcatctgagcacagaagcgacgaagtctgctttgccagaatttctgtcatacttagattcatacaaaatgtcaactcagaattctgtcaaagattaattcaagtttgtttcacatgtttgaagttgtttagagtgacctcatctgccatgattggtcttttattttctctaccagaagwaatgggcaagtctttgtaaggtcaataagaagagtatcagcagagacttgatttctgtccttgtcccaggatattagtcactacccccaattagcagcaactctttacactattctgacatagcataatgaaatttatgagccaataattactagaagtcgaactctggttatctgtctattcactgctcagagattttcttaataccaggcaaaaagattgttctgtatcatgcttaaagatgcacttattctatttgaaggatggactacagccagtgcaaatcaatctaactaccac

SEQ ID NO: 6992 - DNA, 599 bp, Chicken  19866894191518_1
  misc_feature (1)..(22): n is any nucleotide
nnnnnnnnnnnnnnnnnnnnnncttttaaatgccctggagctttctcttctccaggatgaacagccccagctctctcagcctgtcctcgtaggggagttgttccatctctgggatcatttttgtggccatcctctggatgtgctccaacaggtccatgtctctcctgttctgaggacttcacatcagtagtccaggtgcagtctcaccagtgctgagtagaggggcagcatcacctcccttgacctactgaccacatcttttgatgcagccccagatacagttggctttctgggctgtarggtcacactgctgtctcatgttcatccaccagtacccccaagtccttttcagcagggctgtgttctgtccttacatcccccaacttgtgctgatagcaggacttgccacaaaccaagtgcaagatcttgcacttsgatttattgaacctcatgagacctagacaggctcaaacagtggctcatgagtttcatctgagccactgcttgagcctgtctaggtttctctgaatggcatcccgtccctcaaatacatcgaccaaaacacacagcttggtgtgatccgcgcaattgctgagggt

SEQ ID NO: 6993 - DNA, 534 bp, Chicken  19866894191518_2
ggatgtgctccaacaggtccatgtctctcctgttctgaggacttcacatcagtagtccaggtgcagtctcaccagtgctgagtagaggggcagcatcacctcccttgacctactgaccacatcttttgatgcagccccagatacagttggctttctgggctgtarggtcacactgctgtctcatgttcatccaccagtacccccaagtccttttcagcagggctgtgttctgtccttacatcccccaacttgtgctgatagcaggacttgccacaaaccaagtgcaagatcttgcacttsgatttattgaacctcatgagacctagacaggctcaaacagtggctcatgagtttcatctgagccactgcttgagcctgtctaggtttctctgaatggcatcccgtccctcaaatacatcgaccaaaacacacagcttggtgtgatccgcgcaattgctgagggtgcactcaatcccactgttgatgtcactggtaaatcagcttgcttgagtaacaatatctgacccattaaat

SEQ ID NO: 6994 - DNA, 600 bp, Chicken  19866894191528_1
ctttggactgatctcaatagtgcaatggttgaagatacatctcagttgcctgggatgccgagacgcgtttgtttgttgtgcacagctcagagaaatcttcttcagttttgtttatttcgtttgcttttaagactaactttactggtattgtttgcaaaaagcctagaaacgccttcctgaatgctgaactgcaaagcaacgattctttgtgctggtgatactcagctacaggtatgatttctgtatgtggagttcctaacttgcatgatctgaaaacatctgtaagctgcgcctttgtayattgaagtggaacaatctgaagcattgggatgaattaattcaaaaaatttttgctactcctggcactaaatgccagaggcagtttatcatattgcttaaaaatggtaatatttatataaaaatcatatttgttcttaatatagttttaattacattaatatagtaattgtttaactttacgtacaaatagagacttgggttcgtacttcaacttcctaggaatcatttaccaggagcttcctgaatagcaaagctgctttttactcagcatatctcttggtatcttgttgacagtgggtt

SEQ ID NO: 6995 - DNA, 599 bp, Chicken  19866894191536_1
  misc_feature (1)..(117): n is any nucleotide
nnnnnnnnnnnnnnnnnnnnnnnnnnnnnnnnnnnnnnnnnnnnnnnnnnnnnnnnnnnnnnnnnnnnnnnnnnnnnnnnnnnnnnnnnnnnnnnnnnnnnnnnnnnnnnnnnnnnncacaagtcttatgaggagcatctgagggagctgggattgttcagtctggagaagaggatgctcaggggagacctcattgcactctacaacttcctgaagggaggctgtgatgaggaggggtttggcttcttctcccaggcaacaaacaggactcaaggaaatggccacaatttgcaccagagragatttagatttgacataaggaaacactttctctctcagagagctgtcaggcactggactgcctgcccagggaggtgktggacttgccatccctggcagttacaaagataatatttactgtatatattttaattccatactttgctcatatcttctattttaccctcttcatttgacttactaaaacctctcagacagctgtgttaatttggaaaaagaagaacagctgctggatttgaagacatatgttcattttcaactcctgcaagttgttgtgaaagcttagctagctgcccccg

SEQ ID NO: 6996 - DNA, 599 bp, Chicken  19866894191536_2
  misc_feature (1)..(39): n is any nucleotide
nnnnnnnnnnnnnnnnnnnnnnnnnnnnnnnnnnnnnnncacaagtcttatgaggagcatctgagggagctgggattgttcagtctggagaagaggatgctcaggggagacctcattgcactctacaacttcctgaagggaggctgtgatgaggaggggtttggcttcttctcccaggcaacaaacaggactcaaggaaatggccacaatttgcaccagagragatttagatttgacataaggaaacactttctctctcagagagctgtcaggcactggactgcctgcccagggaggtgktggacttgccatccctggcagttacaaagataatatttactgtatatattttaattccatactttgctcatatcttctattttaccctcttcatttgacttactaaaacctctcagacagctgtgttaatttggaaaaagaagaacagctgctggatttgaagacatatgttcattttcaactcctgcaagttgttgtgaaagcttagctagctgcccccggggctcattagtccctcaaggaagtctccaaaacagaaaaagatgaatgtaggaataataaaaaagagttgtgccttc

SEQ ID NO: 6997 - DNA, 600 bp, Chicken  19866894191537_1
caccaggggttctcctctgttttgtaccacatctataacttctttattacatcaatagtaaactaaatgagaagtaatggcaaaaatggaaggtagggagtacaacacagtagcagtatggaaaacaaacattactactggtgttgaactgtgtgagcttttgatgctttaaatctgcagtgctatccttacataaacatagttttcctacttgactctagaaatagtagggaaaagttgcccgtgcatattcacgtattgaatatggccctcactactagaaagacatcaaggccacgragcgtgtccagaggagggcaacaaagtctggagcagcataaaactcacaagtttaaagaggagcaattgagggaactgggattgtttagcytggaggagaggacactcaggggcgaccttatcgctctctacaactgcctgaaaggaggctgtggtgaggtagatgttggtctcttctcccgcgtagctggtgatagaactagaaggaaaagcctcaagttatgccaggggaggttcaggttggatattaggaaaaattccttctccaaaagactggtcaggtgctggaatgggctgccc

SEQ ID NO: 6998 - DNA, 600 bp, Chicken  19866894191537_2
ggtagggagtacaacacagtagcagtatggaaaacaaacattactactggtgttgaactgtgtgagcttttgatgctttaaatctgcagtgctatccttacataaacatagttttcctacttgactctagaaatagtagggaaaagttgcccgtgcatattcacgtattgaatatggccctcactactagaaagacatcaaggccacgragcgtgtccagaggagggcaacaaagtctggagcagcataaaactcacaagtttaaagaggagcaattgagggaactgggattgtttagcytggaggagaggacactcaggggcgaccttatcgctctctacaactgcctgaaaggaggctgtggtgaggtagatgttggtctcttctcccgcgtagctggtgatagaactagaaggaaaagcctcaagttatgccaggggaggttcaggttggatattaggaaaaattccttctccaaaagactggtcaggtgctggaatgggctgcccaggraggtggtgaagtcaccaaccctggagttgttcaagggtactaagggacatggtttagtggggaaatattggtggtaggtggacggtt

SEQ ID NO: 6999 - DNA, 570 bp, Chicken  19866894191537_3
tgtccagaggagggcaacaaagtctggagcagcataaaactcacaagtttaaagaggagcaattgagggaactgggattgtttagcytggaggagaggacactcaggggcgaccttatcgctctctacaactgcctgaaaggaggctgtggtgaggtagatgttggtctcttctcccgcgtagctggtgatagaactagaaggaaaagcctcaagttatgccaggggaggttcaggttggatattaggaaaaattccttctccaaaagactggtcaggtgctggaatgggctgcccaggraggtggtgaagtcaccaaccctggagttgttcaagggtactaagggacatggtttagtggggaaatattggtggtaggtggacggttggactagatggtcttggagatcttttccaaccatggtgattctttgtacatttatataaatatccaaccttccccrttgctgaagtatagcaatgtctactgaaccccagccacacttttccatagcaactgtcatttgagaatgaggagtgtgataactctttaagaaataacatttgtcag

SEQ ID NO: 7000 - DNA, 407 bp, Chicken  19866894191537_4
tggtctcttctcccgcgtagctggtgatagaactagaaggaaaagcctcaagttatgccaggggaggttcaggttggatattaggaaaaattccttctccaaaagactggtcaggtgctggaatgggctgcccaggraggtggtgaagtcaccaaccctggagttgttcaagggtactaagggacatggtttagtggggaaatattggtggtaggtggacggttggactagatggtcttggagatcttttccaaccatggtgattctttgtacatttatataaatatccaaccttccccrttgctgaagtatagcaatgtctactgaaccccagccacacttttccatagcaactgtcatttgagaatgaggagtgtgataactctttaagaaataacatttgtcag

SEQ ID NO: 7001 - DNA, 600 bp, Chicken  19866894191561_1
gtgctcagcgggcagagccatccatccctggtgggcgagaaatgagcgctgctggtggcagccagaggagtgctggggcactgctgagcgggaacgatctgggtgagtatctgcatacagtgattaaaatagatcaagaaagtgtgtctggggcctcttccaaagctaactgaagcctgtgggaaagagtctttctctcagaattctatggcattggatccaaaccctggaaatacatcacaggataatttggtttagtggaaggagtggagagatctaacaaacgggcagttgggagcrcggtggggtttgaggtgatgcagtgagtgcctggctcacccagacccaccgctcggtaatgttaatccgtctctgtgggcatctcttccyggtacggacagcagtgactgagaaatctctctccctcacttctatcagtgtgtcagctgcattctcccctgctctttctctgtgtctgcaacacacagagcacctgcgacgtcagctggggtccctgygctgcttcataacacaccataaggaaaaaatgtcacagatgaaggccaggcaggcctcattactgtgacggtgtatcagatg

SEQ ID NO: 7002 - DNA, 600 bp, Chicken  19866894191561_2
ggaacgatctgggtgagtatctgcatacagtgattaaaatagatcaagaaagtgtgtctggggcctcttccaaagctaactgaagcctgtgggaaagagtctttctctcagaattctatggcattggatccaaaccctggaaatacatcacaggataatttggtttagtggaaggagtggagagatctaacaaacgggcagttgggagcrcggtggggtttgaggtgatgcagtgagtgcctggctcacccagacccaccgctcggtaatgttaatccgtctctgtgggcatctcttccyggtacggacagcagtgactgagaaatctctctccctcacttctatcagtgtgtcagctgcattctcccctgctctttctctgtgtctgcaacacacagagcacctgcgacgtcagctggggtccctgygctgcttcataacacaccataaggaaaaaatgtcacagatgaaggccaggcaggcctcattactgtgacggtgtatcagatgccaccagagcaaggggaacaaacaagctttgtacggaatcagtctgttgcatacccgcctcatttttatgaataatgggtacgttctcat

SEQ ID NO: 7003 - DNA, 600 bp, Chicken  19866894191561_3
tccaaaccctggaaatacatcacaggataatttggtttagtggaaggagtggagagatctaacaaacgggcagttgggagcrcggtggggtttgaggtgatgcagtgagtgcctggctcacccagacccaccgctcggtaatgttaatccgtctctgtgggcatctcttccyggtacggacagcagtgactgagaaatctctctccctcacttctatcagtgtgtcagctgcattctcccctgctctttctctgtgtctgcaacacacagagcacctgcgacgtcagctggggtccctgygctgcttcataacacaccataaggaaaaaatgtcacagatgaaggccaggcaggcctcattactgtgacggtgtatcagatgccaccagagcaaggggaacaaacaagctttgtacggaatcagtctgttgcatacccgcctcatttttatgaataatgggtacgttctcatagtgtagcatggtaattacctttttttgacttactataaaggctgaagtatgtctgctgatgctgctttatctgttcayttcaaatcaatggtattgtgaaatacaacttcacataactgtaattcaa

SEQ ID NO: 7004 - DNA, 600 bp, Chicken  19866894191561_4
ctgtgtctgcaacacacagagcacctgcgacgtcagctggggtccctgygctgcttcataacacaccataaggaaaaaatgtcacagatgaaggccaggcaggcctcattactgtgacggtgtatcagatgccaccagagcaaggggaacaaacaagctttgtacggaatcagtctgttgcatacccgcctcatttttatgaataatgggtacgttctcatagtgtagcatggtaattacctttttttgacttactataaaggctgaagtatgtctgctgatgctgctttatctgttcayttcaaatcaatggtattgtgaaatacaacttcacataactgtaattcaaagtccgtgggatgttttatttcaaggcttttcatctcataattcagctacaaagtgactcgagtgcgcaaattgataaacaatttgacagcgagcyctttgatgctgcagtcccagcgggagcagtgcaggagcccgggaggggtgcgggccgrgagaagcgagggctctgggaacatcctgcctcttcctggctggggaaaagctgcgtccgggcacagagacggggcggctttattgatctgcgctgcc

SEQ ID NO: 7005 - DNA, 600 bp, Chicken  19866894191561_5
ggaacaaacaagctttgtacggaatcagtctgttgcatacccgcctcatttttatgaataatgggtacgttctcatagtgtagcatggtaattacctttttttgacttactataaaggctgaagtatgtctgctgatgctgctttatctgttcayttcaaatcaatggtattgtgaaatacaacttcacataactgtaattcaaagtccgtgggatgttttatttcaaggcttttcatctcataattcagctacaaagtgactcgagtgcgcaaattgataaacaatttgacagcgagcyctttgatgctgcagtcccagcgggagcagtgcaggagcccgggaggggtgcgggccgrgagaagcgagggctctgggaacatcctgcctcttcctggctggggaaaagctgcgtccgggcacagagacggggcggctttattgatctgcgctgccgtmgttttgctcgtttaccgtgcgtgaggacgggcctcgcttcccagagcacacatagcgggtgcgttgtcccgaactcctcctcgagtcgaagaggatggctacgggcggagaagcgcctaaaaatgccgctggttgtgttacg

SEQ ID NO: 7006 - DNA, 600 bp, Chicken  19866894191561_6
taatgggtacgttctcatagtgtagcatggtaattacctttttttgacttactataaaggctgaagtatgtctgctgatgctgctttatctgttcayttcaaatcaatggtattgtgaaatacaacttcacataactgtaattcaaagtccgtgggatgttttatttcaaggcttttcatctcataattcagctacaaagtgactcgagtgcgcaaattgataaacaatttgacagcgagcyctttgatgctgcagtcccagcgggagcagtgcaggagcccgggaggggtgcgggccgrgagaagcgagggctctgggaacatcctgcctcttcctggctggggaaaagctgcgtccgggcacagagacggggcggctttattgatctgcgctgccgtmgttttgctcgtttaccgtgcgtgaggacgggcctcgcttcccagagcacacatagcgggtgcgttgtcccgaactcctcctcgagtcgaagaggatggctacgggcggagaagcgcctaaaaatgccgctggttgtgttacgggtaaaaagacgatgtctcctagcgtcagccccgcgtgcacggcgcagccctgtgcgc

SEQ ID NO: 7007 - DNA, 600 bp, Chicken  19866894191561_7
aaatcaatggtattgtgaaatacaacttcacataactgtaattcaaagtccgtgggatgttttatttcaaggcttttcatctcataattcagctacaaagtgactcgagtgcgcaaattgataaacaatttgacagcgagcyctttgatgctgcagtcccagcgggagcagtgcaggagcccgggaggggtgcgggccgrgagaagcgagggctctgggaacatcctgcctcttcctggctggggaaaagctgcgtccgggcacagagacggggcggctttattgatctgcgctgccgtmgttttgctcgtttaccgtgcgtgaggacgggcctcgcttcccagagcacacatagcgggtgcgttgtcccgaactcctcctcgagtcgaagaggatggctacgggcggagaagcgcctaaaaatgccgctggttgtgttacgggtaaaaagacgatgtctcctagcgtcagccccgcgtgcacggcgcagccctgtgcgcagagaggagcggtttcccggctctgacatcgccggttgccgcgccgctggcgccccgcgcgggggtgcccgtagggcgggggacgttcctgccgcttggg

SEQ ID NO: 7008 - DNA, 600 bp, Chicken  19866894191567_1
tgtttattctatcaaaattaaactggtttctaaattcaggtggatcagtgacgtggatatttcacatctgtttgtaaggtccttgtgattagctcacctggttggactgccttcctgttgctttgcctatgaattacagctgcaggcaaggtggagaggccaactccaaccctaatggggaggttgtgttatttggaaaaaggaacagcctaagggagcagggagctcattcttcactgtgtgctggttcagacacactgggctgcagtgttgcaactgacatcttagctaacaactggygtctgcccwgctaagctgctttcacattatagcttctgggatttgctttccaacatctcagaatgggattcatacttcattacaaaactgacacggtaatcttgtaatgcacgttgataatccactggaaaggagcaagaaaatgggaatcccaagatgctgctctgtctgactatagcaaaccagctcagaaatgacacatggatttgtcagaaaagacaaacatggattttagttacaaaacaaaactggatgatgttcttccatttttcctttacttttattttgagctgttcctaa

SEQ ID NO: 7009 - DNA, 600 bp, Chicken  19866894191567_2
tatcaaaattaaactggtttctaaattcaggtggatcagtgacgtggatatttcacatctgtttgtaaggtccttgtgattagctcacctggttggactgccttcctgttgctttgcctatgaattacagctgcaggcaaggtggagaggccaactccaaccctaatggggaggttgtgttatttggaaaaaggaacagcctaagggagcagggagctcattcttcactgtgtgctggttcagacacactgggctgcagtgttgcaactgacatcttagctaacaactggygtctgcccwgctaagctgctttcacattatagcttctgggatttgctttccaacatctcagaatgggattcatacttcattacaaaactgacacggtaatcttgtaatgcacgttgataatccactggaaaggagcaagaaaatgggaatcccaagatgctgctctgtctgactatagcaaaccagctcagaaatgacacatggatttgtcagaaaagacaaacatggattttagttacaaaacaaaactggatgatgttcttccatttttcctttacttttattttgagctgttcctaagctgcagta

SEQ ID NO: 7010 - DNA, 600 bp, Chicken  19866894191568_1
tggccatgaagcactcccttcttttcctgacaagtactcttaacaagctgcctaaactcctcctttctctttattatttgctgaagatatcattgtctgctgctgacagcttcttttcaactgacattcagaagactttctgcaatctgttccagacctttctgctttggacagaatttgcatttgaatttttgcattcaaagaagctcatatgaagaaatcagtttatcgtcttcagttcccctgaattaaaaattgcaagtgatcaaattcatttaggaacaagacaggttttttttktttgtttgtttgtttgtttgtttgtccagaggtaacagtagacatccaggccttttccacccctgctccgaatggaattactgaaaaatcaaaaatacatatactttaaaaacctgtatttttaatttttcattttgaaaatcttcctggttttccctccttcttccaaaaacactaccacagaacaatcaagtctcaagtctatttgtacaatttatttttgcattttcatcaggactaagctgatccagaagtgaggcttgaattgacactctcggttttttttttagaactatctta

SEQ ID NO: 7011 - DNA, 599 bp, Chicken  19866894191570_1
  misc_feature (1)..(144): n is any nucleotide
nnnnnnnnnnnnnnnnnnnnnnnnnnnnnnnnnnnnnnnnnnnnnnnnnnnnnnnnnnnnnnnnnnnnnnnnnnnnnnnnnnnnnnnnnnnnnnnnnnnnnnnnnnnnnnnnnnnnnnnnnnnnnnnnnnnnnnnnnnnnnnnnctgcactgtgtacagatgaatgtgtgaagagcagactcggatgttcataaccctttgcccaccaagcttgtgctctgttatcatccgctgtgctcagtgtggacaaagacgtgtggaattctagagagaaagcagcagagagaaagctgttaaatygagaatataatgtataaagttcagcaggatcttagtgaaagcatttctaaattcagtttcaagccataartaaaacaatccagcaaatggttacagcaaaattagaggcatggtgacttagtaaaatttctcaacagctgatatcatgaccctgtattctttgttatttatggaaaygtgttacttgccagattgtgaaaatggctgcctgcttgtatatatattaattttgaattgcttataagtcagcagctgcatttttgctatcggtttaataaggacataaaagatggaaaaga

SEQ ID NO: 7012 - DNA, 599 bp, Chicken  19866894191570_2
  misc_feature (1)..(74): n is any nucleotide
nnnnnnnnnnnnnnnnnnnnnnnnnnnnnnnnnnnnnnnnnnnnnnnnnnnnnnnnnnnnnnnnnnnnnnnnnnctgcactgtgtacagatgaatgtgtgaagagcagactcggatgttcataaccctttgcccaccaagcttgtgctctgttatcatccgctgtgctcagtgtggacaaagacgtgtggaattctagagagaaagcagcagagagaaagctgttaaatygagaatataatgtataaagttcagcaggatcttagtgaaagcatttctaaattcagtttcaagccataartaaaacaatccagcaaatggttacagcaaaattagaggcatggtgacttagtaaaatttctcaacagctgatatcatgaccctgtattctttgttatttatggaaaygtgttacttgccagattgtgaaaatggctgcctgcttgtatatatattaattttgaattgcttataagtcagcagctgcatttttgctatcggtttaataaggacataaaagatggaaaagacagcatctctttattaatacttagatatggaattatttaaatgctttaaacattcaaatcatttgtgtga

SEQ ID NO: 7013 - DNA, 600 bp, Chicken  19866894191570_3
gactcggatgttcataaccctttgcccaccaagcttgtgctctgttatcatccgctgtgctcagtgtggacaaagacgtgtggaattctagagagaaagcagcagagagaaagctgttaaatygagaatataatgtataaagttcagcaggatcttagtgaaagcatttctaaattcagtttcaagccataartaaaacaatccagcaaatggttacagcaaaattagaggcatggtgacttagtaaaatttctcaacagctgatatcatgaccctgtattctttgttatttatggaaaygtgttacttgccagattgtgaaaatggctgcctgcttgtatatatattaattttgaattgcttataagtcagcagctgcatttttgctatcggtttaataaggacataaaagatggaaaagacagcatctctttattaatacttagatatggaattatttaaatgctttaaacattcaaatcatttgtgtgaaacaaaaaggctggaaaagctttcccaaataaatgactgtcatcaaagctgctttccatataaggctcatatttcagttctaatcttaactaaagagaacagaagcgt

SEQ ID NO: 7014 - DNA, 600 bp, Chicken  19866894191570_4
cagattgtgaaaatggctgcctgcttgtatatatattaattttgaattgcttataagtcagcagctgcatttttgctatcggtttaataaggacataaaagatggaaaagacagcatctctttattaatacttagatatggaattatttaaatgctttaaacattcaaatcatttgtgtgaaacaaaaaggctggaaaagctttcccaaataaatgactgtcatcaaagctgctttccatataaggctcatatttcagttctaatcttaactaaagagaacagaagcgtacaatctttaygtattaataaatgactgccttctgattgtgcagtaattttaccaggctttctttaaagtgcaattagttttttttccttacatgatgaagttcatttgggctttagatctaatgtttkgctcagatgtaatcttcataattgatttactaaatgttgctgtttgtatttgcctatccacatcaaatattgtactggtcttttgaccttatatctaggtgaggaattatgtggaagccacacagttatgttagtgataaattatttgtgtgcaatcaaatctctttccgtcttcccaattg

SEQ ID NO: 7015 - DNA, 600 bp, Chicken  19866894191570_5
tctttattaatacttagatatggaattatttaaatgctttaaacattcaaatcatttgtgtgaaacaaaaaggctggaaaagctttcccaaataaatgactgtcatcaaagctgctttccatataaggctcatatttcagttctaatcttaactaaagagaacagaagcgtacaatctttaygtattaataaatgactgccttctgattgtgcagtaattttaccaggctttctttaaagtgcaattagttttttttccttacatgatgaagttcatttgggctttagatctaatgtttkgctcagatgtaatcttcataattgatttactaaatgttgctgtttgtatttgcctatccacatcaaatattgtactggtcttttgaccttatatctaggtgaggaattatgtggaagccacacagttatgttagtgataaattatttgtgtgcaatcaaatctctttccgtcttcccaattgccactcttccaccataggaagcactcggccaattcagctgtacattttttagtgaaaactgcttggtctcttcagctgttggctcatcaaaatgaatggtgtttcaaccccttgtcac

SEQ ID NO: 7016 - DNA, 599 bp, Chicken  19866894191576_1
  misc_feature (1)..(52): n is any nucleotide
nnnnnnnnnnnnnnnnnnnnnnnnnnnnnnnnnnnnnnnnnnnnnnnnnnnntgttgcatgacagtgacatcctttataactccttactaagctttatattaaaagtagataattaatagattaataccggaacaatgtgctatacttacagaatttcttcaataatatttagacaaaagacaaaatttattcctgtgaaatacattcccacaaaactcaagaaatctgtttaaaaagattttgcttctgcagtaatattaataattcattgcttcctacagcctctttttgaaatcacrgaggatatacaaagaagcaatcactaatatccagaaaagtgtttaacttaagatctttggtacagtgaccaatttccccattgtttagttattactgattataaaaatcacgtggtacaggttctggtttatagacatgaacttcgtatgctcagaaggagtagaaaaagattttggttcttttattttccctgggggagagaagatttttataatctctctgaaaaaaaatatatttgtagttacacagtgcaacagtatgggaaactgggatcgcttattgtttcaggcctgggcca

SEQ ID NO: 7017 - DNA, 600 bp, Chicken  19866894191582_1
cagacaagatcttcagatggttctaatcagcatcagagttcaagaaactgtactaatacagaccagctgaggatctgccctgctttatgttagaaaaaaatgaaaccaatttcttttggtctttctatggttctttaatgtatgaataataaaggatgatattcattctgtgtgaaattcatccctcctcaaaagcaactcatgccagtccatgcaccactgaagtattttttcaaggaattcatgttcttatggggaaagtttgctttattatatgtcttagtgaatcccttcacaaayggagaaagctgataccagaaagaaaagccaaaattcctacgagttttgatggaagttacaaaaacatcaatggtaacactgatctttacaaattcattctctatccacttactagtaaaaaaaaaaaaaaaaaaggttcatcctttaaactgaatggaaagccaaagcaaggtatgtcagaaggctctgtttggtgaaggcagctgcaagctttgtccttgcatggaataggtcatcagccatgtgacagcagtagagaatccagggacatatgtcccattctgagatatagcatattca

SEQ ID NO: 7018 - DNA, 599 bp, Chicken  19866894191596_1
  misc_feature (1)..(117): n is any nucleotide
nnnnnnnnnnnnnnnnnnnnnnnnnnnnnnnnnnnnnnnnnnnnnnnnnnnnnnnnnnnnnnnnnnnnnnnnnnnnnnnnnnnnnnnnnnnnnnnnnnnnnnnnnnnnnnnnnnnnnacgtccctcttttggatcttccaagccaaaatattgtccacgctggacagaatggcgctgtcgaagagagcatcacccctttgcagggctggaccccagcctctcggtgacaccacataccagtgctgtctccacacaccttagcacagcccccatgagagcctgacacgtgcccagctctaytgtgtgctcgcagagctgctgagctcaggggaacaggcaagaggaaggctgaggctgcaccaggagctttgcagccaggccagcacgatttcagcatgactcatccccctctgacccctgcagcccctccgtgtgtttcgcaagagccctcacaggcagctcagtgctatcttctccctctgttctaacaccatgcctcagtctcctcgcctacagacatagtttgctgtgaccaaggccaagcagagccttaatgtcacccctgcagcgccgggccgagctggacaggcgggtccatc

SEQ ID NO: 7019 - DNA, 600 bp, Chicken  19866894191614_1
acattaatctctattaaatatttgtgtaaaacacagttgaaggtaacagaggaccaggcaagagcaggaaaggggaaaagtccaggaagtggaaagtatttggaaataatttagacagtgtagtgtgtggtcaaagtaggtatctacttaagtgcaagggttttagcttgtaggtaatggtaaattctctcttaagtgtattaaaagcatccaacacaatataaacatttggaaatcagttgaattaaacatatgatcactttgaggcaggagatctacagcaagttcaaggagtgacaragctatttgtttaaacagaagtctctgttcctttctggtctagccccaaatgtcaggaccatacatcgctccccagaaggggcccaccaatgttgccttctgatgttgctccttgcagccttaagagaggttttctaggcttgtattttctcactgtctccttttaatttggtgtaattactgtttccacaatgtagacctagtctgctttgggggatgatggtgaagacaacagcagtgaattgaggctgtaactgtgaaactggaacaggcagggaagcttggatctgaactgaaaaa

SEQ ID NO: 7020 - DNA, 600 bp, Chicken  19866894191619_1
tttccacttctgtcaatgtaatcccggaatggcacaaactacaaaagaaaagatacattcagacaggtcatgatgtgaatgcaaaacacgtcttaaaatacaaaaatgaggaagttagatctatgcaataaaggtacattaatgtactaccttacacattttataaatatattcatatacatatatattatgcctatacatattatatctaaaaaaaatcaattttctaatagaaacatattctcaaaccatggctggctcagattatcagctatgtgttttactggcatatctggaatrtctctcaacctcttccttacaaagctatttttggcttacatgtcttgttcatgggcctcacctaccagaatttgtaggaagaatgttcgctacctgaagtgaacaaaacagaaaggatgactttataatkttgatcatttttcattatacttagtaggattttgaaccacgactgtgaacatttttttttacctaacaccagtaaacataacaagactctaagcaaaaaaaaaaaagatttgatttcaaaaaagcacttgttatgtcataccaaaatctgcaacaccaaaaaggcagcta

SEQ ID NO: 7021 - DNA, 600 bp, Chicken  19866894191619_2
aaggtacattaatgtactaccttacacattttataaatatattcatatacatatatattatgcctatacatattatatctaaaaaaaatcaattttctaatagaaacatattctcaaaccatggctggctcagattatcagctatgtgttttactggcatatctggaatrtctctcaacctcttccttacaaagctatttttggcttacatgtcttgttcatgggcctcacctaccagaatttgtaggaagaatgttcgctacctgaagtgaacaaaacagaaaggatgactttataatkttgatcatttttcattatacttagtaggattttgaaccacgactgtgaacatttttttttacctaacaccagtaaacataacaagactctaagcaaaaaaaaaaaagatttgatttcaaaaaagcacttgttatgtcataccaaaatctgcaacaccaaaaaggcagctaccagctctgccttggagttcacactaataagatgttcatgctgctcgtaaggaaaaaagaaacaatctgggctccttgatttttattcacaacaggcagcatgcagaaatgtagtgggttaagccatgta

SEQ ID NO: 7022 - DNA, 599 bp, Chicken  19866894191624_1
  misc_feature (1)..(98): n is any nucleotide
nnnnnnnnnnnnnnnnnnnnnnnnnnnnnnnnnnnnnnnnnnnnnnnnnnnnnnnnnnnnnnnnnnnnnnnnnnnnnnnnnnnnnnnnnnnnnnnnnntataacctgctttattaggttctctcatttctgaatgtttcaacatcagctaattttgagacgtgcttcttattattaataataaaataattcaatttttaactatcttgttaaaacatgaaatggtatttaatgggcttttgttttaaagggcagagtattctcacatatattcagttgtaggcataatatatatacatayctattcttgaattctaccttccattcagtagtatagctctgggtaacacatttcaactgaaaggaaatctgagctgaatcctgcattaaaaaggattattaaacatgtgctaacttataaatcagatttccttaatattctyatgctaagtatctttacatttgtcagtttgctataggtttactgtccgcatttttctcagcaaagacagatggcctgtgttttacaaagtctcagttttctttccccttgactgactatgcaagccaatattcacaaattacaaaacttgcactctc

SEQ ID NO: 7023 - DNA, 600 bp, Chicken  19866894191624_2
atcagctaattttgagacgtgcttcttattattaataataaaataattcaatttttaactatcttgttaaaacatgaaatggtatttaatgggcttttgttttaaagggcagagtattctcacatatattcagttgtaggcataatatatatacatayctattcttgaattctaccttccattcagtagtatagctctgggtaacacatttcaactgaaaggaaatctgagctgaatcctgcattaaaaaggattattaaacatgtgctaacttataaatcagatttccttaatattctyatgctaagtatctttacatttgtcagtttgctataggtttactgtccgcatttttctcagcaaagacagatggcctgtgttttacaaagtctcagttttctttccccttgactgactatgcaagccaatattcacaaattacaaaacttgcactctcattttctgcaattagcctgaagcaataacaaatcactgctttggaccwtttttttttttattatttttttttccatgcagcttcaaataccttccaaaacttttagaaatttcaaacagattaacattttataagaaatctct

SEQ ID NO: 7024 - DNA, 600 bp, Chicken  19866894191624_3
acatttcaactgaaaggaaatctgagctgaatcctgcattaaaaaggattattaaacatgtgctaacttataaatcagatttccttaatattctyatgctaagtatctttacatttgtcagtttgctataggtttactgtccgcatttttctcagcaaagacagatggcctgtgttttacaaagtctcagttttctttccccttgactgactatgcaagccaatattcacaaattacaaaacttgcactctcattttctgcaattagcctgaagcaataacaaatcactgctttggaccwtttttttttttattatttttttttccatgcagcttcaaataccttccaaaacttttagaaatttcaaacagattaacattttataagaaatctctgccaattctatcatctgttagtctgtaaaatgtctatattacaaagtattatattagataatgtttttatttctaatactcttccagcactgcacttctattgcattacgtctgctagttctcattacaaaatatttctttgtacatatcatttggtccaattcagtaactaccaaaaataactttctactgcatgtgatccatc

SEQ ID NO: 7025 - DNA, 599 bp, Chicken  19866894191632_1
  misc_feature (1)..(67): n is any nucleotide
nnnnnnnnnnnnnnnnnnnnnnnnnnnnnnnnnnnnnnnnnnnnnnnnnnnnnnnnnnnnnnnnnnnacagttatccagtggagaggtctctaggcaccagtaaaaaaatagatgggtgcaaaaaatacttttgttgcattaattttctggattttgcattgttaaccacgtgcagtctctttaggtgacatcaatttttttatgatctcaggcaagtatagcacacttgtggattaaaacaaataatggaaaccaaagaccccattctctattctagagaagtattaaagttgtgcccrtaatttgcacacaattgttgaagtaagtgctatgtttcttgtacccttttttctaccccagatatgtagatgtgtcgtttctccttttgcagatagaaatttggagcacagctagaaataatgtttgctgtctttccttttcttacaactgctaagactgtccaaaacccagagaaataaaaggaagtgtaccaggggaagaagaagtacagcaatatggtagacatcaggcacaagtgaagacttcttcagcaaaatgcctaaaacatttttatgttaataagctaagacagtaacag

SEQ ID NO: 7026 - DNA, 600 bp, Chicken  19866894191637_1
gcagcccctgaagcatgcctgcagatgttttcaaaaggcaccttcaggagcagcactggtggcacacagcctgagctaccagtgcagctggaacaatgtcactgcagctgccactccactgcactgcgtggccgtgctgctccctgtgcctctcaaaggctggtattgaccgcaagcactggttgccaagccaacaccaacactggtgtttggctctcgctgctgaaggaagcacagttgcttatgcagttctctcttaggatgctcacagcctaactagaaaacaccgaggtgcgtcasaaacaacagggagaacaaaggacatacctggtcgatgctgcctcttagccagatttgactctgatgtggcacagatgcagcagctgacttcaatggcatttctgcatctggtttaagacagctttcatacataaacctgaaccagaggctgacattttcagaggagctttgggaatgcaggagactggaggctgagcttccctgagcgtcactgcccgcaactggagccagcccctccagctccaacyrctgcacttcagtcactgccccactgatctctgaagtgccaagaagaagtgg

SEQ ID NO: 7027 - DNA, 600 bp, Chicken  19866894191637_2
gttctctcttaggatgctcacagcctaactagaaaacaccgaggtgcgtcasaaacaacagggagaacaaaggacatacctggtcgatgctgcctcttagccagatttgactctgatgtggcacagatgcagcagctgacttcaatggcatttctgcatctggtttaagacagctttcatacataaacctgaaccagaggctgacattttcagaggagctttgggaatgcaggagactggaggctgagcttccctgagcgtcactgcccgcaactggagccagcccctccagctccaacyrctgcacttcagtcactgccccactgatctctgaagtgccaagaagaagtggaagggcagaggcagccccttggagaggttacagctggagaaaatggggtgtcctaatggagttagtgaccggtagtgccaggcacagaagagccttcagagacaacagcgagcatgtctgcagtagctcctgaatatccagagtcagggagaagctgggggatgcatcagagagagagttcctctggcctcattcctggtcctctgcagagaaaatgaacatctgaggagaatctctgcagcaagctg

SEQ ID NO: 7028 - DNA, 600 bp, Chicken  19866894191637_3
ttctctcttaggatgctcacagcctaactagaaaacaccgaggtgcgtcasaaacaacagggagaacaaaggacatacctggtcgatgctgcctcttagccagatttgactctgatgtggcacagatgcagcagctgacttcaatggcatttctgcatctggtttaagacagctttcatacataaacctgaaccagaggctgacattttcagaggagctttgggaatgcaggagactggaggctgagcttccctgagcgtcactgcccgcaactggagccagcccctccagctccaacyrctgcacttcagtcactgccccactgatctctgaagtgccaagaagaagtggaagggcagaggcagccccttggagaggttacagctggagaaaatggggtgtcctaatggagttagtgaccggtagtgccaggcacagaagagccttcagagacaacagcgagcatgtctgcagtagctcctgaatatccagagtcagggagaagctgggggatgcatcagagagagagttcctctggcctcattcctggtcctctgcagagaaaatgaacatctgaggagaatctctgcagcaagctga

SEQ ID NO: 7029 - DNA, 599 bp, Chicken  19866894191641_1
  misc_feature (1)..(41): n is any nucleotide
nnnnnnnnnnnnnnnnnnnnnnnnnnnnnnnnnnnnnnnnnctaaacctctggataaaacggtgccattttaacaatcttggagaacttacatcattacaaaacatgtaaaaattacaatgtgaaattgcataatgagaaaaatgtagtagtgagaacaaaagtaaatgtgaatttgctaccctagaacacaaagcacataacaatgaaagagtcactttacaaacctcttcatagaatatttaaagcaaaaatacactatgtaatattaagaatttaagttatcactgatcagttctgmtttaataaaacaaagaaaatattttaaaacttcataattaaatacatttcacaatggaaggatactgaataagtaacagcattatgaacttgaatattccttataatcttccatgataaaaaaaagagatatttgaaaacctataagatgttcaagcagctatttattctctgactgtttaaaaaaagcaagtgaaacttatcaaaaagaacagaaattcttaacttagaaaataattttaaggtttaaaggtgacacaatgcagactgataggaacctcaaggcacttcttactaaat

SEQ ID NO: 7030 - DNA, 600 bp, Chicken  19866894191651_1
agaacagcctgaacagaagctccgagtgcataacgctcagacgcttgttctgtatctggcatgcattatacagcactcacataacatatgtttgatcctgccaccgttgaaagagatgtgctggggatcctgtgaggtccttgcagccctacatttttctaattttgtaaattattgcatgcttgtaggaaattatacataactgttactgctgctcagaatattgtttctgtactccgtgaacttttttgttttcaggtcttgctggatctttttcctatatttatgatacaattatcwcagaaagccaacataggctttctgtgtgtttactgatagggctctgtgccagttcacagacttagaatttttccagtgttttgttttgtttttgatttcaatttttaagcaaacctcattgaaaaaagcatctcacttcagtggttttacagtgtgttactgtagcaggaggagaggcaaaaggtgtgcttgttggtgttcatctcagacatgaaaaagctcatttcataatgtattgttattcagaaaagggagtatgagcttgccaaaataaagtagaaacacaaattgtgagagcca

SEQ ID NO: 7031 - DNA, 600 bp, Chicken  19866894191658_1
atctctgctttgtcagagggtcatctggctttttcccttgcttctccctctcaataattacaggtcggtcagtgtagcatctgacacctcttacaacccactgtaacatcctaaagcagattttgaaatagcccaggtggtttttagtgccagcatgcactgtttttaatcagattaaaggggagaaatcatagagtcacagggtcatagaatagtttgacttggaagggacccttaaacatcatctggtccaactccctcacctcgagcagggacacctacaagctagatcatgttgaycagagctccatccagcctgaccttgaatgtctccaaggtcagggcatccatcccctctgggcaacccgtgccagtgccttaccacccttactgtaaaaaaccttctttgttatatccagtttaaatctctcctcttttagtttgaatatagttccacctcttggataatttttgtggccctatcatcccagttttccacggattggtaaaggagtcaggaaaactccagcttctgtaatcaatgttatctgcrtataggtaggcacttagatgcataatttacgtgagcaccgtggttgt

SEQ ID NO: 7032 - DNA, 600 bp, Chicken  19866894191658_2
actccctcacctcgagcagggacacctacaagctagatcatgttgaycagagctccatccagcctgaccttgaatgtctccaaggtcagggcatccatcccctctgggcaacccgtgccagtgccttaccacccttactgtaaaaaaccttctttgttatatccagtttaaatctctcctcttttagtttgaatatagttccacctcttggataatttttgtggccctatcatcccagttttccacggattggtaaaggagtcaggaaaactccagcttctgtaatcaatgttatctgcrtataggtaggcacttagatgcataatttacgtgagcaccgtggttgtttggaggaggaaagtctgaagaaattaagtgtcttggcatggagaygtacttttgttctgggcatagatggaaagtaatgaggggagggtgatccagtgcrggccatcagcagcccrctcttgagtttagctattctaaaggacagtggtgacacttggggtagagtctgcccgactccttctaatagaattatagaaccattaaggctgggaaagaccactaagatcatcttattcagtcatcaaccagctc

SEQ ID NO: 7033 - DNA, 600 bp, Chicken  19866894191658_3
tccatcccctctgggcaacccgtgccagtgccttaccacccttactgtaaaaaaccttctttgttatatccagtttaaatctctcctcttttagtttgaatatagttccacctcttggataatttttgtggccctatcatcccagttttccacggattggtaaaggagtcaggaaaactccagcttctgtaatcaatgttatctgcrtataggtaggcacttagatgcataatttacgtgagcaccgtggttgtttggaggaggaaagtctgaagaaattaagtgtcttggcatggagaygtacttttgttctgggcatagatggaaagtaatgaggggagggtgatccagtgcrggccatcagcagcccrctcttgagtttagctattctaaaggacagtggtgacacttggggtagagtctgcccgactccttctaatagaattatagaaccattaaggctgggaaagaccactaagatcatcttattcagtcatcaaccagctccaccattcttactaaaccatgtccttcagtgccacatctgcccttttcttgaactccttcagggatggtgactccaccacctccctgggcagc

SEQ ID NO: 7034 - DNA, 600 bp, Chicken  19866894191658_4
cttctttgttatatccagtttaaatctctcctcttttagtttgaatatagttccacctcttggataatttttgtggccctatcatcccagttttccacggattggtaaaggagtcaggaaaactccagcttctgtaatcaatgttatctgcrtataggtaggcacttagatgcataatttacgtgagcaccgtggttgtttggaggaggaaagtctgaagaaattaagtgtcttggcatggagaygtacttttgttctgggcatagatggaaagtaatgaggggagggtgatccagtgcrggccatcagcagcccrctcttgagtttagctattctaaaggacagtggtgacacttggggtagagtctgcccgactccttctaatagaattatagaaccattaaggctgggaaagaccactaagatcatcttattcagtcatcaaccagctccaccattcttactaaaccatgtccttcagtgccacatctgcccttttcttgaactccttcagggatggtgactccaccacctccctgggcagcctgtgccaacgcctcaccactctttctgagaataaatttttcctaatatccaaca

SEQ ID NO: 7035 - DNA, 600 bp, Chicken  19866894191658_5
agtttaaatctctcctcttttagtttgaatatagttccacctcttggataatttttgtggccctatcatcccagttttccacggattggtaaaggagtcaggaaaactccagcttctgtaatcaatgttatctgcrtataggtaggcacttagatgcataatttacgtgagcaccgtggttgtttggaggaggaaagtctgaagaaattaagtgtcttggcatggagaygtacttttgttctgggcatagatggaaagtaatgaggggagggtgatccagtgcrggccatcagcagcccrctcttgagtttagctattctaaaggacagtggtgacacttggggtagagtctgcccgactccttctaatagaattatagaaccattaaggctgggaaagaccactaagatcatcttattcagtcatcaaccagctccaccattcttactaaaccatgtccttcagtgccacatctgcccttttcttgaactccttcagggatggtgactccaccacctccctgggcagcctgtgccaacgcctcaccactctttctgagaataaatttttcctaatatccaacagattatggctgtctgt

SEQ ID NO: 7036 - DNA, 600 bp, Chicken  19866894191662_1
gtttctattcatgtaagctttacacctgttttctctgtattagatctttgtttagagtacttctagttcttttagttgaatgtacttcagcaggaatttcagggcaagtaaatatattatcaagtcatgcttatgactttttccctgtaaaaagaaaattctaaataccttgaagttgccatgtctcccagtataagtttccaagaataaaagctaacaaaattttgattccatatatcaaacaggaaagtttggaactttggacaaagtgacttacaggaaagaaatgtcttcttatgrcctcagcagttggaaaagcrctcttgtagatgggtagagaaaagtgagcacacctggtttgggagggctctgctgaggcacacagcagaagaatgtgatgagaactgaaaatgcaagattttattgtggtatgcattgtattaagtggaagaccatactttcaggagcrgattcctttggattcattcataatattgtattttcataattactgtaggatttgacaactgtacaaaattagttcatatgatcgtcctcaagaactactcagtgaaggtgcctttggcgtatgtcagagac

SEQ ID NO: 7037 - DNA, 600 bp, Chicken  19866894191662_2
tacacctgttttctctgtattagatctttgtttagagtacttctagttcttttagttgaatgtacttcagcaggaatttcagggcaagtaaatatattatcaagtcatgcttatgactttttccctgtaaaaagaaaattctaaataccttgaagttgccatgtctcccagtataagtttccaagaataaaagctaacaaaattttgattccatatatcaaacaggaaagtttggaactttggacaaagtgacttacaggaaagaaatgtcttcttatgrcctcagcagttggaaaagcrctcttgtagatgggtagagaaaagtgagcacacctggtttgggagggctctgctgaggcacacagcagaagaatgtgatgagaactgaaaatgcaagattttattgtggtatgcattgtattaagtggaagaccatactttcaggagcrgattcctttggattcattcataatattgtattttcataattactgtaggatttgacaactgtacaaaattagttcatatgatcgtcctcaagaactactcagtgaaggtgcctttggcgtatgtcagagactattgatacttctcgttgaa

SEQ ID NO: 7038 - DNA, 600 bp, Chicken  19866894191662_3
ttgaagttgccatgtctcccagtataagtttccaagaataaaagctaacaaaattttgattccatatatcaaacaggaaagtttggaactttggacaaagtgacttacaggaaagaaatgtcttcttatgrcctcagcagttggaaaagcrctcttgtagatgggtagagaaaagtgagcacacctggtttgggagggctctgctgaggcacacagcagaagaatgtgatgagaactgaaaatgcaagattttattgtggtatgcattgtattaagtggaagaccatactttcaggagcrgattcctttggattcattcataatattgtattttcataattactgtaggatttgacaactgtacaaaattagttcatatgatcgtcctcaagaactactcagtgaaggtgcctttggcgtatgtcagagactattgatacttctcgttgaagatggatatacaaatgtagatatagcatgcacagtttataaatatttgacaaatgctgtacttgacttttgaccctaactagtgcccattaaaataagcagtaaatccagcaattacaagcaaattgctcgtacaactaatagtgctca

SEQ ID NO: 7039 - DNA, 600 bp, Chicken  19866894191664_1
ccagcaggctatgggacagccccaaatccattttattttcagtcccccccagacactgtttctcctctatctccacgttcacactgtgcttggattcccatcacacagaaacacacaggaatttgcaaacaatttccaacactgatcaagattttatttcatttttttttaaacaataaaaccaaacagctctgagcaaaaccaaccatctcaaaaaaaaattcctggcatttactaacagcatcgcaaggtaaggcttcccgaagagttgcactgaaataaattaccttcacctaaacrtcaacgcaacgcctttcgttaaagtcacctttaaacgtccctaaaaaccaacagtaaaaaaagataccaacgattctaggtaatactgggctccttctaaagggcagtggtacaagaactcactcatcaggaatttaacaattaagccgcagctgtgtaaatcccactacgcaagctagcattgctggttccgggtgtgtgtggggtcagaaattccctagaaaaatcccagatggggctgcacggtgcccgagggccctcagccctggtgcttctgtctcgtggtggagtcgtggggtt

SEQ ID NO: 7040 - DNA, 600 bp, Chicken  19866894191669_1
cacccaagtctatgataaatatgtgcaagagactttcacttgttgtcaatagatttctctttgttacagctgtctgcagcttcttatccttaaaaaataatttcttttgttgccaaaatttttggctgtgagagaaggtttcaccttgttacagtaatttaaaaacacctgttgtcatatattttcatatggcagttacactggaactaatccccacataatcttctcagtacaagatactatgtgcttactctactgataggggttttgcatttcatgtctcactacatttagaactgygttttacttctgatacttttgcattatgcctaaatgcatctatccttgcaatatttgcaawggtttttcatcaattttagggaagaaaatcaaacacagcaacttctttatttattttaattacttatcatttgcccccaagtgactagcagaaattacagggcttccctttagcctttttgaaccccagtcttggtaagcaccacgattcttccttcttgctctcaatgttgagatgaagagcgtgtgttcaaaccatcatatttacacaatttcaaggacaaagaaaaacacttaaaa

SEQ ID NO: 7041 - DNA, 600 bp, Chicken  19866894191669_2
tgttacagctgtctgcagcttcttatccttaaaaaataatttcttttgttgccaaaatttttggctgtgagagaaggtttcaccttgttacagtaatttaaaaacacctgttgtcatatattttcatatggcagttacactggaactaatccccacataatcttctcagtacaagatactatgtgcttactctactgataggggttttgcatttcatgtctcactacatttagaactgygttttacttctgatacttttgcattatgcctaaatgcatctatccttgcaatatttgcaawggtttttcatcaattttagggaagaaaatcaaacacagcaacttctttatttattttaattacttatcatttgcccccaagtgactagcagaaattacagggcttccctttagcctttttgaaccccagtcttggtaagcaccacgattcttccttcttgctctcaatgttgagatgaagagcgtgtgttcaaaccatcatatttacacaatttcaaggacaaagaaaaacacttaaaatcatggttgattttaaaatgagtgctcttaccctgttgataataagacaccttcagtgtta

SEQ ID NO: 7042 - DNA, 600 bp, Chicken  19866894191669_3
agagcgtgtgttcaaaccatcatatttacacaatttcaaggacaaagaaaaacacttaaaatcatggttgattttaaaatgagtgctcttaccctgttgataataagacaccttcagtgttatgtaaaagcaagtaaaaataggattacagactttaatttagaaaacaatttccaatatgtcattttttcctgtaatagtaatgtaccattatcacattgaagttgtttattcaaaatccttttgccttccttcctgattgaaagtcatcagccatttgaactctcataggcataatgytatcatgcacaccgtgcatttgtcatgaaaatctttatttcatgttcatgatgtcttctgggtttaaaccactaattttgtctctttttgaatattttggttagatwtttggttatctaaattttttatttatttgtaggtcatgattwtttcctacctgttcatggtctgaattcagagagctagacagtttagagatatgtgcgtattttagagtgcagaaatacattcaaaccaaacctttgatttaaggaataatgaagtggaagacttagtaattgtcagttaggaaatgccatc

SEQ ID NO: 7043 - DNA, 600 bp, Chicken  19866894191669_4
acaccttcagtgttatgtaaaagcaagtaaaaataggattacagactttaatttagaaaacaatttccaatatgtcattttttcctgtaatagtaatgtaccattatcacattgaagttgtttattcaaaatccttttgccttccttcctgattgaaagtcatcagccatttgaactctcataggcataatgytatcatgcacaccgtgcatttgtcatgaaaatctttatttcatgttcatgatgtcttctgggtttaaaccactaattttgtctctttttgaatattttggttagatwtttggttatctaaattttttatttatttgtaggtcatgattwtttcctacctgttcatggtctgaattcagagagctagacagtttagagatatgtgcgtattttagagtgcagaaatacattcaaaccaaacctttgatttaaggaataatgaagtggaagacttagtaattgtcagttaggaaatgccatcattaaggatgaatgtacaaattaagttaaaattcattgtgtgcacgttatcaagtagcttttaattatataatgaccttttttttctttttccagtgccttctttac

SEQ ID NO: 7044 - DNA, 600 bp, Chicken  19866894191669_5
agactttaatttagaaaacaatttccaatatgtcattttttcctgtaatagtaatgtaccattatcacattgaagttgtttattcaaaatccttttgccttccttcctgattgaaagtcatcagccatttgaactctcataggcataatgytatcatgcacaccgtgcatttgtcatgaaaatctttatttcatgttcatgatgtcttctgggtttaaaccactaattttgtctctttttgaatattttggttagatwtttggttatctaaattttttatttatttgtaggtcatgattwtttcctacctgttcatggtctgaattcagagagctagacagtttagagatatgtgcgtattttagagtgcagaaatacattcaaaccaaacctttgatttaaggaataatgaagtggaagacttagtaattgtcagttaggaaatgccatcattaaggatgaatgtacaaattaagttaaaattcattgtgtgcacgttatcaagtagcttttaattatataatgaccttttttttctttttccagtgccttctttactatgcaaaagcaatgatattcactgaatccacatgttgtgtt

SEQ ID NO: 7045 - DNA, 407 bp, Chicken  19866894191669_6
tttgaatattttggttagatwtttggttatctaaattttttatttatttgtaggtcatgattwtttcctacctgttcatggtctgaattcagagagctagacagtttagagatatgtgcgtattttagagtgcagaaatacattcaaaccaaacctttgatttaaggaataatgaagtggaagacttagtaattgtcagttaggaaatgccatcattaaggatgaatgtacaaattaagttaaaattcattgtgtgcacgttatcaagtagcttttaattatataatgaccttttttttwtttttccagtgccttctttactatgcaaaagcaatgatattcactgaatccacatgttgtgttttctccctttaaactcactgatcagtatctgctttcatgctttg

SEQ ID NO: 7046 - DNA, 600 bp, Chicken  19866894191677_1
ctgtaggcctgatttggagtcttccattcttctctcctgagtatcaccatagtgaagataactatgaggataacatttttcttatcggtagaaatattgaaagaacagcagagaaaatgcaatggatggggctgggtaggtgtgaggcaggttcaggcagtaggctctttactgctcagagggatggactgattgaatagctggggtctctattaaactcctctgtcatatgaaaataggcaattcataatgattttgtttatacatgtagtgtttattcatacatgcttcttaagcaastggggaaatctttgagcctcctttctctccccagaataagagagtggaaatcaagaagttcattttctgctccagaaatgaaatgcaacaggtagcatactgattttatgaagagatttcatatttacagttattaaacagaattaaaaataaacaaaagaagaaagccaatatctggacaaagttgtattaatttaacagcaaaactcagtgtagaaatcctctggtttcagatttcattttattcaaacaaactttatgtaaaaattcatgcttccattcacattgaataattacaat

SEQ ID NO: 7047 - DNA, 600 bp, Chicken  19866894191677_2
atttaacagcaaaactcagtgtagaaatcctctggtttcagatttcattttattcaaacaaactttatgtaaaaattcatgcttccattcacattgaataattacaattccctagtggggttggagtaacacaacaaatacgcttcttaatacttaataaagctgacacacacacacaaaattatgttgagttatattgaatctacattttggaaccacttgtggaacctaagtgcaactgttcagtcttaatcctgtggggttttttgtttgtttgtttgattgtttgtttgtttttcyttattctgtttctttctgatacactccatataagttatgcaacattagtacttactcatgactcctgcaactagtgactggaaatcrgacacaatttctgtaagcttaaagaatgatgcatggaaaggagtgagtatagaccaatattgtaatggacaaaacaaaaacaaaaactctggctagagtacctaaccaggaattcagtttcaaattccatataggatatgaaaagaagaaaaatatataatatttccttttgctatcagtttcacaatttttgtattataagaagatttgatt

SEQ ID NO: 7048 - DNA, 600 bp, Chicken  19866894191677_3
ttcacattgaataattacaattccctagtggggttggagtaacacaacaaatacgcttcttaatacttaataaagctgacacacacacacaaaattatgttgagttatattgaatctacattttggaaccacttgtggaacctaagtgcaactgttcagtcttaatcctgtggggttttttgtttgtttgtttgattgtttgtttgtttttcyttattctgtttctttctgatacactccatataagttatgcaacattagtacttactcatgactcctgcaactagtgactggaaatcrgacacaatttctgtaagcttaaagaatgatgcatggaaaggagtgagtatagaccaatattgtaatggacaaaacaaaaacaaaaactctggctagagtacctaaccaggaattcagtttcaaattccatataggatatgaaaagaagaaaaatatataatatttccttttgctatcagtttcacaatttttgtattataagaagatttgattaatttgcataacccttctgaagttcagactaaattatttgcatagtttatgcacaaacagggtcataaggtttaatggcattctttt

SEQ ID NO: 7049 - DNA, 599 bp, Chicken  19866894191684_1
  misc_feature (1)..(141): n is any nucleotide
nnnnnnnnnnnnnnnnnnnnnnnnnnnnnnnnnnnnnnnnnnnnnnnnnnnnnnnnnnnnnnnnnnnnnnnnnnnnnnnnnnnnnnnnnnnnnnnnnnnnnnnnnnnnnnnnnnnnnnnnnnnnnnnnnnnnnnnnnnnnnaatggctggagtgatgtggcctaggaaaggactgggagtaaggctgctcagattttgaattgtgtgaggcagggaaatatcttaatagcctgaaactactgcagagtttgctggagaggagaacagtgaaccgtagcaataaggggaagaagagggaarggaaaagatttactcagaaataagctcagcaaagcaaaacttctaatgyatatgcttgcagaactgcttactggagtgaagacactagaaagggaattcattttcttttagatacaactttccatcttactgtcatatagtcagttgttaccaattactttattgtcagatgccagtttatatcctaaatgtctgggakgagaggactgctctgatcaggaggtattctagtggtcagcacagaaccagcctgtagttggatttcatttgtaacttaacggagattcacatggggcttc

SEQ ID NO: 7050 - DNA, 599 bp, Chicken  19866894191684_2
  misc_feature (1)..(92): n is any nucleotide
nnnnnnnnnnnnnnnnnnnnnnnnnnnnnnnnnnnnnnnnnnnnnnnnnnnnnnnnnnnnnnnnnnnnnnnnnnnnnnnnnnnnnnnnnnnnaatggctggagtgatgtggcctaggaaaggactgggagtaaggctgctcagattttgaattgtgtgaggcagggaaatatcttaatagcctgaaactactgcagagtttgctggagaggagaacagtgaaccgtagcaataaggggaagaagagggaarggaaaagatttactcagaaataagctcagcaaagcaaaacttctaatgyatatgcttgcagaactgcttactggagtgaagacactagaaagggaattcattttcttttagatacaactttccatcttactgtcatatagtcagttgttaccaattactttattgtcagatgccagtttatatcctaaatgtctgggakgagaggactgctctgatcaggaggtattctagtggtcagcacagaaccagcctgtagttggatttcatttgtaacttaacggagattcacatggggcttcatgctacaaactgcactaacattcaggcttggaatgttatctgttttac

SEQ ID NO: 7051 - DNA, 600 bp, Chicken  19866894191684_3
attgtgtgaggcagggaaatatcttaatagcctgaaactactgcagagtttgctggagaggagaacagtgaaccgtagcaataaggggaagaagagggaarggaaaagatttactcagaaataagctcagcaaagcaaaacttctaatgyatatgcttgcagaactgcttactggagtgaagacactagaaagggaattcattttcttttagatacaactttccatcttactgtcatatagtcagttgttaccaattactttattgtcagatgccagtttatatcctaaatgtctgggakgagaggactgctctgatcaggaggtattctagtggtcagcacagaaccagcctgtagttggatttcatttgtaacttaacggagattcacatggggcttcatgctacaaactgcactaacattcaggcttggaatgttatctgttttacaaagctcactccacaaaagggtggattgagttcagcttttcactgaatctcagtagaaatatcatcataaagatcttctctgccagctgcagatgtgttctattttttccctacatctgagtttctgaatcactcttaataataggcaaag

SEQ ID NO: 7052 - DNA, 600 bp, Chicken  19866894191693_1
gtttgtttgtttgtctgtttgttttgtatggatctgttttgttcattcctactggagctaccacagggaccttgtgagttctgtaatctatgtgtctcatctccattctcttttggtctttattatttctatttctatcttatttttattattattattattatttttaatgtaaattttattttttatgtatagaatagttccctttctggtgtttataaactgaaaaaaaaggagtatttcactttactagctagagttcatacagaatgccatgcccactcagtttaggaagcccaraatgtttcattttgtcaacaacaggtaacaaacatttcattatttgctacttcaaaaatgtttttaaaaatattttctgtcaaaaatcagtttatatttttcattttgagttctactccaggggaaaaacagagtatggaaactcatctcgataggatatgtattaaactcattgtttcataatcatatgtatctggatatataggatgtcagtggttgttttcttgaaaaataaactttttctaagctttccacaaatatttcatgatactggagagaagaaagaacaggtaacacaca

SEQ ID NO: 7053 - DNA, 600 bp, Chicken  19866894191697_1
aacacaacagaagctcacacatctaagagtaatgctttaaagaactaaaattataaaagccaacatttgggtctgaagttaagaacatctttccttggtattagtgaatccagacctaattattatacactggttgcaggtacacatcacattaactttgagtatattttcttagctttgcttcctcacttgcagggttatgaagggacctactcaatcccataagcctggtcccaagccaggactggtgtgctgagatcctgtgcacactcctgaacttgatgtttcctttagttttgytcaaacaactcctgtttcacatgctaccatccatgaagcagaatgctatttctgtgtgttgttacacatattggatcacaaaccaaatttccaaaaggattatgtgcccaatattgaaacttctaactgaaagaagtccttgcccatgaaagcaggcacagccatcaccatatccttcagcagaaatgcacaggttgataaccagccctggtgttttaagctgagcttgcctcagggagcaccatgatgggtgcagtgctggctcctccctcaccaaggcgcacctgttactcagcatct

SEQ ID NO: 7054 - DNA, 600 bp, Chicken  19866894191697_2
gttacacatattggatcacaaaccaaatttccaaaaggattatgtgcccaatattgaaacttctaactgaaagaagtccttgcccatgaaagcaggcacagccatcaccatatccttcagcagaaatgcacaggttgataaccagccctggtgttttaagctgagcttgcctcagggagcaccatgatgggtgcagtgctggctcctccctcaccaaggcgcacctgttactcagcatcttctctctagtcagcaccatgcctcctggcatagctgcctcccagtatggctctggcagarggacgtggcatgtgatatagcagggagagagaaaggttgtgaaaaatgatttaggcagaaatctgctgcgctcatctttaccatggcacacaaaaamagatttaacctctgtagaggcagacacctggggatcagttgctgtattttgaccctgcgaaaacaacaaatattttaacaaatccttcatgtttacacttgtttaacaagatgctgtatgattaaatacttccagagtataagtgatattccactcaaattttattgtctagagagaaactagtgattgaataatgttaaaaa

SEQ ID NO: 7055 - DNA, 600 bp, Chicken  19866894191697_3
acagccatcaccatatccttcagcagaaatgcacaggttgataaccagccctggtgttttaagctgagcttgcctcagggagcaccatgatgggtgcagtgctggctcctccctcaccaaggcgcacctgttactcagcatcttctctctagtcagcaccatgcctcctggcatagctgcctcccagtatggctctggcagarggacgtggcatgtgatatagcagggagagagaaaggttgtgaaaaatgatttaggcagaaatctgctgcgctcatctttaccatggcacacaaaaamagatttaacctctgtagaggcagacacctggggatcagttgctgtattttgaccctgcgaaaacaacaaatattttaacaaatccttcatgtttacacttgtttaacaagatgctgtatgattaaatacttccagagtataagtgatattccactcaaattttattgtctagagagaaactagtgattgaataatgttaaaaatgttccttcaacacgcggctactggtgacttaaattgtagcagatttttaaaagcctacttgtgttttaaaggcaatttttacattctaaaatattt

SEQ ID NO: 7056 - DNA, 600 bp, Chicken  19866894191700_1
atatacgtgaattactctagaattgttgatttttattaacgcatactgtttatattatataaggtaagaaattataggttttaattttttgcagatgaatattatatactaattctacacagaactctaccgaattcactattctaaatgaggacagcatgtcactcccaactccccacttattttttattgtttcacatataaatatgaatgtgtgttaaaaaaaatattccattttatttttatctgtgaaagtctcagccagtttggactatggatgccatgggtgtcagatctggyggttccccaagacagaaactcttaaaggactccttagcagcaaaagaacttcagaccatggagaagcacctagctggtatgtatggtagcaagggttgataaaacacatagcagtcctcacacatctgtgccagtattttagacagaggaaaagagataatctatttcagatgctgatgaaaacaaaaaaaatatttgtagatacaaaaaaatttaattacagtaaatacagtatttgaactgttaaatatcttgcagtctggcatcttaataacacacttttttktgtgtgtgtggtac

SEQ ID NO: 7057 - DNA, 600 bp, Chicken  19866894191700_2
gtgtcagatctggyggttccccaagacagaaactcttaaaggactccttagcagcaaaagaacttcagaccatggagaagcacctagctggtatgtatggtagcaagggttgataaaacacatagcagtcctcacacatctgtgccagtattttagacagaggaaaagagataatctatttcagatgctgatgaaaacaaaaaaaatatttgtagatacaaaaaaatttaattacagtaaatacagtatttgaactgttaaatatcttgcagtctggcatcttaataacacacttttttktgtgtgtgtggtacgattcccgtagacttaagcagtaaggagttgctgatgcttcacctacggttagttaaatgttagttaaaagtcttcagtggatatttagggtgagaaagcactgctttgcagcaaaagcccaccttggtcattcagctttggactgaatgacatgtattgacttgtgtatggtggaacatctgaaacatctctggcaaggtagccatttctaaaagatgaagcaaagaaatcatatttttttttcagtgaaagtgtgtccttgggctctaaaatatcaatgaagac

SEQ ID NO: 7058 - DNA, 599 bp, Chicken  19866894191707_1
  misc_feature (1)..(7): n is any nucleotide
nnnnnnnttaggcctgtattaaaaaaaatcccatatcaaaacagaacaacccaccccactcactaagtaggacattctgaaatgacatttgggacatgagcaggagagttatatccagctagtttatcagttgagatacctgcagtgtgtattttctctgtaacagaacaatactctctgagggaaaaaaaaaacccacacaccacaacttgattcaacaacactgaaataaatgcaaatgagtatacatgtctgaacagtaaagaaagcagacacaggatgccttacaaacagctacarctgatgtaccgtatcacaacagcccaggagagccactaacattttgctgcagagaagctctcttccctgctttcccttacattattcttaacaaacagtaaagaaaattaagaagacatcagcacagcagcagtatttttaaaatatagtttactttacccttctgttcagtttcaaatcctacaacaactcctcgtgctccattcaccagcccttgagacacgtccagattcttagctagcatcacctacagagatcaaggagaggggaaaacaaatctcttagtgtgctggctttct

SEQ ID NO: 7059 - DNA, 600 bp, Chicken  19866894191708_1
ggacagtatctgcttctctaacaccaatgcatttgtctctgccagaataattagaaaagaaaagaaaataattagaaaagaatcttcatccaggtcttcccaggcttaccatcaatcactgttctggacttccagtcatgaaagtttactcatgccagccttattgattcagtggggatggaaattggtacacagtggcaattttcctcatgctccactgtacatttctccctgttcatatggatcatggtcaaatgcagcttctgttaaatgagggcaaagtatggtttaagcccttgmtgccactgccaatgtttttcacaagagctgactttgcgtgttcaccctgaaatgtctgagacaactaagaacattggaagaaagatattgattaaagaaaataatgttgcatttggcagttttcagccacaccttacccaatagccactcttaacaggctgccgccacagccacatacttcccacttataaatgaatctttaattaaagtttgtttcagacattcacttattttttgcatgttctaacagtggtttcccccccaggtttggcactcatgtctctggagggtgtcctgtct

SEQ ID NO: 7060 - DNA, 600 bp, Chicken  19866894191726_1
taagaaagtgcaccagtgaacgttataaatagctgacataacaataacggtagctacacaatcaatcacgaccccatgagtgtctcccacggggtggaaaacaccgggaaacgggatgactctaagacaatgtgtcactaagcatgaggtttggaaatgtctgttaagaatggaattcagctttgtgcaagctgaacctacacaggcagagcacaataaaaacaaggacaggaattgctgaggtgccattttgatataagccagtgtgatgcgacagctgctcctacccttcaagatgcrcaaatcctgtgtttcagagtggtcttgcttcgtaggtgtctgagacwgcaaatatttcacctctgtatgggatgggtgctggaaaagataaatgctttctctctcctgtgtcagagctgyrcacacattccaagagtctctgycattttctccaggtatttacttctttccctctgaacaagctcagccatctgtgctggtttcaaagctacctgaatgaagacaaaatttgaaaagtgctgtctttaatagtaaggtacrtgaactatctattgctctcagagcagaaacccaaataca

SEQ ID NO: 7061 - DNA, 600 bp, Chicken  19866894191726_2
cggtagctacacaatcaatcacgaccccatgagtgtctcccacggggtggaaaacaccgggaaacgggatgactctaagacaatgtgtcactaagcatgaggtttggaaatgtctgttaagaatggaattcagctttgtgcaagctgaacctacacaggcagagcacaataaaaacaaggacaggaattgctgaggtgccattttgatataagccagtgtgatgcgacagctgctcctacccttcaagatgcrcaaatcctgtgtttcagagtggtcttgcttcgtaggtgtctgagacwgcaaatatttcacctctgtatgggatgggtgctggaaaagataaatgctttctctctcctgtgtcagagctgyrcacacattccaagagtctctgycattttctccaggtatttacttctttccctctgaacaagctcagccatctgtgctggtttcaaagctacctgaatgaagacaaaatttgaaaagtgctgtctttaatagtaaggtacrtgaactatctattgctctcagagcagaaacccaaatacatgagttaagacaataatatctgaaattrattactgtaaaatttcatt

SEQ ID NO: 7062 - DNA, 600 bp, Chicken  19866894191726_3
tctaagacaatgtgtcactaagcatgaggtttggaaatgtctgttaagaatggaattcagctttgtgcaagctgaacctacacaggcagagcacaataaaaacaaggacaggaattgctgaggtgccattttgatataagccagtgtgatgcgacagctgctcctacccttcaagatgcrcaaatcctgtgtttcagagtggtcttgcttcgtaggtgtctgagacwgcaaatatttcacctctgtatgggatgggtgctggaaaagataaatgctttctctctcctgtgtcagagctgyrcacacattccaagagtctctgycattttctccaggtatttacttctttccctctgaacaagctcagccatctgtgctggtttcaaagctacctgaatgaagacaaaatttgaaaagtgctgtctttaatagtaaggtacrtgaactatctattgctctcagagcagaaacccaaatacatgagttaagacaataatatctgaaattrattactgtaaaatttcattaacctgtcttcagaatagtgaggttttagcaagacaaaaggactctacctatctgagtctgcttctaattctg

SEQ ID NO: 7063 - DNA, 600 bp, Chicken  19866894191726_4
ctaagacaatgtgtcactaagcatgaggtttggaaatgtctgttaagaatggaattcagctttgtgcaagctgaacctacacaggcagagcacaataaaaacaaggacaggaattgctgaggtgccattttgatataagccagtgtgatgcgacagctgctcctacccttcaagatgcrcaaatcctgtgtttcagagtggtcttgcttcgtaggtgtctgagacwgcaaatatttcacctctgtatgggatgggtgctggaaaagataaatgctttctctctcctgtgtcagagctgyrcacacattccaagagtctctgycattttctccaggtatttacttctttccctctgaacaagctcagccatctgtgctggtttcaaagctacctgaatgaagacaaaatttgaaaagtgctgtctttaatagtaaggtacrtgaactatctattgctctcagagcagaaacccaaatacatgagttaagacaataatatctgaaattrattactgtaaaatttcattaacctgtcttcagaatagtgaggttttagcaagacaaaaggactctacctatctgagtctgcttctaattctga

SEQ ID NO: 7064 - DNA, 600 bp, Chicken  19866894191726_5
atgaggtttggaaatgtctgttaagaatggaattcagctttgtgcaagctgaacctacacaggcagagcacaataaaaacaaggacaggaattgctgaggtgccattttgatataagccagtgtgatgcgacagctgctcctacccttcaagatgcrcaaatcctgtgtttcagagtggtcttgcttcgtaggtgtctgagacwgcaaatatttcacctctgtatgggatgggtgctggaaaagataaatgctttctctctcctgtgtcagagctgyrcacacattccaagagtctctgycattttctccaggtatttacttctttccctctgaacaagctcagccatctgtgctggtttcaaagctacctgaatgaagacaaaatttgaaaagtgctgtctttaatagtaaggtacrtgaactatctattgctctcagagcagaaacccaaatacatgagttaagacaataatatctgaaattrattactgtaaaatttcattaacctgtcttcagaatagtgaggttttagcaagacaaaaggactctacctatctgagtctgcttctaattctgaaggtatgtcataggacactgac

SEQ ID NO: 7065 - DNA, 600 bp, Chicken  19866894191726_6
cagtgtgatgcgacagctgctcctacccttcaagatgcrcaaatcctgtgtttcagagtggtcttgcttcgtaggtgtctgagacwgcaaatatttcacctctgtatgggatgggtgctggaaaagataaatgctttctctctcctgtgtcagagctgyrcacacattccaagagtctctgycattttctccaggtatttacttctttccctctgaacaagctcagccatctgtgctggtttcaaagctacctgaatgaagacaaaatttgaaaagtgctgtctttaatagtaaggtacrtgaactatctattgctctcagagcagaaacccaaatacatgagttaagacaataatatctgaaattrattactgtaaaatttcattaacctgtcttcagaatagtgaggttttagcaagacaaaaggactctacctatctgagtctgcttctaattctgaaggtatgtcataggacactgacagctgcgaagtaaaagaaaaacagaacaaaacgaggggcttgcacggtatcagtgaacccgatagcaacttggttcatctaatagtaacagcagaagcatagtgacacagatcttcag

SEQ ID NO: 7066 - DNA, 600 bp, Chicken  19866894191726_7
ttcgtaggtgtctgagacwgcaaatatttcacctctgtatgggatgggtgctggaaaagataaatgctttctctctcctgtgtcagagctgyrcacacattccaagagtctctgycattttctccaggtatttacttctttccctctgaacaagctcagccatctgtgctggtttcaaagctacctgaatgaagacaaaatttgaaaagtgctgtctttaatagtaaggtacrtgaactatctattgctctcagagcagaaacccaaatacatgagttaagacaataatatctgaaattrattactgtaaaatttcattaacctgtcttcagaatagtgaggttttagcaagacaaaaggactctacctatctgagtctgcttctaattctgaaggtatgtcataggacactgacagctgcgaagtaaaagaaaaacagaacaaaacgaggggcttgcacggtatcagtgaacccgatagcaacttggttcatctaatagtaacagcagaagcatagtgacacagatcttcagaaggttaacaatgtagctcatgcctggctagaaaactctattttgtattcaaagtatgtttccattg

SEQ ID NO: 7067 - DNA, 599 bp, Chicken  19866894191735_1
  misc_feature (1)..(130): n is any nucleotide
nnnnnnnnnnnnnnnnnnnnnnnnnnnnnnnnnnnnnnnnnnnnnnnnnnnnnnnnnnnnnnnnnnnnnnnnnnnnnnnnnnnnnnnnnnnnnnnnnnnnnnnnnnnnnnnnnnnnnnnnnnnnnnnnnnatggaagagtgcatcagcagctcacctccctgcgcgctcatgtagcagccctttgtgggtctgggcatggatctatcccactaaagctatctagttccagtcaggggaacaacgacaccaagaagccattccctgtgatggagccttacacctggcaagcagcatccacrcctgcayaggctgcccgggtgcttgttgttcccctttccttttcagagggtgttgaaagtcctatatctcagcccagaagcgatgctgagggcatcaggcgctgccttgcagtgtgaaagctggtgttagagggaggctctcctgcaggaatggccrggaatgagtccatagccccagaggaaagcatggatatctttctagggagcagagaggttttaattagcgctcccttctgcacaaagcctggctctcctcctctggctcctcagatgaacgcagctataattaagaggcagcg

SEQ ID NO: 7068 - DNA, 599 bp, Chicken  19866894191735_2
  misc_feature (1)..(123): n is any nucleotide
nnnnnnnnnnnnnnnnnnnnnnnnnnnnnnnnnnnnnnnnnnnnnnnnnnnnnnnnnnnnnnnnnnnnnnnnnnnnnnnnnnnnnnnnnnnnnnnnnnnnnnnnnnnnnnnnnnnnnnnnnnnatggaagagtgcatcagcagctcacctccctgcgcgctcatgtagcagccctttgtgggtctgggcatggatctatcccactaaagctatctagttccagtcaggggaacaacgacaccaagaagccattccctgtgatggagccttacacctggcaagcagcatccacrcctgcayaggctgcccgggtgcttgttgttcccctttccttttcagagggtgttgaaagtcctatatctcagcccagaagcgatgctgagggcatcaggcgctgccttgcagtgtgaaagctggtgttagagggaggctctcctgcaggaatggccrggaatgagtccatagccccagaggaaagcatggatatctttctagggagcagagaggttttaattagcgctcccttctgcacaaagcctggctctcctcctctggctcctcagatgaacgcagctataattaagaggcagcggtgtcga

SEQ ID NO: 7069 - DNA, 600 bp, Chicken  19866894191735_3
ccctgcgcgctcatgtagcagccctttgtgggtctgggcatggatctatcccactaaagctatctagttccagtcaggggaacaacgacaccaagaagccattccctgtgatggagccttacacctggcaagcagcatccacrcctgcayaggctgcccgggtgcttgttgttcccctttccttttcagagggtgttgaaagtcctatatctcagcccagaagcgatgctgagggcatcaggcgctgccttgcagtgtgaaagctggtgttagagggaggctctcctgcaggaatggccrggaatgagtccatagccccagaggaaagcatggatatctttctagggagcagagaggttttaattagcgctcccttctgcacaaagcctggctctcctcctctggctcctcagatgaacgcagctataattaagaggcagcggtgtcgagaaggagagcaggctccagcccgtgatttattaagggctgtcgtgggtgcaattaagctttctctcttcccctctcttcgctgtttccacaaagtggatttggtgatgaaaggagcatctcaggctyggctaaatgggcgcctccgtgttt

SEQ ID NO: 7070 - DNA, 546 bp, Chicken  19866894191735_4
gaggctctcctgcaggaatggccrggaatgagtccatagccccagaggaaagcatggatatctttctagggagcagagaggttttaattagcgctcccttctgcacaaagcctggctctcctcctctggctcctcagatgaacgcagctataattaagaggcagcggtgtcgagaaggagagcaggctccagcccgtgatttattaagggctgtcgtgggtgcaattaagctttctctcttcccctctcttcgctgtttccacaaagtggatttggtgatgaaaggagcatctcaggctyggctaaatgggcgcctccgtgtttatctccattgcagacgcagcaatggcacagcggctgctttatttttccccatagggttaccaacgaaagcctccaacatctggaagtctcagttctggcctaagccctatgcctgggggaggctggtgttggctcagccctgtgcgcctcgatcctaatcactgccctgccagctgcagccctccaaattccctggcgatggccggcagtgctgctggctgc

SEQ ID NO: 7071 - DNA, 600 bp, Chicken  19866894191737_1
gccaagacctcgcgagcaaacagtcaaaggttaggggagccatccacagcaggagagatctgggttgtcgctgctctcagcagtccctggtgtgctccacagggtgtgatgctgaccccaagatgatctgtctttggccagacaagtgcagatagctgccaaggtgctgcatgcaaagctgttctccgctccagcgctgcacgggtggctgacactcaactcctcttgtctcagcatctccttccccaacacctcgagctaaattcaaccttggtcagctcaaaactcccagcttagcamgaggaccaaggtggtatttgctaaatgactttggtttctctgtctagtcagaggctccccgtccctctcaaaatatattcctgtgctttccgtgctggactctgctttaaacctcaggctgcagcagacacctcccctgcttcctcttttggctgtaggaaaatgcacgcagtctttggctcgtggctgtgccatcctctgacaccaagacatcctctgcacactcagattgcccacctggcataaaagggctttctttcttgctcattctgcctctcatcttgcaggatcacggggtaa

SEQ ID NO: 7072 - DNA, 600 bp, Chicken  19866894191744_1
gagcacaaacaacatccctgcacctccattacatttcatattcgaaatgtattgtccaaagttacctcaagaaagcaaaacttgcctcatttaccatgtgctgctcagctttgactcagattctattcttgatcattacattatgcaaactacttcataaagctccataatccccttaatgcagcccacactgtattaaaaattaaaaatgactattgtttccattatccttttaattggatgatggcatgactaatatacaatatgaaagtcaactatttaatcacacagaatcatccyggtctacattttattcatgccaggtttttctacatcccaatgttaaattgtcagttaaaacatgtagctttccacttcaaacattacctctggttcagtaagatgccacttaaaacccaccacaggaatgtggtgtacaaayaactaattgcacacccaacatttggcattctagatgcttagcatcagatggtggcaatttgagagcaagagcactcaacaggccttcaccctgtaacaagggctcattgcacaggtatcagctgctgcattcctgggaatccagggaattctcttctg

SEQ ID NO: 7073 - DNA, 600 bp, Chicken  19866894191744_2
atgcaaactacttcataaagctccataatccccttaatgcagcccacactgtattaaaaattaaaaatgactattgtttccattatccttttaattggatgatggcatgactaatatacaatatgaaagtcaactatttaatcacacagaatcatccyggtctacattttattcatgccaggtttttctacatcccaatgttaaattgtcagttaaaacatgtagctttccacttcaaacattacctctggttcagtaagatgccacttaaaacccaccacaggaatgtggtgtacaaayaactaattgcacacccaacatttggcattctagatgcttagcatcagatggtggcaatttgagagcaagagcactcaacaggccttcaccctgtaacaagggctcattgcacaggtatcagctgctgcattcctgggaatccagggaattctcttctgcttgcctgcatgaggatgaaggaagacaatgatacgagattccattcagtagcacacaagagcatcttactgcaattcaatgagctgattcctatgctaaattgagtaccatatacatctgcagagaaaaagcatcagaaat

SEQ ID NO: 7074 - DNA, 600 bp, Chicken  19866894191746_1
agctgcctgctcttttggcagttaggtttgcctgtttggtttaggcaaattcgcagccaggcaagcagatgtgtgctcatcaggtatcaaattatccattaagcaagtcctacgtcaaggatgtgcaggactttgatgagtttcatgtaattatttgaaagtttcaggtaaaacaacaaaaattccatattcctacaaagatgaccctatgtctccgaatgatatttaagtggacaccaaacacatttcccttgtctggctcagtggcagccagtgctcttcaggatgtgacctccaagkcccctggtgccaaaagcagccagcttaatgccatcaccacaactgggcttggccacaccaggaggaggattatagttaggcccaggctgaacaaagaaatatttcactgtggctcatgtgtatggcatgcgctattctaatgcacttaggagaaacgtcacagtgttatgcagacatgtcaatgtttcctgtgctgtaattatcatcataatgtttcattattgccactatattgtgggttatttttatatcactcactctatattaaatgtggacgtggctcccaagaagaagaagagt

SEQ ID NO: 7075 - DNA, 600 bp, Chicken  19866894191746_2
ggcttggccacaccaggaggaggattatagttaggcccaggctgaacaaagaaatatttcactgtggctcatgtgtatggcatgcgctattctaatgcacttaggagaaacgtcacagtgttatgcagacatgtcaatgtttcctgtgctgtaattatcatcataatgtttcattattgccactatattgtgggttatttttatatcactcactctatattaaatgtggacgtggctcccaagaagaagaagagtgatatcactttgccaaaagctgcagactaagttcagaaagtcacygtgctttgtgttcttgatgaggccaagtgtcatctcctcatgctccctctctctgtcacattagtccctgaagtcttcagtgggaatatttatggtggaaactactaccaaatgtgagtaatagcatcagtttgactttgcattaaatcttaatgcactgagaaggggcaagactcctcaggctcatttcaaggcctatttttagataagatattcagacttctcttatcaaataattggacatcacaagtaaaggcaagctaactttttggaataaaataggaattcatttaaagcttt

SEQ ID NO: 7076 - DNA, 479 bp, Chicken  19866894191754_1
tgcatactggaaacaatatttaagtgtagaagaaatgcgtggaattatcaacaagtgatagctggtcttttttcacttacaggaagcttttcaggttggaatatactgggcaaacacaaataccgtgcacaaatcagtggcaatcaaactggtccatgatgtgacctccccaaaatggaaggatgctgagaatggggaagtggtaacattggatgaagaaggttttgttgaagctgaaataaaacttggtgcttttccaggtcatcagaaggttaggataaaattatcttgatttataastttatcatttagttaaaaaaaaatcatcaaatgtatgcagcattaaagcttgtccccaattatgttaatacctgtaatgagaatgtaaataatacaagaagtataatttgaagcattagtaagaaatgatctgcccagctcatcaagattatacaagacttcctggaattaattatcat

SEQ ID NO: 7077 - DNA, 600 bp, Chicken  19866894191760_1
gcgctgtgccagcattttttgtttcttatcatccagctaatctgcatgcagaaggcttgaatgttcacagtgggcaaaaaagtgtgtctgcatgagggcatataccaatgagagcagatcagaatcagtgtgttgcagggaaagcagggggtgaggtggttggtaggaactttggtctactttaggactttaataaatcccttcgtactatttcaagtgctgtcttctaaggaaaacacctttattctgcttggtggtgggacaaaatgctaccaggttctgcagtgaggacagcctggrtattgccatcagcattgtggcagtgttcctgaaaaccaggtgttacctgctgtggatttccatgcctgtagtggctggggtttataattcagtgtttatttccccagcccagctggcattgaggtggtaggagaacattgtgtgacgtcagtcaggtcagcagtgcaccgcatcaccaccattgactggagcatggtgttttctatcaagtgacaactgctacccactgcgtacttctactcaaaggttctcttgtagttgtaatggaaaaatcagggaaaaggtgcagtgctgctcacg

SEQ ID NO: 7078 - DNA, 600 bp, Chicken  19866894191767_1
caaacactttccccataagagtggatgtagtctaccacatgagctggacatttaatttagatcaatttagtgataccttatcaccagctgtgcaagacctgttaatatttctattatgatttaagttgccacatagcgagtgccctataactgtttaaccacaattttttagcaattcccctgagtttcacttgattaatttctggaaaatttcttgagtacatatctctctcctgtacgtagaccaataattccatactagctggcaaaaatgtagtccagaagtattcccatgtcctrtccattaagcaaaactgtccatcacaactatagtacacaatttaaaggaaagtgtatgaaagatgcagaaagtagtgcagaacaaaaaataaatgagtgaaactgctkccaaagaaatagagcaaggagcgtaataggagtagtcctataccatatcagcttgaatatattgcatgactatccagatacttataacacatcatttagcagtccaatttttatgcattgagttttttcaaacttcttgcatatataaatggcattcatattgaaaaaggaagatcactattcccttctgac

SEQ ID NO: 7079 - DNA, 600 bp, Chicken  19866894191767_2
ttctattatgatttaagttgccacatagcgagtgccctataactgtttaaccacaattttttagcaattcccctgagtttcacttgattaatttctggaaaatttcttgagtacatatctctctcctgtacgtagaccaataattccatactagctggcaaaaatgtagtccagaagtattcccatgtcctrtccattaagcaaaactgtccatcacaactatagtacacaatttaaaggaaagtgtatgaaagatgcagaaagtagtgcagaacaaaaaataaatgagtgaaactgctkccaaagaaatagagcaaggagcgtaataggagtagtcctataccatatcagcttgaatatattgcatgactatccagatacttataacacatcatttagcagtccaatttttatgcattgagttttttcaaacttcttgcatatataaatggcattcatattgaaaaaggaagatcactattcccttctgacatgatttgtcaaatggtagtagacagaatatttccaatttatgatccaaatttttatcaaatttaagtgtaaagttcaaatcagcttggaaataaaaaacataaaatg

SEQ ID NO: 7080 - DNA, 600 bp, Chicken  19866894191772_1
caggggactgtgcaggagggcacacggagatgccccaggaggacggtgcaggaagtcattctccttcagccccttacagagttcacttcactccgtttctgcttataatatcttgtcccacacacatggttcttaaaggggttgagcttcagagctggtcccttctccagcactgcctgggggatgtcgctttgggaggctggcacctacctctggggtggccagggatggagatagggacctcgtgctgccgtcctgcttcctccttgctgggagcacttgtccaaaccatttgctaayggcagaggtccattgcacaccagcacctcagaatatcggagcccaatgctgtgcaaggcccgctgtgttggaggagggctgactgctgtgccagggcaccggccctgcatgacaggcacagagcctagagcaactcttctttgcacttttgtaaggtgggattttgatacaataaaagttttctgagtaaatgttgtgctgttaacagggtgtgaacgtgaccccggtcattggcacgactgagctggtcgaggggaggcgtgtgctgrtttgtgtgcatgaccaattctcctgagaata

SEQ ID NO: 7081 - DNA, 417 bp, Chicken  19866894191772_2
ctgggagcacttgtccaaaccatttgctaayggcagaggtccattgcacaccagcacctcagaatatcggagcccaatgctgtgcaaggcccgctgtgttggaggagggctgactgctgtgccagggcaccggccctgcatgacaggcacagagcctagagcaactcttctttgcacttttgtaaggtgggattttgatacaataaaagttttctgagtaaatgttgtgctgttaacagggtgtgaacgtgaccccggtcattggcacgactgagctggtcgaggggaggcgtgtgctgrtttgtgtgcatgaccaattctcctgagaataaccttaaacacggcctcgaactcctggcctttgggttcgaggctgcagaagtaggcaggggatttgtgcacctcagctgctgctgg

SEQ ID NO: 7082 - DNA, 599 bp, Chicken  19866894191783_1
  misc_feature (1)..(275): n is any nucleotide
nnnnnnnnnnnnnnnnnnnnnnnnnnnnnnnnnnnnnnnnnnnnnnnnnnnnnnnnnnnnnnnnnnnnnnnnnnnnnnnnnnnnnnnnnnnnnnnnnnnnnnnnnnnnnnnnnnnnnnnnnnnnnnnnnnnnnnnnnnnnnnnnnnnnnnnnnnnnnnnnnnnnnnnnnnnnnnnnnnnnnnnnnnnnnnnnnnnnnnnnnnnnnnnnnnnnnnnnnnnnnnnnnnnnnnnnnnnnnnnnnnnnnnnnnnnnnnnnnnnnnnnnnnnnnnnnnnnatgtgagaaaccccagcttacattytgggtcccatcgttcctgcaggctctgcacattgtgtaagatcaaccggccgtcaccagggctggcatacagggtgctgtaagcaaaatgtcctgcagaaagtaaactgaggagggctgagaatcctggtgaccctcaggagggaaagggccagcaatgggatgtgggggggagaagggcagctcacacactgactgccttgtggagaaggaacagccagtaattagcacctgcagaaaactcccagcctctgcaataaacacaaatatgtctcctggcatggttagctgggaaaatag

SEQ ID NO: 7083 - DNA, 600 bp, Chicken  19866894191783_2
gtaagatcaaccggccgtcaccagggctggcatacagggtgctgtaagcaaaatgtcctgcagaaagtaaactgaggagggctgagaatcctggtgaccctcaggagggaaagggccagcaatgggatgtgggggggagaagggcagctcacacactgactgccttgtggagaaggaacagccagtaattagcacctgcagaaaactcccagcctctgcaataaacacaaatatgtctcctggcatggttagctgggaaaatagaagctgaaaaagcccgttgtgccaaatgcattccartggatttgtgccactgctgcatgtcagctccgtgccgcgggtacgagtgctggagagcagcaaacatgggcctgctgcggcatcaggaatggtatgcacagaggtactcagactttcttttacaactggaggaaagatgtgacctcaaaaggacttacgctgctcagagagcaggaaaaatttctcagaaatagaggtgatgcagtggcacaggctgcaaggaaagtggtggggtcaccatccctggaggtgttccagaaccgtggggatgtggcactgagggatgtgggcagtggccat

SEQ ID NO: 7084 - DNA, 600 bp, Chicken  19866894191783_3
cgtgccgcgggtacgagtgctggagagcagcaaacatgggcctgctgcggcatcaggaatggtatgcacagaggtactcagactttcttttacaactggaggaaagatgtgacctcaaaaggacttacgctgctcagagagcaggaaaaatttctcagaaatagaggtgatgcagtggcacaggctgcaaggaaagtggtggggtcaccatccctggaggtgttccagaaccgtggggatgtggcactgagggatgtgggcagtggccatggggaggtgggttggggttgggcttggggwtctcagaggtcttttccaaccctgatgattctgtgattctatgagagcactcccatcactgtgacacagatgtgatggcaccaggagcagcagatgggcagcaarcaaaataagatggtaccatccaagacattacagttgtcctgggatctgtcctgggatttgggaaagaccgtgaccatgaggaatggcatcacactccacagtccacaaagcaagcccccacagtgactgcagtgtaggaaggacccagctggcccctctcaggggaaatccacgggagctggctgtcaccaggct

SEQ ID NO: 7085 - DNA, 600 bp, Chicken  19866894191783_4
gatgtgacctcaaaaggacttacgctgctcagagagcaggaaaaatttctcagaaatagaggtgatgcagtggcacaggctgcaaggaaagtggtggggtcaccatccctggaggtgttccagaaccgtggggatgtggcactgagggatgtgggcagtggccatggggaggtgggttggggttgggcttggggwtctcagaggtcttttccaaccctgatgattctgtgattctatgagagcactcccatcactgtgacacagatgtgatggcaccaggagcagcagatgggcagcaarcaaaataagatggtaccatccaagacattacagttgtcctgggatctgtcctgggatttgggaaagaccgtgaccatgaggaatggcatcacactccacagtccacaaagcaagcccccacagtgactgcagtgtaggaaggacccagctggcccctctcaggggaaatccacgggagctggctgtcaccaggctccaaatgaagcacacgacaggcacggggaagggacacacatgacctcatgccgctgtcactgcaagagacatgtactgggtgtgggaaggtcccggcagcgctca

SEQ ID NO: 7086 - DNA, 599 bp, Chicken  19866894191786_1
  misc_feature (1)..(136): n is any nucleotide
nnnnnnnnnnnnnnnnnnnnnnnnnnnnnnnnnnnnnnnnnnnnnnnnnnnnnnnnnnnnnnnnnnnnnnnnnnnnnnnnnnnnnnnnnnnnnnnnnnnnnnnnnnnnnnnnnnnnnnnnnnnnnnnnnnnnnnnnttagcagcaaaacaaaggcagcatcctccagcagcaggtcagccctgtggccgtggcagcagcaggcttcaactgtgcactaccgcaccgtgtcctccccacgctccgttctctctccacatccatttgttggttgttgatggagttagccgcaagctgtcacyctcagacccgtgtctcacacagtacagacccgtgtcaccacctcaagcagagagcagcaggattcccaacgtgcagcacatcctccagccatccccaggctggatccccctcctcagccctcaccagccattctgcctcccctcccaccacgctgcttcccacctccccatgcccagccccaaaacccactccagtatttgccttcccaaggaaggaagcagggctgagccatccgccgacccgcctggaatggggctggttaatagggaaggagcactgacgtccccaggtctcccag

SEQ ID NO: 7087 - DNA, 600 bp, Chicken  19866894191786_2
ccaccacgctgcttcccacctccccatgcccagccccaaaacccactccagtatttgccttcccaaggaaggaagcagggctgagccatccgccgacccgcctggaatggggctggttaatagggaaggagcactgacgtccccaggtctcccagctccctgcaaaattcccttttacggcatgcaccgtgccataaaaaggtggtaaatattcatagtatggaaaacactcacggagaggatatactgcacttaagagagagatctggattcattttatatgctgcagagaggctgttyagcgattgcaaacttgtgaatctcccccttgctttttggaaggaggcagggctggaggtccaggcgtgctggggacctgctggggacctgctggctctgcagtgctgtgccctcagcaccatttaaatgtccaattgctctcatccaacccctgcaaagccccgcgccgctgcagcctgtgacagctctgacagccagactccttaattcctttttcttattcccttaatctgtcatctttatcaggctgggggaagtgccaggcagcgtgcaggagccccggccccgatcaatctccac

SEQ ID NO: 7088 - DNA, 600 bp, Chicken  19866894191789_1
gtgttaaactggagccttagcatttccagaatgtctttgtatatgactagctgttcagaatttgagtttaaggctgttgagtttattgggtaatcgtttcttattttgtcaggcacagaataagcaagatgatgaattttgcagtatatggcaatcattgcagggttctgggaagtctcaccatgttcagcaaaacatccatgagaaggtgagtgtatacacttctaaacaaatctctaaattcaaaatatgaaggtttttaattcccaacatgatttcattacatcagaaggcttcctmattagtgttgcacctaagttctgtggaccaaaatattgctgcacgggatacgcagagagctggaaagaggcaatgaaaagagactgttatgtaaatgatagatagtagctttcttgttaaggtttgatgtttgaaattctagggtgcagttctacctcaggaaatcaagctgggatctggcaatcagttctataagccaggcttcaatgatggcagctttagaagtcagcaaagaaaacaggagccatataaaaaatgtaagtactgtgattaaaaacttcatttgagagaacttagttg

SEQ ID NO: 7089 - DNA, 600 bp, Chicken  19866894191792_1
gtgctcttgcccgccagcctctttcaccacccttcatcccatctgccttctagctttgtcaccccaaagcaaacattatactgtgcagaacaaaatccatttcgctggggaacggagatgaagaaagagatgaagaaggagggaagggtgagagacaggatggaaacgcctggggcttcctagagccccagcatcgacactttcctcaccttttgcaggtggatttctctcacctctccagcggcaagctgctgtggcacacattcggatggggcagactgcagctgtgagagcaccaargagatggagttaagggcacatcagtgaacagtgaggagaggctgagcgggtctgctgtgcagggaaaccctgctgagaatccagagccagatctgacgtccgcactgcagaccggaggatgcagccctcctgttatggaggacgtgggtgctcttccactgacctgagccgagacttcctataggttcatagagacatttcatttaaatcctcgggttcttcgggtggaaatgctttgctgcagcacctcagcttcacaccaacacgtcgacagcagccagctctgtaggtgattcgtaa

SEQ ID NO: 7090 - DNA, 599 bp, Chicken  19866894191800_1
  misc_feature (1)..(153): n is any nucleotide
nnnnnnnnnnnnnnnnnnnnnnnnnnnnnnnnnnnnnnnnnnnnnnnnnnnnnnnnnnnnnnnnnnnnnnnnnnnnnnnnnnnnnnnnnnnnnnnnnnnnnnnnnnnnnnnnnnnnnnnnnnnnnnnnnnnnnnnnnnnnnnnnnnnnnnnnnctcactgctccaaataatctcacctcgtctctttcccttttgcaactgctcctctgggtggcaggccagggaagccagccaggacaccacaaccccccaaggagctgactcgcctttctgtaatcaaaagggcatcttaattacacyccttgcccagaaataagatgcacgagaactgccagtcagaggccttggtgcatctaaagccatccacagcacttgccttccttttagaaaggaaccaacctttaagccctygctagaacttgttgtgaaccttaataggacatcaaaggcaaagtgagaagggactgcttctgacccagcagatscatttccccggggacaggcagggcaggagccaagggaggtgcagagatttcaggctctctcctcccttcctctcctcctttcccctcccctaggggctctcatgcaaaacccac

SEQ ID NO: 7091 - DNA, 599 bp, Chicken  19866894191800_2
  misc_feature (1)..(42): n is any nucleotide
nnnnnnnnnnnnnnnnnnnnnnnnnnnnnnnnnnnnnnnnnnctcactgctccaaataatctcacctcgtctctttcccttttgcaactgctcctctgggtggcaggccagggaagccagccaggacaccacaaccccccaaggagctgactcgcctttctgtaatcaaaagggcatcttaattacacyccttgcccagaaataagatgcacgagaactgccagtcagaggccttggtgcatctaaagccatccacagcacttgccttccttttagaaaggaaccaacctttaagccctygctagaacttgttgtgaaccttaataggacatcaaaggcaaagtgagaagggactgcttctgacccagcagatscatttccccggggacaggcagggcaggagccaagggaggtgcagagatttcaggctctctcctcccttcctctcctcctttcccctcccctaggggctctcatgcaaaacccactgggagaggtggtaggaaggaagaaatattcaccctaaggctagctgacagaagactgcacatgcagagacacatatttatttgtctttaagaagccctgaactgcatcct

SEQ ID NO: 7092 - DNA, 600 bp, Chicken  19866894191800_3
ttcccttttgcaactgctcctctgggtggcaggccagggaagccagccaggacaccacaaccccccaaggagctgactcgcctttctgtaatcaaaagggcatcttaattacacyccttgcccagaaataagatgcacgagaactgccagtcagaggccttggtgcatctaaagccatccacagcacttgccttccttttagaaaggaaccaacctttaagccctygctagaacttgttgtgaaccttaataggacatcaaaggcaaagtgagaagggactgcttctgacccagcagatscatttccccggggacaggcagggcaggagccaagggaggtgcagagatttcaggctctctcctcccttcctctcctcctttcccctcccctaggggctctcatgcaaaacccactgggagaggtggtaggaaggaagaaatattcaccctaaggctagctgacagaagactgcacatgcagagacacatatttatttgtctttaagaagccctgaactgcatccttgcaactgcagctatatcagagggaaatctttgttaaaatgaagcagactttgtgcctgattgcccctgcaccca

SEQ ID NO: 7093 - DNA, 539 bp, Chicken  19866894191801_1
ctgtgctgatattgcacaaaggattttgccacctgttcgatttttatttactgctttatttagagagagcttatatactttcgagttaaatgtgaaggacataatatcaaaatgtgtatttcagcaggtagagcttgcagaatatactaaatccctcagttttgaatcttagtaagtttccttctttaattaagattttcttgcaattatttggaactgaatgtttgaagacactgaataccacattaaataaatctctgtaacaggaagtagagctgattttttttttttttttttttycyccctgtgcctcccccctcaggtatttgaagacttgtatttttagaatcagagagatcccctactctgaccctactactgattacctaccaagtagcactaaccagtatgagatcacaattagtggcaaactgaagatagggaagggataaaaacatatcaacgaactttaaggaactatggccagggagctaacctcttctatactatgtgtataaaaagtggaacaagaggaggac

SEQ ID NO: 7094 - DNA, 537 bp, Chicken  19866894191801_2
gtgctgatattgcacaaaggattttgccacctgttcgatttttatttactgctttatttagagagagcttatatactttcgagttaaatgtgaaggacataatatcaaaatgtgtatttcagcaggtagagcttgcagaatatactaaatccctcagttttgaatcttagtaagtttccttctttaattaagattttcttgcaattatttggaactgaatgtttgaagacactgaataccacattaaataaatctctgtaacaggaagtagagctgattttttttttttttttttttycyccctgtgcctcccccctcaggtatttgaagacttgtatttttagaatcagagagatcccctactctgaccctactactgattacctaccaagtagcactaaccagtatgagatcacaattagtggcaaactgaagatagggaagggataaaaacatatcaacgaactttaaggaactatggccagggagctaacctcttctatactatgtgtataaaaagtggaacaagaggaggac

SEQ ID NO: 7095 - DNA, 600 bp, Chicken  19866894191811_1
tgcacgtgaaattggagaattccataacacaagaggtgatgttctgactgtatggctcctatacccttgaagggtccccagcaacctaatttcttccttgcacgttgctgagcagattgtaagcactaaataaatggcattctctggagtcatgctggaatagctgtgtctgcatggtattcatttcacacttgtttttcctcttctgcttctctgggcttggtgagggtatttgtttactgaatccctttgtgctgaacttgtgtaatgaagagttgccaatttctacagtggctgtaygtatrtatgtgagcatacctatatttgtgtatttacacgtgtatatttcttcagggataaggaaggggattaagtgaaagcattttaagccgttcttttccagcgatctctccttaaactgcagcttaaaactgcaaagtgtattggaatttcaaactttgatcgatgtactgagagcatctgccaggatttagcagtccaggatcaarcctaagtttttcccktgttggkgaattggatggctcacgtgagacaccaacatctgtagctgagaacagtccaatggagcagggtatgcag

SEQ ID NO: 7096 - DNA, 600 bp, Chicken  19866894191811_2
gtgaaattggagaattccataacacaagaggtgatgttctgactgtatggctcctatacccttgaagggtccccagcaacctaatttcttccttgcacgttgctgagcagattgtaagcactaaataaatggcattctctggagtcatgctggaatagctgtgtctgcatggtattcatttcacacttgtttttcctcttctgcttctctgggcttggtgagggtatttgtttactgaatccctttgtgctgaacttgtgtaatgaagagttgccaatttctacagtggctgtaygtatrtatgtgagcatacctatatttgtgtatttacacgtgtatatttcttcagggataaggaaggggattaagtgaaagcattttaagccgttcttttccagcgatctctccttaaactgcagcttaaaactgcaaagtgtattggaatttcaaactttgatcgatgtactgagagcatctgccaggatttagcagtccaggatcaarcctaagtttttcccktgttggkgaattggatggctcacgtgagacaccaacatctgtagctgagaacagtccaatggagcagggtatgcaggagct

SEQ ID NO: 7097 - DNA, 600 bp, Chicken  19866894191811_3
ttctctgggcttggtgagggtatttgtttactgaatccctttgtgctgaacttgtgtaatgaagagttgccaatttctacagtggctgtaygtatrtatgtgagcatacctatatttgtgtatttacacgtgtatatttcttcagggataaggaaggggattaagtgaaagcattttaagccgttcttttccagcgatctctccttaaactgcagcttaaaactgcaaagtgtattggaatttcaaactttgatcgatgtactgagagcatctgccaggatttagcagtccaggatcaarcctaagtttttcccktgttggkgaattggatggctcacgtgagacaccaacatctgtagctgagaacagtccaatggagcagggtatgcaggagcttggtggtggtttgtgtcctggcctcrgatagcaggttttaagctgggtgaattgcaggtgttgtttatttacttgtttttaaagttagacctgagccttgggagatgtgggatgagtatttctgtgggttatggtatggatcaccacctggtggatttctgttttggcattccaaccagcaaaaaagcagcctctcaaacaagc

SEQ ID NO: 7098 - DNA, 600 bp, Chicken  19866894191811_4
ggtgagggtatttgtttactgaatccctttgtgctgaacttgtgtaatgaagagttgccaatttctacagtggctgtaygtatrtatgtgagcatacctatatttgtgtatttacacgtgtatatttcttcagggataaggaaggggattaagtgaaagcattttaagccgttcttttccagcgatctctccttaaactgcagcttaaaactgcaaagtgtattggaatttcaaactttgatcgatgtactgagagcatctgccaggatttagcagtccaggatcaarcctaagtttttrccktgttggkgaattggatggctcacgtgagacaccaacatctgtagctgagaacagtccaatggagcagggtatgcaggagcttggtggtggtttgtgtcctggcctcrgatagcaggttttaagctgggtgaattgcaggtgttgtttatttacttgtttttaaagttagacctgagccttgggagatgtgggatgagtatttctgtgggttatggtatggatcaccacctggtggatttctgttttggcattccaaccagcaaaaaagcagcctctcaaacaagctctctgctgttt

SEQ ID NO: 7099 - DNA, 600 bp, Chicken  19866894191811_5
gagggtatttgtttactgaatccctttgtgctgaacttgtgtaatgaagagttgccaatttctacagtggctgtaygtatrtatgtgagcatacctatatttgtgtatttacacgtgtatatttcttcagggataaggaaggggattaagtgaaagcattttaagccgttcttttccagcgatctctccttaaactgcagcttaaaactgcaaagtgtattggaatttcaaactttgatcgatgtactgagagcatctgccaggatttagcagtccaggatcaarcctaagtttttcccktgttggkgaattggatggctcacgtgagacaccaacatctgtagctgagaacagtccaatggagcagggtatgcaggagcttggtggtggtttgtgtcctggcctcrgatagcaggttttaagctgggtgaattgcaggtgttgtttatttacttgtttttaaagttagacctgagccttgggagatgtgggatgagtatttctgtgggttatggtatggatcaccacctggtggatttctgttttggcattccaaccagcaaaaaagcagcctctcaaacaagctctctgctgtttgca

SEQ ID NO: 7100 - DNA, 600 bp, Chicken  19866894191811_6
tttgtttactgaatccctttgtgctgaacttgtgtaatgaagagttgccaatttctacagtggctgtaygtatrtatgtgagcatacctatatttgtgtatttacacgtgtatatttcttcagggataaggaaggggattaagtgaaagcattttaagccgttcttttccagcgatctctccttaaactgcagcttaaaactgcaaagtgtattggaatttcaaactttgatcgatgtactgagagcatctgccaggatttagcagtccaggatcaarcctaagtttttcccktgttggkgaattggatggctcacgtgagacaccaacatctgtagctgagaacagtccaatggagcagggtatgcaggagcttggtggtggtttgtgtcctggcctcrgatagcaggttttaagctgggtgaattgcaggtgttgtttatttacttgtttttaaagttagacctgagccttgggagatgtgggatgagtatttctgtgggttatggtatggatcaccacctggtggatttctgttttggcattccaaccagcaaaaaagcagcctctcaaacaagctctctgctgtttgcagcaggca

SEQ ID NO: 7101 - DNA, 561 bp, Chicken  19866894191811_7
tttacacgtgtatatttcttcagggataaggaaggggattaagtgaaagcattttaagccgttcttttccagcgatctctccttaaactgcagcttaaaactgcaaagtgtattggaatttcaaactttgatcgatgtactgagagcatctgccaggatttagcagtccaggatcaarcctaagtttttcccktgttggkgaattggatggctcacgtgagacaccaacatctgtagctgagaacagtccaatggagcagggtatgcaggagcttggtggtggtttgtgtcctggcctcrgatagcaggttttaagctgggtgaattgcaggtgttgtttatttacttgtttttaaagttagacctgagccttgggagatgtgggatgagtatttctgtgggttatggtatggatcaccacctggtggatttctgttttggcattccaaccagcaaaaaagcagcctctcaaacaagctctctgctgtttgcagcaggcagcagtgcctgctctggaggatgtttaccatgtctctttatgctctaaacagagatcatttt

SEQ ID NO: 7102 - DNA, 599 bp, Chicken  19866894191815_1
  misc_feature (1)..(17): n is any nucleotide
nnnnnnnnnnnnnnnnncattaatctcccatctaaataagtgagcctgttctcattcacagaagcctaaaatgatttctatcgctttctccacaactcactcaatcagtagcggcaggggaggtagctgccagaacaaacagtattccagttaaaaccacatttttactttataaaggaatgatattttcctttttggcttatccactatgcttatttcccccaccatattctttcctcagacatgtcaggattccatttgctttttgacagcatagaagcaccaaaaaaaagcccataytgatgttgacatccttcagctgaccctgttcatttactacagcacaggarattatatgggtcattcacttttcttcctccttccttttctttcacctttctttcttcctcaccttccacaatatattattttgcatttatcaatattttgggttaaaacttctgtagcacctccacttcaacaccttccacatacatgtaatgacagggtagacaaagtcactacatgaccacagggcaatgcaacatcttggtaagtacgcatttgctttataattataagctaactatgtagagatg

SEQ ID NO: 7103 - DNA, 600 bp, Chicken  19866894191815_2
ctcattcacagaagcctaaaatgatttctatcgctttctccacaactcactcaatcagtagcggcaggggaggtagctgccagaacaaacagtattccagttaaaaccacatttttactttataaaggaatgatattttcctttttggcttatccactatgcttatttcccccaccatattctttcctcagacatgtcaggattccatttgctttttgacagcatagaagcaccaaaaaaaagcccataytgatgttgacatccttcagctgaccctgttcatttactacagcacaggarattatatgggtcattcacttttcttcctccttccttttctttcacctttctttcttcctcaccttccacaatatattattttgcatttatcaatattttgggttaaaacttctgtagcacctccacttcaacaccttccacatacatgtaatgacagggtagacaaagtcactacatgaccacagggcaatgcaacatcttggtaagtacgcatttgctttataattataagctaactatgtagagatgctgaagtattttacatgctaattgtactaaattatcatatgattacacagg

SEQ ID NO: 7104 - DNA, 600 bp, Chicken  19866894191815_3
actctagttatgcatcaccaataaactattcaactgaatttccaaccatacattcacatcccttttcactttgatttgtcccttctctgtcccactgcttatcagtttctctttgcaaattacagccattatgtcattttacatagaatatcttccatgttatgagaattacgcataacagcttttatttgcgagatatctaatcacaacattttgtactctgcataacattgttcacaacagggtctcagaacttcagaggcatcagcaacaatttctagactttttcccaacacaatrggaaattcagggaaaaaagaaagttaaagattatctcaccagaaactaattccacccaagggagcatcagctgagattcagctctgatatccatgcaactcaaaaggaccttctgtggggtaagacagaatgccaggagttgctgaagaagtaaataggcaccgagggggaataaggaagacaattaaatttctccttcacgcatagtcccagaacatcctgaactcttaattctcagtcctgaaacaattcttgataccttttcctttatacagagtgaagcatcacttgcaagctgaa

SEQ ID NO: 7105 - DNA, 600 bp, Chicken  19866894191816_1
gaagtgagatttctagtgtgagtgaaggagcatactgtctagtcccgattattttgctatttcagctgaatatttcctgtaggtagatgaggtaatatgaactgcaatgctgtcagtgtgtgactagtacacctcttacatctctgagcaagacagttcattatttttgcttcccaggggttgtgaacaaaattaaaacttctgtaagaacagattccccgaaggtccagcatgacctcttttcacattttgcctgataagaccttaaatcaagtgcagcagttttcagctaatatattycatttgttgacaatgtgacattgttggtatttaggcttaaattcatattctgccaatagtttattttaataacgatcatcttgattgtagctcccttgccctagtaagagctgggacaatgtcctaataaccaaaaaggactttgctatcactttcatatttctttaagtactccttgtgatgtctcatgggacatgtctcaagtgagtggtgttagtatttaaaaatgcatattctgtgagaaactatttgaaaaggtttgccgcttgtacatttcaaaaggctttacttccagttaag

SEQ ID NO: 7106 - DNA, 600 bp, Chicken  19866894191817_1
agcatttcatgtaggaaatggtaaaagaaccttccagggaaaacagctacatgaagaaatcagacactgagagaaacaggctcttacgtttacctccctcaccagtgtaccagggaaagaaggatcttatctgtaggtgaagcagtttggcctatttatttcaattagctgaggatttgacctactagtccactggaaagtatatcttccactgattccaccttttgaactagcttcctgtgatgtggtgagtggctgaatcttactgtgctcaatctccttggaaggattagggcaaaytcaaagctatttcctttagaatgaaactatgggcagacctttctttgcagtaaaatgtcaagtcttaatggattcagaaagaagatcatcatagtcttgtgtgactgtatattcagatgtgtgtaaataccctggaaaatactgttttgattcatggagtggagtaatggtatttgctcatctagttttgtgtgctttccaaggcaaaaatatcatcacaatgcattcctgcacaaaacgtaatgaatgtttgactgtgtgatctctgaactcttgggatacgtgactattaaaaataat

SEQ ID NO: 7107 - DNA, 600 bp, Chicken  19866894191822_1
gccacagaatgttggagagtgtccagtgcaaagttgggggacgctatggccactcaaagaaagccacttgcacattgccaaggctggcgtatctttccttattaagctccagcacttctctgagctgagccctccagaaaagttccacatctctcgtctccggcaggctaagagaaaaatgttgtttgtatatggagagctgcatgggaaggccagaaagatggattgctcagatgcaagcctctaggcctttgttcctcctgtttaacaaaatatgggacttgattaagagaaaaaaawtgtagtagaatatttgaaagagaagaagatggcaaataaagttcaagtgacttattaatctgatttagtgggtggkttttttctctttttttttctggctgagaattccagtgctcaattccttttaagacggcagggttggtctaaagtgtgatgggactctcctattctttatgacctaaatcagtgacccaaagcataatattttctctagaaccatctgttttctcctcttgccaaggggatttcacaatgcctggttgctctgaataattgtacatgtacaaggatataacttgc

SEQ ID NO: 7108 - DNA, 600 bp, Chicken  19866894191822_2
gccaaggctggcgtatctttccttattaagctccagcacttctctgagctgagccctccagaaaagttccacatctctcgtctccggcaggctaagagaaaaatgttgtttgtatatggagagctgcatgggaaggccagaaagatggattgctcagatgcaagcctctaggcctttgttcctcctgtttaacaaaatatgggacttgattaagagaaaaaaawtgtagtagaatatttgaaagagaagaagatggcaaataaagttcaagtgacttattaatctgatttagtgggtggkttttttctctttttttttctggctgagaattccagtgctcaattccttttaagacggcagggttggtctaaagtgtgatgggactctcctattctttatgacctaaatcagtgacccaaagcataatattttctctagaaccatctgttttctcctcttgccaaggggatttcacaatgcctggttgctctgaataattgtacatgtacaaggatataacttgccacagggagaaaattaactaaacaagggcaggtggatgttttgaattttctgttgaaactactgccctttagaaag

SEQ ID NO: 7109 - DNA, 600 bp, Chicken  19866894191822_3
gcgtatctttccttattaagctccagcacttctctgagctgagccctccagaaaagttccacatctctcgtctccggcaggctaagagaaaaatgttgtttgtatatggagagctgcatgggaaggccagaaagatggattgctcagatgcaagcctctaggcctttgttcctcctgtttaacaaaatatgggacttgattaagagaaaaaaawtgtagtagaatatttgaaagagaagaagatggcaaataaagttcaagtgacttattaatctgatttagtgggtggkttttttctckttttttttctggctgagaattccagtgctcaattccttttaagacggcagggttggtctaaagtgtgatgggactctcctattctttatgacctaaatcagtgacccaaagcataatattttctctagaaccatctgttttctcctcttgccaaggggatttcacaatgcctggttgctctgaataattgtacatgtacaaggatataacttgccacagggagaaaattaactaaacaagggcaggtggatgttttgaattttctgttgaaactactgccctttagaaagagayggtgaa

SEQ ID NO: 7110 - DNA, 600 bp, Chicken  19866894191822_4
ttctctttttttttctggctgagaattccagtgctcaattccttttaagacggcagggttggtctaaagtgtgatgggactctcctattctttatgacctaaatcagtgacccaaagcataatattttctctagaaccatctgttttctcctcttgccaaggggatttcacaatgcctggttgctctgaataattgtacatgtacaaggatataacttgccacagggagaaaattaactaaacaagggcaggtggatgttttgaattttctgttgaaactactgccctttagaaagagayggtgaagaaccacacagataagtaatactttatgcccaaactatttttttcttaagcacacgcattttaaaataatactaacaataaagaagcacttaggagatatctgggataaacagattagatactaagccagcctgtgtttctctttaccaaacatctccaagacatgctttaaagcagcgtgaaacacagtcaggattacagatgttgggtcatgctttggctaaacttcaatgaccgtgaaagcacttctgcttcaacttagctatccaccaaatggcatgcaaccagctactc

SEQ ID NO: 7111 - DNA, 600 bp, Chicken  19866894191824_1
aaaggcttgtaaccaaagtcttgcatataatcgatcatgacctttctcagcaaaagcaaaaggctatttacttaaatgcctaagacctcaagtaagtattctttaactacaaaatctaatagaaacagatatcaaacagttatttctaatcactttagaagtttgtcatctgtaggataatacctgatttgatcttcctagatcaagggattcatgcacattattcttcctcaacaagcatagaaagatgagggacatgcatttcccattcaattcaagcgttaactgtatacagcataygtgaaaaaaaccacaacaacttatttacagatattcaccaccactgtcactttttaatgcatgctccaaaccaggtctacatgtgtagactaaatccctccagaatttgtttgcttagttttacttgtccatatcacctacctggacattctcctgtgctacctactgcagggaatctgaggattcctcttaggagagggtttggactcgatgatctccaaaggtcccttccaacccccacagttctgtgatatcagatgcttaacacaataaaccacgtgcctgtatcataaacttaac

SEQ ID NO: 7112 - DNA, 600 bp, Chicken  19866894191824_2
ctacttttaaaaaatactagctacatgctctgatattaaattccaaggcaagatgaacacacgctttgtatttacatgaacaaatgaagtattaattaaaaaaaaacctagaaaaactataacattattggtgatctcttcaaattcattaagcctacagaaagaaaaaagtgaaacatacagtccagtaaagatacactatgaagaacaatgcaaacacgcttatgcttggctcacacttaaagcaactcctaggactacctatgtttctctactacctaaagctaagagaagcagtcrtttgtactcataaactttataagaagattatgtgaagaacagcaatatttttttctttaaraagagcatttttcattcaaccacagcagtgctacatcttacgcttaacaarctgtcatactgaattagcacacatcagtcattaaagatcactcatttcactatgccaggaattcactaagttgtaaaagatttctaaaagtaagtgtgaaacctgctagcaagctcttattcaacattagattcaacattcccaacttccagtaacttatcaaagagttgtgtaacaggaataattca

SEQ ID NO: 7113 - DNA, 600 bp, Chicken  19866894191824_3
cgctttgtatttacatgaacaaatgaagtattaattaaaaaaaaacctagaaaaactataacattattggtgatctcttcaaattcattaagcctacagaaagaaaaaagtgaaacatacagtccagtaaagatacactatgaagaacaatgcaaacacgcttatgcttggctcacacttaaagcaactcctaggactacctatgtttctctactacctaaagctaagagaagcagtcrtttgtactcataaactttataagaagattatgtgaagaacagcaatatttttttctttaaraagagcatttttcattcaaccacagcagtgctacatcttacgcttaacaarctgtcatactgaattagcacacatcagtcattaaagatcactcatttcactatgccaggaattcactaagttgtaaaagatttctaaaagtaagtgtgaaacctgctagcaagctcttattcaacattagattcaacattcccaacttccagtaacttatcaaagagttgtgtaacaggaataattcacactggcttcattaaaaccactacttgtaaaatactagtggcatacagaaacaactgttca

SEQ ID NO: 7114 - DNA, 600 bp, Chicken  19866894191824_4
aaaactataacattattggtgatctcttcaaattcattaagcctacagaaagaaaaaagtgaaacatacagtccagtaaagatacactatgaagaacaatgcaaacacgcttatgcttggctcacacttaaagcaactcctaggactacctatgtttctctactacctaaagctaagagaagcagtcrtttgtactcataaactttataagaagattatgtgaagaacagcaatatttttttctttaaraagagcatttttcattcaaccacagcagtgctacatcttacgcttaacaarctgtcatactgaattagcacacatcagtcattaaagatcactcatttcactatgccaggaattcactaagttgtaaaagatttctaaaagtaagtgtgaaacctgctagcaagctcttattcaacattagattcaacattcccaacttccagtaacttatcaaagagttgtgtaacaggaataattcacactggcttcattaaaaccactacttgtaaaatactagtggcatacagaaacaactgttcagatgtatatagattacagaatcagaaagatggtagcaaaggagtttgaagt

SEQ ID NO: 7115 - DNA, 599 bp, Chicken  19866894191826_1
  misc_feature (1)..(137): n is any nucleotide
nnnnnnnnnnnnnnnnnnnnnnnnnnnnnnnnnnnnnnnnnnnnnnnnnnnnnnnnnnnnnnnnnnnnnnnnnnnnnnnnnnnnnnnnnnnnnnnnnnnnnnnnnnnnnnnnnnnnnnnnnnnnnnnnnnnnnnnnnattttctaaggaaaatcatatgcagttcttaacttattttgtaccttgatattgtagcaggtctaaggcaggtagcacattaatgtatgtgcaaaatatttaatgaaggacttacttacgtgagtggtgcctgcaaagttgttatctatagttgttggaagayatgcagacaattaagaagtgctaggtatacccacrtgatacatggtaggatttagtgctgtgtgatggaacctgaattaactctgaataagttatctcaggtgacataagaagctcatctctttccctggaataaaccrctttgctgagaataccacactgcagcaaagtccatagtacttttatatggcatcatgtaattttttatgcttattgtcagaagacaatttttatgaagtgattcttggactactgtgtctacactgaagtccaggatgctcaactgaaaatcaacacata

SEQ ID NO: 7116 - DNA, 599 bp, Chicken  19866894191826_2
  misc_feature (1)..(102): n is any nucleotide
nnnnnnnnnnnnnnnnnnnnnnnnnnnnnnnnnnnnnnnnnnnnnnnnnnnnnnnnnnnnnnnnnnnnnnnnnnnnnnnnnnnnnnnnnnnnnnnnnnnnnnattttctaaggaaaatcatatgcagttcttaacttattttgtaccttgatattgtagcaggtctaaggcaggtagcacattaatgtatgtgcaaaatatttaatgaaggacttacttacgtgagtggtgcctgcaaagttgttatctatagttgttggaagayatgcagacaattaagaagtgctaggtatacccacrtgatacatggtaggatttagtgctgtgtgatggaacctgaattaactctgaataagttatctcaggtgacataagaagctcatctctttccctggaataaaccrctttgctgagaataccacactgcagcaaagtccatagtacttttatatggcatcatgtaattttttatgcttattgtcagaagacaatttttatgaagtgattcttggactactgtgtctacactgaagtccaggatgctcaactgaaaatcaacacatactatagattaggtcatgaaagaagaaattttgacc

SEQ ID NO: 7117 - DNA, 600 bp, Chicken  19866894191826_3
tttctaaggaaaatcatatgcagttcttaacttattttgtaccttgatattgtagcaggtctaaggcaggtagcacattaatgtatgtgcaaaatatttaatgaaggacttacttacgtgagtggtgcctgcaaagttgttatctatagttgttggaagayatgcagacaattaagaagtgctaggtatacccacrtgatacatggtaggatttagtgctgtgtgatggaacctgaattaactctgaataagttatctcaggtgacataagaagctcatctctttccctggaataaaccrctttgctgagaataccacactgcagcaaagtccatagtacttttatatggcatcatgtaattttttatgcttattgtcagaagacaatttttatgaagtgattcttggactactgtgtctacactgaagtccaggatgctcaactgaaaatcaacacatactatagattaggtcatgaaagaagaaattttgacctcttcagacattcagtattactttaacacagctgttttgtatgttggaatatgaaaaaaaaaaaaaaaaaactggactgcataggttctatgctgttatctttgg

SEQ ID NO: 7118 - DNA, 600 bp, Chicken  19866894191832_1
gtgtgctaactgctgcgactgcagctcatagcgggttcccagaaacactgagagtaaccaagagtatcagcaactctgtcaaggaagaatgaagcactgattctcagagtgtttttaggaatagttttaagatatacaaagctgattcatcctgagtaattgtactttttcactgcagagatttcccctgtggactaattgccacacacgaacagcactgctgggaacctttggtggttggactcaatgacctccagaggtccctttcaatgactacaattctgtgaatctgtgattggygcaggtttggtgctgatgcctggaaggttgctgagcagtccttcacagtgattttaaaatgtgtctctgatatttggtggcccatacagcctctgtacacctgctagtggcaggcacagtgcactgggccactgtcatccctgtggagaytattcctgcatccttttccagagcttctcctggatttccagtaaaaygtctctgctctttaagccttctttcactcagrgacctaatctatctgttggtgcagacatctgctttctcaggggccttcttttatcagtttagcttcagtga

SEQ ID NO: 7119 - DNA, 600 bp, Chicken  19866894191832_2
cctgagtaattgtactttttcactgcagagatttcccctgtggactaattgccacacacgaacagcactgctgggaacctttggtggttggactcaatgacctccagaggtccctttcaatgactacaattctgtgaatctgtgattggygcaggtttggtgctgatgcctggaaggttgctgagcagtccttcacagtgattttaaaatgtgtctctgatatttggtggcccatacagcctctgtacacctgctagtggcaggcacagtgcactgggccactgtcatccctgtggagaytattcctgcatccttttccagagcttctcctggatttccagtaaaaygtctctgctctttaagccttctttcactcagrgacctaatctatctgttggtgcagacatctgctttctcaggggccttcttttatcagtttagcttcagtgaagcagtgtccatcaccaaaaaccattcccagtgccccagcgatgtgtacagctgttctgcaggagtgctgccccagtaaagctgccacttgttttcaagcaaaacctgttccaaagcaccctctgccggctgagggctcctgctttgctc

SEQ ID NO: 7120 - DNA, 600 bp, Chicken  19866894191832_3
attgccacacacgaacagcactgctgggaacctttggtggttggactcaatgacctccagaggtccctttcaatgactacaattctgtgaatctgtgattggygcaggtttggtgctgatgcctggaaggttgctgagcagtccttcacagtgattttaaaatgtgtctctgatatttggtggcccatacagcctctgtacacctgctagtggcaggcacagtgcactgggccactgtcatccctgtggagaytattcctgcatccttttccagagcttctcctggatttccagtaaaaygtctctgctctttaagccttctttcactcagrgacctaatctatctgttggtgcagacatctgctttctcaggggccttcttttatcagtttagcttcagtgaagcagtgtccatcaccaaaaaccattcccagtgccccagcgatgtgtacagctgttctgcaggagtgctgccccagtaaagctgccacttgttttcaagcaaaacctgttccaaagcaccctctgccggctgagggctcctgctttgctctccccaggcatgtgagaaagccaggaattagttagcaggatcgttgc

SEQ ID NO: 7121 - DNA, 600 bp, Chicken  19866894191832_4
tttggtggttggactcaatgacctccagaggtccctttcaatgactacaattctgtgaatctgtgattggygcaggtttggtgctgatgcctggaaggttgctgagcagtccttcacagtgattttaaaatgtgtctctgatatttggtggcccatacagcctctgtacacctgctagtggcaggcacagtgcactgggccactgtcatccctgtggagaytattcctgcatccttttccagagcttctcctggatttccagtaaaaygtctctgctctttaagccttctttcactcagrgacctaatctatctgttggtgcagacatctgctttctcaggggccttcttttatcagtttagcttcagtgaagcagtgtccatcaccaaaaaccattcccagtgccccagcgatgtgtacagctgttctgcaggagtgctgccccagtaaagctgccacttgttttcaagcaaaacctgttccaaagcaccctctgccggctgagggctcctgctttgctctccccaggcatgtgagaaagccaggaattagttagcaggatcgttgcagtacagtcaagataaaatggcatagtttgtg

SEQ ID NO: 7122 - DNA, 600 bp, Chicken  19866894191832_5
tcagtgaagcagtgtccatcaccaaaaaccattcccagtgccccagcgatgtgtacagctgttctgcaggagtgctgccccagtaaagctgccacttgttttcaagcaaaacctgttccaaagcaccctctgccggctgagggctcctgctttgctctccccaggcatgtgagaaagccaggaattagttagcaggatcgttgcagtacagtcaagataaaatggcatagtttgtgataaatggaaagccgatgcccttggcaaaagacatctgactgacaggaactaggagatcccctygctgataatgcactgaaagctactacagccatttgcacgttctgttctgttcagtgggaggtgtctcaaatgctgctataaattctgctcctccagatatgcattgcagaagccagttaaaaagcattcccagtagtctggtacaaggaaaggactcagcccagtgcaaagcatttctctactgcgtgaatttccagagggtaggtcaaatattttattattcagccagtaataactgatgctgctggaaactgtgtctagaattttgtaagaaactttatttcagttcacttatgtgcc

SEQ ID NO: 7123 - DNA, 600 bp, Chicken  19866894191832_6
gagttactgttactgttttactggctcattttcagtcagaatgtgttctctggtttgatgagagatgaaatatctctcaaagaatgaatgagggaagtctctgtgagtgtatcatctcacacagtcctatttcatggtatttttatgttgtaaagcatgtcaaactttctaaattagaaactacaaaagcattttcagtttttcttggtatgcaatacatggtacttctgtaatgtccattcacttacatgaacagcattacaaacaatttgttgacaaatccacttttggaaaaaaaawatcayraaatgtttctagagcactwccctctggaaaagcaaggagctgagcctgacagactgctacttctaacacaacaaggtggttcttcatcctcctttaaaactgggtctttaggggctatttggttacacttgggatcaacagaactattgacaaacatttatttgcttaataaatcctgattctggcttataataatcaggacacatgaaaatcagcttcccattcccacttgacagtctagtttgctccttggtagtatgagaaataagctctcaaaaaaaacccttctgctct

SEQ ID NO: 7124 - DNA, 600 bp, Chicken  19866894191832_7
actgttactgttttactggctcattttcagtcagaatgtgttctctggtttgatgagagatgaaatatctctcaaagaatgaatgagggaagtctctgtgagtgtatcatctcacacagtcctatttcatggtatttttatgttgtaaagcatgtcaaactttctaaattagaaactacaaaagcattttcagtttttcttggtatgcaatacatggtacttctgtaatgtccattcacttacatgaacagcattacaaacaatttgttgacaaatccacttttggaaaaaaaawatcayraaatgtttctagagcactwccctctggaaaagcaaggagctgagcctgacagactgctacttctaacacaacaaggtggttcttcatcctcctttaaaactgggtctttaggggctatttggttacacttgggatcaacagaactattgacaaacatttatttgcttaataaatcctgattctggcttataataatcaggacacatgaaaatcagcttcccattcccacttgacagtctagtttgctccttggtagtatgagaaataagctctcaaaaaaaacccttctgctctaaatg

SEQ ID NO: 7125 - DNA, 600 bp, Chicken  19866894191832_8
ctgttactgttttactggctcattttcagtcagaatgtgttctctggtttgatgagagatgaaatatctctcaaagaatgaatgagggaagtctctgtgagtgtatcatctcacacagtcctatttcatggtatttttatgttgtaaagcatgtcaaactttctaaattagaaactacaaaagcattttcagtttttcttggtatgcaatacatggtacttctgtaatgtccattcacttacatgaacagcattacaaacaatttgttgacaaatccacttttggaaaaaaaawatcayraaatgtttctagagcactwccctctggaaaagcaaggagctgagcctgacagactgctacttctaacacaacaaggtggttcttcatcctcctttaaaactgggtctttaggggctatttggttacacttgggatcaacagaactattgacaaacatttatttgcttaataaatcctgattctggcttataataatcaggacacatgaaaatcagcttcccattcccacttgacagtctagtttgctccttggtagtatgagaaataagctctcaaaaaaaacccttctgctctaaatgc

SEQ ID NO: 7126 - DNA, 600 bp, Chicken  19866894191832_9
tcattttcagtcagaatgtgttctctggtttgatgagagatgaaatatctctcaaagaatgaatgagggaagtctctgtgagtgtatcatctcacacagtcctatttcatggtatttttatgttgtaaagcatgtcaaactttctaaattagaaactacaaaagcattttcagtttttcttggtatgcaatacatggtacttctgtaatgtccattcacttacatgaacagcattacaaacaatttgttgacaaatccacttttggaaaaaaaawatcayraaatgtttctagagcactwccctctggaaaagcaaggagctgagcctgacagactgctacttctaacacaacaaggtggttcttcatcctcctttaaaactgggtctttaggggctatttggttacacttgggatcaacagaactattgacaaacatttatttgcttaataaatcctgattctggcttataataatcaggacacatgaaaatcagcttcccattcccacttgacagtctagtttgctccttggtagtatgagaaataagctctcaaaaaaaacccttctgctctaaatgctttactgtactcttgctgt

SEQ ID NO: 7127 - DNA, 600 bp, Chicken  19866894191834_1
tcacccccctgtgtgccaccccagcacccgctgccgcccacgtcccctctgtccccagtccagtcaagcctgggccccatagcccacagggagggggattcctcctttgcttctagaggccgtgcttggctctccagcactgccacgctggggctctcggtggggtggagcaccaattctgcatcgctcaagcggagcgtagaaacgcacggctcctgttgctgcacagctcctgttgctgcatggcccgtggaagctttgagcctaaagcaagaggaggatcctggaggagcagcgagmggtgctgtgggatgctcagtgtggggacgggacagaaaagccccccacrataacagtgagaggtgaacaccgcacgctgccatccctggcacatgggtctcttcggcacagcctgcagaggactcaaccacaccacatcccgggctcctggtggccctttttactcacaatttccagctgactgcaaattctgctctcacagggcttctcaagctgctccttaccacgctgctctggtttcatacaagatggcagagggacacatcaccgccacgcggcgccttcctgtcccccccagca

SEQ ID NO: 7128 - DNA, 600 bp, Chicken  19866894191834_2
tgtccccagtccagtcaagcctgggccccatagcccacagggagggggattcctcctttgcttctagaggccgtgcttggctctccagcactgccacgctggggctctcggtggggtggagcaccaattctgcatcgctcaagcggagcgtagaaacgcacggctcctgttgctgcacagctcctgttgctgcatggcccgtggaagctttgagcctaaagcaagaggaggatcctggaggagcagcgagmggtgctgtgggatgctcagtgtggggacgggacagaaaagccccccacrataacagtgagaggtgaacaccgcacgctgccatccctggcacatgggtctcttcggcacagcctgcagaggactcaaccacaccacatcccgggctcctggtggccctttttactcacaatttccagctgactgcaaattctgctctcacagggcttctcaagctgctccttaccacgctgctctggtttcatacaagatggcagagggacacatcaccgccacgcggcgccttcctgtcccccccagcacaggggctcggctgggacctccccttgctgccaacaccccacatccaga

SEQ ID NO: 7129 - DNA, 600 bp, Chicken  19866894191845_1
gcgaggcaaggctaggctacgcgaggcgtagcgtggcgaggcgagttgagtcaaggcgaggcgaggcgaggtgaggcggggcgtggcaatgtaagtcgaggcggggtggggcgaggtgaggtgaggcaaaggcgagacaacgcaaagcaaggcggggtgaggcggggcgtagcgtggcgatgcgagttgaggcgaggcaaaggcaaggctaaggcgaggtgaggcgaggggaggcaagacgaggtgataggtggcgaggaaaggcaaaggtgaagcaaggtgttgacaagtgagggaaargcraggygaggcaagccgaggcgaggcgaggcaaggcaaaggcaaggcgaggcgtggcaaggtgagccaaaggcgaagcgaggcgaggtgaggtgaggcggggcgagaygaggaagggcgtgacaaggacaggcgaggcaaaggcaaggcgaggtgaggcggggcaaggctaggcgtggcagggtgaggcggggcgaggtggggcgaggcaaggcgaggcgaggcggggcgaagcggcgcggggcgagacggggtgaggttggatgaggcggggccaggcggggcgaggcggggcgaaac

SEQ ID NO: 7130 - DNA, 600 bp, Chicken  19866894191845_2
aggcaaggctaggctacgcgaggcgtagcgtggcgaggcgagttgagtcaaggcgaggcgaggcgaggtgaggcggggcgtggcaatgtaagtcgaggcggggtggggcgaggtgaggtgaggcaaaggcgagacaacgcaaagcaaggcggggtgaggcggggcgtagcgtggcgatgcgagttgaggcgaggcaaaggcaaggctaaggcgaggtgaggcgaggggaggcaagacgaggtgataggtggcgaggaaaggcaaaggtgaagcaaggtgttgacaagtgagggaaargcraggygaggcaagccgaggcgaggcgaggcaaggcaaaggcaaggcgaggcgtggcaaggtgagccaaaggcgaagcgaggcgaggtgaggtgaggcggggcgagaygaggaagggcgtgacaaggacaggcgaggcaaaggcaaggcgaggtgaggcggggcaaggctaggcgtggcagggtgaggcggggcgaggtggggcgaggcaaggcgaggcgaggcggggcgaagcggcgcggggcgagacggggtgaggttggatgaggcggggccaggcggggcgaggcggggcgaaacggg

SEQ ID NO: 7131 - DNA, 600 bp, Chicken  19866894191845_3
aaggctaggctacgcgaggcgtagcgtggcgaggcgagttgagtcaaggcgaggcgaggcgaggtgaggcggggcgtggcaatgtaagtcgaggcggggtggggcgaggtgaggtgaggcaaaggcgagacaacgcaaagcaaggcggggtgaggcggggcgtagcgtggcgatgcgagttgaggcgaggcaaaggcaaggctaaggcgaggtgaggcgaggggaggcaagacgaggtgataggtggcgaggaaaggcaaaggtgaagcaaggtgttgacaagtgagggaaargcraggygaggcaagccgaggcgaggcgaggcaaggcaaaggcaaggcgaggcgtggcaaggtgagccaaaggcgaagcgaggcgaggtgaggtgaggcggggcgagaygaggaagggcgtgacaaggacaggcgaggcaaaggcaaggcgaggtgaggcggggcaaggctaggcgtggcagggtgaggcggggcgaggtggggcgaggcaaggcgaggcgaggcggggcgaagcggcgcggggcgagacggggtgaggttggatgaggcggggccaggcggggcgaggcggggcgaaacgggacga

SEQ ID NO: 7132 - DNA, 534 bp, Chicken  19866894191845_4
ggcgaggtgaggtgaggcaaaggcgagacaacgcaaagcaaggcggggtgaggcggggcgtagcgtggcgatgcgagttgaggcgaggcaaaggcaaggctaaggcgaggtgaggcgaggggaggcaagacgaggtgataggtggcgaggaaaggcaaaggtgaagcaaggtgttgacaagtgagggaaargcraggygaggcaagccgaggcgaggcgaggcaaggcaaaggcaaggcgaggcgtggcaaggtgagccaaaggcgaagcgaggcgaggtgaggtgaggcggggcgagaygaggaagggcgtgacaaggacaggcgaggcaaaggcaaggcgaggtgaggcggggcaaggctaggcgtggcagggtgaggcggggcgaggtggggcgaggcaaggcgaggcgaggcggggcgaagcggcgcggggcgagacggggtgaggttggatgaggcggggccaggcggggcgaggcggggcgaaacgggacgaggtggggcgaggcacggcaggcgaggggaagcgagg

SEQ ID NO: 7133 - DNA, 546 bp, Chicken  19866894191851_1
ttaggactgaacaataatcatataatatctgcatttccctctacatgacatgtagtacatctcacttaacggttttagtcagtgctttcatactgattgatatacaccagccaattaagcctgctccccacttaaaagcaattagtgccacttcccaacacaagacccacatcccagggcagggagaagtactcctttgaaccttgcagcttcagaagcatttgtgataaagacaaaagttccatacaggaaaattgtgtgtaattgatactatcctccaaaacctactgaatctgcatmctcctgcttcctgtatttcctaccacattttctaaccacagctattaataggacaagggggaagggttttaaactaaaataaaggagatcaagattggatgtcagggggaaatttttcaccgaggctgtggtcagacccttgcagaraytgctgaaagaagctgtggtgccccatccctggaggtgctcatggcygggttggatggggccctgggcagctgagctggtggggggcagccctgctca

SEQ ID NO: 7134 - DNA, 399 bp, Chicken  19866894191851_2
ccacttcccaacacaagacccacatcccagggcagggagaagtactcctttgaaccttgcagcttcagaagcatttgtgataaagacaaaagttccatacaggaaaattgtgtgtaattgatactatcctccaaaacctactgaatctgcatmctcctgcttcctgtatttcctaccacattttctaaccacagctattaataggacaagggggaagggttttaaactaaaataaaggagatcaagattggatgtcagggggaaatttttcaccgaggctgtggtcagacccttgcagaraytgctgaaagaagctgtggtgccccatccctggaggtgctcatggcygggttggatggggccctgggcagctgagctggtggggggcagccctgctca

SEQ ID NO: 7135 - DNA, 397 bp, Chicken  19866894191851_3
acttcccaacacaagacccacatcccagggcagggagaagtactcctttgaaccttgcagcttcagaagcatttgtgataaagacaaaagttccatacaggaaaattgtgtgtaattgatactatcctccaaaacctactgaatctgcatmctcctgcttcctgtatttcctaccacattttctaaccacagctattaataggacaagggggaagggttttaaactaaaataaaggagatcaagattggatgtcagggggaaatttttcaccgaggctgtggtcagacccttgcagaraytgctgaaagaagctgtggtgccccatccctggaggtgctcatggcygggttggatggggccctgggcagctgagctggtggggggcagccctgctca

SEQ ID NO: 7136 - DNA, 351 bp, Chicken  19866894191851_4
tttgaaccttgcagcttcagaagcatttgtgataaagacaaaagttccatacaggaaaattgtgtgtaattgatactatcctccaaaacctactgaatctgcatmctcctgcttcctgtatttcctaccacattttctaaccacagctattaataggacaagggggaagggttttaaactaaaataaaggagatcaagattggatgtcagggggaaatttttcaccgaggctgtggtcagacccttgcagaraytgctgaaagaagctgtggtgccccatccctggaggtgctcatggcygggttggatggggccctgggcagctgagctggtggggggcagccctgctca

SEQ ID NO: 7137 - DNA, 600 bp, Chicken  19866894191853_1
gagcatttctgcttgcatgggagggggagaagagggaaaaaaaaaaaaggcaattttcagtctttctcaaggtaaacacttaagcatgctgtgtaatgagttgtctttcctttatgtggtgtatctttcttttgggtccattttaatgcttgaataaagcattacaagagtctaatcccctatttcctctaagataaacacatttccaatgcactgttttgtttttgttttatttgatgaagaggactgcctgctgtctgcatttgtgttgctgtagaacttggcccttggaaggtgcartgttagcggtctctcttattcttccagacactgtttgaatatgatggctatgtgtactgcatgttgttcagattctaagatatytacttcttcctgcaaatttttaatatcattggtgatgcagtccttgataaagtttgcagaaccaaatgactttgcacctgtgctgartataagggagcagaacacaagagtgagtgaggcyctccaattttacctcctactacctggtttttcttttctttttttaaatatgcatggccttccctcacatttgagtgggcttgatttgttggtttt

SEQ ID NO: 7138 - DNA, 600 bp, Chicken  19866894191853_2
catgctgtgtaatgagttgtctttcctttatgtggtgtatctttcttttgggtccattttaatgcttgaataaagcattacaagagtctaatcccctatttcctctaagataaacacatttccaatgcactgttttgtttttgttttatttgatgaagaggactgcctgctgtctgcatttgtgttgctgtagaacttggcccttggaaggtgcartgttagcggtctctcttattcttccagacactgtttgaatatgatggctatgtgtactgcatgttgttcagattctaagatatytacttcttcctgcaaatttttaatatcattggtgatgcagtccttgataaagtttgcagaaccaaatgactttgcacctgtgctgartataagggagcagaacacaagagtgagtgaggcyctccaattttacctcctactacctggtttttcttttctttttttaaatatgcatggccttccctcacatttgagtgggcttgatttgttggttttggatcttaaagataactcaagcgctgtacgaactgtacagaacgagctcaacttccagtggtcatgtctgccttctgccacacc

SEQ ID NO: 7139 - DNA, 600 bp, Chicken  19866894191853_3
ctaatcccctatttcctctaagataaacacatttccaatgcactgttttgtttttgttttatttgatgaagaggactgcctgctgtctgcatttgtgttgctgtagaacttggcccttggaaggtgcartgttagcggtctctcttattcttccagacactgtttgaatatgatggctatgtgtactgcatgttgttcagattctaagatatytacttcttcctgcaaatttttaatatcattggtgatgcagtccttgataaagtttgcagaaccaaatgactttgcacctgtgctgartataagggagcagaacacaagagtgagtgaggcyctccaattttacctcctactacctggtttttcttttctttttttaaatatgcatggccttccctcacatttgagtgggcttgatttgttggttttggatcttaaagataactcaagcgctgtacgaactgtacagaacgagctcaacttccagtggtcatgtctgccttctgccacacctcccccttctgttagcagaggtacagagccacgtattttcttgtatatacaagactgactcacatgaagattttgacactgctgtga

SEQ ID NO: 7140 - DNA, 588 bp, Chicken  19866894191853_4
ccaatgcactgttttgtttttgttttatttgatgaagaggactgcctgctgtctgcatttgtgttgctgtagaacttggcccttggaaggtgcartgttagcggtctctcttattcttccagacactgtttgaatatgatggctatgtgtactgcatgttgttcagattctaagatatytacttcttcctgcaaatttttaatatcattggtgatgcagtccttgataaagtttgcagaaccaaatgactttgcacctgtgctgartataagggagcagaacacaagagtgagtgaggcyctccaattttacctcctactacctggtttttcttttctttttttaaatatgcatggccttccctcacatttgagtgggcttgatttgttggttttggatcttaaagataactcaagcgctgtacgaactgtacagaacgagctcaacttccagtggtcatgtctgccttctgccacacctcccccttctgttagcagaggtacagagccacgtattttcttgtatatacaagactgactcacatgaagattttgacactgctgtgaatttacagagttccatagggat

SEQ ID NO: 7141 - DNA, 600 bp, Chicken  19866894191854_1
gggttattacttgtgcattgtgttctgcttttagaggcagagtagagtgctactatctatcctcatctggtaagataaaagcaataaggataaaaaaagaggaagaactggggaaagaaaaggagtaagcattatcttctagttataatacgcttaaaactaaagtcacatgcagtctctggagctgctgtggtgttggtttgaacggatgacaggatgatagatagggctctgattcaccatcacagaatggtttatttaattaagctgcaaattaaaccaatcatagataacgcatgkgtggaggggaagaaagcaatcagaacatatctgtaaggaaccctcaaagaaagcaggatggcatcacagcaataagaagcgtttctgaaagaactacaggaggaagagaaaaaaaaaatcacgaccatcagcaggtccaagcagagagcaaggaactaaacctcaggtttgccaaaacaacagttatgatgctttcattactataaagggaatacagatctggcacttcacacagagctgcagaagataagccacacatatcgtgtgaaagcatactgcccacgagctaaagatgaagag

SEQ ID NO: 7142 - DNA, 599 bp, Chicken  19866894191855_1
  misc_feature (1)..(256): n is any nucleotide
nnnnnnnnnnnnnnnnnnnnnnnnnnnnnnnnnnnnnnnnnnnnnnnnnnnnnnnnnnnnnnnnnnnnnnnnnnnnnnnnnnnnnnnnnnnnnnnnnnnnnnnnnnnnnnnnnnnnnnnnnnnnnnnnnnnnnnnnnnnnnnnnnnnnnnnnnnnnnnnnnnnnnnnnnnnnnnnnnnnnnnnnnnnnnnnnnnnnnnnnnnnnnnnnnnnnnnnnnnnnnnnnnnnnnnnnnnnnnnnnnnnnnnnnnnnnnnnntttaacacagataacagcaataccactccctcagcacaatgaasactccaatatgaaacaggaaagaaaaagtgacacatctatagagcaagactaatartaagctcttggttgaaatcttayggcatagtggtctaagcaaattcaaattgacttgcagaccagtctagacattcagagagctagaataggaagtctcagtagaacgatctcacccctctgctcctcactcaacaattcagtctactgatggcgtcataaatgtgtgttaaaaaacaaaaccacagagcaaatatttttctttctccagcatcagtattctcatccattattttttcctgag

SEQ ID NO: 7143 - DNA, 599 bp, Chicken  19866894191855_2
  misc_feature (1)..(200): n is any nucleotide
nnnnnnnnnnnnnnnnnnnnnnnnnnnnnnnnnnnnnnnnnnnnnnnnnnnnnnnnnnnnnnnnnnnnnnnnnnnnnnnnnnnnnnnnnnnnnnnnnnnnnnnnnnnnnnnnnnnnnnnnnnnnnnnnnnnnnnnnnnnnnnnnnnnnnnnnnnnnnnnnnnnnnnnnnnnnnnnnnnnnnnnnnnnnnnnnnnnnnnnntttaacacagataacagcaataccactccctcagcacaatgaasactccaatatgaaacaggaaagaaaaagtgacacatctatagagcaagactaatartaagctcttggttgaaatcttayggcatagtggtctaagcaaattcaaattgacttgcagaccagtctagacattcagagagctagaataggaagtctcagtagaacgatctcacccctctgctcctcactcaacaattcagtctactgatggcgtcataaatgtgtgttaaaaaacaaaaccacagagcaaatatttttctttctccagcatcagtattctcatccattattttttcctgagaatataatcagtatttctttggtgtaacacaaattttagtaccaagaaaggaccct

SEQ ID NO: 7144 - DNA, 599 bp, Chicken  19866894191855_3
  misc_feature (1)..(177): n is any nucleotide
nnnnnnnnnnnnnnnnnnnnnnnnnnnnnnnnnnnnnnnnnnnnnnnnnnnnnnnnnnnnnnnnnnnnnnnnnnnnnnnnnnnnnnnnnnnnnnnnnnnnnnnnnnnnnnnnnnnnnnnnnnnnnnnnnnnnnnnnnnnnnnnnnnnnnnnnnnnnnnnnnnnnnnnnnnnnnnnnntttaacacagataacagcaataccactccctcagcacaatgaasactccaatatgaaacaggaaagaaaaagtgacacatctatagagcaagactaatartaagctcttggttgaaatcttayggcatagtggtctaagcaaattcaaattgacttgcagaccagtctagacattcagagagctagaataggaagtctcagtagaacgatctcacccctctgctcctcactcaacaattcagtctactgatggcgtcataaatgtgtgttaaaaaacaaaaccacagagcaaatatttttctttctccagcatcagtattctcatccattattttttcctgagaatataatcagtatttctttggtgtaacacaaattttagtaccaagaaaggaccctttgctattctagtcagcttacct

SEQ ID NO: 7145 - DNA, 600 bp, Chicken  19866894191867_1
agttttgcttgcttgcttagttctacaaaatctttttgacccaagtgagctgcatgtgaccctacaaagatagaggggaggagtaggggaggatgaggtgcaggagctgctgcccttgcctgaatgcagctctcaggtctgtttgcttatgctctagcagcatattcttcagccctaagtgagcagtttcataactgggagcactggttcttttcttcctcagctgcctggtgctctaaccagcgcgtggggcttgtcccctgcttgcctccaggggtgtgctgcaggccaagggagctytccctctgcctgctctcaggtacatggtttcctttttgaaaagcagcttagctgcaaaccaaataatgtaggaaacgttggttggattcctgccagatgtctgatgtaatgatacgaagcagcagcacagccctgcgactgctggaaaaggcagcgcctgcaagggaggagagggtggaggtttgtgcttgaaaatgaaaaggtgatccatgctaaatcactcaatattgagttcccttatgttgccttttactacactatttgtgtcccctattggcatcactcttgcatttctgaaga

SEQ ID NO: 7146 - DNA, 600 bp, Chicken  19866894191867_2
ttggattcctgccagatgtctgatgtaatgatacgaagcagcagcacagccctgcgactgctggaaaaggcagcgcctgcaagggaggagagggtggaggtttgtgcttgaaaatgaaaaggtgatccatgctaaatcactcaatattgagttcccttatgttgccttttactacactatttgtgtcccctattggcatcactcttgcatttctgaagagctaaccatcccttacttccctgtgttgcccttctgttaccagctcttatgaggcgtttcaggtgacaggcaggcagtgtyccctcagcacatgggctgcagggtgctgaggagcagctctgggagtccttggccaaagagtaccccacagcagcaatgaaggcacacggtccctcttacagccacgtttacttggactgatttctggtattcatccctgtagggcacacctaggcagggattaatctgcctggcttattggtgtgtgttttctcagcacctaaatcatcacacagttgratactagcatgaagttccctctaaaggggcctccttttgatgcaccttgctaatttcatgccttgtgcgtggaggtgattt

SEQ ID NO: 7147 - DNA, 600 bp, Chicken  19866894191867_3
gctaaccatcccttacttccctgtgttgcccttctgttaccagctcttatgaggcgtttcaggtgacaggcaggcagtgtyccctcagcacatgggctgcagggtgctgaggagcagctctgggagtccttggccaaagagtaccccacagcagcaatgaaggcacacggtccctcttacagccacgtttacttggactgatttctggtattcatccctgtagggcacacctaggcagggattaatctgcctggcttattggtgtgtgttttctcagcacctaaatcatcacacagttgratactagcatgaagttccctctaaaggggcctccttttgatgcaccttgctaatttcatgccttgtgcgtggaggtgatttcttctggaaggttttgctgctttgtgtggtggtggagagagcctctggtgagatcgttggtgagagtgctgcacacaccatggtgatggcacaccattacacccccatatatttaggtttcaattccagactagcttcccacatctgtggagctaccaggtgcartatcastgatgttttccccagctggaagcctgttgatgtttgcagctgtgttct

SEQ ID NO: 7148 - DNA, 600 bp, Chicken  19866894191867_4
ctgcctggcttattggtgtgtgttttctcagcacctaaatcatcacacagttgratactagcatgaagttccctctaaaggggcctccttttgatgcaccttgctaatttcatgccttgtgcgtggaggtgatttcttctggaaggttttgctgctttgtgtggtggtggagagagcctctggtgagatcgttggtgagagtgctgcacacaccatggtgatggcacaccattacacccccatatatttaggtttcaattccagactagcttcccacatctgtggagctaccaggtgcartatcastgatgttttccccagctggaagcctgttgatgtttgcagctgtgttctggacatggtactatccattggggcacaatgctgcttcagagtgctggcgagcatcatcccaggtctctgatttgcttgattgcagaggctgagatcctcagcctgaccagcagcatctgaaagtcttcttgagagacatgagccttggcagaggtttgtatccttctaatccaaagcaaccaagagaagattgttctgctcatttgtactcatctttttgaggtgctgtgagctttggtgggtcag

SEQ ID NO: 7149 - DNA, 600 bp, Chicken  19866894191867_5
ggcttattggtgtgtgttttctcagcacctaaatcatcacacagttgratactagcatgaagttccctctaaaggggcctccttttgatgcaccttgctaatttcatgccttgtgcgtggaggtgatttcttctggaaggttttgctgctttgtgtggtggtggagagagcctctggtgagatcgttggtgagagtgctgcacacaccatggtgatggcacaccattacacccccatatatttaggtttcaattccagactagcttcccacatctgtggagctaccaggtgcartatcastgatgttttccccagctggaagcctgttgatgtttgcagctgtgttctggacatggtactatccattggggcacaatgctgcttcagagtgctggcgagcatcatcccaggtctctgatttgcttgattgcagaggctgagatcctcagcctgaccagcagcatctgaaagtcttcttgagagacatgagccttggcagaggtttgtatccttctaatccaaagcaaccaagagaagattgttctgctcatttgtactcatctttttgaggtgctgtgagctttggtgggtcagaggaaa

SEQ ID NO: 7150 - DNA, 600 bp, Chicken  19866894191872_1
aatacagtaccacttgcaggcagatgagctcagagtgttccagcaacaacctttgtctttttaatttacatccctacgtgatcctcccacaaaagcatacatgctgtgactttagcatccaaaactttagcagtgttctgaaacctgctatgccctttgatgcagcaatgacagttaatacaaataccctgtgtaatttttctaaagcagaactgggatgtagtcttacaggattcaagttgccctcttaaattgagatagggtgttttggaagcatttggtgttgcctgttttgcccarttttcttccttcagaatctacgtttttgcagacttgcatcttcaaagccctcagttcctttgactctgaaactatgcttgtaaatcaagctgatggctctctctgagctgtgttgtcttttcctctcctacccatctttttaaaggataagaatcacagcttattgccaaaacttttcatcacccaggtaccagatttattccaagggtctgttacatgttcaatacttgcttgtctatcttaccacaacacaggctaatcttcccctccccaagtgacccaggagtttcacattgccac

SEQ ID NO: 7151 - DNA, 600 bp, Chicken  19866894191875_1
tgacaagagaattgtaaacctaaccacaaagtacacagagagattacttcacacatcactgaagtatatcctgtctctggggcaaaaactaacagtggtttaagagcacacagtgatgctgtacaggaatttctttttgatacagttccagcttctagatgtaatttcccactatcaagttcagtgatggtgatggagctaatgttgctgttcctattttaaatgtgccagaaggctctttgatactccaaaatattcttgtgatcttgactgtatcttaaaattgtaggagcctctctycagggggagtaatttctgtagaattcaatggagctaggtgaatatagataaactgagggtctgacctgtgtcaatactgcaggagattactttgtatccctataactgtctaggagaataataacttaaataggcaaatgcttaacttgtggtattttctctgcagcaagtacttctttcaacagacttatttagttgtgagataaagaagcacaaagaacatagctgtgtttttcgtggggtcaaggatgttgtgctgggtaaagatgtggtatttgatgcgctttgggttagaataag

SEQ ID NO: 7152 - DNA, 600 bp, Chicken  19866894191875_2
ttgtatccctataactgtctaggagaataataacttaaataggcaaatgcttaacttgtggtattttctctgcagcaagtacttctttcaacagacttatttagttgtgagataaagaagcacaaagaacatagctgtgtttttcgtggggtcaaggatgttgtgctgggtaaagatgtggtatttgatgcgctttgggttagaataagaggctagagttctgtaggatgcaggatgcagtctgcatttgatgtacagtagtataaccagtaaaagacaaaaagccgtaagagaaaataraaaacctgtcacgacttttaataaaaaatgaatcccacaagaatttcggaatattcatttaatacattccatatgttgtaactgtggcaaaactttttgagccatgagctagcattcccaagtaattctccaaattgaactaactggcagggataattttttttaagtcaacgtaactgtatttataatgtttgacaaactaactgtagtttacttcaggctgctgtatctggtttcttacggtatatttcaccagttcacttgatagctctgttgcagggaactagccaaatctaattt

SEQ ID NO: 7153 - DNA, 599 bp, Chicken  19866894191881_1
  misc_feature (1)..(94): n is any nucleotide
nnnnnnnnnnnnnnnnnnnnnnnnnnnnnnnnnnnnnnnnnnnnnnnnnnnnnnnnnnnnnnnnnnnnnnnnnnnnnnnnnnnnnnnnnnnnnnaaactaacgtgatcatactccaatgtgtctattcttagcagaatgttttaatttgaaacccgttgttattgtttgaaggcctgaaatgcttgcttttctggaatttagttcttgccctacagtgtttctgtgtctcggagttgaaaaagaggcatgttgggagtaaggaggtgctcagctaaaacttgggccttctctgcgaggtrtactcattggcctgcagcaatgagtctctgcctcagtttccctgtgtatagcaagacagtgatgcctacttcaaagatgctttgtaggattaattaatgcttaggaaggcctttgaagatgaagaagmaggatttgaaatatgaaaagtttccatgccccaggtagaaaggttctgtgtgctgactcgagtktggctttttccaaatctcttgagcacctccagatgcttggaggggcttctttcagatggactgtggtggtggacgctttcaggagacaccaagttgcatagcactac

SEQ ID NO: 7154 - DNA, 541 bp, Chicken  19866894191881_10
agttaaaaacaaaacaaaaaacataccaggaggttgagttggctgtttagctgcttggatgttaaagratttgccagtgctgcrtttgaagctggagtgggctgtggggcaggctgctaagtggggtgtaagtagagcgcctgaacgttttcctttctggaagcatcgttctgcaaaccctaggcaggccgggctgtggaatctgcatcattaaaaatgctccccgtcagcagacagcaagataaaattacagctttggaggaaattcggttcttgctcgtaagcacggtgtgacgtctyagtgaggctgagcggcgtgtgggctctgacagtgggaagcgctccgtgcggctcagatgtgtggcttcctagccagccttcctgagtcgtcctggcactgtgagtaattgctttgagcgcgttccctgatttagtgctagggtgagctgcatctggcactgctgtagctgcgcttacctttaaaaatagaagggcatactttgctggaaatgctggatgtgggagtaaagagagcaaaacg

SEQ ID NO: 7155 - DNA, 600 bp, Chicken  19866894191881_2
ttagcagaatgttttaatttgaaacccgttgttattgtttgaaggcctgaaatgcttgcttttctggaatttagttcttgccctacagtgtttctgtgtctcggagttgaaaaagaggcatgttgggagtaaggaggtgctcagctaaaacttgggccttctctgcgaggtrtactcattggcctgcagcaatgagtctctgcctcagtttccctgtgtatagcaagacagtgatgcctacttcaaagatgctttgtaggattaattaatgcttaggaaggcctttgaagatgaagaagmaggatttgaaatatgaaaagtttccatgccccaggtagaaaggttctgtgtgctgactcgagtktggctttttccaaatctcttgagcacctccagatgcttggaggggcttctttcagatggactgtggtggtggacgctttcaggagacaccaagttgcatagcactacctccagaggttagttacttggaggaaaggaggaaaggtgatatcccacggcctcagcagtatgtacaggtagcaggcttgtcctgaaaaaggggccactgcagcattttccagttattcttccctaggg

SEQ ID NO: 7156 - DNA, 600 bp, Chicken  19866894191881_3
tggaatttagttcttgccctacagtgtttctgtgtctcggagttgaaaaagaggcatgttgggagtaaggaggtgctcagctaaaacttgggccttctctgcgaggtrtactcattggcctgcagcaatgagtctctgcctcagtttccctgtgtatagcaagacagtgatgcctacttcaaagatgctttgtaggattaattaatgcttaggaaggcctttgaagatgaagaagmaggatttgaaatatgaaaagtttccatgccccaggtagaaaggttctgtgtgctgactcgagtktggctttttccaaatctcttgagcacctccagatgcttggaggggcttctttcagatggactgtggtggtggacgctttcaggagacaccaagttgcatagcactacctccagaggttagttacttggaggaaaggaggaaaggtgatatcccacggcctcagcagtatgtacaggtagcaggcttgtcctgaaaaaggggccactgcagcattttccagttattcttccctagggcaagcttctgtcctttcctatgtttgataaaccagtccattgatgagccctstatgaaatgatt

SEQ ID NO: 7157 - DNA, 600 bp, Chicken  19866894191881_4
ctgactcgagtktggctttttccaaatctcttgagcacctccagatgcttggaggggcttctttcagatggactgtggtggtggacgctttcaggagacaccaagttgcatagcactacctccagaggttagttacttggaggaaaggaggaaaggtgatatcccacggcctcagcagtatgtacaggtagcaggcttgtcctgaaaaaggggccactgcagcattttccagttattcttccctagggcaagcttctgtcctttcctatgtttgataaaccagtccattgatgagccctstatgaaatgatttakggtaatcatagcactgcgttcttaacctctaacagactggagaagtaatgctgtctttactttccagggatgtgaaagagttgtgatattttaaaatgaggtcttaatttcttggaagacatgtcagttctgtgtgtgatgtgtgcttaggtgtgcaggggaaaaaaagagaacttttaggttgttctgtatcatcttccttttggtatctcctcttttccatacattttgccaattatgtagtgactgcrtgttttataggcaccatcctagcttaaggtgctc

SEQ ID NO: 7158 - DNA, 600 bp, Chicken  19866894191881_5
ctttttccaaatctcttgagcacctccagatgcttggaggggcttctttcagatggactgtggtggtggacgctttcaggagacaccaagttgcatagcactacctccagaggttagttacttggaggaaaggaggaaaggtgatatcccacggcctcagcagtatgtacaggtagcaggcttgtcctgaaaaaggggccactgcagcattttccagttattcttccctagggcaagcttctgtcctttcctatgtttgataaaccagtccattgatgagccctstatgaaatgatttakggtaatcatagcactgcgttcttaacctctaacagactggagaagtaatgctgtctttactttccagggatgtgaaagagttgtgatattttaaaatgaggtcttaatttcttggaagacatgtcagttctgtgtgtgatgtgtgcttaggtgtgcaggggaaaaaaagagaacttttaggttgttctgtatcatcttccttttggtatctcctcttttccatacattttgccaattatgtagtgactgcrtgttttataggcaccatcctagcttaaggtgctctgatgaatgtgaatt

SEQ ID NO: 7159 - DNA, 600 bp, Chicken  19866894191881_6
tatgtttgataaaccagtccattgatgagccctstatgaaatgatttakggtaatcatagcactgcgttcttaacctctaacagactggagaagtaatgctgtctttactttccagggatgtgaaagagttgtgatattttaaaatgaggtcttaatttcttggaagacatgtcagttctgtgtgtgatgtgtgcttaggtgtgcaggggaaaaaaagagaacttttaggttgttctgtatcatcttccttttggtatctcctcttttccatacattttgccaattatgtagtgactgcrtgttttataggcaccatcctagcttaaggtgctctgatgaatgtgaattaagggagaactcggtctggactttatcacacaagaggggaggactttggagcaccatccgtgttgcagtggtaagagtttgagggtgactgtgctaagaacaagctgcaaagtcttaagttttacgcataaggactcttaatttttctgttttaattcaggtttctgtggaggtgcagtcggccttgcagaagtagataaaatgctctggcattgwaatgcacaaatgtcttgagtatattgaggtctaag

SEQ ID NO: 7160 - DNA, 600 bp, Chicken  19866894191881_7
tttccatacattttgccaattatgtagtgactgcrtgttttataggcaccatcctagcttaaggtgctctgatgaatgtgaattaagggagaactcggtctggactttatcacacaagaggggaggactttggagcaccatccgtgttgcagtggtaagagtttgagggtgactgtgctaagaacaagctgcaaagtcttaagttttacgcataaggactcttaatttttctgttttaattcaggtttctgtggaggtgcagtcggccttgcagaagtagataaaatgctctggcattgwaatgcacaaatgtcttgagtatattgaggtctaaggcaggcctgccagtgtttcctgtaggaacatgaaggtttaagtggctcctttcccccagttaaaaacaaaacaaaaaacataccaggaggttgagttggctgtttagctgcttggatgttaaagratttgccagtgctgcrtttgaagctggagtgggctgtggggcaggctgctaagtggggtgtaagtagagcgcctgaacgttttcctttctggaagcatcgttctgcaaaccctaggcaggccgggctgtggaatctgcat

SEQ ID NO: 7161 - DNA, 600 bp, Chicken  19866894191881_8
gtttgagggtgactgtgctaagaacaagctgcaaagtcttaagttttacgcataaggactcttaatttttctgttttaattcaggtttctgtggaggtgcagtcggccttgcagaagtagataaaatgctctggcattgwaatgcacaaatgtcttgagtatattgaggtctaaggcaggcctgccagtgtttcctgtaggaacatgaaggtttaagtggctcctttcccccagttaaaaacaaaacaaaaaacataccaggaggttgagttggctgtttagctgcttggatgttaaagratttgccagtgctgcrtttgaagctggagtgggctgtggggcaggctgctaagtggggtgtaagtagagcgcctgaacgttttcctttctggaagcatcgttctgcaaaccctaggcaggccgggctgtggaatctgcatcattaaaaatgctccccgtcagcagacagcaagataaaattacagctttggaggaaattcggttcttgctcgtaagcacggtgtgacgtctyagtgaggctgagcggcgtgtgggctctgacagtgggaagcgctccgtgcggctcagatgtgtggcttc

SEQ ID NO: 7162 - DNA, 600 bp, Chicken  19866894191881_9
gctaagaacaagctgcaaagtcttaagttttacgcataaggactcttaatttttctgttttaattcaggtttctgtggaggtgcagtcggccttgcagaagtagataaaatgctctggcattgwaatgcacaaatgtcttgagtatattgaggtctaaggcaggcctgccagtgtttcctgtaggaacatgaaggtttaagtggctcctttcccccagttaaaaacaaaacaaaaaacataccaggaggttgagttggctgtttagctgcttggatgttaaagratttgccagtgctgcrtttgaagctggagtgggctgtggggcaggctgctaagtggggtgtaagtagagcgcctgaacgttttcctttctggaagcatcgttctgcaaaccctaggcaggccgggctgtggaatctgcatcattaaaaatgctccccgtcagcagacagcaagataaaattacagctttggaggaaattcggttcttgctcgtaagcacggtgtgacgtctyagtgaggctgagcggcgtgtgggctctgacagtgggaagcgctccgtgcggctcagatgtgtggcttcctagccagccttcctg

SEQ ID NO: 7163 - DNA, 493 bp, Chicken  19866894191882_1
ctggttcctaaaaggcacttggaagatatggtaatggaatgggtggctgctttttcttgcagatcaattagtgtaaatttaatggactgtataaaatggacacatttacaaagctcagcatattcttatggctcctcatgcagcagcagtagccactaagccacttagtactagctacacacttgctggaattgctagcaaagaagtgaaccatcaagcacgattttggcagcctcttacacagcctaactgaattaattctgattataccacctgcagtatttacttgatgaaatacaytcgactaaagctgctgcatgtattagtcttctgaatgcacagctcatcagaacaggatgctcaggttcagtgactggcataggtgagccagcatggcaggtttagggattaatttctttagttgttctcattcattttctctagccttacatacattctgtgcctgaacagtctgaattgttcttgtgaaata

SEQ ID NO: 7164 - DNA, 600 bp, Chicken  19866894191885_1
aacaatgtatgctacactcaacagttctcactcagctctcacttaaactaaataatgggggctaaatttctcattcagagcatcctttaggatttagaaaggacttagcaaagatggtcatacattacatgttaaaagggaagatatctgcaataatctagcaacatagatactgtgaatagttcatagattggaaaaacaaattactacagcagatctcctaaaagattttgtaggagatatttctatatactgtttgcaagcaggatatttgtatatctcctttcatgcaacgatgtwcatgcatgaaaatacacattaaaatgcagatcctttacctgactactatacattggttgcattattttgaaaggtaaaaaaaaataaaatagaaaataaaaaaaaaaggtagttatgaaatacttttataattttctttcacaataacccatgagagggaagaaatgcccactgaaatacaaacccaggttctattcacttaaacaaatctgctataatttgtgttctgcattttgtatatgacgttgacattaggatttattcatcatttgagtaggacactaaaaatatagaatgtta

SEQ ID NO: 7165 - DNA, 600 bp, Chicken  19866894191887_1
ccattttagcatggtaaaatatcaaactaaaaacccaatccttcataatataatcaaactacatgaaatgtaaagtgtaaaaatgcttcaaatacgtgcacatgcatattctatattgctatgagttctaattaaaataaacataaatccttacaatcatctacttcaatgcatttctcttacatcctttgattaatattattgctgtagccaatgctgcatagctgagctcacagtctgcaaagagttgtgaaagttgagttgtcagacagcgtcccaaccaactcttttcccctctcrccatgaaaaaggacaagaactaccatttgaaactcgatgcttgtgcttcagagtctctgaaagctgagtctctgtggtgctttcagcatcttctgtctctcacaaggtcataaagtgacactatactattacttgctctcacttgctatacgtctagtgatagctttttctagcagtccttccccagatacacataaataaaatgtataagcattttcatataagtcaaagcacttgaataatatattggttacttaatactgatattttcatccaaggataacaaaaacaatatggctt

SEQ ID NO: 7166 - DNA, 589 bp, Chicken  19866894191893_1
tagcctgaactggtggaaaggactcagaagaatcatcaagtccagcttctggctccacacatgtcaatgaaaagcctgtctcttagaatgttgtcctaatactccttgaactccatcagcttggggccatgaccaatgccctggggatcctgtgccagtgtctgacaaccttctggtgaagactctttccctaaaccccaaccagaaccctgaccctcccctgatgcagctccgtgccattccctaaggtcttgtcagtgtcaccagagagcagagctcagcactcccctctgctctctstgaggaggtatagccaccatgggggctcacctcagctcctttgctttgggctgaacaaaccaaggaatgtcatccacttcccatacaccttgccctccagacccttctccatctctgtagccctcctttagaagtcaatagttgtctacccttcttatattgtagaccccaaacccacacacagtgttcaaggtaagactacactagaatatggatatcacctgttgtccacagtttatttgattcttagtgcagaaacacaacagggaaaatagaatgatttggaaaa

SEQ ID NO: 7167 - DNA, 600 bp, Chicken  19866894191896_1
cacatgtaaacttaaagcaatgactttcttgctcctggctgcaggcatcatgcaagtccacaacttcaaattgctgacacagtagtctgaaaactgctctgtggaaatatagttttccacaaaaatatatatattagtttttatatttagtttatatatttagcttatgcatgcatatatatgcataatttataataatgctttaataataatactttattattattattaatttatacgattaacaatattttgatataatttatatttaacaattttactttaagttccccacacccyagaacagctaagaattcatcataggcaattcatttcagaagcagctgcttttatgtatggtttctgaatgttgattttatagtcaagtcataatcctggttttagttttggatttaataaggaggaaaatgttttccttgtttctttataaaaaattttccataccatatccgtacaaactttctaaaatggaaatcaagaataggaagaatgtaatgtataaacaaaacaaaagaatctagatgctaccgttaacctgaaaatcagctacttgtctggatactctcctgggaagtatga

SEQ ID NO: 7168 - DNA, 599 bp, Chicken  19866894191907_1
  misc_feature (1)..(147): n is any nucleotide
nnnnnnnnnnnnnnnnnnnnnnnnnnnnnnnnnnnnnnnnnnnnnnnnnnnnnnnnnnnnnnnnnnnnnnnnnnnnnnnnnnnnnnnnnnnnnnnnnnnnnnnnnnnnnnnnnnnnnnnnnnnnnnnnnnnnnnnnnnnnnnnnnnntgggatttggcctgaggagacttcagacaatcctctaatgccactgatattatatataatatctaggttgtgcaatgatgaagcctgacagtatcctctaatcagatgaggagcacaaccctgaagaactcagatgccaatttgctcctctgycagtgcactgccagctttgttttcaggaaaatacttgctaaaacagctcctcagtgcttctagcatacttcatttatccctgtgatgatttgccttttagaacaattagtgaaataaagtaawaacaaaagcttcaaaggttcaaactgtagtgccccagaacaagatgccagtctgtggcctttgggacagttctgcagctagcastgcagctacaaacacaaacagtaagagggaacagatctgcagtaaaaaagctgtacagaatcatcaaatstgttgagaatatgttttccact

SEQ ID NO: 7169 - DNA, 599 bp, Chicken  19866894191907_2
  misc_feature (1)..(24): n is any nucleotide
nnnnnnnnnnnnnnnnnnnnnnnntgggatttggcctgaggagacttcagacaatcctctaatgccactgatattatatataatatctaggttgtgcaatgatgaagcctgacagtatcctctaatcagatgaggagcacaaccctgaagaactcagatgccaatttgctcctctgycagtgcactgccagctttgttttcaggaaaatacttgctaaaacagctcctcagtgcttctagcatacttcatttatccctgtgatgatttgccttttagaacaattagtgaaataaagtaawaacaaaagcttcaaaggttcaaactgtagtgccccagaacaagatgccagtctgtggcctttgggacagttctgcagctagcastgcagctacaaacacaaacagtaagagggaacagatctgcagtaaaaaagctgtacagaatcatcaaatstgttgagaatatgttttccacttaatcaaaggaaatatctaagcaccagcagtattcagaagctacaaattaaytggtatttgtaggcagtgattacgttttcctcttttcttgatattcgtataaatatgtgcgaatgactggt

SEQ ID NO: 7170 - DNA, 600 bp, Chicken  19866894191907_3
atctaggttgtgcaatgatgaagcctgacagtatcctctaatcagatgaggagcacaaccctgaagaactcagatgccaatttgctcctctgycagtgcactgccagctttgttttcaggaaaatacttgctaaaacagctcctcagtgcttctagcatacttcatttatccctgtgatgatttgccttttagaacaattagtgaaataaagtaawaacaaaagcttcaaaggttcaaactgtagtgccccagaacaagatgccagtctgtggcctttgggacagttctgcagctagcastgcagctacaaacacaaacagtaagagggaacagatctgcagtaaaaaagctgtacagaatcatcaaatstgttgagaatatgttttccacttaatcaaaggaaatatctaagcaccagcagtattcagaagctacaaattaaytggtatttgtaggcagtgattacgttttcctcttttcttgatattcgtataaatatgtgcgaatgactggttgcatggctgtgctgtgggtggggcaagtgccatgctcccctcctgaatttgcagatctagctgggaaactgcataagagcaaat

SEQ ID NO: 7171 - DNA, 600 bp, Chicken  19866894191907_4
cagatgccaatttgctcctctgycagtgcactgccagctttgttttcaggaaaatacttgctaaaacagctcctcagtgcttctagcatacttcatttatccctgtgatgatttgccttttagaacaattagtgaaataaagtaawaacaaaagcttcaaaggttcaaactgtagtgccccagaacaagatgccagtctgtggcctttgggacagttctgcagctagcastgcagctacaaacacaaacagtaagagggaacagatctgcagtaaaaaagctgtacagaatcatcaaatstgttgagaatatgttttccacttaatcaaaggaaatatctaagcaccagcagtattcagaagctacaaattaaytggtatttgtaggcagtgattacgttttcctcttttcttgatattcgtataaatatgtgcgaatgactggttgcatggctgtgctgtgggtggggcaagtgccatgctcccctcctgaatttgcagatctagctgggaaactgcataagagcaaatgaatccagggtattacctcattgtgtagagcagagtgccgtcatcctcgaggcgcagaagtttgttcggt

SEQ ID NO: 7172 - DNA, 600 bp, Chicken  19866894191907_5
cagtgcttctagcatacttcatttatccctgtgatgatttgccttttagaacaattagtgaaataaagtaawaacaaaagcttcaaaggttcaaactgtagtgccccagaacaagatgccagtctgtggcctttgggacagttctgcagctagcastgcagctacaaacacaaacagtaagagggaacagatctgcagtaaaaaagctgtacagaatcatcaaatstgttgagaatatgttttccacttaatcaaaggaaatatctaagcaccagcagtattcagaagctacaaattaaytggtatttgtaggcagtgattacgttttcctcttttcttgatattcgtataaatatgtgcgaatgactggttgcatggctgtgctgtgggtggggcaagtgccatgctcccctcctgaatttgcagatctagctgggaaactgcataagagcaaatgaatccagggtattacctcattgtgtagagcagagtgccgtcatcctcgaggcgcagaagtttgttcggtgtcgtcatgttgtgagcaatagacttcttgccattgggaaaaaagtgtctggcgtccagattttgctggcgagc

SEQ ID NO: 7173 - DNA, 600 bp, Chicken  19866894191910_1
cccggtcagatggagtgctctccagtgcagggactctccagccccataccaggaggatggaggtgggagctctggggctttctgtttttaattacagtggttagaagagacccttcctcttctttaaccccactaaatacccacgtaagcatggagacgtgcacaacaaacacggagaacccccacatttccatctcgtgcccattttttttatctttctcaggagatccatttcctgctgatgcacagatctgcttgcatcgcgtggagcccatacatcaactgatcccgagttgtgakgcttctgttgtggcagcgaggctgatgcwgtgttgtgatctggttttggggcyggatgccatccgttggtgwtgggttggggatgggcaccgatgtgccagtgatggggatgatgatgctccagctttggggagtggtggtttccctcccactgccctcgtgccaatctatttccaggctgtatataggggtgcattggggtcaggaatgctgggaagaaacggttaaacctgagggtcgggatgttttcccacaccctgaatggtgggggagcacagaacgcgtattgaatcggaggga

SEQ ID NO: 7174 - DNA, 600 bp, Chicken  19866894191910_2
gggactctccagccccataccaggaggatggaggtgggagctctggggctttctgtttttaattacagtggttagaagagacccttcctcttctttaaccccactaaatacccacgtaagcatggagacgtgcacaacaaacacggagaacccccacatttccatctcgtgcccattttttttatctttctcaggagatccatttcctgctgatgcacagatctgcttgcatcgcgtggagcccatacatcaactgatcccgagttgtgakgcttctgttgtggcagcgaggctgatgcwgtgttgtgatctggttttggggcyggatgccatccgttggtgwtgggttggggatgggcaccgatgtgccagtgatggggatgatgatgctccagctttggggagtggtggtttccctcccactgccctcgtgccaatctatttccaggctgtatataggggtgcattggggtcaggaatgctgggaagaaacggttaaacctgagggtcgggatgttttcccacaccctgaatggtgggggagcacagaacgcgtattgaatcggagggaagtaataatgcttctaattttcctgtgtg

SEQ ID NO: 7175 - DNA, 600 bp, Chicken  19866894191910_3
aggatggaggtgggagctctggggctttctgtttttaattacagtggttagaagagacccttcctcttctttaaccccactaaatacccacgtaagcatggagacgtgcacaacaaacacggagaacccccacatttccatctcgtgcccattttttttatctttctcaggagatccatttcctgctgatgcacagatctgcttgcatcgcgtggagcccatacatcaactgatcccgagttgtgakgcttctgttgtggcagcgaggctgatgcwgtgttgtgatctggttttggggcyggatgccatccgttggtgwtgggttggggatgggcaccgatgtgccagtgatggggatgatgatgctccagctttggggagtggtggtttccctcccactgccctcgtgccaatctatttccaggctgtatataggggtgcattggggtcaggaatgctgggaagaaacggttaaacctgagggtcgggatgttttcccacaccctgaatggtgggggagcacagaacgcgtattgaatcggagggaagtaataatgcttctaattttcctgtgtgatttaataaaaatgtaaattgact

SEQ ID NO: 7176 - DNA, 600 bp, Chicken  19866894191910_4
tggggctttctgtttttaattacagtggttagaagagacccttcctcttctttaaccccactaaatacccacgtaagcatggagacgtgcacaacaaacacggagaacccccacatttccatctcgtgcccattttttttatctttctcaggagatccatttcctgctgatgcacagatctgcttgcatcgcgtggagcccatacatcaactgatcccgagttgtgakgcttctgttgtggcagcgaggctgatgcwgtgttgtgatctggttttggggcyggatgccatccgttggtgwtgggttggggatgggcaccgatgtgccagtgatggggatgatgatgctccagctttggggagtggtggtttccctcccactgccctcgtgccaatctatttccaggctgtatataggggtgcattggggtcaggaatgctgggaagaaacggttaaacctgagggtcgggatgttttcccacaccctgaatggtgggggagcacagaacgcgtattgaatcggagggaagtaataatgcttctaattttcctgtgtgatttaataaaaatgtaaattgacttcgggtggatgactcacta

SEQ ID NO: 7177 - DNA, 600 bp, Chicken  19866894191922_1
tgattcacttgtcttctaatatcacagctgacctgaatagccttttcaattagccttattggtgaagcagatctgatagattttaaataaataaagatctctcttcattggttaaatgctgatattcacagctcatttagtctatctactgagatgcaatgtcaaaaaaacattttctttgtccagtgttggtgaagattttgtggagatgagacagaagggtattgcaggatctttgttttgctttgaaaaagatctaaataagactttaagaaagatgcaacattattttccaataayttaaatgcattaaaagctttttaagaaatgttgaggaaaaaaatagctaatagtgctgagttccctagtgaatttattctgacacctagcaaataatcttaatctctaaaaagtgtatggattttctatgtttagaaatcttctatagctcattgaaaagcatcttttatgcttctgtagctgcgtgattgttcttgtttcggttcctcaaaaccttcactgtgtaagagagactgcctactgtgataaaacttttactatgtgtgggggcacgcatggggaagaaggcctctgagttga

SEQ ID NO: 7178 - DNA, 599 bp, Chicken  19866894191923_1
  misc_feature (1)..(39): n is any nucleotide
nnnnnnnnnnnnnnnnnnnnnnnnnnnnnnnnnnnnnnnggaaaaagcggagggagagttggcagataaaggggagacaagaagatcccggctgctgatgtcctttatgtatacatacatgatttgcggctcctggcttcaaacttgggactggtgggcaatgaataattacgatgaagaattaagtagcttttgtacctttgcaaatatctccatataaaggatgctgcctgagacacgtgttacttaatgatgtcacaactgctaggatttcccaaggctggaggacttctgtccccrtcgacgtagctgtcatagtgttgagtacatctctgttttggagagccacatctataccagggattcaggtgatgagtaactgcattgtgttggattccctttctgtgacccggaggacccagaactgcatccttcacggtatgatgtctttcagccatgtcacattcatgggcttcatgtggagatgatgtggctttgaaccatttgtgccaggaacaggagtgcaaagcaccccgttggcccttcttcagccatcagacgcattaaagacaaggataacccaattacagatcagagag

SEQ ID NO: 7179 - DNA, 600 bp, Chicken  19866894191923_2
agaagggaaaaatttcaaagagcaaaaaaatgggattaaaggcatacatcagcatctatcatcccccacctctccggggatctgtgctcaggagttggccctgtgggtgcttgtggcaccttttactgcagtctgaaggttaacatgaaggtcctttgctctgagctgatgcactgacatcaagaggaaagttgctgaggtacagaagggccccgtgctttgtccagtggtttcctggggtacttcccagttctgttcaagggtgggattttgatccaaagggtttagatcacctggtgytcaaacctgtgcaaaacatggtgggatgagctccactttgaagagytgtgagagtggctcttgtgccaaaaccctatgttggaagagagtagattttatttggaaatactaatgatatatgtctgtgtatgtctgtagatatgtatatgcatataaactacacatatstatcttagtaattcctcaaaaatgtgtcataggagttgcatgagggttatgagtttgggtattttgaaggctctgccttcaaaaggatttggggcatcaaagtggtaacatacccctgagaagaggagggat

SEQ ID NO: 7180 - DNA, 600 bp, Chicken  19866894191923_3
catcagcatctatcatcccccacctctccggggatctgtgctcaggagttggccctgtgggtgcttgtggcaccttttactgcagtctgaaggttaacatgaaggtcctttgctctgagctgatgcactgacatcaagaggaaagttgctgaggtacagaagggccccgtgctttgtccagtggtttcctggggtacttcccagttctgttcaagggtgggattttgatccaaagggtttagatcacctggtgytcaaacctgtgcaaaacatggtgggatgagctccactttgaagagytgtgagagtggctcttgtgccaaaaccctatgttggaagagagtagattttatttggaaatactaatgatatatgtctgtgtatgtctgtagatatgtatatgcatataaactacacatatstatcttagtaattcctcaaaaatgtgtcataggagttgcatgagggttatgagtttgggtattttgaaggctctgccttcaaaaggatttggggcatcaaagtggtaacatacccctgagaagaggagggatatattccagaggaggtctgtgcatccattttccctcatgacagtgt

SEQ ID NO: 7181 - DNA, 600 bp, Chicken  19866894191923_4
atgcactgacatcaagaggaaagttgctgaggtacagaagggccccgtgctttgtccagtggtttcctggggtacttcccagttctgttcaagggtgggattttgatccaaagggtttagatcacctggtgytcaaacctgtgcaaaacatggtgggatgagctccactttgaagagytgtgagagtggctcttgtgccaaaaccctatgttggaagagagtagattttatttggaaatactaatgatatatgtctgtgtatgtctgtagatatgtatatgcatataaactacacatatstatcttagtaattcctcaaaaatgtgtcataggagttgcatgagggttatgagtttgggtattttgaaggctctgccttcaaaaggatttggggcatcaaagtggtaacatacccctgagaagaggagggatatattccagaggaggtctgtgcatccattttccctcatgacagtgtttgtttttttcattgcattctttggttgcatttattcaccagtgaagcttcgctgccatccagggggaggctggctccatggtgagggctggctgccttggggaggaagggagttgttgtta

SEQ ID NO: 7182 - DNA, 561 bp, Chicken  19866894191923_5
ctgccttggggaggaagggagttgttgttattggaagtagggggctccaaggggggactcgatgagaccttttgggagggaatggaaggaattagttgacacaaaggacaattggctgtaatggttctttcagatggttatgttttattgtgtaaatgtatgtttataggcttttttaaaatgcagattaaacacccagcacagtatttaggcactcggaagaaaacatgtcattgcctcaacgaatcactgccccttcttttaagctgctatgttccctcgtgctaaaatgtgtttggktgatgttaaacgtgtgtattgcatagccaaagtcagcgatgctgctggcaaagccaaggcatcgaagagacactctgaaacagcatttctgaattgtctttgaggatacagaccctaaaattgcccatattactgcactcatggctggaagatggagtccaacacacttcgttagagctgaaagcctatctacagtttaattgtatggtagattctgtgagggaaaatacacatttctgttctttctttatagctccaaca

SEQ ID NO: 7183 - DNA, 600 bp, Chicken  19866894191925_1
cccatatactcaccaaagcatttaaataaactcacttaagtatcacttttgttaggaactgttatacaaagtcagcgtgtgacatcatggtgctttataggaaaagcatttagacactaatttcagtagcaaacaactcctcattcaacagtttccattgcaactacaaagccattattgctccatgcagactagcacccaaaaaacctaactacaacagacaaacttgtgtaatacccactgttgcatatcctctacccatggttttctcccttttaatagctgatcctttctggaccraaattgtctaagtgctcaatacagcacacatttgaaatagccagtatgaaatgcacatggtggtgcagcacttacagggttaagtgaacagcagaaaacataggcagtcttccgtggccatcttcatcagggaaacctctaaagcacagcagtgggttcatgtcagcaccttccagagctgcagtggagtgaaggcacactgtgcggacttgtatatggccaggaaagagggaggtgggggaaatggagcaggaaggactgcaggatcataggaaatcctgctgaatggaggatgaattt

SEQ ID NO: 7184 - DNA, 600 bp, Chicken  19866894191925_2
ccaggctatttttccataggactgctcagcacatgcaggactgtgcaaagatcattaaaaagattacaaattattcatgggtctaagtttagaagccaaggatagcaagtgactgcacacaaaataaagggaacttgatcaagagattctcaagcttctgcagtgacaacacgagggaacaaaaagtgaattgaagcccacagcatgcaacaacagctgttagtaatccaagcagcaaaaaggcacaggaatgctcaactgatggcttactaggacatgctccatgttagtcaccttcarttcaagaaaaggcaagcgacaaaaataccaagtgctacagattgggttgtttgtttgattttaaactgaagactgaaggcatcagttttcttcttcaggcatttctgtaatgcaataattgagaatccacctccagacattcacagcacttcagccaaactcaaactttccactgccttccttctatttatgagtcaccagtagagccttcccattgtcctctcagcatcactgaattacacttcccagtcactgaagtgacacacaaatgttttctgcatctttaccatctctagaact

SEQ ID NO: 7185 - DNA, 600 bp, Chicken  19866894191925_3
aaaaataccaagtgctacagattgggttgtttgtttgattttaaactgaagactgaaggcatcagttttcttcttcaggcatttctgtaatgcaataattgagaatccacctccagacattcacagcacttcagccaaactcaaactttccactgccttccttctatttatgagtcaccagtagagccttcccattgtcctctcagcatcactgaattacacttcccagtcactgaagtgacacacaaatgttttctgcatctttaccatctctagaactcttcaaagcatctttctatrctaaagccacagcatttgatctacaaatcagtccarcsaacaaaacctaatcagcttaagagcaaatggaactgaacaagtacagcaggcatacggaggatgtgcttaccttcagctaagcagcacaaacacaagatcagtggtttctgttaaaaatatatgattcttctcagaccaaattgaggttatgtaggtgactggtttggggggcagggagatgaatgcagcacaatggtttcagtccacataggatctacctctacatcctcccttgggtcatttcccatgcatctcccctcc

SEQ ID NO: 7186 - DNA, 600 bp, Chicken  19866894191925_4
gattttaaactgaagactgaaggcatcagttttcttcttcaggcatttctgtaatgcaataattgagaatccacctccagacattcacagcacttcagccaaactcaaactttccactgccttccttctatttatgagtcaccagtagagccttcccattgtcctctcagcatcactgaattacacttcccagtcactgaagtgacacacaaatgttttctgcatctttaccatctctagaactcttcaaagcatctttctatrctaaagccacagcatttgatctacaaatcagtccarcsaacaaaacctaatcagcttaagagcaaatggaactgaacaagtacagcaggcatacggaggatgtgcttaccttcagctaagcagcacaaacacaagatcagtggtttctgttaaaaatatatgattcttctcagaccaaattgaggttatgtaggtgactggtttggggggcagggagatgaatgcagcacaatggtttcagtccacataggatctacctctacatcctcccttgggtcatttcccatgcatctcccctcctcagctctgtttctgaccagttctatcatccagacc

SEQ ID NO: 7187 - DNA, 600 bp, Chicken  19866894191925_5
ttttaaactgaagactgaaggcatcagttttcttcttcaggcatttctgtaatgcaataattgagaatccacctccagacattcacagcacttcagccaaactcaaactttccactgccttccttctatttatgagtcaccagtagagccttcccattgtcctctcagcatcactgaattacacttcccagtcactgaagtgacacacaaatgttttctgcatctttaccatctctagaactcttcaaagcatctttctatrctaaagccacagcatttgatctacaaatcagtccarcsaacaaaacctaatcagcttaagagcaaatggaactgaacaagtacagcaggcatacggaggatgtgcttaccttcagctaagcagcacaaacacaagatcagtggtttctgttaaaaatatatgattcttctcagaccaaattgaggttatgtaggtgactggtttggggggcagggagatgaatgcagcacaatggtttcagtccacataggatctacctctacatcctcccttgggtcatttcccatgcatctcccctcctcagctctgtttctgaccagttctatcatccagacctt

SEQ ID NO: 7188 - DNA, 587 bp, Chicken  19866894191927_1
gtttccaattctcatctcaaggaacctgcgagaggtaatggggagctgcgacgggagatgccaaggggtaagtgcgtgttgctgcagccacttgtgaggtgcaaagacaactaacctcgacttttagcggataaactacaacaaattacgtattaacttctgtatgcaaattacacagctgagagaaaaagctcttccccagaggaaaggaagaagcacttgcattgcttgggtgcagagcatggagcaggagcccatgcacatctgctggagaggaacccggtcctcagcaccagcacrcactgttgccttgatttgctggtaacagttgctgagtgaagaccattttccaactgatgagattktcacaaasaattttagacttcactacccaccacgtttagtttttcatgagagtattttcccaagcctttggaaatgcaggaaggacaagtgccttggagcagaggccctgcacagcagcaggarcagcagcaatctgccttaatgccaggctgatcgactgccaggctcttcctccctctggtacagcagaaccacccaacccaaagcatttataccgtcag

SEQ ID NO: 7189 - DNA, 522 bp, Chicken  19866894191927_2
gggtaagtgcgtgttgctgcagccacttgtgaggtgcaaagacaactaacctcgacttttagcggataaactacaacaaattacgtattaacttctgtatgcaaattacacagctgagagaaaaagctcttccccagaggaaaggaagaagcacttgcattgcttgggtgcagagcatggagcaggagcccatgcacatctgctggagaggaacccggtcctcagcaccagcacrcactgttgccttgatttgctggtaacagttgctgagtgaagaccattttccaactgatgagattktcacaaasaattttagacttcactacccaccacgtttagtttttcatgagagtattttcccaagcctttggaaatgcaggaaggacaagtgccttggagcagaggccctgcacagcagcaggarcagcagcaatctgccttaatgccaggctgatcgactgccaggctcttcctccctctggtacagcagaaccacccaacccaaagcatttataccgtcag

SEQ ID NO: 7190 - DNA, 514 bp, Chicken  19866894191927_3
gcgtgttgctgcagccacttgtgaggtgcaaagacaactaacctcgacttttagcggataaactacaacaaattacgtattaacttctgtatgcaaattacacagctgagagaaaaagctcttccccagaggaaaggaagaagcacttgcattgcttgggtgcagagcatggagcaggagcccatgcacatctgctggagaggaacccggtcctcagcaccagcacrcactgttgccttgatttgctggtaacagttgctgagtgaagaccattttccaactgatgagattktcacaaasaattttagacttcactacccaccacgtttagtttttcatgagagtattttcccaagcctttggaaatgcaggaaggacaagtgccttggagcagaggccctgcacagcagcaggarcagcagcaatctgccttaatgccaggctgatcgactgccaggctcttcctccctctggtacagcagaaccacccaacccaaagcatttataccgtcag

SEQ ID NO: 7191 - DNA, 398 bp, Chicken  19866894191927_4
agctcttccccagaggaaaggaagaagcacttgcattgcttgggtgcagagcatggagcaggagcccatgcacatctgctggagaggaacccggtcctcagcaccagcacrcactgttgccttgatttgctggtaacagttgctgagtgaagaccattttccaactgatgagattktcacaaasaattttagacttcactacccaccacgtttagtttttcatgagagtattttcccaagcctttggaaatgcaggaaggacaagtgccttggagcagaggccctgcacagcagcaggarcagcagcaatctgccttaatgccaggctgatcgactgccaggctcttcctccctctggtacagcagaaccacccaacccaaagcatttataccgtcag

SEQ ID NO: 7192 - DNA, 600 bp, Chicken  19866894191944_1
cgtcgctgtcaccaaagctgaaacacactacccaccacatcagtgtgatcacatccactgtttggtcactgtaaacatttagcaagtgctgatgaatgtcagtgggtgccattttttccatctggaggaattcagtgtcacacctttgcttcatctgcacttccatgtcagacagcattttgttagggtgctgccatctgtcagacttgactgtaaatgcataaatgtttatgtgtccagatcaatggaagctgaggatttggtgtaccttgtcacacttgagaagtcttgttgatgcaratattcaagatactagtgttatgaacttgagatacaggtatctgttacttgaaaaagttgcagatgggtaaaatgtaaatgtctgtcccagtgagggatttaagatttgaactcctctctgtcccaagaacacctggaagcttaactggaaaaccagcttgggagagaatcttaatttgaaggaacaatcatggggagtgtattgaaagctaaaactatccttttctatccgatgaatagttttcctcttggcattttgatggcatgtgaaattagcaagcatgcattatagtggtgagt

SEQ ID NO: 7193 - DNA, 600 bp, Chicken  19866894191951_1
cacagcacctaaatgatcgtatctgtgatgtaacctggagttccaggctgagcacaatgttgtattaattgcttgagacagaaatcaaatatttcagagggtacatacaagggtagagaggaattatctgcagtgctacaagggaacataactgggaggagtgacacagatcaagagaaactctgagtccatattagtgaaaagcttcctaatgcaacaactggttttgcatcccagagcactttggtaaactccttagtcgtgacacgtaaaatctgaatggcaacatctcattgtgcrtgcacagtgggacacctctgcaccaactctttgtcctaatatgtttttgttcatcttaatacgaggagtttatgatttcaacaaccagagctggtataaatcactgcagctttatgaacttcagcttcaccagsagaacgtcaagccttagatgtgtaactgcatttctgatcmgctggaagatgtggacgcaattgccccatyactgctgaacatgaggctcctcatgcagaccaccagttcactgtatactttgmtsttctgagcataacacaagaatccctcaggacaggctgagag

SEQ ID NO: 7194 - DNA, 600 bp, Chicken  19866894191951_2
gctacaagggaacataactgggaggagtgacacagatcaagagaaactctgagtccatattagtgaaaagcttcctaatgcaacaactggttttgcatcccagagcactttggtaaactccttagtcgtgacacgtaaaatctgaatggcaacatctcattgtgcrtgcacagtgggacacctctgcaccaactctttgtcctaatatgtttttgttcatcttaatacgaggagtttatgatttcaacaaccagagctggtataaatcactgcagctttatgaacttcagcttcaccagsagaacgtcaagccttagatgtgtaactgcatttctgatcmgctggaagatgtggacgcaattgccccatyactgctgaacatgaggctcctcatgcagaccaccagttcactgtatactttgmtsttctgagcataacacaagaatccctcaggacaggctgagagctggtgctcttctgcctggagaagagaaggccgtgaggcgatctcatagtggcctttcagtatctaaaggggagctacaggaaagaagtggacagactctttagcagggtctgttgtgatagaacaagaggaag

SEQ ID NO: 7195 - DNA, 600 bp, Chicken  19866894191951_3
gagaaactctgagtccatattagtgaaaagcttcctaatgcaacaactggttttgcatcccagagcactttggtaaactccttagtcgtgacacgtaaaatctgaatggcaacatctcattgtgcrtgcacagtgggacacctctgcaccaactctttgtcctaatatgtttttgttcatcttaatacgaggagtttatgatttcaacaaccagagctggtataaatcactgcagctttatgaacttcagcttcaccagsagaacgtcaagccttagatgtgtaactgcatttctgatcmgctggaagatgtggacgcaattgccccatyactgctgaacatgaggctcctcatgcagaccaccagttcactgtatactttgmtsttctgagcataacacaagaatccctcaggacaggctgagagctggtgctcttctgcctggagaagagaaggccgtgaggcgatctcatagtggcctttcagtatctaaaggggagctacaggaaagaagtggacagactctttagcagggtctgttgtgatagaacaagaggaagtggcttcaagctcaaagtttaggttggatataaggaaaaa

SEQ ID NO: 7196 - DNA, 600 bp, Chicken  19866894191951_4
cttcctaatgcaacaactggttttgcatcccagagcactttggtaaactccttagtcgtgacacgtaaaatctgaatggcaacatctcattgtgcrtgcacagtgggacacctctgcaccaactctttgtcctaatatgtttttgttcatcttaatacgaggagtttatgatttcaacaaccagagctggtataaatcactgcagctttatgaacttcagcttcaccagsagaacgtcaagccttagatgtgtaactgcatttctgatcmgctggaagatgtggacgcaattgccccatyactgctgaacatgaggctcctcatgcagaccaccagttcactgtatactttgmtsttctgagcataacacaagaatccctcaggacaggctgagagctggtgctcttctgcctggagaagagaaggccgtgaggcgatctcatagtggcctttcagtatctaaaggggagctacaggaaagaagtggacagactctttagcagggtctgttgtgatagaacaagaggaagtggcttcaagctcaaagtttaggttggatataaggaaaaaatcttagagtgagggtggcacagcactgga

SEQ ID NO: 7197 - DNA, 600 bp, Chicken  19866894191951_5
agtcgtgacacgtaaaatctgaatggcaacatctcattgtgcrtgcacagtgggacacctctgcaccaactctttgtcctaatatgtttttgttcatcttaatacgaggagtttatgatttcaacaaccagagctggtataaatcactgcagctttatgaacttcagcttcaccagsagaacgtcaagccttagatgtgtaactgcatttctgatcmgctggaagatgtggacgcaattgccccatyactgctgaacatgaggctcctcatgcagaccaccagttcactgtatactttgmtsttctgagcataacacaagaatccctcaggacaggctgagagctggtgctcttctgcctggagaagagaaggccgtgaggcgatctcatagtggcctttcagtatctaaaggggagctacaggaaagaagtggacagactctttagcagggtctgttgtgatagaacaagaggaagtggcttcaagctcaaagtttaggttggatataaggaaaaaatcttagagtgagggtggcacagcactggaacaggctgtctggtgttgtggttgatgccccrtgcctggagactttcaaggcg

SEQ ID NO: 7198 - DNA, 600 bp, Chicken  19866894191951_6
tcgtgacacgtaaaatctgaatggcaacatctcattgtgcrtgcacagtgggacacctctgcaccaactctttgtcctaatatgtttttgttcatcttaatacgaggagtttatgatttcaacaaccagagctggtataaatcactgcagctttatgaacttcagcttcaccagsagaacgtcaagccttagatgtgtaactgcatttctgatcmgctggaagatgtggacgcaattgccccatyactgctgaacatgaggctcctcatgcagaccaccagttcactgtatactttgmtsttctgagcataacacaagaatccctcaggacaggctgagagctggtgctcttctgcctggagaagagaaggccgtgaggcgatctcatagtggcctttcagtatctaaaggggagctacaggaaagaagtggacagactctttagcagggtctgttgtgatagaacaagaggaagtggcttcaagctcaaagtttaggttggatataaggaaaaaatcttagagtgagggtggcacagcactggaacaggctgtctggtgttgtggttgatgccccrtgcctggagactttcaaggcgag

SEQ ID NO: 7199 - DNA, 407 bp, Chicken  19866894191951_7
ccagttcactgtatactttgmtsttctgagcataacacaagaatccctcaggacaggctgagagctggtgctcttctgcctggagaagagaaggccgtgaggcgatctcatagtggcctttcagtatctaaaggggagctacaggaaagaagtggacagactctttagcagggtctgttgtgatagaacaagaggaagtggcttcaagctcaaagtttaggttggatataaggaaaaaatcttagagtgagggtggcacagcactggaacaggctgtctggtgttgtggttgatgccccrtgcctggagactttcaaggcgaggctggatcaggccctgggcaacctgatctagctgtggtgtccctgttcattgcaggggagatggactagatggccctcagaggt

SEQ ID NO: 7200 - DNA, 600 bp, Chicken  19866894191962_1
ccagcagtaagcatgccatgaagttggcagtctcgtgtactaattgctcactgtagctggagacttgcacccagtgttcttgctgaggaaaaagtcgcatgggaaaactatcagcaggataagtaattaaagattgcatcaggcacatgtctgaaggtgctaatggaatagtttgtgggctgcctttgtcttggcaatttctaatgtgcaacagcttgatcatataatgcatctttgcaagcagccacacaaatcaccctgggatttgctacaaatcagaggaatatccagagagtggtkctgtcattcctaattcagaagtaaccccttctcagcaagctgcagaggtactggctgaggacagaaggaggagacattgtgagtgatgtgtgtttcagtaacatcaattatcttgtctgtcactgtatccctagacwatgctcagctgaaaccatcttccctacatgccgctgctcagctttccattccggtccccacccctttacaccagcgttggttcctctttccagctttaattgatttatttctaatatttatttatctattcattcccatccgtctggtttcaacactgatatc

SEQ ID NO: 7201 - DNA, 600 bp, Chicken  19866894191962_2
atcaggcacatgtctgaaggtgctaatggaatagtttgtgggctgcctttgtcttggcaatttctaatgtgcaacagcttgatcatataatgcatctttgcaagcagccacacaaatcaccctgggatttgctacaaatcagaggaatatccagagagtggtkctgtcattcctaattcagaagtaaccccttctcagcaagctgcagaggtactggctgaggacagaaggaggagacattgtgagtgatgtgtgtttcagtaacatcaattatcttgtctgtcactgtatccctagacwatgctcagctgaaaccatcttccctacatgccgctgctcagctttccattccggtccccacccctttacaccagcgttggttcctctttccagctttaattgatttatttctaatatttatttatctattcattcccatccgtctggtttcaacactgatatctgcctccactctgtcaattttctacctgttagatctggactgctgtccataattctgagtcatggtgcttatgatgtccagttgcaactgaaaagggaaggggagggagaggaagggaagagaaaggaagagaaagt

SEQ ID NO: 7202 - DNA, 377 bp, Chicken  19866894191962_3
atctggactgctgtccataattctgagtcatggtgcttatgatgtccagttgcaactgaaaagggaaggggagggagaggaagggaagagaaaggaagagaaagtggaaaaaaagagaagaggaaaaaaataaacaacaacccaacagtagtttgaaaaatcaaatcataaaagatgaaagattaagctcagtttttacaaattttaagacaacccttacagctgctagaccaagcctgcactatagatctatgtaatattcgggttattctgaacatctacacatttatattagctcamtccagaacagaaatgtgctttgctacacacacacatccctttcagaatgttcttagctacaggggaaagtcaagaaa

SEQ ID NO: 7203 - DNA, 600 bp, Chicken  19866894191968_1
ccagtcacaaaccttactaagaagcttcccacggcatattagcttgcttctcttctttcagaaagagcagttaccagttttgtcttgtcagtgcagtcagtggaaataaatcctggctatttgaggcatctagcatgagtatgaagctgagctgatctaccacttttgtggcttcctaaagcctacgcaagtccaggaatggactccttgggctcgccagtctcgtcttttgtttatgctcaaggaggtgcagtgttattcagatggtttcctaggtgctggctttgaatttttttgtgkgaagaggcttctatttggctgcgtcattatcaatggtagtagatgttggccataaggtagaggaagaaggataaggtgttgtttgtccaacccaagatgagactgatgagatatgtggggcaaaacaggtgagaacccaaaaagtaatgtgttggaacagcacagaaagaaggaaacagagcttccccaggcaaatctgtgagctgctctcactgcaggtgccttggtgtacattttttcccaaaaagttcagaagatagggatggtgttcccatcggtgtggtctggcaagcaaaggta

SEQ ID NO: 7204 - DNA, 600 bp, Chicken  19866894191978_1
tatttctccaagtagaactattaaaagcctagggctggttaaaagagttgagctgcgacagtaccgtaaactcagcgtttccaggcaagacagatctagccaaacagaacactaaaccagctgagagaataaacagcaaaatcaaataagccaattttaaccctgctgaaaaaaaaaaaaggcatgcagtgcctttgagctataagtcatctaccagtgtgaattcggctctgctacatccacttgtgaaaaagcagcaccccaactttgcctggtgaccaaaggcttgggaaggcccargcagagatagcctgattgtgttcttgtcctttttaagggtcactgttcccatcctttgtataagggagagctccaaactcaccagccaactgactgagacaatcatggagaccagataaagcctttctatgtgtccacactctgtaccatctcagggagagcagtgtgctgggactggctgaagctccatcccaaagtatgggagcaggacaggctttctctttttaatttttctatgcaatgcataggaagtgcatgaatcacagacatatgggaacaagttactgtgggtctttaact

SEQ ID NO: 7205 - DNA, 600 bp, Chicken  19866894191990_1
atgaaatccatctagacaaaacaataaagacttgttgagtatttgctccctaaatctccccacgctggggcatacactgaaaagaaaagctcctgtccatcttgagtttatttaaggcacaactgtgttgaaaactgacagtaaagaaagaatatccccactacatgccttacaaatttagctaatggataactggagacatcaccttaggtttcaaactcagaatacctttagactctgagtgtttcactgaagcctgaaaaaaataagacgtatacagattttggaagaatgagtacytttcaatcttctacygaatccttccttccttmtgtgtctccttttcaaaaatctcagtgatggaaatgatacatccttcttcctctacatgatatgggaacacatttttctcaaaaataccaggtgggaagaaatttaatcatcaattaataacatctgcaataactttaaaaaacaaagctacttttctgatcaatttcctaattttcatgttttcattttccagtcagttttactgcttataacaagcaactagtttgtaggattagatttccttgtccaagggtgttagggttcaaa

SEQ ID NO: 7206 - DNA, 600 bp, Chicken  19866894191990_2
acaaaacaataaagacttgttgagtatttgctccctaaatctccccacgctggggcatacactgaaaagaaaagctcctgtccatcttgagtttatttaaggcacaactgtgttgaaaactgacagtaaagaaagaatatccccactacatgccttacaaatttagctaatggataactggagacatcaccttaggtttcaaactcagaatacctttagactctgagtgtttcactgaagcctgaaaaaaataagacgtatacagattttggaagaatgagtacytttcaatcttctacygaatccttccttccttmtgtgtctccttttcaaaaatctcagtgatggaaatgatacatccttcttcctctacatgatatgggaacacatttttctcaaaaataccaggtgggaagaaatttaatcatcaattaataacatctgcaataactttaaaaaacaaagctacttttctgatcaatttcctaattttcatgttttcattttccagtcagttttactgcttataacaagcaactagtttgtaggattagatttccttgtccaagggtgttagggttcaaagtggctatctggaca

SEQ ID NO: 7207 - DNA, 600 bp, Chicken  19866894191990_3
tgttgagtatttgctccctaaatctccccacgctggggcatacactgaaaagaaaagctcctgtccatcttgagtttatttaaggcacaactgtgttgaaaactgacagtaaagaaagaatatccccactacatgccttacaaatttagctaatggataactggagacatcaccttaggtttcaaactcagaatacctttagactctgagtgtttcactgaagcctgaaaaaaataagacgtatacagattttggaagaatgagtacytttcaatcttctacygaatccttccttccttmtgtgtctccttttcaaaaatctcagtgatggaaatgatacatccttcttcctctacatgatatgggaacacatttttctcaaaaataccaggtgggaagaaatttaatcatcaattaataacatctgcaataactttaaaaaacaaagctacttttctgatcaatttcctaattttcatgttttcattttccagtcagttttactgcttataacaagcaactagtttgtaggattagatttccttgtccaagggtgttagggttcaaagtggctatctggacactctaaattctcattca

SEQ ID NO: 7208 - DNA, 600 bp, Chicken  19866894191992_1
atgggtgttctatatagcagggatttggcatccaaatgcaccccaagatgctctgtgccatagtccggctgcggtgctgcattcattatcccacaccacgtagtgctgatgtagttcctgccaatctcagtcagtctgggtgttacagtaacagcgtgggactgtcacagctctcacaggcagtggtttgctgcttgtttggtttgttggttttatttcttatcccacggaagcaaatggtttcctcacggggtatctctttcttttcctgagagcaaaaccccactgcctgagggctcyctgagccccawccccactgcctgagctcctctggaccaggcagagattttggtctggtattggttgcacgctgataaaccacataggggttaaaacaatagcaataaccacgaagccctacaggaaaagaattggagggggatgttcaccagagcttcagctcctgcagggtgaagcaatgcaggacatcagaaaccaaccagaacacaaacccagcagaacagttgacctgagctgccacagtgcagccaatgctgcacggaaacccacccagctcccactgcatccccccagcagggc

SEQ ID NO: 7209 - DNA, 600 bp, Chicken  19866894191992_2
atatagcagggatttggcatccaaatgcaccccaagatgctctgtgccatagtccggctgcggtgctgcattcattatcccacaccacgtagtgctgatgtagttcctgccaatctcagtcagtctgggtgttacagtaacagcgtgggactgtcacagctctcacaggcagtggtttgctgcttgtttggtttgttggttttatttcttatcccacggaagcaaatggtttcctcacggggtatctctttcttttcctgagagcaaaaccccactgcctgagggctcyctgagccccawccccactgcctgagctcctctggaccaggcagagattttggtctggtattggttgcacgctgataaaccacataggggttaaaacaatagcaataaccacgaagccctacaggaaaagaattggagggggatgttcaccagagcttcagctcctgcagggtgaagcaatgcaggacatcagaaaccaaccagaacacaaacccagcagaacagttgacctgagctgccacagtgcagccaatgctgcacggaaacccacccagctcccactgcatccccccagcagggcttccttccaac

SEQ ID NO: 7210 - DNA, 599 bp, Chicken  19866894191993_1
  misc_feature (1)..(175): n is any nucleotide
nnnnnnnnnnnnnnnnnnnnnnnnnnnnnnnnnnnnnnnnnnnnnnnnnnnnnnnnnnnnnnnnnnnnnnnnnnnnnnnnnnnnnnnnnnnnnnnnnnnnnnnnnnnnnnnnnnnnnnnnnnnnnnnnnnnnnnnnnnnnnnnnnnnnnnnnnnnnnnnnnnnnnnnnnnnnnnntggtgttctgccttatgatcccttatgcgtctgttctaaaacctgcaagcacacttttctagtttaaacaaagataatgcactgaattagaagaaaagcttaaaaacaataaaaacaagctcccmaaaaatctactttgacttgatctattttctaaaggaaakggagagtggggaacatttgttgtttgcatccaatggtgcaattatgtctgcctttagcattacataatgcttttcacaaaaaagttacctgccatataaggaggtttactgaaaatggttagtgtgcaatagagcatgtttagtacaacttcaatacttattttccaatgcccgtttcccacctttgtctcaccttcctcagtaaccacatacacatttcattcactgcttacatctgtgctttagaaaaaaattagtat

SEQ ID NO: 7211 - DNA, 599 bp, Chicken  19866894191993_2
  misc_feature (1)..(136): n is any nucleotide
nnnnnnnnnnnnnnnnnnnnnnnnnnnnnnnnnnnnnnnnnnnnnnnnnnnnnnnnnnnnnnnnnnnnnnnnnnnnnnnnnnnnnnnnnnnnnnnnnnnnnnnnnnnnnnnnnnnnnnnnnnnnnnnnnnnnnnnntggtgttctgccttatgatcccttatgcgtctgttctaaaacctgcaagcacacttttctagtttaaacaaagataatgcactgaattagaagaaaagcttaaaaacaataaaaacaagctcccmaaaaatctactttgacttgatctattttctaaaggaaakggagagtggggaacatttgttgtttgcatccaatggtgcaattatgtctgcctttagcattacataatgcttttcacaaaaaagttacctgccatataaggaggtttactgaaaatggttagtgtgcaatagagcatgtttagtacaacttcaatacttattttccaatgcccgtttcccacctttgtctcaccttcctcagtaaccacatacacatttcattcactgcttacatctgtgctttagaaaaaaattagtatcccaaacccaaaattttacatctcaagcccaggtctcat

SEQ ID NO: 7212 - DNA, 600 bp, Chicken  19866894191993_3
gtttagtacaacttcaatacttattttccaatgcccgtttcccacctttgtctcaccttcctcagtaaccacatacacatttcattcactgcttacatctgtgctttagaaaaaaattagtatcccaaacccaaaattttacatctcaagcccaggtctcatgtccactgtttgtttctgagttagtaccagcctacttagttacaggaaaattccagagctgagaaggattatgtccatcagtgagccagaacaagactaggaacaagaaccagctgtaggctaatagtctacatattmcaatcaaaataatttataaaaaacaaacaaaaaaagcagatattttagtctcactgaaaccatgtgaagaattcccactgcctctttaaaataaataacatcataagttatacatggccttctaagcaatgaagttaagagttccaatgcaagaagcccaattcaaaacttacagtccataacaagagatcatgagcccattacctttcttgtgcgtatgtccagaacttctgggcctatttggcataatacttaaggggatraaaaggcaaattcacatacttaaaatattaagggatt

SEQ ID NO: 7213 - DNA, 600 bp, Chicken  19866894191993_4
aacaagaaccagctgtaggctaatagtctacatattmcaatcaaaataatttataaaaaacaaacaaaaaaagcagatattttagtctcactgaaaccatgtgaagaattcccactgcctctttaaaataaataacatcataagttatacatggccttctaagcaatgaagttaagagttccaatgcaagaagcccaattcaaaacttacagtccataacaagagatcatgagcccattacctttcttgtgcgtatgtccagaacttctgggcctatttggcataatacttaaggggatraaaaggcaaattcacatacttaaaatattaagggattcccataacagaattaaacacaacaragtctataacatagttctaaaatgtaacrttgttcctttaggcatggtgtttcaactgaacgttggccagctgcatctaacaagctaaaattgctctgttataacacaagagcgaacaataagcaccactaatcaggaattaggaatagctaggtattagttcaggtaaagatctctcactaaccgaacagtagatgaactcagctccacttgtctctgcagaaggtgtcagaagctt

SEQ ID NO: 7214 - DNA, 600 bp, Chicken  19866894191993_5
aacaaaaaaagcagatattttagtctcactgaaaccatgtgaagaattcccactgcctctttaaaataaataacatcataagttatacatggccttctaagcaatgaagttaagagttccaatgcaagaagcccaattcaaaacttacagtccataacaagagatcatgagcccattacctttcttgtgcgtatgtccagaacttctgggcctatttggcataatacttaaggggatraaaaggcaaattcacatacttaaaatattaagggattcccataacagaattaaacacaacaragtctataacatagttctaaaatgtaacrttgttcctttaggcatggtgtttcaactgaacgttggccagctgcatctaacaagctaaaattgctctgttataacacaagagcgaacaataagcaccactaatcaggaattaggaatagctaggtattagttcaggtaaagatctctcactaaccgaacagtagatgaactcagctccacttgtctctgcagaaggtgtcagaagcttgacaaaattggtgtgcctgaagtttggtaaataactctttgggtaagagactgtggagataa

SEQ ID NO: 7215 - DNA, 600 bp, Chicken  19866894191993_6
tgaaaccatgtgaagaattcccactgcctctttaaaataaataacatcataagttatacatggccttctaagcaatgaagttaagagttccaatgcaagaagcccaattcaaaacttacagtccataacaagagatcatgagcccattacctttcttgtgcgtatgtccagaacttctgggcctatttggcataatacttaaggggatraaaaggcaaattcacatacttaaaatattaagggattcccataacagaattaaacacaacaragtctataacatagttctaaaatgtaacrttgttcctttaggcatggtgtttcaactgaacgttggccagctgcatctaacaagctaaaattgctctgttataacacaagagcgaacaataagcaccactaatcaggaattaggaatagctaggtattagttcaggtaaagatctctcactaaccgaacagtagatgaactcagctccacttgtctctgcagaaggtgtcagaagcttgacaaaattggtgtgcctgaagtttggtaaataactctttgggtaagagactgtggagataagctggtcttttaaaaattgcccaaagctt

SEQ ID NO: 7216 - DNA, 600 bp, Chicken  19866894191997_1
tgcctgtgaaatttactagtacaagcatttccatgtcaagcagaaaaaaatttgtttattctgctaaaaagaatattccttgaattactattggatatgaaatagggtagctattcagactgcacaggataaagatttagactaaaataattggtagaaaagattggttgctacacagcattcttcctcgtcccaccccctaagaaatatcaaatctttctggatttcagcaagcttttaaattctcagatctgtccctacagctgtctagccattacaccttctcatcacagtgggaayrctgcctcctcttccataggatactcactcacagaaaagagaacaaccttttttccctcactcctcttctggtgtccaagatttaattcttcgtgtctatagagcgggaaatccttctgttttcaaaactgcaaccagggaaaaaagaagctttgcaaaaataggccacatgaatccacggcgcttgatgacacacagatttagatatcgagctcaagagacgctctttggaatgagtcgcacccagaaggagtcatttccctatggatacccttgccctttgccagacctcagttaaca

SEQ ID NO: 7217 - DNA, 600 bp, Chicken  19866894191997_2
gcctgtgaaatttactagtacaagcatttccatgtcaagcagaaaaaaatttgtttattctgctaaaaagaatattccttgaattactattggatatgaaatagggtagctattcagactgcacaggataaagatttagactaaaataattggtagaaaagattggttgctacacagcattcttcctcgtcccaccccctaagaaatatcaaatctttctggatttcagcaagcttttaaattctcagatctgtccctacagctgtctagccattacaccttctcatcacagtgggaayrctgcctcctcttccataggatactcactcacagaaaagagaacaaccttttttccctcactcctcttctggtgtccaagatttaattcttcgtgtctatagagcgggaaatccttctgttttcaaaactgcaaccagggaaaaaagaagctttgcaaaaataggccacatgaatccacggcgcttgatgacacacagatttagatatcgagctcaagagacgctctttggaatgagtcgcacccagaaggagtcatttccctatggatacccttgccctttgccagacctcagttaacaa

SEQ ID NO: 7218 - DNA, 599 bp, Chicken  19866894191999_1
  misc_feature (1)..(114): n is any nucleotide
nnnnnnnnnnnnnnnnnnnnnnnnnnnnnnnnnnnnnnnnnnnnnnnnnnnnnnnnnnnnnnnnnnnnnnnnnnnnnnnnnnnnnnnnnnnnnnnnnnnnnnnnnnnnnnnnnnacccgcaaggttctgtaggtcgggaggggagggctgggtgctcagtgtcctttcttacaggcggtgctggtggtggagaaggccttgggtgacctctggatccagctgccctgcatcgaccagctgggcagctgcacctatgatgatgtgtgcaacatcctcgacaacctcatcccacccggcacrccctgcccggagccgctgctcacctacggcatcccctgccactgccccttcaaggcggtacgtcccacaaccggctgccctyggtgctgtggggtcggtgttggctcacgcagcccctctctctgcagggctcctactcactgcccgccagcgacttcgccctgcccgacgtcgagctgccctcctggatgaccaacggcaactaccgtgtgcgagtggtcgtcagcaacaaggggcaggagctcgcctgcgtcaagctgggcttctccttgcagtcccagtgaggggctgggggcgtc

SEQ ID NO: 7219 - DNA, 596 bp, Chicken  19866894191999_2
  misc_feature (1)..(32): n is any nucleotide
nnnnnnnnnnnnnnnnnnnnnnnnnnnnnnnnacccgcaaggttctgtaggtcgggaggggagggctgggtgctcagtgtcctttcttacaggcggtgctggtggtggagaaggccttgggtgacctctggatccagctgccctgcatcgaccagctgggcagctgcacctatgatgatgtgtgcaacatcctcgacaacctcatcccacccggcacrccctgcccggagccgctgctcacctacggcatcccctgccactgccccttcaaggcggtacgtcccacaaccggctgccctyggtgctgtggggtcggtgttggctcacgcagcccctctctctgcagggctcctactcactgcccgccagcgacttcgccctgcccgacgtcgagctgccctcctggatgaccaacggcaactaccgtgtgcgagtggtcgtcagcaacaaggggcaggagctcgcctgcgtcaagctgggcttctccttgcagtcccagtgaggggctgggggcgtccctcctctccccgctgcctttttaattcatctcatcccgtcctaccccatcccaccccatcctcatcccttctccatcc

SEQ ID NO: 7220 - DNA, 600 bp, Chicken  19866894192009_1
aacaaacacttggtaccaaaatttaaagcatgacgtccatagaaatcagaagcacacactgccctcgcctgccagtccctaaggtctctggcctgcagcactgatgtacaaagcatctttaacagagaccagaactgctcatattatgaattatttaggtccatggctcaaattcttgtttattgaccaaagaaatcaagtcaccaatatataatggaaaaagtacttaacaatgtaaactcaggtctagctcctgtgctttgagactagagcccatagcaaatgcaaattggcttagcrttattccctactaggaactctgaggggcttgactgtcaaacacaytggtcagcacggtagaagttgccatctcccccaccaacccctgtgtgatatttctaatgcaaaatttctctaaacagagttttttttatccatttaaaagagaaacagctcttgtgcagaacaggcccatcccagtgctgccatgatcaagcyaggaaaacagccagaggtactctgcagcctcgcagtagattgacacagatcattgacaacatgaaggagagcactgctggctttaaaacactattgcatatt

SEQ ID NO: 7221 - DNA, 600 bp, Chicken  19866894192009_2
tcagaagcacacactgccctcgcctgccagtccctaaggtctctggcctgcagcactgatgtacaaagcatctttaacagagaccagaactgctcatattatgaattatttaggtccatggctcaaattcttgtttattgaccaaagaaatcaagtcaccaatatataatggaaaaagtacttaacaatgtaaactcaggtctagctcctgtgctttgagactagagcccatagcaaatgcaaattggcttagcrttattccctactaggaactctgaggggcttgactgtcaaacacaytggtcagcacggtagaagttgccatctcccccaccaacccctgtgtgatatttctaatgcaaaatttctctaaacagagttttttttatccatttaaaagagaaacagctcttgtgcagaacaggcccatcccagtgctgccatgatcaagcyaggaaaacagccagaggtactctgcagcctcgcagtagattgacacagatcattgacaacatgaaggagagcactgctggctttaaaacactattgcatattaaacaatggttgaatagctgctgtataatggaatcctgcagtact

SEQ ID NO: 7222 - DNA, 600 bp, Chicken  19866894192009_3
agtcaccaatatataatggaaaaagtacttaacaatgtaaactcaggtctagctcctgtgctttgagactagagcccatagcaaatgcaaattggcttagcrttattccctactaggaactctgaggggcttgactgtcaaacacaytggtcagcacggtagaagttgccatctcccccaccaacccctgtgtgatatttctaatgcaaaatttctctaaacagagttttttttatccatttaaaagagaaacagctcttgtgcagaacaggcccatcccagtgctgccatgatcaagcyaggaaaacagccagaggtactctgcagcctcgcagtagattgacacagatcattgacaacatgaaggagagcactgctggctttaaaacactattgcatattaaacaatggttgaatagctgctgtataatggaatcctgcagtactctgaatgccagaagtgtttaactgcttactttaaaggcacctcttctggatgtcttttttttttccccataagaaccagattaaaggaaactaatgtttatgcaggggaagaaaaacaattagacattcatttatagcctgctatctgaaaat

SEQ ID NO: 7223 - DNA, 600 bp, Chicken  19866894192009_4
ctggctttaaaacactattgcatattaaacaatggttgaatagctgctgtataatggaatcctgcagtactctgaatgccagaagtgtttaactgcttactttaaaggcacctcttctggatgtcttttttttttccccataagaaccagattaaaggaaactaatgtttatgcaggggaagaaaaacaattagacattcatttatagcctgctatctgaaaatgcttcatctaaatatttcctattctatgaatttattttccatagcatgactacgaatgaagggaagactgcactgrcactaaggccagaggcagggctctgtggaaaaaggcccctctgtcaacttgtcaactcaagtttaccaaagctggcactgaaagcactgtcctgttttccttctccacaccagatacctataatgacatccttggggatgtttcaaggcaaagcctcctccttgtcagcgccatccttcttaatgaggctgcctctgatgccagctgcagcaggatgacatagaaaaccaagtttgggttagcaacttgactatttaaatgtgtaattgcaataaatacttaactgcactttgttcttct

SEQ ID NO: 7224 - DNA, 600 bp, Chicken  19866894192015_1
tatgatttgtttcttcacattgcttcagagcatttataagtttgcaagacacattgatggatgtgttactctgaaatgttgtcttgaaaagtagcagctgcaaagattgctctggcttttttcactaaatggaagtgaagggactgaattatgttggttaaacagtatttatttattaatgtgccaagagacacttcaaattctgtggtctccatttttttttccatgctttaaaatacaaatatatcttctctgtatttctagaacaatgaagagaagttggaaaggcaaactagtttytgccttttctgaattyggaacccagaaaaatctgtgttttcaaatgtctataaaaagtagaagacaaattcagcctctggctagagcaaagaagttctgctaccatgtgctcactggcatggaaagcaccaaacacatgggtttactagacttttgatggaactagcagtgaaatctactcctgtatatgagcatttatcaagtagatgtgtgctttcagctttataggactagtttgaagcataaaaatgttctagatactgcttgtgctctttgaattttgtctctccgtattttatt

SEQ ID NO: 7225 - DNA, 600 bp, Chicken  19866894192015_2
acattgcttcagagcatttataagtttgcaagacacattgatggatgtgttactctgaaatgttgtcttgaaaagtagcagctgcaaagattgctctggcttttttcactaaatggaagtgaagggactgaattatgttggttaaacagtatttatttattaatgtgccaagagacacttcaaattctgtggtctccatttttttttccatgctttaaaatacaaatatatcttctctgtatttctagaacaatgaagagaagttggaaaggcaaactagtttytgccttttctgaattyggaacccagaaaaatctgtgttttcaaatgtctataaaaagtagaagacaaattcagcctctggctagagcaaagaagttctgctaccatgtgctcactggcatggaaagcaccaaacacatgggtttactagacttttgatggaactagcagtgaaatctactcctgtatatgagcatttatcaagtagatgtgtgctttcagctttataggactagtttgaagcataaaaatgttctagatactgcttgtgctctttgaattttgtctctccgtattttattttcttcctcttttctc

SEQ ID NO: 7226 - DNA, 599 bp, Chicken  19866894192021_1
  misc_feature (1)..(211): n is any nucleotide
nnnnnnnnnnnnnnnnnnnnnnnnnnnnnnnnnnnnnnnnnnnnnnnnnnnnnnnnnnnnnnnnnnnnnnnnnnnnnnnnnnnnnnnnnnnnnnnnnnnnnnnnnnnnnnnnnnnnnnnnnnnnnnnnnnnnnnnnnnnnnnnnnnnnnnnnnnnnnnnnnnnnnnnnnnnnnnnnnnnnnnnnnnnnnnnnnnnnnnnnnnnnnnnnnnnccaaattgtcttttgatttataattcctcttaacattactattagtgtcaaaatttcatctattcctgatttgtttttcttcttctccygggatcctcattaagacagctgaatgtagagaggaaaaggagcacccttttatggatgcagtttacttaacttttacttacttaactgcctttggaacctgcccacgctrtaaggttgcaacagcctcaataaaagttataatcatgaatctcctaaatgaaagctgagytctgrtctcactacagaaacttatatgcacaaaaataaatkttcagttttagagcaattaagaataaccccacttaaccaaaaacactctggaactaaggtgttcagttttaacatgcacaggatgtat

SEQ ID NO: 7227 - DNA, 599 bp, Chicken  19866894192021_2
  misc_feature (1)..(101): n is any nucleotide
nnnnnnnnnnnnnnnnnnnnnnnnnnnnnnnnnnnnnnnnnnnnnnnnnnnnnnnnnnnnnnnnnnnnnnnnnnnnnnnnnnnnnnnnnnnnnnnnnnnnnccaaattgtcttttgatttataattcctcttaacattactattagtgtcaaaatttcatctattcctgatttgtttttcttcttctccygggatcctcattaagacagctgaatgtagagaggaaaaggagcacccttttatggatgcagtttacttaacttttacttacttaactgcctttggaacctgcccacgctrtaaggttgcaacagcctcaataaaagttataatcatgaatctcctaaatgaaagctgagytctgrtctcactacagaaacttatatgcacaaaaataaatkttcagttttagagcaattaagaataaccccacttaaccaaaaacactctggaactaaggtgttcagttttaacatgcacaggatgtatgcatccactgctcatcttcaccaaagaattagcaagatttttctctaaaagatggcccgaagttggtattgacaaagatctgcaggacactttcagatttcacaagcttc

SEQ ID NO: 7228 - DNA, 599 bp, Chicken  19866894192021_3
  misc_feature (1)..(41): n is any nucleotide
nnnnnnnnnnnnnnnnnnnnnnnnnnnnnnnnnnnnnnnnnccaaattgtcttttgatttataattcctcttaacattactattagtgtcaaaatttcatctattcctgatttgtttttcttcttctccygggatcctcattaagacagctgaatgtagagaggaaaaggagcacccttttatggatgcagtttacttaacttttacttacttaactgcctttggaacctgcccacgctrtaaggttgcaacagcctcaataaaagttataatcatgaatctcctaaatgaaagctgagytctgrtctcactacagaaacttatatgcacaaaaataaatkttcagttttagagcaattaagaataaccccacttaaccaaaaacactctggaactaaggtgttcagttttaacatgcacaggatgtatgcatccactgctcatcttcaccaaagaattagcaagatttttctctaaaagatggcccgaagttggtattgacaaagatctgcaggacactttcagatttcacaagcttccataagaactgggaatgctgaggttgctggaatattgatccttagggaagtttagagctt

SEQ ID NO: 7229 - DNA, 599 bp, Chicken  19866894192021_4
  misc_feature (1)..(36): n is any nucleotide
nnnnnnnnnnnnnnnnnnnnnnnnnnnnnnnnnnnnccaaattgtcttttgatttataattcctcttaacattactattagtgtcaaaatttcatctattcctgatttgtttttcttcttctccygggatcctcattaagacagctgaatgtagagaggaaaaggagcacccttttatggatgcagtttacttaacttttacttacttaactgcctttggaacctgcccacgctrtaaggttgcaacagcctcaataaaagttataatcatgaatctcctaaatgaaagctgagytctgrtctcactacagaaacttatatgcacaaaaataaatkttcagttttagagcaattaagaataaccccacttaaccaaaaacactctggaactaaggtgttcagttttaacatgcacaggatgtatgcatccactgctcatcttcaccaaagaattagcaagatttttctctaaaagatggcccgaagttggtattgacaaagatctgcaggacactttcagatttcacaagcttccataagaactgggaatgctgaggttgctggaatattgatccttagggaagtttagagcttttctt

SEQ ID NO: 7230 - DNA, 600 bp, Chicken  19866894192021_5
ccaaattgtcttttgatttataattcctcttaacattactattagtgtcaaaatttcatctattcctgatttgtttttcttcttctccygggatcctcattaagacagctgaatgtagagaggaaaaggagcacccttttatggatgcagtttacttaacttttacttacttaactgcctttggaacctgcccacgctrtaaggttgcaacagcctcaataaaagttataatcatgaatctcctaaatgaaagctgagytctgrtctcactacagaaacttatatgcacaaaaataaatkttcagttttagagcaattaagaataaccccacttaaccaaaaacactctggaactaaggtgttcagttttaacatgcacaggatgtatgcatccactgctcatcttcaccaaagaattagcaagatttttctctaaaagatggcccgaagttggtattgacaaagatctgcaggacactttcagatttcacaagcttccataagaactgggaatgctgaggttgctggaatattgatccttagggaagtttagagcttttctttcaggtagatcattatatcactgtatgcaaatgcagt

SEQ ID NO: 7231 - DNA, 600 bp, Chicken  19866894192023_1
tcttctgtcagaatgtgacacaaaatacctcagtttggttatatttatgtgttacattaaaaaacatctccacctttcttagtcaatacgcagaattaaatggtatagctcctgatttgggtaggaaataggaaagaaaggaaaaactggggaaaaggaagttttcatttcctatggaacacaggaagcgttcataatctgtctatcccctgtcccctaacaacttcaaggctgtttccattctctttagtaattagccttgacccggaaaagatgacctcttctactgctttttttttyttttttctttttyctctcggtgaaagtctcatagtgcacagaatttacctttgtactttccttagccccaggttacgggggatctcaaagtcttaaatgctctccttggacatgtggacttacccatgactgtggatatgtaaaggctttcctggtaacatcagaagccgtaaaattatgaggcaaagtaggcacagatgggggtacacacaaatgacagaaccagtgatgaaatcagtgctatggagctgggttaactcttactggaagttgttatggccatgagtgttagcaatcctt

SEQ ID NO: 7232 - DNA, 600 bp, Chicken  19866894192023_2
tcagaatgtgacacaaaatacctcagtttggttatatttatgtgttacattaaaaaacatctccacctttcttagtcaatacgcagaattaaatggtatagctcctgatttgggtaggaaataggaaagaaaggaaaaactggggaaaaggaagttttcatttcctatggaacacaggaagcgttcataatctgtctatcccctgtcccctaacaacttcaaggctgtttccattctctttagtaattagccttgacccggaaaagatgacctcttctactgctttttttttyttttttytttttyctctcggtgaaagtctcatagtgcacagaatttacctttgtactttccttagccccaggttacgggggatctcaaagtcttaaatgctctccttggacatgtggacttacccatgactgtggatatgtaaaggctttcctggtaacatcagaagccgtaaaattatgaggcaaagtaggcacagatgggggtacacacaaatgacagaaccagtgatgaaatcagtgctatggagctgggttaactcttactggaagttgttatggccatgagtgttagcaatccttaatctct

SEQ ID NO: 7233 - DNA, 600 bp, Chicken  19866894192023_3
tgtgacacaaaatacctcagtttggttatatttatgtgttacattaaaaaacatctccacctttcttagtcaatacgcagaattaaatggtatagctcctgatttgggtaggaaataggaaagaaaggaaaaactggggaaaaggaagttttcatttcctatggaacacaggaagcgttcataatctgtctatcccctgtcccctaacaacttcaaggctgtttccattctctttagtaattagccttgacccggaaaagatgacctcttctactgctttttttttyttttttctttttyctctcggtgaaagtctcatagtgcacagaatttacctttgtactttccttagccccaggttacgggggatctcaaagtcttaaatgctctccttggacatgtggacttacccatgactgtggatatgtaaaggctttcctggtaacatcagaagccgtaaaattatgaggcaaagtaggcacagatgggggtacacacaaatgacagaaccagtgatgaaatcagtgctatggagctgggttaactcttactggaagttgttatggccatgagtgttagcaatccttaatctctttcggg

SEQ ID NO: 7234 - DNA, 600 bp, Chicken  19866894192035_1
gttacttgcagggacaaagaagacatcctgcagccagttgaagttgcccttggtggccgggtcgacacaaatcaagctggccttcaggaaggtggtccacttggaagcagaaagtgaactggttccacctttgtcttcctggagtggaaagaaagaagggagtcagggcttggtagggaacaacacgaagtcctctctgtatggcatcttaggaggataactgggggatgctctggagatacatttgctgctggccacggcaatgcttgtttatctctaacatcccagcaagacaggacrgtgttgtctcccctacaagcaagacgggagcccaagggcaggaaggccaaaggacatggctagagggagccmgaggggccaactcgtgtactgacaataccagatgagctggtacggccatttgtcacctctgtgacactgctgcctccccaacatacactgtccccatggtaccttacagagctgggccactcgggagatgtttctgggtgcctcaggactcttatctggattgtcttcacggaagaagtagtaaatcttgtcctgataaggctcttcatgccttaatgtggggctttg

SEQ ID NO: 7235 - DNA, 570 bp, Chicken  19866894192035_2
caagctggccttcaggaaggtggtccacttggaagcagaaagtgaactggttccacctttgtcttcctggagtggaaagaaagaagggagtcagggcttggtagggaacaacacgaagtcctctctgtatggcatcttaggaggataactgggggatgctctggagatacatttgctgctggccacggcaatgcttgtttatctctaacatcccagcaagacaggacrgtgttgtctcccctacaagcaagacgggagcccaagggcaggaaggccaaaggacatggctagagggagccmgaggggccaactcgtgtactgacaataccagatgagctggtacggccatttgtcacctctgtgacactgctgcctccccaacatacactgtccccatggtaccttacagagctgggccactcgggagatgtttctgggtgcctcaggactcttatctggattgtcttcacggaagaagtagtaaatcttgtcctgataaggctcttcatgccttaatgtggggctttgacaaactgagggtctggaaagcgaagcaagcagtcagaaaac

SEQ ID NO: 7236 - DNA, 600 bp, Chicken  19866894192039_1
gttcaaaactctgctcttttatgactttaaaatctacccaacctttctgtactctaatgtggtacccctcttatattctcagaaaaagagtcagtcttgcacagaagattaaggcatctatttatatattcaagtccgattaagataaacgaatgcccaagtgaagatcaaagtcattacagtgactaatctggttgcttatcacaagaaaggagagctctgaaaggaagcaaaggctccagtattgctgttgtagaggcaacagtatttacagggggtgaaaaaaaagcacctatgttratttcctaaatacagtattgttatactgctctacacccaccaagaagctgacagatacagctgaaggaaacttgaaattgcagtttacaaatttaggatgatgatgtagaactgttctgagctgtagctttaagagaaaaggcaygattatgcagtgtcctggagtaggtgaaaggaaattaagaaacagtcaggtttgtagagagagttacaactgatagtttgcaggcaagagataagcatcccagcaggtgtctcctgtagctgatggtctgccatactggaaaatcaagttgtcat

SEQ ID NO: 7237 - DNA, 600 bp, Chicken  19866894192039_2
taaacgaatgcccaagtgaagatcaaagtcattacagtgactaatctggttgcttatcacaagaaaggagagctctgaaaggaagcaaaggctccagtattgctgttgtagaggcaacagtatttacagggggtgaaaaaaaagcacctatgttratttcctaaatacagtattgttatactgctctacacccaccaagaagctgacagatacagctgaaggaaacttgaaattgcagtttacaaatttaggatgatgatgtagaactgttctgagctgtagctttaagagaaaaggcaygattatgcagtgtcctggagtaggtgaaaggaaattaagaaacagtcaggtttgtagagagagttacaactgatagtttgcaggcaagagataagcatcccagcaggtgtctcctgtagctgatggtctgccatactggaaaatcaagttgtcatatgccagtcctgaaaatctcacctcctggctctgcagcaccaccagacctcccatctctttggctgcacaggccctttttgctccaacagggtaaaattaaactagtctctccatgactgccttaagtgacctcattaactaaac

SEQ ID NO: 7238 - DNA, 600 bp, Chicken  19866894192042_1
tagaaaaggcgaaaacaaacaaaaaacccgtgtgatatcatttctgtttggaatgtatatgcttgctcttcttagctcaattggaaaagtttagatcaccattgagtgtccagctagcttaggaatagttgctatattcagcaggtagcaggcagagaaaataggtcagcttcagctatgatagtagcttctcaaacagaaacagcactgacactgatctctcactgtttcaacttgttgtaagaatgctgaactcaattcttttgagtcattctccaaagaagtgctgcaaatctaagrcgttttcctttagccaggactttcctgctttcaaaacagtaatgttaccttgctgctggagaaagaaagtttgaggaggaatgaccttaacagagccacttaaattctgttgtttactggaagtcacacgtaactctttaaggagactgattatagccaagatgtcacaaataagaaccaaggcttcatcatttgaccctgacaaaatcctcttactggtgagacctgtaatgaacaccctctgaaactgatcatgcttggtgctgactagctgygtgtcaccatccccctgagagtcta

SEQ ID NO: 7239 - DNA, 600 bp, Chicken  19866894192042_2
ccaaagaagtgctgcaaatctaagrcgttttcctttagccaggactttcctgctttcaaaacagtaatgttaccttgctgctggagaaagaaagtttgaggaggaatgaccttaacagagccacttaaattctgttgtttactggaagtcacacgtaactctttaaggagactgattatagccaagatgtcacaaataagaaccaaggcttcatcatttgaccctgacaaaatcctcttactggtgagacctgtaatgaacaccctctgaaactgatcatgcttggtgctgactagctgygtgtcaccatccccctgagagtctaaccaatgacgtgtgtaaacagagactgttttgagtggtgagttatataattgtgcttttcttataagtcatttaaaactactactaagagttgtctctttcttctttgatctattccatttgattaactgttatcatttgtgtggtaatataggtctttcctgtgttgtttttttactttctttttttttttttaaattattattatttttaactcttctatgtatttcagttgtaaagctttcccataccccatcagccatagtaaatcaaaag

SEQ ID NO: 7240 - DNA, 600 bp, Chicken  19866894192051_1
gggtgctgcttcccagccaacttcacctcctttgacctgtgtctgctcaaatgcaagtgaagagctgccccatctcaacacattttggccatttccccgctggtgccacagcctgctggaattgctatggaaagcccacagcatgaagcacctcacctggaagctgaggccctcagaggcagcattttgtagactaattagcagattctagattaacgaccaggatcccacaaggcttaggagaaatggctccaggctgagcagggcaggttgagacaggctgcatcctggctgctaagrgagagttattctgccttacgtgtgtgttctgttcaggcagatattaaactaggtctcttccagcattgtcacggacgctgctctcatctgctgcattaagtaatttgtgcttctcccccagaaaagtatttatttcgtctctgtaccgctgtcaaagctaatattagcgagtgttactgaaccgttttacatctgctccagcagcagctgctccacgggagcatgacttgacaagaggacagggcagaggaagaaagtcacatcggatacttagcaggaaagtggggaaggataaggtgc

SEQ ID NO: 7241 - DNA, 568 bp, Chicken  19866894192051_2
tctgcctcaagctaaaggaaatctattaggctctttaaagaagtaagtcaaaggggatacatccgggataaggtcaggcaaagatgtgtacagcagagaatggtagtgctcaatatcattgctttggctgtcagggaaagtttgccccatgtgttgccaaactcctcttaaacttgtttcctgtctccaaatgcctctgtgagctggaggtgagcacactgtgcttcttcctggcactcacctgaggtagagcatgaaaattcagctcaaggaccaaacgccccatcccagtaatgcagrctgtgcaagtgaaggccatccaaaagtcatgctgctgcaatcttgtgtgccactgaagggtgtgctcttcttggagactagtagttrgtgcagttgtgaatacaacatcaaccttatcacatctctctgcttccaccacagccaggtatcagtgctgctcctgcctcagttttggtatacaaccaagaggaggagtggtccttttgtccctctggggaatgaagacaaggaagaagggcaaggtggaaatatggacctttctgtattg

SEQ ID NO: 7242 - DNA, 481 bp, Chicken  19866894192051_3
gtacagcagagaatggtagtgctcaatatcattgctttggctgtcagggaaagtttgccccatgtgttgccaaactcctcttaaacttgtttcctgtctccaaatgcctctgtgagctggaggtgagcacactgtgcttcttcctggcactcacctgaggtagagcatgaaaattcagctcaaggaccaaacgccccatcccagtaatgcagrctgtgcaagtgaaggccatccaaaagtcatgctgctgcaatcttgtgtgccactgaagggtgtgctcttcttggagactagtagttrgtgcagttgtgaatacaacatcaaccttatcacatctctctgcttccaccacagccaggtatcagtgctgctcctgcctcagttttggtatacaaccaagaggaggagtggtccttttgtccctctggggaatgaagacaaggaagaagggcaaggtggaaatatggacctttctgtattg

SEQ ID NO: 7243 - DNA, 600 bp, Chicken  19866894192053_1
atgagacctgatcagtattggcaacccgtactaggagcacctcgttagccaaagtgctttgtgtgggtctgtataatatcttgtcttgcttcttgctcccactatcgctatatgcagtcatgacactgagaaactttaggagagatttagtaacataaataaggtcaaaggaaagcgtatttccatgatcacagactatctgacagccattcagatgggaggggaggagttgattcaagatgctaaatttaattaaagcatatgctcttgggttttgcagttaaatatccttaaatcttyctttctttgtctccttaccaggtcatcacaaagttttaaatcactttgaaaggttcttgctccaytgttctgcaatattttttcctaaaatttgtttttgccccctgttcacttcctcaggagaaattataaagaaatcctcatcaaaagggtattaagactattttcaagaggatagcaaaattaaaatctgtggatgaccaaacaggagagaaattataccttgcaaagttattaaatttaaaataatactgttcatcattatagcacacaaaggtagttagaagattataagaagca

SEQ ID NO: 7244 - DNA, 600 bp, Chicken  19866894192053_2
ggtctgtataatatcttgtcttgcttcttgctcccactatcgctatatgcagtcatgacactgagaaactttaggagagatttagtaacataaataaggtcaaaggaaagcgtatttccatgatcacagactatctgacagccattcagatgggaggggaggagttgattcaagatgctaaatttaattaaagcatatgctcttgggttttgcagttaaatatccttaaatcttyctttctttgtctccttaccaggtcatcacaaagttttaaatcactttgaaaggttcttgctccaytgttctgcaatattttttcctaaaatttgtttttgccccctgttcacttcctcaggagaaattataaagaaatcctcatcaaaagggtattaagactattttcaagaggatagcaaaattaaaatctgtggatgaccaaacaggagagaaattataccttgcaaagttattaaatttaaaataatactgttcatcattatagcacacaaaggtagttagaagattataagaagcaagtctgtgatcaccaaatgtgtatccatgtgtaagccaaaatgtgtatcaacggcacagacatgg

SEQ ID NO: 7245 - DNA, 600 bp, Chicken  19866894192054_1
gctctttgcagtgacatatgtgcagacagtactcactcatttgacaaattcagagctgaatttgagcctttcttcagtgcagacaggaggaaaaacccttctggccaacgtatgaagtaataggcagctgctatgcaaaatgagaaggggctttattggtgtttacccgtggctggattttagtgaggggctgctgggtgtctgcacacctccatcaggaggaggggagtcggactggctcagtaagcaaaacattcattctggagagcagaagactgaccgctgttaataaatatcacragacattctaaaagtcctctagggaaaaaagagaaataccatctgttcatccaaacacaacacgtctacacaaaatgaggtaaggaaagctaagaagagtcctttacacaatctgacttcacgctggcatggcaattaacagtgagatgctttacagattccctaccatgctcatcagagaaattcttcatagcaagtgtgctccattgaagcatgacaatgtcctacctgcacatactacacctctgttttggcagtttgtacacttgaggcagtttgctggcaacctgcagaatgcag

SEQ ID NO: 7246 - DNA, 599 bp, Chicken  19866894192055_1
  misc_feature (1)..(196): n is any nucleotide
nnnnnnnnnnnnnnnnnnnnnnnnnnnnnnnnnnnnnnnnnnnnnnnnnnnnnnnnnnnnnnnnnnnnnnnnnnnnnnnnnnnnnnnnnnnnnnnnnnnnnnnnnnnnnnnnnnnnnnnnnnnnnnnnnnnnnnnnnnnnnnnnnnnnnnnnnnnnnnnnnnnnnnnnnnnnnnnnnnnnnnnnnnnnnnnnnnnncttcctagaaagtagattaccacttttttctttaaatcatgactaaagttaatcactgtcaagagatagttacaacgaagagtatgtaagtgtagaggaaagcyattactttctactttgtcttaatgtctataattttttttttccaagagtatgtcattattttctctataaaaattacaatttttttatgtttatttatttcagaataaaaatgtttaaaaatatatatattaaacttcttacactttttaggacttcattatttgaaatttcatgtaaccaaaaatatgaaaagtgttttgtaatgtgatttagttgtatgaaagcaaaatgtggacttgtaatctataagttttctggaatgagaaactgctcttcatcattgttttggtgcatccat

SEQ ID NO: 7247 - DNA, 508 bp, Chicken  19866894192061_1
ccggtttgtactgacttgatatctatattcacacacatcattctcaaggctcaattggcaacatttcccacagtctgcaacactctagcaagagatccagatcttacaattcaacttggcatttcctaataaaaacataattaataatttaatcttttctgattatttcccagcattcttttaataatgcaaacataaaagccacagtctcacagagacatttgaaattaaagatattcagattttatcactagcgtcattgtaactactctcacatatcatacacatttcagaaattcrgaaaaatgtgtgaaaggataagcaaggatatgctttaggagccatttaggtacttaatgggaatttttaaggatcccagttccttgctaaggctaatgcacaacaaagctcttcatcctggaagaacaagctactgatttaaaaagcacttcaaaatgtatatgaaataaagttagtattactgtatgtcattttaggaagaaattat

SEQ ID NO: 7248 - DNA, 600 bp, Chicken  19866894192062_1
cttaccctaatgaaacctgcattatgagaaggttatagttctgacccaaagacgattagctctgtgctctcttattgctacatatgtaattgtataattgattttaaaatttacttttgtgtccccaaaccataaagtgagcagcccattaagagggagaagtataattaatatatctattaaagtgaggtggtatattattgcaattttaagattatgtggataagtgtacacataaaaatcaggaagaaatataaaagttgtatattttcagtgcacaataaacagctctgcaagatrcacctaacaggtagaaatccaatttcatacacaactccycagagccaggcaggtagagaagtagagtgttctactagcctgagcctttgagagtccaccccagggaagccaccttttcaatctctgtatgtgtgcttgactatgcacctaacacagcatagttcctctaagtcaatagatagaatttactgaaataaataaataaatgaaaacatacacaactagcaccataagtcttttaattcaaaagaattctgccctcatttatgcttcaaccttactatcgattcagtcagctga

SEQ ID NO: 7249 - DNA, 600 bp, Chicken  19866894192062_2
tctgacccaaagacgattagctctgtgctctcttattgctacatatgtaattgtataattgattttaaaatttacttttgtgtccccaaaccataaagtgagcagcccattaagagggagaagtataattaatatatctattaaagtgaggtggtatattattgcaattttaagattatgtggataagtgtacacataaaaatcaggaagaaatataaaagttgtatattttcagtgcacaataaacagctctgcaagatrcacctaacaggtagaaatccaatttcatacacaactccycagagccaggcaggtagagaagtagagtgttctactagcctgagcctttgagagtccaccccagggaagccaccttttcaatctctgtatgtgtgcttgactatgcacctaacacagcatagttcctctaagtcaatagatagaatttactgaaataaataaataaatgaaaacatacacaactagcaccataagtcttttaattcaaaagaattctgccctcatttatgcttcaaccttactatcgattcagtcagctgacagttcccatcacctaaagcaatctgaggcacacagatc

SEQ ID NO: 7250 - DNA, 600 bp, Chicken  19866894192065_1
gacacagagcatctgggagagccactccttgcacctccctcaggtggaacagctatgatcacctctcagtgcgtggagcacagcccacccccccgatcagtggggctggatgggactcggggggctgcagtgtggggtgatggaggcagaggtgtcaacgcagccctcccacacccgtgggaacgcacagaacagccccaaaggcactgggttggagatggaccgcgtgggggaacgcacagggagcggatggtgtggctgcagcactgagctgagcgggcactctgcaggaggaagggractcattcatcacacagctgcgattcgctaattgcaataaggaatacaagcttgctgctcctcctgatgggggctcattggagctgcgtttctcacaccaagaagccacgcagggcgcccggctgcctccccccgctgcccctccaaaccccactcacttcgccaaggcaccctcagggtccgcgaagtcgatggcggcagtggggcccaacagcttctgcagatggcacgaaaccaactgctgcttcagcccctccagctgccgggccaaagccatgggcgtcagctcttcctcggccg

SEQ ID NO: 7251 - DNA, 600 bp, Chicken  19866894192072_1
ttgacctaatttgaactcatttcttaagaacactatctcagttgatgttggaagttcccagtatctttcaggaagcattctgagtgcagtgcattatacttagccttctttatggccctgatgcagcacttacgtggtgcatcgtggtgcaacttgacgcacaaccacaccacgattgctccaagttttgcagtgcctctgctgagaagcaatgggtcagagtctcatcatgccccctgcctgcccccaaacttactgcagatattaatgatccaaggaaagggctgaatcaactgaacscaagctgcgggcttctytggagaatgccagcatcaaccggagctgccacagccacatctgtttgttggctcaggtacttcatgtagtaatatacttagggccagaaggagtgaaaccactgttacacacaggtattactggaattcatcccgaagtcaacaggcaagcctgggtttaaacttgaagtagtgcatgaagaaatgatttaagtcctaagcatgttttccagatttatcyctaaatatatatggacataaggaaattaatataaggaagaatctttctactataaggatagta

SEQ ID NO: 7252 - DNA, 600 bp, Chicken  19866894192072_2
catttcttaagaacactatctcagttgatgttggaagttcccagtatctttcaggaagcattctgagtgcagtgcattatacttagccttctttatggccctgatgcagcacttacgtggtgcatcgtggtgcaacttgacgcacaaccacaccacgattgctccaagttttgcagtgcctctgctgagaagcaatgggtcagagtctcatcatgccccctgcctgcccccaaacttactgcagatattaatgatccaaggaaagggctgaatcaactgaacscaagctgcgggcttctytggagaatgccagcatcaaccggagctgccacagccacatctgtttgttggctcaggtacttcatgtagtaatatacttagggccagaaggagtgaaaccactgttacacacaggtattactggaattcatcccgaagtcaacaggcaagcctgggtttaaacttgaagtagtgcatgaagaaatgatttaagtcctaagcatgttttccagatttatcyctaaatatatatggacataaggaaattaatataaggaagaatctttctactataaggatagtaaagcacggggacaggct

SEQ ID NO: 7253 - DNA, 600 bp, Chicken  19866894192072_3
tgcctgcccccaaacttactgcagatattaatgatccaaggaaagggctgaatcaactgaacscaagctgcgggcttctytggagaatgccagcatcaaccggagctgccacagccacatctgtttgttggctcaggtacttcatgtagtaatatacttagggccagaaggagtgaaaccactgttacacacaggtattactggaattcatcccgaagtcaacaggcaagcctgggtttaaacttgaagtagtgcatgaagaaatgatttaagtcctaagcatgttttccagatttatcyctaaatatatatggacataaggaaattaatataaggaagaatctttctactataaggatagtaaagcacggggacaggctgcccagaaaggtggtggatccctgtccctggagacattcaaggtcatgctggatggggctctgagcaacctgatgtagctgtagttgtccctgatcactgcagggggagttggactttaggtgtccctgccaacacaaaggattctatgatatccaaatctctcctacagctctgtgcatataaatacatttaccaatacatacatacttacacacccac

SEQ ID NO: 7254 - DNA, 600 bp, Chicken  19866894192079_1
ccaccctgtaccacttcattgccgcagatgtcctttacatctggcaagggccgtttctctgcatgtcaacagtaattcagtttaacagctgtctcttttgacaagcttagtgtcagactctgaaatgacagggtgacagttttccttttctttaacagaacatagtgcaaattaaccgtttgaatgcaggatcgctaaacgcctccggaatacagttttcagagcaaactgaataggatttaggaattggtggtatcaggaccaaagctgaaaatcaattgggtttgcaaaactgaggcrcttctcccaccactgagaccygtacctgaaatctaagcagtcaaagcccagaaarccttaaactgaggtgagatagacgttggaggtaaacactgggaatttgcaaactggtttgatragyacttttcttgcattgcgtgaatacacaggagaatttgctgtatatttagttaaagtgcttgttaatagagcagctaatggtgtcgtatcagctttcaaatggcactcggcacacacatcgttctccacaaatgccacacgtacaaagcacctctcagcatcatttccccaggacwaaaa

SEQ ID NO: 7255 - DNA, 600 bp, Chicken  19866894192079_2
ccgcagatgtcctttacatctggcaagggccgtttctctgcatgtcaacagtaattcagtttaacagctgtctcttttgacaagcttagtgtcagactctgaaatgacagggtgacagttttccttttctttaacagaacatagtgcaaattaaccgtttgaatgcaggatcgctaaacgcctccggaatacagttttcagagcaaactgaataggatttaggaattggtggtatcaggaccaaagctgaaaatcaattgggtttgcaaaactgaggcrcttctcccaccactgagaccygtacctgaaatctaagcagtcaaagcccagaaarccttaaactgaggtgagatagacgttggaggtaaacactgggaatttgcaaactggtttgatragyacttttcttgcattgcgtgaatacacaggagaatttgctgtatatttagttaaagtgcttgttaatagagcagctaatggtgtcgtatcagctttcaaatggcactcggcacacacatcgttctccacaaatgccacacgtacaaagcacctctcagcatcatttccccaggacwaaaactatgcccaaggtaattctgc

SEQ ID NO: 7256 - DNA, 600 bp, Chicken  19866894192079_3
tctctgcatgtcaacagtaattcagtttaacagctgtctcttttgacaagcttagtgtcagactctgaaatgacagggtgacagttttccttttctttaacagaacatagtgcaaattaaccgtttgaatgcaggatcgctaaacgcctccggaatacagttttcagagcaaactgaataggatttaggaattggtggtatcaggaccaaagctgaaaatcaattgggtttgcaaaactgaggcrcttctcccaccactgagaccygtacctgaaatctaagcagtcaaagcccagaaarccttaaactgaggtgagatagacgttggaggtaaacactgggaatttgcaaactggtttgatragyacttttcttgcattgcgtgaatacacaggagaatttgctgtatatttagttaaagtgcttgttaatagagcagctaatggtgtcgtatcagctttcaaatggcactcggcacacacatcgttctccacaaatgccacacgtacaaagcacctctcagcatcatttccccaggacwaaaactatgcccaaggtaattctgcacatctgaatgaccaaaatctttagcacaaaatc

SEQ ID NO: 7257 - DNA, 600 bp, Chicken  19866894192079_4
tctgaaatgacagggtgacagttttccttttctttaacagaacatagtgcaaattaaccgtttgaatgcaggatcgctaaacgcctccggaatacagttttcagagcaaactgaataggatttaggaattggtggtatcaggaccaaagctgaaaatcaattgggtttgcaaaactgaggcrcttctcccaccactgagaccygtacctgaaatctaagcagtcaaagcccagaaarccttaaactgaggtgagatagacgttggaggtaaacactgggaatttgcaaactggtttgatragyacttttcttgcattgcgtgaatacacaggagaatttgctgtatatttagttaaagtgcttgttaatagagcagctaatggtgtcgtatcagctttcaaatggcactcggcacacacatcgttctccacaaatgccacacgtacaaagcacctctcagcatcatttccccaggacwaaaactatgcccaaggtaattctgcacatctgaatgaccaaaatctttagcacaaaatccagctcttggacaggaacaaagtgccaccaccatttctgcatgactgacaaatgctacacagg

SEQ ID NO: 7258 - DNA, 600 bp, Chicken  19866894192079_5
gaaatgacagggtgacagttttccttttctttaacagaacatagtgcaaattaaccgtttgaatgcaggatcgctaaacgcctccggaatacagttttcagagcaaactgaataggatttaggaattggtggtatcaggaccaaagctgaaaatcaattgggtttgcaaaactgaggcrcttctcccaccactgagaccygtacctgaaatctaagcagtcaaagcccagaaarccttaaactgaggtgagatagacgttggaggtaaacactgggaatttgcaaactggtttgatragyacttttcttgcattgcgtgaatacacaggagaatttgctgtatatttagttaaagtgcttgttaatagagcagctaatggtgtcgtatcagctttcaaatggcactcggcacacacatcgttctccacaaatgccacacgtacaaagcacctctcagcatcatttccccaggacwaaaactatgcccaaggtaattctgcacatctgaatgaccaaaatctttagcacaaaatccagctcttggacaggaacaaagtgccaccaccatttctgcatgactgacaaatgctacacaggcct

SEQ ID NO: 7259 - DNA, 534 bp, Chicken  19866894192079_6
ggcrcttctcccaccactgagaccygtacctgaaatctaagcagtcaaagcccagaaarccttaaactgaggtgagatagacgttggaggtaaacactgggaatttgcaaactggtttgatragyacttttcttgcattgcgtgaatacacaggagaatttgctgtatatttagttaaagtgcttgttaatagagcagctaatggtgtcgtatcagctttcaaatggcactcggcacacacatcgttctccacaaatgccacacgtacaaagcacctctcagcatcatttccccaggacwaaaactatgcccaaggtaattctgcacatctgaatgaccaaaatctttagcacaaaatccagctcttggacaggaacaaagtgccaccaccatttctgcatgactgacaaatgctacacaggccttgctgtaatctggtgcaagagcgaactttatgggtctggctgcattaggctggcatgaaaaaaatatacaaaaacaacgctacacttaaactgcagatcgatgcaagtt

SEQ ID NO: 7260 - DNA, 600 bp, Chicken  19866894192084_1
tttttaatgcacttattttttttctccaggagtgagcaaattttattctgcatatctcctttgggatgtgcataaggtcctacaatgctatctggagacattgtgtgccagaaattgcctcgagagaattttcttttatgctgcatcccaaactgcttatatggctcttcagcactcttccaacaatcattaaaggaagcgcacgctcacacggtgtcctgtggatgtgacttgatgaacagacctaccggaaaatgtgctggggtaaagcagattgctgctctggagaacatccaggcrgtgtgggagtgccattccgctttgttttccatagaaaaactgtagttgctcagatgtaaattaaccctacaattctggccttcccttttaatactttattcatttgagatcacaaattttgcaaggctttggcgttgtgttttttttttttttttttgcagcttctggtctagcagtacctggtcctgctggacagtgcctgtagtggggccagcagtgttggctgtgggctgagaggtattggaaatggcaaatggtgggtggcttagcagctcccccttgcagggctggtgctggtac

SEQ ID NO: 7261 - DNA, 600 bp, Chicken  19866894192085_1
ttaagattttattcatcatctgttctctgtagacacgattaaatacttcacagggagttcatattcatgctattcagtgacatcataggtgataaaataccatatactaccagtgtttaatttagcacatatttctaaaattattaaaatagtctcttgtcatacaaggttcaacactttgaagatgatttctagatcagaaacataagtacttgacagtgaattcttaaagataaggtatatatgcactataaggtttggtgattactttccaattatatgagaccagaatgatatccraataacagtttcttactcagttaatctttcacttatgttgaraattacagtttctgtattatcaatgataaatgcctaacaactttgatttataaacttgtaaatatgtagaagactaataaatcttgctttaatgagaaacagctgctctgttacgctgtgcctacaggacattctcatgcttggcacaaggtttgggaacattctgcattaattactcttcaaaagaataaaagcagttataaaactttagctgggcttagacatacttacttgtatatatgcatttttgtttgagaa

SEQ ID NO: 7262 - DNA, 600 bp, Chicken  19866894192085_2
atacttcacagggagttcatattcatgctattcagtgacatcataggtgataaaataccatatactaccagtgtttaatttagcacatatttctaaaattattaaaatagtctcttgtcatacaaggttcaacactttgaagatgatttctagatcagaaacataagtacttgacagtgaattcttaaagataaggtatatatgcactataaggtttggtgattactttccaattatatgagaccagaatgatatccraataacagtttcttactcagttaatctttcacttatgttgaraattacagtttctgtattatcaatgataaatgcctaacaactttgatttataaacttgtaaatatgtagaagactaataaatcttgctttaatgagaaacagctgctctgttacgctgtgcctacaggacattctcatgcttggcacaaggtttgggaacattctgcattaattactcttcaaaagaataaaagcagttataaaactttagctgggcttagacatacttacttgtatatatgcatttttgtttgagaaatgataaataaacatgtttgaacttccatttttttttccagg

SEQ ID NO: 7263 - DNA, 599 bp, Chicken  19866894192088_1
  misc_feature (1)..(2): n is any nucleotide
nnaggagaggatagaaaagctagaaaatgcagtacaacagccagcattctctgcactgttgactcaggctcacatgatccccaatatatattttagcatttaagtggatttgtaaagtatgaagatgttttccactcggacattcctgactccttttttgatcagattgtttgtattttaccttctttaatattcagatttttaaaaagccttactattgtgaaaggaggttctcattaaagggatcgttctcatattcttaaaaatttattgtacctaagtggttatctgtccatttaraaatgaaataaaatattcaattattctgtttacttcacatgattagagcaccttactgaagaactactagcactaattaaaacatkgtgtaaaaatcttaccttcttcttctccatcttgatctagtgctgcactttcttcttcaaaacttccaatacctgattctatttgaggagcttggttgtgttgctgacttaacttgttgcgaatactgctgatttctttctttaacagctttgctcttttgctccttgacccactggatttcattgcacaggtaagatcaagtttttctagca

SEQ ID NO: 7264 - DNA, 600 bp, Chicken  19866894192088_2
tatattttagcatttaagtggatttgtaaagtatgaagatgttttccactcggacattcctgactccttttttgatcagattgtttgtattttaccttctttaatattcagatttttaaaaagccttactattgtgaaaggaggttctcattaaagggatcgttctcatattcttaaaaatttattgtacctaagtggttatctgtccatttaraaatgaaataaaatattcaattattctgtttacttcacatgattagagcaccttactgaagaactactagcactaattaaaacatkgtgtaaaaatcttaccttcttcttctccatcttgatctagtgctgcactttcttcttcaaaacttccaatacctgattctatttgaggagcttggttgtgttgctgacttaacttgttgcgaatactgctgatttctttctttaacagctttgctcttttgctccttgacccactggatttcattgcacaggtaagatcaagtttttctagcaactccctcagctgttcttccaaggacatatgcactcgatttgcaggattcagtaatctatccactgaagtcaaaacacgtatttgaa

SEQ ID NO: 7265 - DNA, 600 bp, Chicken  19866894192090_1
acacaatttgtacctgggtactttcgtcatgaaagccctccagaaaactctccaacagttcatctgcattgtcaattcgttctgcatattcacccactatccagatcatggcagctctggcatctggttcatccagggaatctaggttctcacacagggtggcaatgatgctttcatacctgatttatcagagtacaggtgaattactggggtgaactcaacttgtgtttacttcatttcagcccacaattctgcagagaatcctgtactgaattacaatgctgtgtatttctatacaaygtgaaacaagcagcatttgcaatcaattgaagatattcccaggctttttccttctccaatctgagtgccaggacctcacaggatcctcaagggcgttgcagtttcttcaatcagcagagccacccagaagtggtgctcaagacaaarctgcctccccttccattttgctaaagggaacatttgatccaaacatccaaatgttcaaaatgagtctgtatcagatcctgcagccttcctactatcttcagactagcaactctagaattggatatygcactccccaaaggctttgctataaaa

SEQ ID NO: 7266 - DNA, 497 bp, Chicken  19866894192090_2
tctcacacagggtggcaatgatgctttcatacctgatttatcagagtacaggtgaattactggggtgaactcaacttgtgtttacttcatttcagcccacaattctgcagagaatcctgtactgaattacaatgctgtgtatttctatacaaygtgaaacaagcagcatttgcaatcaattgaagatattcccaggctttttccttctccaatctgagtgccaggacctcacaggatcctcaagggcgttgcagtttcttcaatcagcagagccacccagaagtggtgctcaagacaaarctgcctccccttccattttgctaaagggaacatttgatccaaacatccaaatgttcaaaatgagtctgtatcagatcctgcagccttcctactatcttcagactagcaactctagaattggatatygcactccccaaaggctttgctataaaacagacaataccccacactaattatttagcttcccctgttcccat

SEQ ID NO: 7267 - DNA, 371 bp, Chicken  19866894192090_3
ttacaatgctgtgtatttctatacaaygtgaaacaagcagcatttgcaatcaattgaagatattcccaggctttttccttctccaatctgagtgccaggacctcacaggatcctcaagggcgttgcagtttcttcaatcagcagagccacccagaagtggtgctcaagacaaarctgcctccccttccattttgctaaagggaacatttgatccaaacatccaaatgttcaaaatgagtctgtatcagatcctgcagccttcctactatcttcagactagcaactctagaattggatatygcactccccaaaggctttgctataaaacagacaataccccacactaattatttagcttcccctgttcccat

SEQ ID NO: 7268 - DNA, 600 bp, Chicken  19866894192095_1
taaaactgaaggtggagtacagagactgaacacagataagacagaacaggacaaaacggggggaaatagaaatgtctaagtggcaagagagaactcaaacattcagcttttcttactgagtttagcacaactgaagaaacaaatgtgtttcaggcatcctacaaagtcagcaattaggaggagtgtaacagatttgttttcagctgcagctgagggttatttaactcccaagtctccagcagagtgaagcaggcagaggttccaaactaagcgttactatgcaaaccaagaactggaatygtactgacagtaaacaaacaaactaaatctggagatgcgtgcaagtttacaggctctgctyrtaggagcagcatcatattactgctgtacaacagctgtgactgaccctatgagatgtacagcagctacatgtataacagcatttgaaatcaaagtctgaaaattgcaaacacgccaagcaaacaagtccagcaggaactccacagagaacatgagtgaagctgcacgtgttgggccttctgtcgagctcaggctttatagaaaaagaaattctgaaagtaggctgtaggtggaagtaaa

SEQ ID NO: 7269 - DNA, 600 bp, Chicken  19866894192095_2
ggaaatagaaatgtctaagtggcaagagagaactcaaacattcagcttttcttactgagtttagcacaactgaagaaacaaatgtgtttcaggcatcctacaaagtcagcaattaggaggagtgtaacagatttgttttcagctgcagctgagggttatttaactcccaagtctccagcagagtgaagcaggcagaggttccaaactaagcgttactatgcaaaccaagaactggaatygtactgacagtaaacaaacaaactaaatctggagatgcgtgcaagtttacaggctctgctyrtaggagcagcatcatattactgctgtacaacagctgtgactgaccctatgagatgtacagcagctacatgtataacagcatttgaaatcaaagtctgaaaattgcaaacacgccaagcaaacaagtccagcaggaactccacagagaacatgagtgaagctgcacgtgttgggccttctgtcgagctcaggctttatagaaaaagaaattctgaaagtaggctgtaggtggaagtaaagcccttatatttcaaagatcacagcggtgtctttattactcaaagatggctaaattccgtg

SEQ ID NO: 7270 - DNA, 600 bp, Chicken  19866894192095_3
gaaatagaaatgtctaagtggcaagagagaactcaaacattcagcttttcttactgagtttagcacaactgaagaaacaaatgtgtttcaggcatcctacaaagtcagcaattaggaggagtgtaacagatttgttttcagctgcagctgagggttatttaactcccaagtctccagcagagtgaagcaggcagaggttccaaactaagcgttactatgcaaaccaagaactggaatygtactgacagtaaacaaacaaactaaatctggagatgcgtgcaagtttacaggctctgctyrtaggagcagcatcatattactgctgtacaacagctgtgactgaccctatgagatgtacagcagctacatgtataacagcatttgaaatcaaagtctgaaaattgcaaacacgccaagcaaacaagtccagcaggaactccacagagaacatgagtgaagctgcacgtgttgggccttctgtcgagctcaggctttatagaaaaagaaattctgaaagtaggctgtaggtggaagtaaagcccttatatttcaaagatcacagcggtgtctttattactcaaagatggctaaattccgtgc

SEQ ID NO: 7271 - DNA, 600 bp, Chicken  19866894192097_1
gtgtattagtcttgtcttcatgtaaggtgaaaggagacactaacgagacgaaagatcgtcatcaaaaaagtctgatgacaatcatccttgggaaaaaaggactcacatagctttacatttacaatactgcacttttttttcccttgcaaatacaataaccatatttgaagctggttccaatacctgttgttttcattgctgtcatgttgcttgtaaaacctgggttattctaatgaacaaaacatttgacttgaatttgggtaatgcttatgaccatacaaaaaaatctatcagtagcartagtgtcagctggagaactaatgctacaagtggataacattgcactacttgaaaccaatagctcttcacacagttgaagactgagggttctattcagcaatattcagggtcctatggttgtggccacagaggttccagaagctctcgctgagtctaatcctgattcaggaaccaaaatgatatgctgtgtatatatttctctgcacagcctggatgcgctggacaccctcccccacttgattcctgggaagggaaaaaaaaaaaaaataatagtctctgtttagctcagtggcatgaaaa

SEQ ID NO: 7272 - DNA, 600 bp, Chicken  19866894192097_2
ctgctaagagacacttctcattttctaggatacactaactgttatagtgctcctcatctgctctcttggcctgttcctatcacggtttggttacagctgagagctcagtgatgtgttttctaaactcaactcccaaatgcccaggtgggcatttcaattgtggcacttcagccaggagctaacttttcaatgagggcacaaatacctgggctccagactttgcttgatcatccttcacagccatgtttgtctgttggtatccccattttctcacagggcacagtgcttccctgctgcaaygggctgggagtgttcaaaggtctccctgctgaaagtgcgctgctgttgtccccaggaatcagtaaatgttattgattgtggagacagacaaggctgggatatttttgccattttgtaacgtcttcctattgtgtgacattgaacttatgggacaacctaaagctggtgcttgcaaccaagtcaaatctttagttgcattctgataacaagtctacactctgcagaaagtactcagagtgtctgtcagctgcctgcctctatatatcaggtgcttatggcattgtacatggcttaatagga

SEQ ID NO: 7273 - DNA, 600 bp, Chicken  19866894192108_1
gtcccctcactatgaatgcagccacaatgatttcttctccttcatcttccatcctgccatgtacttcatgacatcaaccatatattttcctgctaataatatcttttgtaaattttatatatatgtcagttgcaaattgctcagatgctacactgagaggcacagaagtgtctttaagagaatctgcagcttttactgaagcaaaacaccatctggaataaacaatatacttgcctacacaagcccactctgcttgcttctatatctttttagaatttcagtatctatatcacattttcrttcctcctgctatctccgggactatctcatttagctttagctgcctagaagttaggaatgtggtctaaggcagtaagttaagctcaccttatatttggaagagagtgacaggtcttctggatgagggttggatgaagaagagtttctttctgcaaaggtacatctatcactctaatgcacagaaatagcctgagcatcaagctccatacctgtagtagaggatcccaagtattaagattttccgaagtgtttcttaggtaagactactgatttctttccataagaaaacaaaaaaatggc

SEQ ID NO: 7274 - DNA, 600 bp, Chicken  19866894192109_1
cttaagtaaaccaaaaggaatcttttaaaccttgaaaggaagccacactaaaaggcaataaaactactccttcactgaactgatgggaaaggtcagagtttcagtaactcagaatgaattctgatctctttatattcttaatcaacagatattttaacaatatttccttgcagaaaagcagtataggcactggctcacaggattaaaatggttttcacagtagactcaagttttcatctgtgggactcaaaactctgatttagcagagcaatatacagttagatggatgaaggtcaaackttcccaggttccaaatgagattcttgaaagaaaacatatacaccaaaataattatatgcagttctcagtatccagcaaaattactcctgaaagcagtccatcattttccttaagatttcagctaaatcagagtcaaactgagcaaactatccaactgaacattgtttgaactagttcatcaaaaacgtccggacatacaatgtccagaaaatacaattagtaactatctgcatgtagcttctccagctgtagcatcaatctgaggaaggactaaacaggarcatgaagagaayggaaaga

SEQ ID NO: 7275 - DNA, 600 bp, Chicken  19866894192109_2
gatggatgaaggtcaaackttcccaggttccaaatgagattcttgaaagaaaacatatacaccaaaataattatatgcagttctcagtatccagcaaaattactcctgaaagcagtccatcattttccttaagatttcagctaaatcagagtcaaactgagcaaactatccaactgaacattgtttgaactagttcatcaaaaacgtccggacatacaatgtccagaaaatacaattagtaactatctgcatgtagcttctccagctgtagcatcaatctgaggaaggactaaacaggarcatgaagagaayggaaagaaaactccctcctgtaccacagactcagccattattttgatgtcaaaggaataagatgattagaacatctcaatcactacgtataaacaagagaagacatgcaaaagaagcagtccaataaatccatgcccattattccctccataaacagaaaaggctgggctttttgtgatctttcatctcakaaacataagatctttccttccgtaaaaaggagatggaggcacagtcttctatttatgtttcaaagaaaaaggagagcttcacttcctgaaaggagta

SEQ ID NO: 7276 - DNA, 600 bp, Chicken  19866894192109_3
tcaaackttcccaggttccaaatgagattcttgaaagaaaacatatacaccaaaataattatatgcagttctcagtatccagcaaaattactcctgaaagcagtccatcattttccttaagatttcagctaaatcagagtcaaactgagcaaactatccaactgaacattgtttgaactagttcatcaaaaacgtccggacatacaatgtccagaaaatacaattagtaactatctgcatgtagcttctccagctgtagcatcaatctgaggaaggactaaacaggarcatgaagagaayggaaagaaaactccctcctgtaccacagactcagccattattttgatgtcaaaggaataagatgattagaacatctcaatcactacgtataaacaagagaagacatgcaaaagaagcagtccaataaatccatgcccattattccctccataaacagaaaaggctgggctttttgtgatctttcatctcakaaacataagatctttccttccgtaaaaaggagatggaggcacagtcttctatttatgtttcaaagaaaaaggagagcttcacttcctgaaaggagtagcacctgtgatt

SEQ ID NO: 7277 - DNA, 600 bp, Chicken  19866894192109_4
acgtccggacatacaatgtccagaaaatacaattagtaactatctgcatgtagcttctccagctgtagcatcaatctgaggaaggactaaacaggarcatgaagagaayggaaagaaaactccctcctgtaccacagactcagccattattttgatgtcaaaggaataagatgattagaacatctcaatcactacgtataaacaagagaagacatgcaaaagaagcagtccaataaatccatgcccattattccctccataaacagaaaaggctgggctttttgtgatctttcatctcakaaacataagatctttccttccgtaaaaaggagatggaggcacagtcttctatttatgtttcaaagaaaaaggagagcttcacttcctgaaaggagtagcacctgtgattaaaggcaggttagaaaccgtataaaaatatttccagtgttacctctcctataaagacgaccataacacaatccagtttttcttcaggggacaacttatcaataagggagtggagagtttctgtaaggtaagacttgacttttcttttcactgtaggtattcccattacaatggaaactgaaattaaacaaa

SEQ ID NO: 7278 - DNA, 599 bp, Chicken  19866894192112_1
  misc_feature (1)..(91): n is any nucleotide
nnnnnnnnnnnnnnnnnnnnnnnnnnnnnnnnnnnnnnnnnnnnnnnnnnnnnnnnnnnnnnnnnnnnnnnnnnnnnnnnnnnnnnnnnnntctgaacctacaggagaacattttcaagtctggtctgtggcgaatacttttgtttgtaccttcagcagccgttactgaagaaataccacctaatagaccaaagcagatgtgtaggcaagaggcagttactctcatggtccaacctacaggtgcaaaaactgcacaactgcttacaagcatccagtttccatcacaaaccctgggatgaygcaatgagcagtaagctggggatcttgtccttaaygtgcaggcttagcagggggctgccttgcttcaggagaacattcacacctctgaaaaccgtgctgtttgttccaccagcgctgagatttcattgcttttcatctgtctccctccgagcttaaagcaatgaaggtaccacaaaatcccatcctccctccccatgcaatcatcgctggcggagatatcactttttgagtctaccgacacttgcaaagttgtgraggtgaaagtctgagagcaagggggaggtggcagcgtgctggag

SEQ ID NO: 7279 - DNA, 599 bp, Chicken  19866894192112_2
  misc_feature (1)..(56): n is any nucleotide
nnnnnnnnnnnnnnnnnnnnnnnnnnnnnnnnnnnnnnnnnnnnnnnnnnnnnnnntctgaacctacaggagaacattttcaagtctggtctgtggcgaatacttttgtttgtaccttcagcagccgttactgaagaaataccacctaatagaccaaagcagatgtgtaggcaagaggcagttactctcatggtccaacctacaggtgcaaaaactgcacaactgcttacaagcatccagtttccatcacaaaccctgggatgaygcaatgagcagtaagctggggatcttgtccttaaygtgcaggcttagcagggggctgccttgcttcaggagaacattcacacctctgaaaaccgtgctgtttgttccaccagcgctgagatttcattgcttttcatctgtctccctccgagcttaaagcaatgaaggtaccacaaaatcccatcctccctccccatgcaatcatcgctggcggagatatcactttttgagtctaccgacacttgcaaagttgtgraggtgaaagtctgagagcaagggggaggtggcagcgtgctggagagcagacgtgctgctgaggtttgtcactagataga

SEQ ID NO: 7280 - DNA, 600 bp, Chicken  19866894192112_3
aactgcttacaagcatccagtttccatcacaaaccctgggatgaygcaatgagcagtaagctggggatcttgtccttaaygtgcaggcttagcagggggctgccttgcttcaggagaacattcacacctctgaaaaccgtgctgtttgttccaccagcgctgagatttcattgcttttcatctgtctccctccgagcttaaagcaatgaaggtaccacaaaatcccatcctccctccccatgcaatcatcgctggcggagatatcactttttgagtctaccgacacttgcaaagttgtgraggtgaaagtctgagagcaagggggaggtggcagcgtgctggagagcagacgtgctgctgaggtttgtcactagatagatgctgctggattggagcagggagtgacagtgctacggcagtgctgggaggagagggagcgagtgggggtgtctgcagatgagtcactgccctggggaagcatcggccccctaagcatatgctccttcattttaaattaattagcatcccaaggagagcatctcctggctcctcctccctcactactgccctagaaatgtgaaaagtgcctccaccccccaa

SEQ ID NO: 7281 - DNA, 600 bp, Chicken  19866894192112_4
agcatcggccccctaagcatatgctccttcattttaaattaattagcatcccaaggagagcatctcctggctcctcctccctcactactgccctagaaatgtgaaaagtgcctccaccccccaaatccacatcaccatcaaaagggagtgataaaaaattcaaaacgctgtaaacacagccatgaatttttcatcaccagagatgcatattcaatcattacgttgctcctctggcaatataaaatgctcgtgctctgcaaaggacaaccggggcacacggaggagaccgtggaggtcggkgcagggctgcaggaggggctctgtgcactgcgcagaggagggagacttacattcattttccttcgacatcgggagaggttgagaaggagtgacaccttcagctcacggaaggttttcaggtcttccccaaagccttccctggggaacttcttcagggcgtactggtagcgctgggcagcctccttcactttacctttctgatagaaggagaacgtgtcaaagcaaatcctttgggtgagtttactgcaaagcactgccagacccacgggtgttttggcggtgaaggtaacacgatctcat

SEQ ID NO: 7282 - DNA, 600 bp, Chicken  19866894192114_1
acttccatggctgaatgaatgcatcacaactccaccactaaataagcttaaactacatctgaacacaattactagcattcatttagacactattagggatctgttgtaaagatcccatcttaattgcttattttcttttcttatcagatgtatatattaactagttattaacaaaaaacaaggaaaaatattgcttttggtatctgctttgaaagttccctatatctttgacagcagcaaggaagtaccaaccagatgtattagcagtcttattaactttgtgctttgctttaaccttcraacaaataacttctcttcccaaagccttacctttcttttccagtatggtctagaagctatacaaagcattccaagaactgaaaagtgctaagtttactatgcacgtttaaccagaaaaaaaaaaaaaaaaaaaggaaaaatgaagttggaaaaaataaaaataaaagcttctctctgacttgcagtggctaaagtctgagagagctgaccttccacattttcagcattttcctctgaatgctgcagaagacataaatagattcaagattgactagacttcagataaacttaataaaaaga

SEQ ID NO: 7283 - DNA, 599 bp, Chicken  19866894192118_1
  misc_feature (1)..(169): n is any nucleotide
nnnnnnnnnnnnnnnnnnnnnnnnnnnnnnnnnnnnnnnnnnnnnnnnnnnnnnnnnnnnnnnnnnnnnnnnnnnnnnnnnnnnnnnnnnnnnnnnnnnnnnnnnnnnnnnnnnnnnnnnnnnnnnnnnnnnnnnnnnnnnnnnnnnnnnnnnnnnnnnnnnnnnnnnncttggagctcccagctggaatgagaacaggcgatgcaccgaaacgctgtgattgaggagaactggcacaggcaactccgacagcagcagtgcaaactgctaagccaatatctattttttcatgctatcgaytggaagcaagagagctggttcttctcctgctcgctccttgctcccaaatcctcctgactttccctgtgggtgacctgaagcgaggacagccatagagcatggcgctggtgatggctgggcagaggtgggaccactccagcacatgggatggttctggcatgggtgtgctctgctctgctggcactcacgcaggcttagagccggagttctggcacagtgatttcacatctgcaatataccaccgagatgtacccttattgtcgtggggattcggcgctctgggatggatatctgctgca

SEQ ID NO: 7284 - DNA, 600 bp, Chicken  19866894192118_2
caggggaaggagcccggcatgtactgtgtgctgactgcacttggctggggggatttacacccgaggggttggtgggctcacttactgccaaagggggtctgaagtcagaaagctgagagaggacagagcctgctggcccagatagcaccgcctttgagctgtgcaggagcacatggggagcacaaatcactgctcaacccctcttccttgcaatcttcttgcaagaattacacacctggggaggaacagcctcacgtatcagtgcaggtacggggctgagctgccggaaaggagctctgmggaggacctcagcggggtgaccgtgagtccgcagcgagccctggtggccgaggaggccggcggtaccccggtcgaccagcagttggccgaaggttggccgtgagccgtcggtgtgccccggtggttcctggggcgcacggcgcagagcgcggccggcagcgtgaaggcggtgctcctccctctgctctgccctggggagggcacagccggagcgctgcgcccaatgctgggctccgcagtaacgggcagacggggaactgccgcagagaggctgcagagatgatggggtccttggtggtg

SEQ ID NO: 7285 - DNA, 600 bp, Chicken  19866894192126_1
caacagaaaccaacagatatatctgctagagcacattagcctacattataaactgcgtatcaattcactccgtcttcctgctttcactactatgtgaatgatatcctagtgtctggcattaatgagggacatcttttggtacatctgtatccttacttgaggctttaagtattttgtcattcaaaagcatgtacataatattaactacttgtttattaatcaaggcttgaatcaagacatatcagcaccttctgtgcattccaccttacttctccgaaggtaaagaggaaagaaatggtsctcccacttacagggccattcatctcaaacagagcaataacaaacatgaatggctaattattttacattaagacatcacaaagattctacatttcttgtcttatattgtgctatagaggttttggtcaaataagattaaactagaagagtaatacaacaagaaacttagaggagcaaccaggtattatgtgaagtttagtaagtggaaagaaagcacctcatcctctacaatgaaccaggactttaagaaagcacaaggagataccatctttccagaaaatcattcccaaaagatgcact

SEQ ID NO: 7286 - DNA, 600 bp, Chicken  19866894192135_1
aactgaaattctaatttaatgccaacctgtctacatctaaaactactgttaatctcttttccagaagtttgaagtttattagtaaacttatttcaatggaaaataatcaagagactttcatttctataattaccctttaattttcttactgaatgaaagaattaacataaattgtttaagtttcacaatttaaatatatttatattgaacagatggaataaggggatttctttctgttctgtggtgtctctagccaagttcataaactcatctgggctatagctaagcttcttggaaacwgtagtttgctttgtattcagctccatggagttttaagaactaccaagcctgaaattataactctgactactgtggaaacagtgttcttcagtagttaaattacatagtatgatagcttcatactagcgctgtatgaaagttacagtgatttcactttgtgtgttacatttcatttttttttaataaaatgaatagcactgtaattttacaaaccttctgtgaaccaacaatacattcttttttttttgtatgtacactctaaaacaatgcagtttaaatgctattatttactgtaacgct

SEQ ID NO: 7287 - DNA, 600 bp, Chicken  19866894192135_2
ctgtggtgtctctagccaagttcataaactcatctgggctatagctaagcttcttggaaacwgtagtttgctttgtattcagctccatggagttttaagaactaccaagcctgaaattataactctgactactgtggaaacagtgttcttcagtagttaaattacatagtatgatagcttcatactagcgctgtatgaaagttacagtgatttcactttgtgtgttacatttcatttttttttaataaaatgaatagcactgtaattttacaaaccttctgtgaaccaacaatacattcwtttttttttgtatgtacactctaaaacaatgcagtttaaatgctattatttactgtaacgctatggagagacttttactgtaggtatcgtttgtttgttttagtgtgatagcttattcagtcatcatgggagctctaatggcaagtggaaaggaagtatcaggaaaaatccctaaaggaaaggtaagtaccaaggccttggggaaggatgtgaatttgagggaggagctgtgagaatgaaccaaagttgcacactgatgtactgacgaagagggagctgcttaccgtggtgtcttccagc

SEQ ID NO: 7288 - DNA, 600 bp, Chicken  19866894192138_1
tagctcaattcaatattctactgagagcttttgtgttccctggatgaagtcttaaaatttccttagctctttctattctgccagaaaaaacttgttctcttgctacatgtcggatatgattttaagtcagtgatggatactgttgtctgtttttgctggtcttagcacaagttgtgtcattctgcatttcccacacacttaacatatgcgttcagtgcatagaaattcagctctataaatcatttgctttagtattttaactctccagtgcctctggcttttcttttattgctcaaatgyaatttgtggcaatatgttagactgtgtctgagcatctaacttaaacagctatcctgtttgctttgagatcaatagcctgttcatcttctcttatgtagctgcccatagatgctaggaaaaaaaaagtaaatctcatgattaatgtcaccttttgtcccttgtgtgtacaccgtagaggtgatgagagaatctcggcccacctgtgtaatgggcacattttcctatatgctcagagcactgggaaatcacktcagctggtgtcaactgccacaagagtctgttttgctggaatttgacttt

SEQ ID NO: 7289 - DNA, 600 bp, Chicken  19866894192138_2
agtattttaactctccagtgcctctggcttttcttttattgctcaaatgyaatttgtggcaatatgttagactgtgtctgagcatctaacttaaacagctatcctgtttgctttgagatcaatagcctgttcatcttctcttatgtagctgcccatagatgctaggaaaaaaaaagtaaatctcatgattaatgtcaccttttgtcccttgtgtgtacaccgtagaggtgatgagagaatctcggcccacctgtgtaatgggcacattttcctatatgctcagagcactgggaaatcacktcagctggtgtcaactgccacaagagtctgttttgctggaatttgactttctgttccagttctgctgcttgccacaggactctccctctcatgtgygtaattgctacccacacttaatgcagcatgctgcttcatgcttcacaagctgaaagccatgctgctggaagctgccacatgaaaatatttcagtaccatattcacaaaaatactgatcacattcacaaggacagtgggactgctggctctaaaaaaagaaataacccagcctcctagatctgttatgagcttcaaaattatgag

SEQ ID NO: 7290 - DNA, 600 bp, Chicken  19866894192138_3
agctatcctgtttgctttgagatcaatagcctgttcatcttctcttatgtagctgcccatagatgctaggaaaaaaaaagtaaatctcatgattaatgtcaccttttgtcccttgtgtgtacaccgtagaggtgatgagagaatctcggcccacctgtgtaatgggcacattttcctatatgctcagagcactgggaaatcacktcagctggtgtcaactgccacaagagtctgttttgctggaatttgactttctgttccagttctgctgcttgccacaggactctccctctcatgtgygtaattgctacccacacttaatgcagcatgctgcttcatgcttcacaagctgaaagccatgctgctggaagctgccacatgaaaatatttcagtaccatattcacaaaaatactgatcacattcacaaggacagtgggactgctggctctaaaaaaagaaataacccagcctcctagatctgttatgagcttcaaaattatgagagtaagaaaaaaaaatggccttttactttcaggagtttatggcttattttgtttgtttcagtttatagcactcacatcttccaaggtttcctctat

SEQ ID NO: 7291 - DNA, 600 bp, Chicken  19866894192140_1
tcactcatgtcaccatctcgcccatcgccagacctgcaggatctttaacgagcaaagccaataaagacaaacccatccttcctgagcagatgcaaactgcccctattttttcatcactgcttgcttttgttttttgaagaagtcaccaggactgttcagaataggtgaaacactgtacagctttgatctatgcatggcttggctggctgctgtgccccattgcctcccatattgctgctgcaagggaaactagagctgctgctccacactcatcacctacagtttctcttcctttcctcyrgtgacacragcccagagcctgcccagggcttcatctgttctctgcaggagaagggctctttattcgggcactccggctgcttctgcctgcagcactggcagctggggggtccaggaggctcygtgagcctgagctcatggcatgaatccctgctgggactcctctggctccagggtcccttcaagcatccattagctccttgttaattaaaagccaagtgtgcacgtgcatgcacaaagtgcagctgtgtgcatccaggagcgatgcctctgagagcttttccttcacaggagatacaa

SEQ ID NO: 7292 - DNA, 600 bp, Chicken  19866894192140_2
cactcatgtcaccatctcgcccatcgccagacctgcaggatctttaacgagcaaagccaataaagacaaacccatccttcctgagcagatgcaaactgcccctattttttcatcactgcttgcttttgttttttgaagaagtcaccaggactgttcagaataggtgaaacactgtacagctttgatctatgcatggcttggctggctgctgtgccccattgcctcccatattgctgctgcaagggaaactagagctgctgctccacactcatcacctacagtttctcttcctttcctcyrgtgacacragcccagagcctgcccagggcttcatctgttctctgcaggagaagggctctttattcgggcactccggctgcttctgcctgcagcactggcagctggggggtccaggaggctcygtgagcctgagctcatggcatgaatccctgctgggactcctctggctccagggtcccttcaagcatccattagctccttgttaattaaaagccaagtgtgcacgtgcatgcacaaagtgcagctgtgtgcatccaggagcgatgcctctgagagcttttccttcacaggagatacaag

SEQ ID NO: 7293 - DNA, 600 bp, Chicken  19866894192140_3
tcaccatctcgcccatcgccagacctgcaggatctttaacgagcaaagccaataaagacaaacccatccttcctgagcagatgcaaactgcccctattttttcatcactgcttgcttttgttttttgaagaagtcaccaggactgttcagaataggtgaaacactgtacagctttgatctatgcatggcttggctggctgctgtgccccattgcctcccatattgctgctgcaagggaaactagagctgctgctccacactcatcacctacagtttctcttcctttcctcyrgtgacacragcccagagcctgcccagggcttcatctgttctctgcaggagaagggctctttattcgggcactccggctgcttctgcctgcagcactggcagctggggggtccaggaggctcygtgagcctgagctcatggcatgaatccctgctgggactcctctggctccagggtcccttcaagcatccattagctccttgttaattaaaagccaagtgtgcacgtgcatgcacaaagtgcagctgtgtgcatccaggagcgatgcctctgagagcttttccttcacaggagatacaaggctctcat

SEQ ID NO: 7294 - DNA, 600 bp, Chicken  19866894192140_4
cttttgttttttgaagaagtcaccaggactgttcagaataggtgaaacactgtacagctttgatctatgcatggcttggctggctgctgtgccccattgcctcccatattgctgctgcaagggaaactagagctgctgctccacactcatcacctacagtttctcttcctttcctcyrgtgacacragcccagagcctgcccagggcttcatctgttctctgcaggagaagggctctttattcgggcactccggctgcttctgcctgcagcactggcagctggggggtccaggaggctcygtgagcctgagctcatggcatgaatccctgctgggactcctctggctccagggtcccttcaagcatccattagctccttgttaattaaaagccaagtgtgcacgtgcatgcacaaagtgcagctgtgtgcatccaggagcgatgcctctgagagcttttccttcacaggagatacaaggctctcatggagaccctccctccatactacacactgtaggtgagtgcaaaacacaagaagaaccttttggtggtgagaaaattgctggagcagccagcatcatctcctgccctgtgcagctg

SEQ ID NO: 7295 - DNA, 600 bp, Chicken  19866894192151_1
aaatgttttaacagcatcagtcagtgggggaaatcatgcctgtatttatagtgcaaggtccttacttgaactctggtctcatctctgcactccaaggtggtttggcaaaccagaagtaatgaagtcctctcccccaggactgggcttctggccatggccacacccgctggccctttcctgctcatcagtctgactctgggatgtctcccgtttctctccagctagagatgtttgtcctgttcttgtgagctctgaggctccctttccttcctacagcagcccatgctgtttgagttggcrttctcccctttgtaagaagctatcattttccagtacttttaccgactgaattttgcctatggtcaaactctgccagtgtgagagaacacaatctccattcagtacaaaaattggccacactttaaggagcatgctgaggagaggcaggaggctgccacctgtgctttccgtccccggctgcatggcacagggctgtgctgcttggtggggcaaaggcttgtcagctcagaggcaccacagatggagatgcatcctgaatctggttatggctgcggagacttcagggctgctggtgctttc

SEQ ID NO: 7296 - DNA, 599 bp, Chicken  19866894192153_1
  misc_feature (1)..(125): n is any nucleotide
nnnnnnnnnnnnnnnnnnnnnnnnnnnnnnnnnnnnnnnnnnnnnnnnnnnnnnnnnnnnnnnnnnnnnnnnnnnnnnnnnnnnnnnnnnnnnnnnnnnnnnnnnnnnnnnnnnnnnnnnnnnnngccgcctggtgccactccctgcagtgcacagggacagccacagctccagcagtgctcagagccccgtccagcctgaccttggctgtctgcagggacggggcaccaccgtctctctgggcaacctgtgccactgcctcaccgccctcagtgccaaaccttcttccttacatccaakctaaagctcccctcttctaattggaagccgtttcccctcatcctatcacacagaccmcactaaagagcctgtccccttcttacaccccttataggtactgagcagagcacagacagcacacagtaccaacgcaaggcatcatttccacagcagcccaggggatctgaatactccagtggcagattaatttcagtgcaaactgatcagagacgaggagataactgcaccgtttattttgtgggcaaacagcaattcctttacagcctccatctcaaaatactttccctttgttgtgccat

SEQ ID NO: 7297 - DNA, 599 bp, Chicken  19866894192153_2
  misc_feature (1)..(68): n is any nucleotide
nnnnnnnnnnnnnnnnnnnnnnnnnnnnnnnnnnnnnnnnnnnnnnnnnnnnnnnnnnnnnnnnnnnngccgcctggtgccactccctgcagtgcacagggacagccacagctccagcagtgctcagagccccgtccagcctgaccttggctgtctgcagggacggggcaccaccgtctctctgggcaacctgtgccactgcctcaccgccctcagtgccaaaccttcttccttacatccaakctaaagctcccctcttctaattggaagccgtttcccctcatcctatcacacagaccmcactaaagagcctgtccccttcttacaccccttataggtactgagcagagcacagacagcacacagtaccaacgcaaggcatcatttccacagcagcccaggggatctgaatactccagtggcagattaatttcagtgcaaactgatcagagacgaggagataactgcaccgtttattttgtgggcaaacagcaattcctttacagcctccatctcaaaatactttccctttgttgtgccatcgctgcctcaaatacaaattcaaaagaagctcaaataagtccatatttctctaggag

SEQ ID NO: 7298 - DNA, 600 bp, Chicken  19866894192162_1
tacttcatggcttttgggaccatcaactttatgtggaaaatttaaaatgtaacattctgtttttgaatattagagattctctttcactatcatgataatggaaaaacaaacaaagatgtcttaagaattgcatttcttaagctatttaaatgatgtaattgaataaatgttgtttaagtctatataacagaaatgtggatgtgagttcaaagaggtacgtgaatctgaaacttctgactgagacatcccattttcagagaaattgatacaattactattgaagttgtatatatctagggrgagagagataccttcacagataacgtattttgtagaaagcagaatgtactgaaaacctcagcttaatttttcagcatgtaaaaaatacgtttatattctgaggtgaaaatcctgtttctgagcctgaattttcggctgtattacaatcaagtgactagaaaactgttcatgtcctcaaatgcaatgacttaaaagcaagtgtttgaattgtttgttgaacctttcacaccaaaagcattgaactatttcttgtatattacagagctgtgtttgtcttatttagacaatattgtcaacaga

SEQ ID NO: 7299 - DNA, 600 bp, Chicken  19866894192165_1
acatttttttggtgctgttgttgtgaccatacaaaaaacatggtagaattatcccacatttcattacttcaacgtgctgcttgtagttcttcagtattttatctcctgcagtttctccccatttttctcaatagggaaaactgaaaacgtaatcttacttcctgatgtattctaaactggtggcctctcagaagatagcacatttgtactgactttactaatacgtatttcctttactggtgaaggtttcaacaactgtcagaaatggaacagaaaggcagtcggttagaagtggaaatrwtgtgctgtgaaataccgggtagtgagcatttaagaatgggctgatgcacaccagtgaccactgctgcacacgtgccaggtgtatttttccttcttaggaagaggtatttgtgccagacaggtatcccggctttttaccatggctgaaccagtcagttcctgtcttttcaacatctcatagattgcttctcagctgcccttgcctcgatcttgtcatttttcatggctttcagccaaagctgttctgctggcgtccctccagtgttcctgaccctctacttcggaggtaactgcaagttg

SEQ ID NO: 7300 - DNA, 600 bp, Chicken  19866894192165_2
catttttttggtgctgttgttgtgaccatacaaaaaacatggtagaattatcccacatttcattacttcaacgtgctgcttgtagttcttcagtattttatctcctgcagtttctccccatttttctcaatagggaaaactgaaaacgtaatcttacttcctgatgtattctaaactggtggcctctcagaagatagcacatttgtactgactttactaatacgtatttcctttactggtgaaggtttcaacaactgtcagaaatggaacagaaaggcagtcggttagaagtggaaatrwtgtgctgtgaaataccgggtagtgagcatttaagaatgggctgatgcacaccagtgaccactgctgcacacgtgccaggtgtatttttccttcttaggaagaggtatttgtgccagacaggtatcccggctttttaccatggctgaaccagtcagttcctgtcttttcaacatctcatagattgcttctcagctgcccttgcctcgatcttgtcatttttcatggctttcagccaaagctgttctgctggcgtccctccagtgttcctgaccctctacttcggaggtaactgcaagttgt

SEQ ID NO: 7301 - DNA, 600 bp, Chicken  19866894192170_1
ttgtctctcagtcaatactaatgaatgttgacactgtggatggaaagagagcattttttctgatcctccagtactccagccactactactcacactccttccctccctgggcctctcctacagggaactgcatggagctccagagggcaaattcaaccctaaacatgaccagtgaaaatgccacctccccggtcatcgagttctgggagtaagtaaagaacaggctggtatccctttttcctccaagacaagcaatccccgggcaatgaaccaacctgcagaggtacttcctattaaacyatgctggtcagaagaggtcacagagagcaagctggtcaggtcagggcaaaggctcttggggacagcaaagtcagtcaaggatggcatcactgagcctgtggtgtttgtccagagccgtgctggtgtatctcagtgccagtggacatagtccttctcttacacaagaggtgtccagccttttgatttgcctgagacgcactgagtgaagaggaattgtcttgggctgcatgtaagacatataatcttgttaatatatataaataagaaaacttttttttttttttacatttttcattacag

SEQ ID NO: 7302 - DNA, 599 bp, Chicken  19866894192175_1
  misc_feature (1)..(60): n is any nucleotide
nnnnnnnnnnnnnnnnnnnnnnnnnnnnnnnnnnnnnnnnnnnnnnnnnnnnnnnnnnnncccctgagcattaaccttatttagctgaatggcagaaactgctctctactctgtacctatttcaattgccttgatccctcctcagtccctacctccctttcacacaaagaacattctcttcttgagaaaaagtacagagatggtttttattgactgccccagtgccacagcttgcactgtaagacccacaagacgtgataacgtggaccatatccctgaactaattataaagatattagkgctgtttctatgcttttcactatcagaaccttttgctaatacaataccaaagatacatggaacatatctgatttccatattcccaatgcattctagcaaggtgctagaaaaagaaacaaaatcagtgcggtttaatatagtgagaactgcatccaaaatacagatgcccccgctctaggacatacactgtgaaatcctgccacttcctgtatagacatcgccactgtgactctatcatccaatcaagtcatcgagacaatttagaatggtaatagagttctcgaaggttcggtacaatc

SEQ ID NO: 7303 - DNA, 600 bp, Chicken  19866894192180_1
atgtcaagaattcgataaaagcaaatttcttcattcatgcatactatgtgcatgctgagatttgttcatcaccagatactttaagggctccagatgagaacaattaatcaagtgaaaatttattttagtatgtggtttgattcaattacatctaatcatactggttactgtcttagactctaagcttaaagcacaaataaatccattcccctttttacttaccactgtttgtttccaaagcaactcctgagctgtgtatatggctatgtatcaatgtgcagctaatagctctgcttctaytgaggttttggcytcctttctttattgttttatacagtaatttctgacagcctcttggaaaatcagtatgttattctgcaaattatttcactggacaaaacacatcaccctttctgagatggagaagtgctttactatgtagtcccactgaatttaatgactgagatgaataagtatatgttgatataagtcaaatgaattacagaatgtggcatataatcagcatatatggacactagcaatttaaatttttcctttttcttcctttattttaaatgaggtatttgtataacttaatta

SEQ ID NO: 7304 - DNA, 600 bp, Chicken  19866894192180_2
gataaaagcaaatttcttcattcatgcatactatgtgcatgctgagatttgttcatcaccagatactttaagggctccagatgagaacaattaatcaagtgaaaatttattttagtatgtggtttgattcaattacatctaatcatactggttactgtcttagactctaagcttaaagcacaaataaatccattcccctttttacttaccactgtttgtttccaaagcaactcctgagctgtgtatatggctatgtatcaatgtgcagctaatagctctgcttctaytgaggttttggcytcctttctttattgttttatacagtaatttctgacagcctcttggaaaatcagtatgttattctgcaaattatttcactggacaaaacacatcaccctttctgagatggagaagtgctttactatgtagtcccactgaatttaatgactgagatgaataagtatatgttgatataagtcaaatgaattacagaatgtggcatataatcagcatatatggacactagcaatttaaatttttcctttttcttcctttattttaaatgaggtatttgtataacttaattaaaaactcagaatt

SEQ ID NO: 7305 - DNA, 600 bp, Chicken  19866894192184_1
aaagacatacctaagcccagatcaatttttgaagcggtgatttgaagttgcagcagaataactactcctcaagcctgccaatttgataggtaagaatgtggtttaaagaattgaaatctacactgaaattttacactgctgagaatagcccgcagttattcaacacacttcttctaaagggaaaataaaacactttgaggattttagtgacacttaaagcaatttaacctgcagtttcccattttgcatttcctttctctccctcttcatccaacagcatctctcctacagcaggctaaragcattaaggaatgatgcaagataccatctagctgtgcacaagtactgctctaaaccaccatacttataaccacccttcraaccaacatagctctgaggaacatatctatctctacctctgtatctctctcatcaggctccttcaattcacataaagtggctttccagcccctctcgctttgagtggtggcacaagttcatttgccactctctgaatttcactccatctggctcaaaaaaccaacctactgaccacatgttgtccaagctagccctgaacacttcctgctcttggaaatg

SEQ ID NO: 7306 - DNA, 600 bp, Chicken  19866894192184_2
atttgataggtaagaatgtggtttaaagaattgaaatctacactgaaattttacactgctgagaatagcccgcagttattcaacacacttcttctaaagggaaaataaaacactttgaggattttagtgacacttaaagcaatttaacctgcagtttcccattttgcatttcctttctctccctcttcatccaacagcatctctcctacagcaggctaaragcattaaggaatgatgcaagataccatctagctgtgcacaagtactgctctaaaccaccatacttataaccacccttcraaccaacatagctctgaggaacatatctatctctacctctgtatctctctcatcaggctccttcaattcacataaagtggctttccagcccctctcgctttgagtggtggcacaagttcatttgccactctctgaatttcactccatctggctcaaaaaaccaacctactgaccacatgttgtccaagctagccctgaacacttcctgctcttggaaatggaggtttccatggggaaggtttccactttgcagaatgggttctgtgatgatggcttcccatctgcctgcctggaaggctt

SEQ ID NO: 7307 - DNA, 600 bp, Chicken  19866894192190_1
gattaacaacctgagatgccctatttgagaccttggaaaactgtcaggacttctttacaacctggaagctgtcctgcatcatcaacactgctaggtggatctcatactacttacccagctcaaagaatgcccctcatgcttcgtccttgttcctatctgttccagggcttacagggcctgcttaaatcccatgctcctctgggaccctcataagaccggcagtattcccttaccttggcttagtttacaagtcttcccacctgcttcagcacagactgctctagaagacaccacaatatyccgagagcccatctttgcactacactttggcaacactgttatgagctcttgcattttctctccagtgcttcatcagcccatcccactcaagacacaaagtgttaagatccctactcacccacagaaggcaaggctcgrtggtggtcctccacattttctaaacttacctggtgtcactgggagactaggtaaagggactgtaagtccttttacaaatgcctggctcttccatgcctccttgcacagtaccgtgggtcagtagccagcaggtacttgggcatctcaagggagcagtggaag

SEQ ID NO: 7308 - DNA, 600 bp, Chicken  19866894192190_2
cttcgtccttgttcctatctgttccagggcttacagggcctgcttaaatcccatgctcctctgggaccctcataagaccggcagtattcccttaccttggcttagtttacaagtcttcccacctgcttcagcacagactgctctagaagacaccacaatatyccgagagcccatctttgcactacactttggcaacactgttatgagctcttgcattttctctccagtgcttcatcagcccatcccactcaagacacaaagtgttaagatccctactcacccacagaaggcaaggctcgrtggtggtcctccacattttctaaacttacctggtgtcactgggagactaggtaaagggactgtaagtccttttacaaatgcctggctcttccatgcctccttgcacagtaccgtgggtcagtagccagcaggtacttgggcatctcaagggagcagtggaagcagttagggttccctgtccccttcttgttccctctttttatccattgactctcctctatgtctttttttaatcattttctcacctgcaattacttctttttttcccctctccagtgtattctctttgcctcccttctt

SEQ ID NO: 7309 - DNA, 600 bp, Chicken  19866894192193_1
ggctgaatgtgatgacaagctgaaccttaaaagcctaaggtatagacttactaaaagacttgctcggtatgtggttttaagggttggagtggtaacatttaggctatactgcaggccccaaggacacccttgggttctcattgggggaccctgaaagttctgtatgttgccttaaaactagtctatctgaatgatccacacagtctaaatcttcaggaaattttcagtcaccttgggaaaaatactgaagagattcagggagcaaaacaaggtcagcaagaaaggaagaccactttttckgtcaaaatgaatgagaattgagtggaacaaaaaacctaccagccttttgattgctcctgtagtctgggcaccactccctgtgaaacctccaaaatgggactccgtgcttttattcacagaatttgaattaatcaggtgcttttaacctaatgaaagaaatcttttgtgatgttacagtctatgcatctgtaggtcctctgcttgattaagatctcaaatccatcatctagtttccatgcaaagaataaccaggcttgctacttcagatctagtggggcatgaaaaggcacaccaagctca

SEQ ID NO: 7310 - DNA, 600 bp, Chicken  19866894192193_2
ccaaaacagtgtggtcaacagggagagggtggtgatcctgcccctctgctctgagctgtgagacctcacctggagtactgcatccagatgtggcgtcagtacaggagagacatggacctgtacatgtccagaggagggtcacaaaatgatccagtgatggaacacctctcttacaaaggcaggctgagagagctggggctgtgcagggagatctgagagcggcctttcggtatccaaagggagaggtggcagactcttcgtcagggtctgtggtgacaggacaagggagaatggtttcaraatgaaagaggagagaatcaaactagtaaggaagattcttcctaagataaggaagaagtttctttactataagagtggtaaaacattgtcacaggttgcccagagatatgaaggatgcctcatcttcacactcaaggtcaggctggacggggatcggagcacctgatggagctgtaggtgtacctgttcattgcagaggagttgggcctttcaagctctttccaactcaaatgattctgtgattctatgattctacattggggaatgctaggaatgttctgttttattttaaattgatat

SEQ ID NO: 7311 - DNA, 600 bp, Chicken  19866894192193_3
caaaactgttcaaactcaccactttagtggaaaattgtctgacaataaataagtgtcatgcagttcctctccactatcagagatgtgcaatagatcccatagttggtcccccatggatctctatgcaatcatgtattttcagattgattgactctatttacagtgcttatttaaagctgacatggaccacaccctcaagaaccaatttctatcctctgagtgtaaaagtcatgtagctgatcagctcagaaatatgtgtctacattgtgtagacatcaatgcttgagcagtaaaatttcyactcttcatgctttctgaaaaaaaagaaaaaaaatttgaaagacaaatttagctgaaaatatacttttgattccaaagcagctttgacacaatcttttaataaacattaaaaaaagattcttcttgcagcaggagaaaacatattggaatatctaaacttgatatggtgcctcttctgcataagacgcaaaccatggcaatcgagtgagaagtttatctctaggcatcagactaaacctgcatttcattagttctcagtcttgctaggaattaactccaccatgaattcatgattaacat

SEQ ID NO: 7312 - DNA, 600 bp, Chicken  19866894192198_1
ctctagcctttgtctaagtccatctttcccacttttgttttgtttacctggtggttatttcattttcagaactatattttctccccacttcctgggtttgcttcatttttttaatttgtctgaactcagtctagctccagtgttttatataatctaaattcccaatgcccgataattggactactgatcatcagctttatataatatgcaagggtgttggaacttccttaatatgagctggggtgacatatttaggaaaagaacaacacaacaagccaaaccgcattgcatgtgtaaaarttgcatgtgaatatctaattgatctaatcctacacagtgttcctacaagagctagtgctaaacaaaactaaacaaaacaacacaattttgatatatacaatctctttaagtgtgaaattggattttcaacataaagatcaaattcactgacttcagtgatgttgcaccagggataaattggccttttagtcattttatggcatctgcaaactcatacctcatgccttatctttgtctgatctgctatcaaatacttattcatacaggaaataatttgactctttagcaaaaaggcaccaa

SEQ ID NO: 7313 - DNA, 600 bp, Chicken  19866894192198_2
atcaaattcactgacttcagtgatgttgcaccagggataaattggccttttagtcattttatggcatctgcaaactcatacctcatgccttatctttgtctgatctgctatcaaatacttattcatacaggaaataatttgactctttagcaaaaaggcaccaaattcaaataatatctgctagaccaataaatatgaaaatgctgccaaatgtgcatgaataaatccccataatcttacttcttagatttttatccatacaggatatgttaggaagaatattgtagaggaactgggtcygattttcatctctgtggtataaatcaagagtagctcttcagtagtcaataaaattacactgttaaaccagaacatgttctttcctttttaagatgtttcaccactgttggtttaacaaacatcttagaagtagaaaagtattcagatttcattataattattttctccagtaattaaaagttagacattttcctgcattaatttaatttttggttattatagtcactgatttttagaacaccctggggtgcagttttgtgaagttgttaggtgaatcaccagtgagcacaaaatttgagg

SEQ ID NO: 7314 - DNA, 600 bp, Chicken  19866894192219_1
atttgcttgatagatcaccaactgtgctcaataaatatagattcaagattggtcttgacacttggcttctactaatcattttaagtctgaaaggaaatacttttctggaactggacttcttccataatagcttggaaaatcaaactggtgcgtatcaggtaataatttgtggtttcttgacagctgcataaaaacctcatgctttgagcatttttaatacacaaaaacaatggcccaaatgttttgatattagagtgtaaaattatggagagaactatttgtgtgaatgagaaatatttytctagtttgttacttawgtatcatttctgcttttctagaatatttcatttgtttggtttgaccacagcataacaactcattaacctatattgttaagactctgtttttaatttctagaagagtgagtgaaatgtaataaacaaaaatctaatctcaaaaccgtccttgtactccttggtcaatttgaaggttatagcatgaaaatgcctttagaaggaataataaaacctgcgtggtgacgtgcatagctgatctgaggcatgcaagttaacaaaaatactgaaaacaacactgtagact

SEQ ID NO: 7315 - DNA, 600 bp, Chicken  19866894192219_2
ccaactgtgctcaataaatatagattcaagattggtcttgacacttggcttctactaatcattttaagtctgaaaggaaatacttttctggaactggacttcttccataatagcttggaaaatcaaactggtgcgtatcaggtaataatttgtggtttcttgacagctgcataaaaacctcatgctttgagcatttttaatacacaaaaacaatggcccaaatgttttgatattagagtgtaaaattatggagagaactatttgtgtgaatgagaaatatttytctagtttgttacttawgtatcatttctgcttttctagaatatttcatttgtttggtttgaccacagcataacaactcattaacctatattgttaagactctgtttttaatttctagaagagtgagtgaaatgtaataaacaaaaatctaatctcaaaaccgtccttgtactccttggtcaatttgaaggttatagcatgaaaatgcctttagaaggaataataaaacctgcgtggtgacgtgcatagctgatctgaggcatgcaagttaacaaaaatactgaaaacaacactgtagactgggggaagggaggatta

SEQ ID NO: 7316 - DNA, 600 bp, Chicken  19866894192222_1
tgttccttctgaagactgtcctctgtcaaatcctctccttatccagacggaaaagatcagaacaaaataagtcttatccagagctaaaaaatcatggcagcatccaacagagaagtaatccaaatagaaagaaataaccatgatggaaggagtgactgtttctccccccttcaacctctgtttgccccaggaactgcagtgatacaaagggctcacagctcccctccatgtgggcatgaaccgaacagggtctgcctctcccactgatccccccctcctgaaggggatctcaaggagctycaacaagccttcagctcacagcaaacccagctactcacgtgcaataggcacacagccctcacctgcacacgycttccaaaaggtccccttctcctcagtgtgctggtgaagctgcagctcctgcgtccctactgcagtcagtgctcagctgtaggatcagtactgggtccctgggatcctcctcagcygctctctgtctcgccttctgcctctctccctctcacacttaatctctcccccctctggtaggtgcaggctgtcacagrgctgttatcctgccagacatccagatcwtttttt

SEQ ID NO: 7317 - DNA, 600 bp, Chicken  19866894192222_2
cttatccagagctaaaaaatcatggcagcatccaacagagaagtaatccaaatagaaagaaataaccatgatggaaggagtgactgtttctccccccttcaacctctgtttgccccaggaactgcagtgatacaaagggctcacagctcccctccatgtgggcatgaaccgaacagggtctgcctctcccactgatccccccctcctgaaggggatctcaaggagctycaacaagccttcagctcacagcaaacccagctactcacgtgcaataggcacacagccctcacctgcacacgycttccaaaaggtccccttctcctcagtgtgctggtgaagctgcagctcctgcgtccctactgcagtcagtgctcagctgtaggatcagtactgggtccctgggatcctcctcagcygctctctgtctcgccttctgcctctctccctctcacacttaatctctcccccctctggtaggtgcaggctgtcacagrgctgttatcctgccagacatccagatcwtttttttttttttaatgggaacccraggcacctgcctcctattcgttgttatttcagtccatatcagtaatggtgctg

SEQ ID NO: 7318 - DNA, 505 bp, Chicken  19866894192222_3
aggaactgcagtgatacaaagggctcacagctcccctccatgtgggcatgaaccgaacagggtctgcctctcccactgatccccccctcctgaaggggatctcaaggagctycaacaagccttcagctcacagcaaacccagctactcacgtgcaataggcacacagccctcacctgcacacgycttccaaaaggtccccttctcctcagtgtgctggtgaagctgcagctcctgcgtccctactgcagtcagtgctcagctgtaggatcagtactgggtccctgggatcctcctcagcygctctctgtctcgccttctgcctctctccctctcacacttaatctctcccccctctggtaggtgcaggctgtcacagrgctgttatcctgccagacatccagatcwtttttttttttttaatgggaacccraggcacctgcctcctattcgttgttatttcagtccatatcagtaatggtgctgcacaaatctggcattaataaa

SEQ ID NO: 7319 - DNA, 427 bp, Chicken  19866894192222_4
atccccccctcctgaaggggatctcaaggagctycaacaagccttcagctcacagcaaacccagctactcacgtgcaataggcacacagccctcacctgcacacgycttccaaaaggtccccttctcctcagtgtgctggtgaagctgcagctcctgcgtccctactgcagtcagtgctcagctgtaggatcagtactgggtccctgggatcctcctcagcygctctctgtctcgccttctgcctctctccctctcacacttaatctctcccccctctggtaggtgcaggctgtcacagrgctgttatcctgccagacatccagatcwtttttttttttttaatgggaacccraggcacctgcctcctattcgttgttatttcagtccatatcagtaatggtgctgcacaaatctggcattaataaa

SEQ ID NO: 7320 - DNA, 399 bp, Chicken  19866894192222_5
gagctycaacaagccttcagctcacagcaaacccagctactcacgtgcaataggcacacagccctcacctgcacacgycttccaaaaggtccccttctcctcagtgtgctggtgaagctgcagctcctgcgtccctactgcagtcagtgctcagctgtaggatcagtactgggtccctgggatcctcctcagcygctctctgtctcgccttctgcctctctccctctcacacttaatctctcccccctctggtaggtgcaggctgtcacagrgctgttatcctgccagacatccagatcwtttttttttttttaatgggaacccraggcacctgcctcctattcgttgttatttcagtccatatcagtaatggtgctgcacaaatctggcattaataaa

SEQ ID NO: 7321 - DNA, 374 bp, Chicken  19866894192222_6
agcaaacccagctactcacgtgcaataggcacacagccctcacctgcacacgycttccaaaaggtccccttctcctcagtgtgctggtgaagctgcagctcctgcgtccctactgcagtcagtgctcagctgtaggatcagtactgggtccctgggatcctcctcagcygctctctgtctcgccttctgcctctctccctctcacacttaatctctcccccctctggtaggtgcaggctgtcacagrgctgttatcctgccagacatccagatcwtttttttttttttaatgggaacccraggcacctgcctcctattcgttgttatttcagtccatatcagtaatggtgctgcacaaatctggcattaataaa

SEQ ID NO: 7322 - DNA, 600 bp, Chicken  19866894192228_1
aagttttctttaaaattattgctgttacccattagactgccaaggagcatctctagaacactcaactgaatgaatgttttcactgaattaaaaatctttgggggtagggattagaagaacaggaagaaataacaggccacaaaacaaaacaaaaaaaccaaaacaagcagtccggacttctttgtcccaggtaaggagagcaaggctaatatggagatgtgaagtgtttctcctggaagcagttcattctgtgcaggctgggacttaaatggatccttgcagaagtcatcagccttctgycatcacagacgttaccttggccatacgcggtattcaggctataattatcacagctcaatcatttatgactaacaaaaagttaaaacatccgtaatataacatatgttagcaatgtggcattcactctcagaggcaattgaagtattaattctaaatgtagcaaaaaaaaaagccaaaccaaaacaaaaaccccccagacccaagccgaaaacaatatgtactactgtctaagactgattacttcattaaagtgcctttcaacaatctttatatcccagatctcttgggagtaatgtgcag

SEQ ID NO: 7323 - DNA, 599 bp, Chicken  19866894192231_1
  misc_feature (1)..(174): n is any nucleotide
nnnnnnnnnnnnnnnnnnnnnnnnnnnnnnnnnnnnnnnnnnnnnnnnnnnnnnnnnnnnnnnnnnnnnnnnnnnnnnnnnnnnnnnnnnnnnnnnnnnnnnnnnnnnnnnnnnnnnnnnnnnnnnnnnnnnnnnnnnnnnnnnnnnnnnnnnnnnnnnnnnnnnnnnnnnnnngaaaaaataagaaggaaaaggagccacaggaatgggcaggaacagaacagagctttccatgaccaagaaacatcgctagcagtttttcaccactttatgttgcagcagctgcctccatacacagcrgctcatgcaactcatgccacacttggagcccagcagcagccactggrggttgcccagagacaccagcagcacccagagacaccagcacgcaccaaaggcattcagagcagtgaaggccaggagcagctctcgctgctgctcagcagagccaggcgctgcccgcacactgcaggaagggcagcacagcctgcaccactccaacagcaccccggaggcacagagccctgggggctgtaarggacctccagagacctctcagtccagcccccctaaagggaagggggaaggcacgaggagag

SEQ ID NO: 7324 - DNA, 599 bp, Chicken  19866894192231_2
  misc_feature (1)..(127): n is any nucleotide
nnnnnnnnnnnnnnnnnnnnnnnnnnnnnnnnnnnnnnnnnnnnnnnnnnnnnnnnnnnnnnnnnnnnnnnnnnnnnnnnnnnnnnnnnnnnnnnnnnnnnnnnnnnnnnnnnnnnnnnnnnnnnnngaaaaaataagaaggaaaaggagccacaggaatgggcaggaacagaacagagctttccatgaccaagaaacatcgctagcagtttttcaccactttatgttgcagcagctgcctccatacacagcrgctcatgcaactcatgccacacttggagcccagcagcagccactggrggttgcccagagacaccagcagcacccagagacaccagcacgcaccaaaggcattcagagcagtgaaggccaggagcagctctcgctgctgctcagcagagccaggcgctgcccgcacactgcaggaagggcagcacagcctgcaccactccaacagcaccccggaggcacagagccctgggggctgtaarggacctccagagacctctcagtccagcccccctaaagggaagggggaaggcacgaggagaggacacactgctggctcacagcctgggggcaaccactggtcaactgct

SEQ ID NO: 7325 - DNA, 600 bp, Chicken  19866894192231_3
aagaaacatcgctagcagtttttcaccactttatgttgcagcagctgcctccatacacagcrgctcatgcaactcatgccacacttggagcccagcagcagccactggrggttgcccagagacaccagcagcacccagagacaccagcacgcaccaaaggcattcagagcagtgaaggccaggagcagctctcgctgctgctcagcagagccaggcgctgcccgcacactgcaggaagggcagcacagcctgcaccactccaacagcaccccggaggcacagagccctgggggctgtaarggacctccagagacctctcagtccagcccccctaaagggaagggggaaggcacgaggagaggacacactgctggctcacagcctgggggcaaccactggtcaactgctggtcaaccaggacctccaggtccttctctgcacagctcctttcaacctgtactaacgctgtggttattcctcccrggtgcaggaccctgcaccttccttgctgaaccccgtaaggctcctctccacacagctctcagcctgtccaggtctcgctgaacggcagcacagccttcaagtgcatcagcctctctt

SEQ ID NO: 7326 - DNA, 600 bp, Chicken  19866894192231_4
agcagctctcgctgctgctcagcagagccaggcgctgcccgcacactgcaggaagggcagcacagcctgcaccactccaacagcaccccggaggcacagagccctgggggctgtaarggacctccagagacctctcagtccagcccccctaaagggaagggggaaggcacgaggagaggacacactgctggctcacagcctgggggcaaccactggtcaactgctggtcaaccaggacctccaggtccttctctgcacagctcctttcaacctgtactaacgctgtggttattcctcccrggtgcaggaccctgcaccttccttgctgaaccccgtaaggctcctctccacacagctctcagcctgtccaggtctcgctgaacggcagcacagccttcaagtgcatcagcctctcttcccagctctgtgccatcaccaaacttgctgaaggtggactccatcccttcatgcagatcagtaacgatgatgctgaacaacaccgtactcaacactgacccctggggaacactgctggccacagacctccaaccacactgtgccgctgggcacaacccctgagctctcccagcagctcccaac

SEQ ID NO: 7327 - DNA, 600 bp, Chicken  19866894192231_5
tcagccacgacccggcctgtcgctctcagcccctctctcactcacagcgcccgcatccccccacgcacgtggctgacagcagcccctggggggacccgatgtgcccatcccacgcaggggcagtgagctgagctcaggggcagacatcccacggcccacagccgccccggtgctggtgcccacagcctgcaggcagcctgggaagcggatggggggcctggatgccgctctgacccccaggctgggatcgaggagtgccgtgtcctgctcccagtgcctgcacagcgagagcaggtcggrttggtgtgctgtgaggatcattttgtacagtcctgcctgggggtggggacagatggggcggaggggaacgcaggcagcaggcaggtcccagcccctgcatctgccgccctgttggtcacggcgctcaggtgcagcagatgacagtgcaacataacccagtgtgggtaatgtgatgtgggaacagcagcccgggtccccgctggcgtgactcgagcccagagtggcacagctcagcgcagccccagactgcacgcagaccaccggcatcgctctgcccgcccagcagtgcccaccttcagc

SEQ ID NO: 7328 - DNA, 600 bp, Chicken  19866894192236_1
caactaagagatggagctagctgaatcatcagttaaaatacagagcttaggattactggcttgttcgaatataggaatcattcaaaccccaatatataccagaaaaatgatcgctccattctcgcagttgtccagtttcatggatttgataattaggagggagatgtagaaatgatttgtctgaacaaacagcatattcaagttagacatgaggtaaactgaaccaacaatggcagatctgactaatcaagaagactgattctggatccgaatgctctaatgtggtcatttttcataaamaaaatgctttctttttctacactggtgtggttggtttcagcatacagcagcgtgaaagcaggctcctctccagaaactttgtaatcagcatttmgtgtttttggagagtcataaggcctgtgcttctcatgtgtttttattcatcaattatttctctctaagagttagttttgcagtggaaagtattgttcatacagtcgtgttttcattgcagtgtaatgtgcccagccttcctctgaccttatgcaagtcatagctggggctatttttagagattatatttgcagcaaaacgctacaa

SEQ ID NO: 7329 - DNA, 600 bp, Chicken  19866894192236_2
tataccagaaaaatgatcgctccattctcgcagttgtccagtttcatggatttgataattaggagggagatgtagaaatgatttgtctgaacaaacagcatattcaagttagacatgaggtaaactgaaccaacaatggcagatctgactaatcaagaagactgattctggatccgaatgctctaatgtggtcatttttcataaamaaaatgctttctttttctacactggtgtggttggtttcagcatacagcagcgtgaaagcaggctcctctccagaaactttgtaatcagcatttmgtgtttttggagagtcataaggcctgtgcttctcatgtgtttttattcatcaattatttctctctaagagttagttttgcagtggaaagtattgttcatacagtcgtgttttcattgcagtgtaatgtgcccagccttcctctgaccttatgcaagtcatagctggggctatttttagagattatatttgcagcaaaacgctacaagaatgacagtagcaaggatgctgccaatgcgaaataaatccatctgcatctcttccttctctgagccacataaaaagtagatgtcactgaacaa

SEQ ID NO: 7330 - DNA, 600 bp, Chicken  19866894192236_3
ggggctatttttagagattatatttgcagcaaaacgctacaagaatgacagtagcaaggatgctgccaatgcgaaataaatccatctgcatctcttccttctctgagccacataaaaagtagatgtcactgaacaatctaaagcaggacagatgcaattctaaatcatggatatttagggactgaatctggctagggccaacgtggccagcatccctgtgcttcccaaggtaagcagggaacattatagtgagtggctgtgaaataatgctttccttctctgctgtcttgagctctttcwgtgtgcaaacaaagccacagatacccaacccttatacttyagagtgtaagcttgtccctgggtggaggaaccacagaggaattgttcatttactgggtaggctggaggggcaatggcattgattcagtaaggggatttaaacacattttggtcagtgttgggagctgcagtggacagaatgaagctatcaacacaggtaatgcacctcaacattaacagcagttaatgcacactagactgagccaggctaaaatgcgggcctttacagcaaagggcagaaagtcagaagccgggagcttt

SEQ ID NO: 7331 - DNA, 600 bp, Chicken  19866894192236_4
aagaatgacagtagcaaggatgctgccaatgcgaaataaatccatctgcatctcttccttctctgagccacataaaaagtagatgtcactgaacaatctaaagcaggacagatgcaattctaaatcatggatatttagggactgaatctggctagggccaacgtggccagcatccctgtgcttcccaaggtaagcagggaacattatagtgagtggctgtgaaataatgctttccttctctgctgtcttgagctctttcwgtgtgcaaacaaagccacagatacccaacccttatacttyagagtgtaagcttgtccctgggtggaggaaccacagaggaattgttcatttactgggtaggctggaggggcaatggcattgattcagtaaggggatttaaacacattttggtcagtgttgggagctgcagtggacagaatgaagctatcaacacaggtaatgcacctcaacattaacagcagttaatgcacactagactgagccaggctaaaatgcgggcctttacagcaaagggcagaaagtcagaagccgggagctttctgcttgcagtagctagtcctcaagccaagttgctgctgc

SEQ ID NO: 7332 - DNA, 600 bp, Chicken  19866894192244_1
ttcctcactgagaccgctggttggacccagtctccactcatgctcagtcagctctgtgccttgatggcacagtacttgcatccacaaagctggctgactcaaccaaacctccttatccacctggtatccaggggtcagtacatcatccattcactaaatccatatactggtccttaagcttacatattgatcccaattggtaatccagaccgtatcactatgtgtcgcaggactcctcctgctttctaagcagactacaggactgcccatccacgagcattagcaagcttagcagtatckctacatcttgtatcagtgcctagaggacgagggattcaggcctggaaagatgtactgaaaaacgtcattccccggatgtggatcctgtaagaggtcgctttgtcataaatatcgccagcagcgctcacgctgtagcaagcgttttttctacagagaagctccgtccgtccgcgatacaaacacgccgcctctacccagcaacattccccacacccaacatggctcctcaatggcttcacccgctcttcagcgccgccctccagcccggcagcccacctcccccaccggttcggatctgct

SEQ ID NO: 7333 - DNA, 600 bp, Chicken  19866894192247_1
aaacatttgttgatcagatttgtcctcaccctgcagttacaaagagagcaaggttataaaccagatgtcagggggcattgggctctcaggatacccagtgttatatctcctatcctatacagctataggatagtaccaatccagaaagtaattgatcctctatggagtccttgaataactttgatatgaaggtactttgctggtatgcatcatattttatggggttttataatcaattctaacataataagtgtaaaacaagctttaatattcatatgggcagttgcatgtcacccaaaytcttattcttaaattgtgtctttcttctcttaattctaactggctgttgcaaccctatgcacgtatgcaagttgtaaaatgaaacagaggaaaaatacacaactgttttgaagtttgtaaattgcagctatatgatatcacacatttaagaaagtaaaaaaaaaatacaagagcaaaactttattatctctatttttagagattggtggggggaaaaagtgggattcagatagcaggagaaaattgaatttgtccacttgtcacaaaatattcccctgattctatgtggctacgtacctc

SEQ ID NO: 7334 - DNA, 600 bp, Chicken  19866894192248_1
cctttttgtctccataatagtttcattaaggttggaaaaagaccactaagatcatctagtcctaccatcaatccatcaccaccatgcctgctaaaacaacttcacggtgatactcaaaacaaaggcctatgccactggtacaaacaatttcaccgcctgcatcttgtctagtctattgatgttaaacaagtgccctttgtgctgaagatgaaccttacagctgttttgttcctatttcattataatagacatgcaagggaagaaaatcacaaagtcattaaggtgggaaagagtattaaractatctagtccagccatcaactcatcaccacaccactaaaccctatcactcaatgcaatgtctacccttttcttgagaaccttcaggaacagggatatcaccacctccctggtcagactgctccaaaactttaccacgctttctgagaagacatttttcctaatatccaacctgaataaaatataaaaatattataaaaataaagaaaataaatataaattaccttgtaagtccgtatttctgattcacatataggttgcccaggtgaggttatgaatgccccctccctggaagcattc

SEQ ID NO: 7335 - DNA, 600 bp, Chicken  19866894192250_1
tcttgggttttccttaaagacttggtaaatctgcatgtcttgtgtttcatctctttctattattaaagtgcaaagctatgaataaccttaacttctcattgttttcagttttcttttagagaaaaaaaaccaaaaaaaaccttttggttcatttgattttcctttaacaatgtaggtcaggaactaattttgcaatttggctgcactggctctaaaatgtgctgatatgagaccacgtcagtcctgcagagatcgcgccagcattctgagcagaagcttttccccaaatcatttccttaygattgctgtaggctgtagaacaatgaaatawgaagcactgactaaataagacttaaagattatggcactacgtgatctttttgtaaaatsgaagatttcacataacagcctggcacctccatggtgtgaatgcatacagaatgtttagtcatcttttttttttccctctaataacttagtgaaatctctccctgttcacttccaggtgattgggatagttacaatccatcttcgtcaaatgtaatatatgaagaacagtcaccgttatcctcatcttcacattctgcttccccacctgaa

SEQ ID NO: 7336 - DNA, 600 bp, Chicken  19866894192250_2
tgcatgtcttgtgtttcatctctttctattattaaagtgcaaagctatgaataaccttaacttctcattgttttcagttttcttttagagaaaaaaaaccaaaaaaaaccttttggttcatttgattttcctttaacaatgtaggtcaggaactaattttgcaatttggctgcactggctctaaaatgtgctgatatgagaccacgtcagtcctgcagagatcgcgccagcattctgagcagaagcttttccccaaatcatttccttaygattgctgtaggctgtagaacaatgaaatawgaagcactgactaaataagacttaaagattatggcactacgtgatctttttgtaaaatsgaagatttcacataacagcctggcacctccatggtgtgaatgcatacagaatgtttagtcatcttttttttttccctctaataacttagtgaaatctctccctgttcacttccaggtgattgggatagttacaatccatcttcgtcaaatgtaatatatgaagaacagtcaccgttatcctcatcttcacattctgcttccccacctgaaatgtgttattttccagtaccaggagaagctt

SEQ ID NO: 7337 - DNA, 600 bp, Chicken  19866894192250_3
acttctcattgttttcagttttcttttagagaaaaaaaaccaaaaaaaaccttttggttcatttgattttcctttaacaatgtaggtcaggaactaattttgcaatttggctgcactggctctaaaatgtgctgatatgagaccacgtcagtcctgcagagatcgcgccagcattctgagcagaagcttttccccaaatcatttccttaygattgctgtaggctgtagaacaatgaaatawgaagcactgactaaataagacttaaagattatggcactacgtgatctttttgtaaaatsgaagatttcacataacagcctggcacctccatggtgtgaatgcatacagaatgtttagtcatcttttttttttccctctaataacttagtgaaatctctccctgttcacttccaggtgattgggatagttacaatccatcttcgtcaaatgtaatatatgaagaacagtcaccgttatcctcatcttcacattctgcttccccacctgaaatgtgttattttccagtaccaggagaagctttaaggaaagttcagctgtctgagaaactggaacaagcaaagaacactgtgcctgaaaag

SEQ ID NO: 7338 - DNA, 599 bp, Chicken  19866894192252_1
  misc_feature (1)..(32): n is any nucleotide
nnnnnnnnnnnnnnnnnnnnnnnnnnnnnnnncttgataatgtcagaattcaatagtatttgactgtatgtacattacttaagatgtgtcaaattaaggaagagtccgagtttaggaggagtagggagaatatcatagtcccttggtagcagaaatgcctgcaaactgaacttttcatgcatgtgaaatcactctctaagcgccctgtctttgatctctgtacttctgaatggactagctactctgattcactgaagatatcttcctcctacctgagatgcagtatagcttttttcagtwgagttgaagattctgtttgattacacaatgaacacaagtctaatgtataaaagtatattttaaaatttgtgcttgctcattccaaaggtagtcattgttactgtggaagcaatttcctctcatttttttttttccactatatacacccccatgtctgcatgaggggagtatgtatatcctttaacgttgagttctctctggtgggaactgatggatttctttgaaattagcaagttagctgtgagagaactatgggaggaaaggtgtgcgtaaggttactattttgtttgatctgcatg

SEQ ID NO: 7339 - DNA, 600 bp, Chicken  19866894192256_1
accagtacggctagatacagacacaccagattttctttcaggtttctgcagtcctcctaaagggccttctacttactgaacgggagcatttttggggagggttggtagaatgcccatccagctgtccgtgctcactcaggaacccagtcacttggtccaagaaagacgtcacgtccagttggtgccactccactagtttctggcctaggaaacatatgacatcatgtagtctattttcagcaacaactcctcaaagattgcaacacagctgtcaaaaacatcagttcacttctgtgcacrtactatgcaaaaatccacatctgtgggactgcagttgcctacaggccaccacctattaattacagagcttcctccttctatccccttgaaaagccttattttcagttcttttctgagaaagtacgcatccagaaaggtgaactggacatcaaaattaaaaacttttgatgtccactaattttatgaagttatacattcttgtctgcttcgattctgcaccttggtaaacagcatttgcttccatttgtgctaaaaagagtatcctaatttcagtttcaacaacaacaaaaatgttttgag

SEQ ID NO: 7340 - DNA, 600 bp, Chicken  19866894192265_1
gtgtgtttgattttttctcagtggttatgaacagatttgaccattaaaagatatgctaaactaaatgcaatcgtgtttatatttcaaaaggaacactgatttttatccatcctatgcagctgccctttctgcaagtgtctcttccctgggcaaagtgcccacatccctgttcacctgacagatgctgtgcacctcacttggaactgtcatttaaagctagaaaataaaccaaactgcaagtttgctttgaaagtatcacgagatgctcttaaaaagaccaataaataaataaataaatamatacatacattactgaggcatcttaccatggctccttcacatattcctagtttcaagctcttttcccaaccaacaggaataacagtaccgtgatgctgaaaaaacacctgagatgtatgttatcagttggctcgaggagcttttaggagagcactgacttcaagaaaaatcttgataaaatcatgagagtttgtattgccctttgaatgcaggactgctctttgacaacaggatgagaagtctcaagcctccctctgaaggaaagaaaatacccattttggtccttgcagaacagagaca

SEQ ID NO: 7341 - DNA, 600 bp, Chicken  19866894192265_2
ctgaaaaaacacctgagatgtatgttatcagttggctcgaggagcttttaggagagcactgacttcaagaaaaatcttgataaaatcatgagagtttgtattgccctttgaatgcaggactgctctttgacaacaggatgagaagtctcaagcctccctctgaaggaaagaaaatacccattttggtccttgcagaacagagacacattagctgctgagaagccttgcagtgacttcaatatgttttgaatagggccatagcaataattttcctagttcccttgtgaggttggccatccytgtcttccttcagtacctcgctgccctcccactccagctttacagggaccacactgcgaaatttgtgttgtttcaaggatcaaatacatggttgccttaacaatcatttgtctccaggcacactgtattagttgagtatatgtgactgtgaaaaccagaaaacagtttcaagagcattcttttttaaagccatgttttccccagactttgacaactatttggagctgtgaggcacatgttgtcccagtgttgcagaattaactactttggtttgtttatgtctcctgcctgctcagcaga

SEQ ID NO: 7342 - DNA, 600 bp, Chicken  19866894192275_1
ggtgcctagcatagctcctggggatttctgctccaagtgttttaggttacagctgttcccagtcagctcaggttcagcagaggctctgctgactccctccagaaagaaggcttcaggtacaggaatcacctgattcttgcagtgtgagcatgcatatacatgtggctttctctacaaatgttttggcctctcttctcttctactctgtaggtgtctttgttccatcagactccagcggtcttggtctcgatgtatctgaaaaggattaaatattagctctgatttctcttgctagctgcwgttcacacttcttattgctctgtcactatgttttccttttaatgtatcagtttgtgactccggcctttggtttytcagttggagatgaattcagcttcttgtttctgatagcctgttttgtggtcacgctatcctgtgtctgcttccttttagtgcttctcaagacattagcagctgtgctgcatatccataccatttcragctgctcccttctgtttccttttcacaagttttgtcatgtctatgtctctgttcttttttgaagctgggtgtagctgctgtaatgcttggactttgtta

SEQ ID NO: 7343 - DNA, 600 bp, Chicken  19866894192275_2
cagcagaggctctgctgactccctccagaaagaaggcttcaggtacaggaatcacctgattcttgcagtgtgagcatgcatatacatgtggctttctctacaaatgttttggcctctcttctcttctactctgtaggtgtctttgttccatcagactccagcggtcttggtctcgatgtatctgaaaaggattaaatattagctctgatttctcttgctagctgcwgttcacacttcttattgctctgtcactatgttttccttttaatgtatcagtttgtgactccggcctttggtttytcagttggagatgaattcagcttcttgtttctgatagcctgttttgtggtcacgctatcctgtgtctgcttccttttagtgcttctcaagacattagcagctgtgctgcatatccataccatttcragctgctcccttctgtttccttttcacaagttttgtcatgtctatgtctctgttcttttttgaagctgggtgtagctgctgtaatgcttggactttgttaaacctggggaattctgaatgtaagcaccagaacagcaaccccaaccataagtggaagatctagtataagatctt

SEQ ID NO: 7344 - DNA, 600 bp, Chicken  19866894192275_3
tactctgtaggtgtctttgttccatcagactccagcggtcttggtctcgatgtatctgaaaaggattaaatattagctctgatttctcttgctagctgcwgttcacacttcttattgctctgtcactatgttttccttttaatgtatcagtttgtgactccggcctttggtttytcagttggagatgaattcagcttcttgtttctgatagcctgttttgtggtcacgctatcctgtgtctgcttccttttagtgcttctcaagacattagcagctgtgctgcatatccataccatttcragctgctcccttctgtttccttttcacaagttttgtcatgtctatgtctctgttcttttttgaagctgggtgtagctgctgtaatgcttggactttgttaaacctggggaattctgaatgtaagcaccagaacagcaaccccaaccataagtggaagatctagtataagatcttgcacactaatgaggaccaaatgaaagacttccatgacttccttgtccaactgctctgtgaaattatactggtggagtcaaggttgtttcccaaagtacagcttctgcagattcagcgctacgtaca

SEQ ID NO: 7345 - DNA, 600 bp, Chicken  19866894192276_1
ttatatactcactggtagaagatcagcaaaatgctgttcctccaaagaaatgtagtttaaacaagctagatctctgggcacctcacttactgcctaacatccctggtccataagcataacccagagacagcatagggtcagctctaggaggtccatcaagcaccatgcattgatttgatcagagtgactggaaaccaggctgtgctttgccctcacgtgggtttcattcctaatgtcttaatgacaaactaactcttctatgtgcaataggctcaacttcttactggtataattcttttkaagtaaatgcaattgggcagaggagtaattggcccgatgttttgtttttcttggctctctgtacaggatctcttgttgctatgttgcttctttttgtctggtggatatatatatgtacatactgtcatttttctgctgccagtagcagtggaagtaggaagtgcctgcatcccatgctctgtaacaatgtatcaaaatagcagtaattaaaaaaaaatcattcatgtagctgttactcagaagacctcctgctcctggcaaatagctcatctgcactcactggtatgcccagagcatttc

SEQ ID NO: 7346 - DNA, 599 bp, Chicken  19866894192283_1
  misc_feature (1)..(120): n is any nucleotide
nnnnnnnnnnnnnnnnnnnnnnnnnnnnnnnnnnnnnnnnnnnnnnnnnnnnnnnnnnnnnnnnnnnnnnnnnnnnnnnnnnnnnnnnnnnnnnnnnnnnnnnnnnnnnnnnnnnnnnnnaggtgtagggcagagggaacagataagcctccgagcacattagcccttgtcgcatcattccacctgcaaaaaagactgagaccatcccagccatcactccagagcatagttgctataacatggctgacagagaagtgcaaaatgaagatgagcacttcgactttacagtgccctgtaacrtcagcaactcacactgacctgaaatggtgacccgcagcaacatgcagcatctcggagacaaggtaacacaaagcttccctttcggtttccatttcctgtaaggacaggctttgcacactagggcatcaagtcagcaatattctacttctctcacgctgccaaaggactctatttctcatggtttccctgccacgggagtctgattcatgctgctgggctcttcagctatggctgctgagctgatttgcatattaatccaataaccctttgcaattaaatggaaaagggaaaataagaga

SEQ ID NO: 7347 - DNA, 600 bp, Chicken  19866894192283_2
tttcttccattccctactgagacagatgcttcccattttcttgacataagttgtgtggatcacttgcccatctggcttccctaagttctgacaaaggtatctctccctcagatgtcatctttcaatttctaatagcctccacatggagacaataatattatttaacatttctaaaagacaggtctctaatcccctgaaatttgttaattgaccttaacattgtcacattgtggggatgtactactagcctagatttacaggactggtatcagtgacacaatatgccacacatcacagtgwkgactagtgatgaagtaggcacatgagcagggattttaaatccagattcccttgttcccattactgtgtaaagactccttatctagaccagctgatgccaatgaatttcctctttcctgttcagcctgtcccacactaatgaaactcagaggcatgagatgagagaacagattgttgttaagaaaattaatgtaataatgctgtagactgctttatggtgacaatggaacacttggcgttagcttttaatatagtaagaaaagagtaaatccaccttctgctgctccagcagatttgaac

SEQ ID NO: 7348 - DNA, 600 bp, Chicken  19866894192283_3
ttcttccattccctactgagacagatgcttcccattttcttgacataagttgtgtggatcacttgcccatctggcttccctaagttctgacaaaggtatctctccctcagatgtcatctttcaatttctaatagcctccacatggagacaataatattatttaacatttctaaaagacaggtctctaatcccctgaaatttgttaattgaccttaacattgtcacattgtggggatgtactactagcctagatttacaggactggtatcagtgacacaatatgccacacatcacagtgwkgactagtgatgaagtaggcacatgagcagggattttaaatccagattcccttgttcccattactgtgtaaagactccttatctagaccagctgatgccaatgaatttcctctttcctgttcagcctgtcccacactaatgaaactcagaggcatgagatgagagaacagattgttgttaagaaaattaatgtaataatgctgtagactgctttatggtgacaatggaacacttggcgttagcttttaatatagtaagaaaagagtaaatccaccttctgctgctccagcagatttgaact

SEQ ID NO: 7349 - DNA, 600 bp, Chicken  19866894192289_1
aaagtttggaagaatagcacagtgattacacggcatctcctcctaaagcttttcttacttctaatttttcattcagtagcctcacactgtctgttacatctttaaaaaggatactgtttcattaagaaaatagtttgcaatcattttaaattaacaaatatgacttcactgcacacataaataataatgaataataaatgaataagtatgaactcactgcatcaatggatatgggaagagcccctgacgtcacctatctcgacttcagtaaggcctttgacacggtgccccacaacatcyttctctccaaattggaaagatacagatttgataggtggactgatcaatggacaaagaactggctgcaggatcgagtccagagagtggcggtcaatggctgaatgtctgggaggagatcagtggcgagtggtgccccctagggcttggtgctggggcgatactcttttgtatcttcattagtgacatcggcagtggggtccagtgctccgagtgagtttgcagatgacaccaagctgtggggtgcggctgacacatcaaagggatgggatgacattcagagggacctagacaggcttgagc

SEQ ID NO: 7350 - DNA, 600 bp, Chicken  19866894192290_1
tgaactcactgcatcaatggatatgggaagagcccctgacgtcacctatctcgacttcagtaaggcctttgacacggtgccccacaacatccttctctccaaattggaaagatacagatttgataggtggactgatcaatggacaaagaactggctgcaggatcgagtccagagagtggcggtcaatggctgaatgtctgggaggagatcagtggcgagtggtgccccctagggcttggtgctggggcgatactcttttgtatcttcattagtgacatcggcagtggggtccagtgctcygagtgagtttgcagatgacaccaagctgtggggtgcggctgacacatcaaagggatgggatgacattcagagggacctagacaggcttgagcagtggagccatgtgaacctcatgaggttcaacaaatccaaatgtatgatcttacacctgggtcaaggcaatcctcgctaccagtgcaagctggggcatgaaaggattcagcgcagccctgctgaaaaagacctggggatgctagtggatgggaagctggacatgagccagcagtgtgccctcacagtccagaaagccaaccgtatcca

SEQ ID NO: 7351 - DNA, 600 bp, Chicken  19866894192294_1
tagctgacaattcgctctatcaaacagtgttattgtgctcttcgtatatgttgtagtttccatggaaataaataggaggcattactttctgagtgacctacacatgttttgaagaaactgagtacatgaaaagatgctggtttgacttactggggagttaatgtgttgttttcatacaatattttccaaatagtcaccaatttggctgcagatttcatttgtgtcgtcttttcacatgcattgagataaataccttccagtgccagacaccaaaagccctggttttggagccatttcagycatttcaatatggcctgacttctggtatcagggaatcacaggtgctgcatattgaggcatatcaacagctgcaggyatgatgcagtagcaacacattctctcaccatgggaacagagaggatggtaggcctggttccctctgtttccactcctctgcatctttccaaggatgctccaaaatggtagccaagtatggatcactgtcaaccacccttttgtcttctggagcttcctctttccctgcctccatctcacacaaccatctttcctctaaattgtacttgcaggctggtagggatt

SEQ ID NO: 7352 - DNA, 600 bp, Chicken  19866894192294_2
aggcattactttctgagtgacctacacatgttttgaagaaactgagtacatgaaaagatgctggtttgacttactggggagttaatgtgttgttttcatacaatattttccaaatagtcaccaatttggctgcagatttcatttgtgtcgtcttttcacatgcattgagataaataccttccagtgccagacaccaaaagccctggttttggagccatttcagycatttcaatatggcctgacttctggtatcagggaatcacaggtgctgcatattgaggcatatcaacagctgcaggyatgatgcagtagcaacacattctctcaccatgggaacagagaggatggtaggcctggttccctctgtttccactcctctgcatctttccaaggatgctccaaaatggtagccaagtatggatcactgtcaaccacccttttgtcttctggagcttcctctttccctgcctccatctcacacaaccatctttcctctaaattgtacttgcaggctggtagggattgggcctcagtttaccactgaagtgtttcatcacagaaggattttggaggcccctttccctggaggaaccctgcaga

SEQ ID NO: 7353 - DNA, 600 bp, Chicken  19866894192301_1
tctgggacagggagtgcagcccacaaccccatgcaggactcgtgtccctcagtgccccagcgaggggacgggagctgtggcgcacactgtgtgcataaggctgggtttggctcttcctcagccccaggctgagcagggccgggctttcaccccccacttcccccatcccaaccttcagtttgggctgggagggactcgtggacgcttccccagggctgtgtgtgcagacctcgcacagaaacaagagaacagaatcagcacggcccgcaccatcccgcaggcagcagtgctgtgagcacygccggagctgctgggagagcagcagggctccatcactcctggccaaagccttccgtctcctcaatggcatacagcagcttctccttcagctgttcgtagctcttgtagggaggcagatccaagcggttaaagctggtgagacagggtgytgtgagcggggcagggagcccagtactgccgccaccctgctccccaccgcagggtcccctcccacaggtcccccccagcagctccatcccatgggggaaaggcatacagacagccagagccccatgcagccccacagggacaccaccgtgc

SEQ ID NO: 7354 - DNA, 600 bp, Chicken  19866894192301_2
ccccccacttcccccatcccaaccttcagtttgggctgggagggactcgtggacgcttccccagggctgtgtgtgcagacctcgcacagaaacaagagaacagaatcagcacggcccgcaccatcccgcaggcagcagtgctgtgagcacygccggagctgctgggagagcagcagggctccatcactcctggccaaagccttccgtctcctcaatggcatacagcagcttctccttcagctgttcgtagctcttgtagggaggcagatccaagcggttaaagctggtgagacagggtgytgtgagcggggcagggagcccagtactgccgccaccctgctccccaccgcagggtcccctcccacaggtcccccccagcagctccatcccatgggggaaaggcatacagacagccagagccccatgcagccccacagggacaccaccgtgcgccccacgcagtgtcacacagcagccactcaccatgtatggctccgaggcagccacgtctctttgccaactttatcgatgcagaatttctgaggcccattgctgcctgttaatgacgagcacagctgatttattacatgatcaagagct

SEQ ID NO: 7355 - DNA, 600 bp, Chicken  19866894192301_3
gttacccacaataggtcacacaggtaggcatctagacaggtcttgaatatctccacaggagactctacaacctctctgagcaatctgttccagtgccccgtcacccttaccttaaagacgctcaaaaaaaccactcaaatctcattcaaaatgagattacaaactgggcagacaaagctaactgcagtggcacagttcacacccaaggaatttgtctcagtacagcaccaaccaagcacactgcctcactcagatgtcagtgcagctgcatcactgccctactggaatgggaacgtgaayacttgtccacagcaaccagagccaggcatggccaccatccccctccctgcccaaccttagcgtggccacacaccgatgagctctgcgaagcccccgacaggcaggcggcacgtcccagtcacaaactgcagcaggcggatcctcttctcattgtccatctccttcaccacctgcaagcacagggaagcggatccccatcaccccacagcctcaagcagtgcccggccccgagcgtggcacaygaaggctctggggctcacctgccagaaccactggatctgtttgctgttcttggtgtag

SEQ ID NO: 7356 - DNA, 600 bp, Chicken  19866894192301_4
gcctcactcagatgtcagtgcagctgcatcactgccctactggaatgggaacgtgaayacttgtccacagcaaccagagccaggcatggccaccatccccctccctgcccaaccttagcgtggccacacaccgatgagctctgcgaagcccccgacaggcaggcggcacgtcccagtcacaaactgcagcaggcggatcctcttctcattgtccatctccttcaccacctgcaagcacagggaagcggatccccatcaccccacagcctcaagcagtgcccggccccgagcgtggcacaygaaggctctggggctcacctgccagaaccactggatctgtttgctgttcttggtgtagtgccggtagatggtgttcttctgccaatcgttcatgtcaatctcctgcatgccgcacagcatcagctgggaatggaggacagtcagggggatggaaatacagccccacrttcacgcttcacacacaccccatgggcaccacagtggcctgcctggggcagggcctgctcacctccagctccttctcatcaaagtaccgcaaccattcaagtggcaccacttcattgaagccatccaggaacg

SEQ ID NO: 7357 - DNA, 600 bp, Chicken  19866894192301_5
acgtcccagtcacaaactgcagcaggcggatcctcttctcattgtccatctccttcaccacctgcaagcacagggaagcggatccccatcaccccacagcctcaagcagtgcccggccccgagcgtggcacaygaaggctctggggctcacctgccagaaccactggatctgtttgctgttcttggtgtagtgccggtagatggtgttcttctgccaatcgttcatgtcaatctcctgcatgccgcacagcatcagctgggaatggaggacagtcagggggatggaaatacagccccacrttcacgcttcacacacaccccatgggcaccacagtggcctgcctggggcagggcctgctcacctccagctccttctcatcaaagtaccgcaaccattcaagtggcaccacttcattgaagccatccaggaacgccttggtttgctcctccacaccccgtgtgaacctccagtccgtcagcagcctgtgaaggcaggcagaggtccaygggtgacaccagggctctccccaccatctttttcacccttcacgattccacgattccctcccactgcttcccagcccacaagcagcagaaggc

SEQ ID NO: 7358 - DNA, 600 bp, Chicken  19866894192301_6
tcttctgccaatcgttcatgtcaatctcctgcatgccgcacagcatcagctgggaatggaggacagtcagggggatggaaatacagccccacrttcacgcttcacacacaccccatgggcaccacagtggcctgcctggggcagggcctgctcacctccagctccttctcatcaaagtaccgcaaccattcaagtggcaccacttcattgaagccatccaggaacgccttggtttgctcctccacaccccgtgtgaacctccagtccgtcagcagcctgtgaaggcaggcagaggtccaygggtgacaccagggctctccccaccatctttttcacccttcacgattccacgattccctcccactgcttcccagcccacaagcagcagaaggctctgagtatggagcagtcatcatcgagtgaccaccaagcagccccacggtggccccagcagccccgcaatacacaggccggcaagcagcgtgggacgaggagagttgttgcaccctctctcccctctcctcttccctgagagccctggcagccgcccagaccacaggcagccagaccgcagtgcagcgccacgccagcccaggcttg

SEQ ID NO: 7359 - DNA, 600 bp, Chicken  19866894192312_1
tggggatgaatagctttcagagagcttttcctctttcattcacttccattaacaacaaaagtgcccgatctaatggtgtatcttgagcacagattactcagaagtcatgtgaatggcaccgccactaccctcattcagtagtaactctcaggaacacaaaaacctcagctaaagaataggcctcttgattactgtgtcttgatttctgtcttctttcagcaaataagatcaagttcactcccatctccagcttgatggatttacaaccttcctctgaagcccataagatacatgcaatgwgcatcatgcaaaactgatgaattgccagttactctaccagatgctttatagatttgatctttttgcaactgttcagtgctttataataatttaccatctggtaaaataagccagattgtcctatgcaagactgctgtctgtccctccgaagttaatacagcaccttcrtttcttaacaggaataatcttctmtatttcctctctccagagttgctatctatgagaaacttgtctacatacaatatttaaagcccttaaaattggaatgttttaaaatttaataaatctgagtggctgtca

SEQ ID NO: 7360 - DNA, 600 bp, Chicken  19866894192312_2
ctaaagaataggcctcttgattactgtgtcttgatttctgtcttctttcagcaaataagatcaagttcactcccatctccagcttgatggatttacaaccttcctctgaagcccataagatacatgcaatgwgcatcatgcaaaactgatgaattgccagttactctaccagatgctttatagatttgatctttttgcaactgttcagtgctttataataatttaccatctggtaaaataagccagattgtcctatgcaagactgctgtctgtccctccgaagttaatacagcaccttcrtttcttaacaggaataatcttctmtatttcctctctccagagttgctatctatgagaaacttgtctacatacaatatttaaagcccttaaaattggaatgttttaaaatttaataaatctgagtggctgtcattctcttttgaaattgaaaatatggaataagtttctccaaggggttcagctctcttgcttctaggagtgaggtgctctctccctggaggacagcccaatgttcaaagcaaggtgacagggtgtgagctgaagcccaattcacccttcaaaagccaacattacgctggt

SEQ ID NO: 7361 - DNA, 600 bp, Chicken  19866894192312_3
tgtgtcttgatttctgtcttctttcagcaaataagatcaagttcactcccatctccagcttgatggatttacaaccttcctctgaagcccataagatacatgcaatgwgcatcatgcaaaactgatgaattgccagttactctaccagatgctttatagatttgatctttttgcaactgttcagtgctttataataatttaccatctggtaaaataagccagattgtcctatgcaagactgctgtctgtccctccgaagttaatacagcaccttcrtttcttaacaggaataatcttctmtatttcctctctccagagttgctatctatgagaaacttgtctacatacaatatttaaagcccttaaaattggaatgttttaaaatttaataaatctgagtggctgtcattctcttttgaaattgaaaatatggaataagtttctccaaggggttcagctctcttgcttctaggagtgaggtgctctctccctggaggacagcccaatgttcaaagcaaggtgacagggtgtgagctgaagcccaattcacccttcaaaagccaacattacgctggtaattttgaacagtaaccttgaact

SEQ ID NO: 7362 - DNA, 480 bp, Chicken  19866894192312_4
tttaaagcccttaaaattggaatgttttaaaatttaataaatctgagtggctgtcattctcttttgaaattgaaaatatggaataagtttctccaaggggttcagctctcttgcttctaggagtgaggtgctctctccctggaggacagcccaatgttcaaagcaaggtgacagggtgtgagctgaagcccaattcacccttcaaaagccaacattacgctggtaattttgaacagtaaccttgaactacagctacaggcttttttgtttaaggcagaaagacattataaggaaaatacrtaagaaaaaagctataaaaacaattaatgatggtagacaccggtaatcggctaaacagattgtatagaatcagtgctgctttggaagtccaacagcaagcaatcagccaatgctcttagacccttactgtctctttgccttgacaacgccatgcctctcctcaagctgctctgccttgca

SEQ ID NO: 7363 - DNA, 600 bp, Chicken  19866894192315_1
ccgacctaccagaagtgggttgctgcagctctgaagctgtacgaagtgaccatcgaaggcaaagacgatgacccgacttctctcactggcgaactgagctcaaaaatcatgggcagcatcaaagttctggaaggctatttagatatagacaccaagttctccgagaaccgttgccagaaagccctccccatggcccacagtgcctaccagtccaacctgccccacaattacaccatgacggtccataagaaccagctggctcaggccttacgtgtgtacagccagcacgcccgcggcccrgccttccataagtacgccatgcagctgaatgaggactgctacaagttctggagcaacgggcaccagctttgtgaggagcgaagcttgactgaccagcactgygtgcacaagttccatttgcttcccaaagcaggtraggaaactcagttgtgattggttccctctgcttaattttgtacctactttaaaacgcctttagcttcagtgaccaattcaggccctgtgttctgagcagtgtattgcaggtagtgggaccggatrcagtgcaattgcagtgcacaggagcagggtataggagaa

SEQ ID NO: 7364 - DNA, 600 bp, Chicken  19866894192315_2
aaaatcatgggcagcatcaaagttctggaaggctatttagatatagacaccaagttctccgagaaccgttgccagaaagccctccccatggcccacagtgcctaccagtccaacctgccccacaattacaccatgacggtccataagaaccagctggctcaggccttacgtgtgtacagccagcacgcccgcggcccrgccttccataagtacgccatgcagctgaatgaggactgctacaagttctggagcaacgggcaccagctttgtgaggagcgaagcttgactgaccagcactgygtgcacaagttccatttgcttcccaaagcaggtraggaaactcagttgtgattggttccctctgcttaattttgtacctactttaaaacgcctttagcttcagtgaccaattcaggccctgtgttctgagcagtgtattgcaggtagtgggaccggatrcagtgcaattgcagtgcacaggagcagggtataggagaagctataggtggtgaggccttgtttcatgtgtcagtgttacagaggcatgatgtccagtaactattctcgtgtccttatgcctttgcatcctctgaattctat

SEQ ID NO: 7365 - DNA, 600 bp, Chicken  19866894192315_3
atttagatatagacaccaagttctccgagaaccgttgccagaaagccctccccatggcccacagtgcctaccagtccaacctgccccacaattacaccatgacggtccataagaaccagctggctcaggccttacgtgtgtacagccagcacgcccgcggcccrgccttccataagtacgccatgcagctgaatgaggactgctacaagttctggagcaacgggcaccagctttgtgaggagcgaagcttgactgaccagcactgygtgcacaagttccatttgcttcccaaagcaggtraggaaactcagttgtgattggttccctctgcttaattttgtacctactttaaaacgcctttagcttcagtgaccaattcaggccctgtgttctgagcagtgtattgcaggtagtgggaccggatrcagtgcaattgcagtgcacaggagcagggtataggagaagctataggtggtgaggccttgtttcatgtgtcagtgttacagaggcatgatgtccagtaactattctcgtgtccttatgcctttgcatcctctgaattctattcaaaacacaccactgccccactcacatgcagta

SEQ ID NO: 7366 - DNA, 600 bp, Chicken  19866894192315_4
caggccttacgtgtgtacagccagcacgcccgcggcccrgccttccataagtacgccatgcagctgaatgaggactgctacaagttctggagcaacgggcaccagctttgtgaggagcgaagcttgactgaccagcactgygtgcacaagttccatttgcttcccaaagcaggtraggaaactcagttgtgattggttccctctgcttaattttgtacctactttaaaacgcctttagcttcagtgaccaattcaggccctgtgttctgagcagtgtattgcaggtagtgggaccggatrcagtgcaattgcagtgcacaggagcagggtataggagaagctataggtggtgaggccttgtttcatgtgtcagtgttacagaggcatgatgtccagtaactattctcgtgtccttatgcctttgcatcctctgaattctattcaaaacacaccactgccccactcacatgcagtaatggttaggagcaagcctgctctcagtaataactttggttctgcattgctacttggaggtgttacacgggagctcttctaactggagatacagaggataaaaaaaagttctttgggaaagttctt

SEQ ID NO: 7367 - DNA, 600 bp, Chicken  19866894192315_5
tacttggaggtgttacacgggagctcttctaactggagatacagaggataaaaaaaagttctttgggaaagttctttaaaagttcttctctgcctcctttgattgagcgcagtcaagggctggaaactgaggtgtaagtattgcagggagaagaactatttatgccttgcgagaagcttctaaaagcaaagaatacagtttagtggtgtaatctacactggaactttatatacagtgggggaaagagaaaaggagttgctggtgaacagttttgttaggtaaatagcaaggaaaggcaaykgatgragagaatcaaagaatctctagaaatagtgagcattttatctgcttgattttgcttctaggggagaagccagaagcagacagaaatcccccaatcctgtaccacaacagccgggctcgttccactggcgcctgtaactgtggaagaaagcaagctcctcgtgatgacccctttgacatcaaagcagctaattacgacttctaccaggtaactgctgagcctctctttttgcttcaagtggtgtttttgcatcgtcaacacagcctgtgttctgaagggaccacaaatcagtgtcc

SEQ ID NO: 7368 - DNA, 600 bp, Chicken  19866894192315_6
acttggaggtgttacacgggagctcttctaactggagatacagaggataaaaaaaagttctttgggaaagttctttaaaagttcttctctgcctcctttgattgagcgcagtcaagggctggaaactgaggtgtaagtattgcagggagaagaactatttatgccttgcgagaagcttctaaaagcaaagaatacagtttagtggtgtaatctacactggaactttatatacagtgggggaaagagaaaaggagttgctggtgaacagttttgttaggtaaatagcaaggaaaggcaaykgatgragagaatcaaagaatctctagaaatagtgagcattttatctgcttgattttgcttctaggggagaagccagaagcagacagaaatcccccaatcctgtaccacaacagccgggctcgttccactggcgcctgtaactgtggaagaaagcaagctcctcgtgatgacccctttgacatcaaagcagctaattacgacttctaccaggtaactgctgagcctctctttttgcttcaagtggtgtttttgcatcgtcaacacagcctgtgttctgaagggaccacaaatcagtgtcct

SEQ ID NO: 7369 - DNA, 600 bp, Chicken  19866894192315_7
gaggtgttacacgggagctcttctaactggagatacagaggataaaaaaaagttctttgggaaagttctttaaaagttcttctctgcctcctttgattgagcgcagtcaagggctggaaactgaggtgtaagtattgcagggagaagaactatttatgccttgcgagaagcttctaaaagcaaagaatacagtttagtggtgtaatctacactggaactttatatacagtgggggaaagagaaaaggagttgctggtgaacagttttgttaggtaaatagcaaggaaaggcaaykgatgragagaatcaaagaatctctagaaatagtgagcattttatctgcttgattttgcttctaggggagaagccagaagcagacagaaatcccccaatcctgtaccacaacagccgggctcgttccactggcgcctgtaactgtggaagaaagcaagctcctcgtgatgacccctttgacatcaaagcagctaattacgacttctaccaggtaactgctgagcctctctttttgcttcaagtggtgtttttgcatcgtcaacacagcctgtgttctgaagggaccacaaatcagtgtcctcttaa

SEQ ID NO: 7370 - DNA, 600 bp, Chicken  19866894192318_1
catgggaagtggttcaaatgaatgaattccatcgccttctcatgttgggccacttagtgtgtacagaggaggaccacagaaatgttcctagggatgtagcacctccatatgaggacaggctgagagagctgtgcagccaggagaggagaaggctctggggagacccgagaccatcctttcagtatctaaagggggtctacaagaaggcagggggcagaatcttcagaggagtctgtgacagaacaaggggaaatggtttcaaactagaaaaagggagatttaggctggatataaggaagrtttttttctgcaatgaaggtgrtgaggcactggcacaggctgccctgagatgtctcatccctggagacacccaagatcaggctggaggggttctgagcacccaatggaactatagttgtcyctgttcattgcagggggggtggactagatagcctttcagggtaccttccaactcaaacagttctatgattcttgcatagcagtacattcaagttaatctgaggtatgagatcgtgtatgtagtgtgtgtggccagccagtggtctcttgtggctggaaggcagtgaaacagcagcctaa

SEQ ID NO: 7371 - DNA, 600 bp, Chicken  19866894192318_2
tgaattccatcgccttctcatgttgggccacttagtgtgtacagaggaggaccacagaaatgttcctagggatgtagcacctccatatgaggacaggctgagagagctgtgcagccaggagaggagaaggctctggggagacccgagaccatcctttcagtatctaaagggggtctacaagaaggcagggggcagaatcttcagaggagtctgtgacagaacaaggggaaatggtttcaaactagaaaaagggagatttaggctggatataaggaagttttttttctgcaatgaaggtgrtgaggcactggcacaggctgccctgagatgtctcatccctggagacacccaagatcaggctggaggggttctgagcacccaatggaactatagttgtcyctgttcattgcagggggggtggactagatagcctttcagggtaccttccaactcaaacagttctatgattcttgcatagcagtacattcaagttaatctgaggtatgagatcgtgtatgtagtgtgtgtggccagccagtggtctcttgtggctggaaggcagtgaaacagcagcctaactgtgctgtgtcagggagcatg

SEQ ID NO: 7372 - DNA, 600 bp, Chicken  19866894192318_3
gagagagctgtgcagccaggagaggagaaggctctggggagacccgagaccatcctttcagtatctaaagggggtctacaagaaggcagggggcagaatcttcagaggagtctgtgacagaacaaggggaaatggtttcaaactagaaaaagggagatttaggctggatataaggaagttttttttctgcaatgaaggtgrtgaggcactggcacaggctgccctgagatgtctcatccctggagacacccaagatcaggctggaggggttctgagcacccaatggaactatagttgtcyctgttcattgcagggggggtggactagatagcctttcagggtaccttccaactcaaacagttctatgattcttgcatagcagtacattcaagttaatctgaggtatgagatcgtgtatgtagtgtgtgtggccagccagtggtctcttgtggctggaaggcagtgaaacagcagcctaactgtgctgtgtcagggagcatggtgtacttgaacatgaatcagctgagctgagcctgggagcagcttctgcatatcagctgtgtgctgcttcattaattctgagcccagcatcatgttgag

SEQ ID NO: 7373 - DNA, 600 bp, Chicken  19866894192331_1
gccacagaaattaattcaaggaagttgtatgtctggtgtaacaaaagcagtcagaggctgtgatcataatggttcccctactgctcttaagagttcattaatctattagataaatgaaagaaatattggaattttctgtcatattccctgttcaatcaataatgtcaaatacaatttacccacaattgatgttttactaaccctagtgtcagcagaaaagaaccacgagttacccacctactgctttgtctctatattcaatttgcattcataatccttgtgatctgtaaagacaaacayacagytttgcaaagataattagatttaattacttattatatatatatattatattaattacatataatcaatatcaattaaaaaaaatcacctattttgtatttaaacagtattttaaatattttagaaatagtttgtatttggttttcagcctatttcttatatttgtatgttgcaaaggattttattcagtaaataaagtaggcaaaaatgcaacagttccaagtattaatttcagtgaacaagagtatcttatataatgtacaaattaagccccaaaccatgcattatgccaatcat

SEQ ID NO: 7374 - DNA, 600 bp, Chicken  19866894192331_2
agaaattaattcaaggaagttgtatgtctggtgtaacaaaagcagtcagaggctgtgatcataatggttcccctactgctcttaagagttcattaatctattagataaatgaaagaaatattggaattttctgtcatattccctgttcaatcaataatgtcaaatacaatttacccacaattgatgttttactaaccctagtgtcagcagaaaagaaccacgagttacccacctactgctttgtctctatattcaatttgcattcataatccttgtgatctgtaaagacaaacayacagytttgcaaagataattagatttaattacttattatatatatatattatattaattacatataatcaatatcaattaaaaaaaatcacctattttgtatttaaacagtattttaaatattttagaaatagtttgtatttggttttcagcctatttcttatatttgtatgttgcaaaggattttattcagtaaataaagtaggcaaaaatgcaacagttccaagtattaatttcagtgaacaagagtatcttatataatgtacaaattaagccccaaaccatgcattatgccaatcataatga

SEQ ID NO: 7375 - DNA, 600 bp, Chicken  19866894192336_1
caccattagctatacattttagccagtaatatacaggagcctgcatgttgtgcacttaaaaaatctgcatcagtggagaagccctgttgtcaccactgttgaaacacactgcattctgccacattgtactcacagctgctgtttggtttccagaaacatttagcaagccttgatgaatgtcagtgggtgctgtttcctccacatagaggagttcaatgacgcccctttgcttcatatggtcttttgtgtcagacaccattttgtcggactgccctttgctgccaattgtcaaatggcaayaaaatgtaatggaatgttggtgggaaggttcagcctttactgccataccactaacatcagcttctgatgtcgtgggccaacataataaaatgaaagacattacttttggagcaactattgtgcttagagtttattagtatctataaagacagaaaactaagggctaatacagtcagaaattaaggaataaatggaaaggaatgtacctaatccagagcatgaaagtgtttgtaggccgttagggaggaaaggagtgtctaggagaagacaatgaagaacgtctgaggcctagtagagatg

SEQ ID NO: 7376 - DNA, 600 bp, Chicken  19866894192337_1
taattctgaagactattagagacagtttggataaaactcagtgatcatataatattccaatgctatttgctttctaactttttcatactggaactttctctccagtgaaaacatcccaaaacttccaggcagataaaaacatttattcctcattgcagtctcctctactctgcctgtcagtggcagtgtccaggttgggtcagcaggacttggaaagtcttgtctactgctgctgaacctttgttcatcttgggtggaagagcgggctggggaaagagtagtgcttaccaaaagtcatayagaatagggaactattttccttcccatgtttcacttcactgcaaggtacaggaaatgtttttcccttatttggaaatatttgctattctgatacctgtaaagatgttgtcccaagttcttcagtgtctcaaagaccattatgcagaacttctcatgggtagacaaatatgatattatacaataggtttagaaattgagctcatgtaaattttatacttaaaccaaatttccccatcagagtttcctggagagctgaagtctttgctagtgggttgcctggggttttcccagagggaagaa

SEQ ID NO: 7377 - DNA, 600 bp, Chicken  19866894192338_1
actaaactgcatgctggatatgacacatttcatctcagaaattttctaaagaatgaaggtacaaagatgtaaataagagctatttattagaaaatagtgctgcttctaatatgggctgaatggcatgaaaagagtttcgaagaaaggaaacactgccaatatacccagatttgattttatctttccagtgcatttggtttggtattttagcttcttgtgaccccataagtcattgccccacgtcctggtgcagggacagcaccagcacaggctgcagggcaacttatagacgtgccaggyacagcagtcacacttgtgtacatgttactccaacacgcagagttgctgaagctccttgagcctggcctcaatctgactgaagtttggtatagctccgtgattaaaaaaagacaactgtagagaaaaaggagtgttcacctcaggttgggtatcagggcaaggctgtgccctggagggcggtgggcacggcacagctcccagggcagtgggcacagccccgagtgccggagctcagacagcgttgggacatcattctacataggatttgggtttgggtggtgctgtgtggtgccaggggtt

SEQ ID NO: 7378 - DNA, 600 bp, Chicken  19866894192341_1
gagattctttttgtaagcagcccgaccactgcaatgtttttactggtcttccatatatagttgtgacaacagcggtaaaatattcactcggctgccctgccatagccagccgagtctgtaaccacccctcccacaccacagatgtacccgagaactaacaaatcgctccctcactatttacacagcatgacaagctaggatgccactgtttcagaagcattagtgctcctgccctcccaccagataccaaatctgtgtcttctgagcgaggacataatccacacaatgcacgaggaatayagacgagcaacttggatagcaccttacattcaacagcggggagctaaccttgttgttctagctcaccataggatcagagtcagctagcaacaaccacaaacttgtaacaggaattagtttaataaatagctattagatcccatttcttctttagaaagacttccatgctatgcaacattctgatatactctgccttggactgcatgcttccatactttctctaaattacagaagcacctccaacaaaaacaatacactactgacagctgaatgtttcttgccaaggctgagtgcacccct

SEQ ID NO: 7379 - DNA, 600 bp, Chicken  19866894192346_1
ctgaagggaggaatgaggagtttgaataggactttactagagctatgggaaaccttggaaaagcaaaacgctttttctctgtccagaagcataatgaacaatcaacaaattgagcactgcggccacagccctggtggagggagggagagcaaggtcacctggagactggtccctgcctgtccgaaggggctcaggacattcagcagagcatgagctgtctttcagaggtgaacttcctaaatggccatgactgcatggaggaagcagctgagtagtaaattctcccactcaaacccaccrgtgaggaaaaaaataaacacacaagactctggctgtgcgtgatttttaaaaggtgacatgcaaatgtcaagagaaatgacatttcagagtggtaagatgcaatgcagctccttcagtggtgcttattgacaagccattcatggtcacatagctcagtgcttgccagcagctaatcaatgagatctgaaatactgtgygttcataagggataatttcaaggttaaaggaaaagaaaaagaaaaaaggtagaaagcatccaatatccatgtgttatcatcctccaagaggtaccccatacaa

SEQ ID NO: 7380 - DNA, 546 bp, Chicken  19866894192346_2
attcagcagagcatgagctgtctttcagaggtgaacttcctaaatggccatgactgcatggaggaagcagctgagtagtaaattctcccactcaaacccaccrgtgaggaaaaaaataaacacacaagactctggctgtgcgtgatttttaaaaggtgacatgcaaatgtcaagagaaatgacatttcagagtggtaagatgcaatgcagctccttcagtggtgcttattgacaagccattcatggtcacatagctcagtgcttgccagcagctaatcaatgagatctgaaatactgtgygttcataagggataatttcaaggttaaaggaaaagaaaaagaaaaaaggtagaaagcatccaatatccatgtgttatcatcctccaagaggtaccccatacaaggggaatgcacaattgatggtgagacgtttttggaggacataagaaagaagtaytaggcactttatattagacacttcataacaggcttcatattaaaactccaagcttttcctcaattaaataacttctgaaagttgctctg

SEQ ID NO: 7381 - DNA, 389 bp, Chicken  19866894192346_3
gacatgcaaatgtcaagagaaatgacatttcagagtggtaagatgcaatgcagctccttcagtggtgcttattgacaagccattcatggtcacatagctcagtgcttgccagcagctaatcaatgagatctgaaatactgtgygttcataagggataatttcaaggttaaaggaaaagaaaaagaaaaaaggtagaaagcatccaatatccatgtgttatcatcctccaagaggtaccccatacaaggggaatgcacaattgatggtgagacgtttttggaggacataagaaagaagtaytaggcactttatattagacacttcataacaggcttcatattaaaactccaagcttttcctcaattaaataacttctgaaagttgctctg

SEQ ID NO: 7382 - DNA, 600 bp, Chicken  19866894192350_1
ttattgggtgccctcatgtttcagataccctagggcatttcacaatctatttgtagggaaccgaatgcagaccccttaattttcagtgatgcagaagaaaccaaacaggatcccgtctttgaagaaatatagaaatccatctgcatttcatatccactcccccaaatctgtttctgttggcctctatcctgaagacatttactttcagtgactcctatacctgaatgaaggagcgctccagttgcaagaaaaagtgctttttcctattcaatagatgtgctaaattcattcaggactctsaggatcgatgtgctcactggagcggcctctgacaaagcaggaacaaggtggagagaccatcttagatcatagaacctaaccttaaacaccggttgttactgaaactctagcttatttctgttaaacacagagctgtacattttaaaagcaaaaccmaagaaaaagaaatggtgatattctgttctttaacagttatttacagtttcacaagcattacagttcagcagctctgagtcagttttaagggatacatacacttaacaattctacatccaaacaatcagatgaaattttaaaagc

SEQ ID NO: 7383 - DNA, 600 bp, Chicken  19866894192350_2
ctcccccaaatctgtttctgttggcctctatcctgaagacatttactttcagtgactcctatacctgaatgaaggagcgctccagttgcaagaaaaagtgctttttcctattcaatagatgtgctaaattcattcaggactctsaggatcgatgtgctcactggagcggcctctgacaaagcaggaacaaggtggagagaccatcttagatcatagaacctaaccttaaacaccggttgttactgaaactctagcttatttctgttaaacacagagctgtacattttaaaagcaaaaccmaagaaaaagaaatggtgatattctgttctttaacagttatttacagtttcacaagcattacagttcagcagctctgagtcagttttaagggatacatacacttaacaattctacatccaaacaatcagatgaaattttaaaagcatgggcttgatttttacaagctacttgacaacttgacgatagcataaaatttcccttaagttgttcgtggtaggataaatctttggtagcatataggcattaagaggacttttgtggtatctcccctttcttctggcacagatcagagctaagcaa

SEQ ID NO: 7384 - DNA, 599 bp, Chicken  19866894192353_1
  misc_feature (1)..(110): n is any nucleotide
nnnnnnnnnnnnnnnnnnnnnnnnnnnnnnnnnnnnnnnnnnnnnnnnnnnnnnnnnnnnnnnnnnnnnnnnnnnnnnnnnnnnnnnnnnnnnnnnnnnnnnnnnnnnnnattcttttatggatctttacagtctagctactttcatgaccatacttcatattgactattggaatttatgaatttaatattttattttttggagatgaaaggaattattttaattattgcaaaatacaagtgcagatctctagtgattaacagtgcagatctggcaatcctttttagtataattgttttwtaattaatgccttttgacacagtctgtcctgtgaattacattttgtttagacaagtgtagttagcctgtcttttaactttatttactcctattctgtatccacttaatcctctacagcaaagtaagacaatacttttcagacatctctccttcaattcacttcaaattttgtagaaaaatgtactatgggccagatgtgaatgaataatacacttttaagaaggattaatttagactcataacaaactcagttgtaaccattgtagtggaatgaaagttatcgatatgttctgttgggg

SEQ ID NO: 7385 - DNA, 600 bp, Chicken  19866894192354_1
agataagaggtgagtaaagaaaagggaagataacccaaaacttggtgaggccaggcagtatgcggatgtgtgtggaagtgtgggacggatctctgcatgttctttgttccttctttctcaacaaagggaacttctaggcattgaaccatctgcgtttattgccaacagtaaaacagcagctatgctgaaagcttgcagggagttgagcctcttaaagctatacagatgtttccggaataatagctttgtatacaaaatgacattgagtagcaattatacagcctccaaataaatacaaaygctaagtaaatctaaatcatcatcatgaaagatgtatttatttggaaaatcctgacaagagctcatacctaatcaaatgtgagctgggctttaaaaagtctctctgctactgatagcattgtatctgcattaggatccaggtagcccacagctcagtagaaggacatttccattcgcagtacttgtgttgatttaaagagcaagcttctcctctaaatataaaatgttgtttttactgcaatcattaaaatacctccaagagaaaacaattaaattgctcattccgtataaaaatgtgca

SEQ ID NO: 7386 - DNA, 600 bp, Chicken  19866894192356_1
ttctactgcacacatgctactgctatgtctgctcacttaagagcattcacattcctcttgaacgacataccaacagttgtatgcagagttctgggctctcatttatcaatccatttcaccactagaacttgtgtagtaatttgtgcttcattttaagttaaccacttggctagagcagcatatgtaccatcagccatgaccaaccacttttcattttacaaggactccaaattagcagtatgttctctttaatggcaggccatgttacagtcagtacaataacatctatacattattccraattggagccatcactgtaaacctacaatgcaagagaacactactgmttctcaatttaaggaatattgatgcatgagcatgtaatagagaagtgagaccacaaaaatcacccaataggttagagacaacatctactctcagaagacctacttgacacataccatggtaaaatcctcactctgcatccagcacggtaactgagtagcttgacttagtgcctggaacagagttgctctgagagcacagtagttatcacctcgtacttgccttattgatgcaaacttccgtgcaactgcttca

SEQ ID NO: 7387 - DNA, 600 bp, Chicken  19866894192356_2
cacattcctcttgaacgacataccaacagttgtatgcagagttctgggctctcatttatcaatccatttcaccactagaacttgtgtagtaatttgtgcttcattttaagttaaccacttggctagagcagcatatgtaccatcagccatgaccaaccacttttcattttacaaggactccaaattagcagtatgttctctttaatggcaggccatgttacagtcagtacaataacatctatacattattccraattggagccatcactgtaaacctacaatgcaagagaacactactgmttctcaatttaaggaatattgatgcatgagcatgtaatagagaagtgagaccacaaaaatcacccaataggttagagacaacatctactctcagaagacctacttgacacataccatggtaaaatcctcactctgcatccagcacggtaactgagtagcttgacttagtgcctggaacagagttgctctgagagcacagtagttatcacctcgtacttgccttattgatgcaaacttccgtgcaactgcttcatatccctaggaaaataaaaaatccaaataacacaaaagcattaataa

SEQ ID NO: 7388 - DNA, 600 bp, Chicken  19866894192356_3
aattcaagcggtatcataaaggaattggaacatgagcatctaatgataaagctctctcaagaacaaagaaaggtttgatcaatcaaatgatttggaagtacgtatgattctgtgtcacaaattttgctttacaaaaaacaaaacttccgtagtcctgctaaataacaaagaagaaaccaatgaaactgaagtaggtactgcctgcagcatttatctgactacacagcagaaatatctttgaaatgtaggtagctagcccacttaggtttcaaacaaaacccaaacacacaagaatataarcctaaaaatacagcatgattacaacaagaagtttcagcaatgccatttacccaatayttstcacatgcarcttatttatgccgcaggggaaaatctgcctttacacaaatgtgatgagagatcagaaacatttgtcccctccttgctgttcccacacgtacacttgtaacagaagatgcaatgttgaaactcagcttctgaagcttagtatgtattttcagctcatctaacaagattcaaatctctacatctgtactgtcaccaatctcttgaattacacaaagcattttaggcttgttt

SEQ ID NO: 7389 - DNA, 600 bp, Chicken  19866894192356_4
caagaacaaagaaaggtttgatcaatcaaatgatttggaagtacgtatgattctgtgtcacaaattttgctttacaaaaaacaaaacttccgtagtcctgctaaataacaaagaagaaaccaatgaaactgaagtaggtactgcctgcagcatttatctgactacacagcagaaatatctttgaaatgtaggtagctagcccacttaggtttcaaacaaaacccaaacacacaagaatataarcctaaaaatacagcatgattacaacaagaagtttcagcaatgccatttacccaatayttstcacatgcarcttatttatgccgcaggggaaaatctgcctttacacaaatgtgatgagagatcagaaacatttgtcccctccttgctgttcccacacgtacacttgtaacagaagatgcaatgttgaaactcagcttctgaagcttagtatgtattttcagctcatctaacaagattcaaatctctacatctgtactgtcaccaatctcttgaattacacaaagcattttaggcttgtttgcgtgtaccactatttttcttctccaacacaatttaaaataaagaacacccaaacca

SEQ ID NO: 7390 - DNA, 600 bp, Chicken  19866894192356_5
gaacaaagaaaggtttgatcaatcaaatgatttggaagtacgtatgattctgtgtcacaaattttgctttacaaaaaacaaaacttccgtagtcctgctaaataacaaagaagaaaccaatgaaactgaagtaggtactgcctgcagcatttatctgactacacagcagaaatatctttgaaatgtaggtagctagcccacttaggtttcaaacaaaacccaaacacacaagaatataarcctaaaaatacagcatgattacaacaagaagtttcagcaatgccatttacccaatayttstcacatgcarcttatttatgccgcaggggaaaatctgcctttacacaaatgtgatgagagatcagaaacatttgtcccctccttgctgttcccacacgtacacttgtaacagaagatgcaatgttgaaactcagcttctgaagcttagtatgtattttcagctcatctaacaagattcaaatctctacatctgtactgtcaccaatctcttgaattacacaaagcattttaggcttgtttgcgtgtaccactatttttcttctccaacacaatttaaaataaagaacacccaaaccaatc

SEQ ID NO: 7391 - DNA, 600 bp, Chicken  19866894192356_6
aggtttgatcaatcaaatgatttggaagtacgtatgattctgtgtcacaaattttgctttacaaaaaacaaaacttccgtagtcctgctaaataacaaagaagaaaccaatgaaactgaagtaggtactgcctgcagcatttatctgactacacagcagaaatatctttgaaatgtaggtagctagcccacttaggtttcaaacaaaacccaaacacacaagaatataarcctaaaaatacagcatgattacaacaagaagtttcagcaatgccatttacccaatayttstcacatgcarcttatttatgccgcaggggaaaatctgcctttacacaaatgtgatgagagatcagaaacatttgtcccctccttgctgttcccacacgtacacttgtaacagaagatgcaatgttgaaactcagcttctgaagcttagtatgtattttcagctcatctaacaagattcaaatctctacatctgtactgtcaccaatctcttgaattacacaaagcattttaggcttgtttgcgtgtaccactatttttcttctccaacacaatttaaaataaagaacacccaaaccaatccccacttcac

SEQ ID NO: 7392 - DNA, 600 bp, Chicken  19866894192357_1
aaatgagggtaaatcaacaggagggtagaagcaaactgctgcctggaaagtgaggatgaaaaactgtttgctaacaccccttactgtgcttggagctgcacgctaccactgaggacatttgtctgtgcctaagagactgataatatagttgatccatcatggttcttgcagttacatttgccgaattacagttacatcaaaactttagaatgggctgacttccagtgtcagaaattgttcaattatcagggaccacagttcgctaacttctcagctgtagtgattacacatgactacccrtatgattctgcagttctgtgatcatctgaatatttctatcctgtttacagagcaaattcactttctacgcaaattgcatcttggatgacatagggaatttagacaattctatgtgattttgaasttattagtaccaacaacaaaatggatggtatcaaatcttctgctagtagaagttaaaaatacttatcttaagtttatagaaattaccttgcttaactgcagctgaaaatgtgactgttctcttgatttactggaatatggcattttaataatttctgtatgctttttttttttttt

SEQ ID NO: 7393 - DNA, 600 bp, Chicken  19866894192357_2
gtgcctaagagactgataatatagttgatccatcatggttcttgcagttacatttgccgaattacagttacatcaaaactttagaatgggctgacttccagtgtcagaaattgttcaattatcagggaccacagttcgctaacttctcagctgtagtgattacacatgactacccrtatgattctgcagttctgtgatcatctgaatatttctatcctgtttacagagcaaattcactttctacgcaaattgcatcttggatgacatagggaatttagacaattctatgtgattttgaasttattagtaccaacaacaaaatggatggtatcaaatcttctgctagtagaagttaaaaatacttatcttaagtttatagaaattaccttgcttaactgcagctgaaaatgtgactgttctcttgatttactggaatatggcattttaataatttctgtatgctttttttttttttttttataatgacctcttggtcccaacttgaacagactaactgaaggaccagcattagctgtaaagttcagtgaccatatcatctaacttaaatcaagaatgaccatcaagatttcacatttcaca

SEQ ID NO: 7394 - DNA, 600 bp, Chicken  19866894192359_1
taccactctcatagtaaagaacttcccccttgacatccaaacctaaaccttccctccttcaacttaaaaccacttccccttgtcctgctattatctatcccttcaaagagttgactcctctcctgtttacaggccccctgtaggtcctgaaaggctgcaattaggtcatcttgcagccttcttttctccaggcttaacaagcccagctccctcagcctgtccagagctgctccagcattctgataatctttacggccctcctctgggtcctctccaacagctcctcctgccaccctctgwctgtggcctttcaaccaattccttatccatcaggtggtccacccatcaaatccacatccctccaatttggagataaggatgtggtgggggaccatgtaaaaggcgttgcacaaacccaggtatatgacatcagtcgccttccctttgtccaccaacgctgtcactccatcatagaaggccaccagattggttaagcgtgactttcccctggtgaagccatgctggctgtcgtggatcacatgctcattgctcgtgtgatcaagcatgtcgtcaagggggatcagttccacgaacttccca

SEQ ID NO: 7395 - DNA, 599 bp, Chicken  19866894192361_1
  misc_feature (1)..(218): n is any nucleotide
nnnnnnnnnnnnnnnnnnnnnnnnnnnnnnnnnnnnnnnnnnnnnnnnnnnnnnnnnnnnnnnnnnnnnnnnnnnnnnnnnnnnnnnnnnnnnnnnnnnnnnnnnnnnnnnnnnnnnnnnnnnnnnnnnnnnnnnnnnnnnnnnnnnnnnnnnnnnnnnnnnnnnnnnnnnnnnnnnnnnnnnnnnnnnnnnnnnnnnnnnnnnnnnnnnnnnnnnnnaaaatcattaatcacccgttgtgtttgagtataaacatcccagagctagcaggcgggcgtttcgctcagctgagcagcagcragatggacaatcacattctgctgcttccaagctcaggtactcacagccagagctggtgctgcaggtacccggcgcccagcgcctctgtgtgccccaagaaatggtcgagctggatatggttaaccaataacttyrcawggcacattagtgagcccttctgccaaacggcatttccaattagtatcgaagttcagcagatccacactgtatcaatatcatccctctcttgcacaagcaaagtgagcttcttcacttctggtattttaaacagaatgtgtaattcttgtgtgacccatggg

SEQ ID NO: 7396 - DNA, 599 bp, Chicken  19866894192361_2
  misc_feature (1)..(84): n is any nucleotide
nnnnnnnnnnnnnnnnnnnnnnnnnnnnnnnnnnnnnnnnnnnnnnnnnnnnnnnnnnnnnnnnnnnnnnnnnnnnnnnnnnnnaaaatcattaatcacccgttgtgtttgagtataaacatcccagagctagcaggcgggcgtttcgctcagctgagcagcagcragatggacaatcacattctgctgcttccaagctcaggtactcacagccagagctggtgctgcaggtacccggcgcccagcgcctctgtgtgccccaagaaatggtcgagctggatatggttaaccaataacttyrcawggcacattagtgagcccttctgccaaacggcatttccaattagtatcgaagttcagcagatccacactgtatcaatatcatccctctcttgcacaagcaaagtgagcttcttcacttctggtattttaaacagaatgtgtaattcttgtgtgacccatgggaggcacaaaactgcgtgagctgaatagcaccaaacaagatttcatgaaaagaaggcttttattcagaataaagccgtatcagcctatgtgttactcccttgttctaattatataggacagaatctatttaaact

SEQ ID NO: 7397 - DNA, 599 bp, Chicken  19866894192361_3
  misc_feature (1)..(83): n is any nucleotide
nnnnnnnnnnnnnnnnnnnnnnnnnnnnnnnnnnnnnnnnnnnnnnnnnnnnnnnnnnnnnnnnnnnnnnnnnnnnnnnnnnnaaaatcattaatcacccgttgtgtttgagtataaacatcccagagctagcaggcgggcgtttcgctcagctgagcagcagcragatggacaatcacattctgctgcttccaagctcaggtactcacagccagagctggtgctgcaggtacccggcgcccagcgcctctgtgtgccccaagaaatggtcgagctggatatggttaaccaataacttyrcawggcacattagtgagcccttctgccaaacggcatttccaattagtatcgaagttcagcagatccacactgtatcaatatcatccctctcttgcacaagcaaagtgagcttcttcacttctggtattttaaacagaatgtgtaattcttgtgtgacccatgggaggcacaaaactgcgtgagctgaatagcaccaaacaagatttcatgaaaagaaggcttttattcagaataaagccgtatcagcctatgtgttactcccttgttctaattatataggacagaatctatttaaactg

SEQ ID NO: 7398 - DNA, 599 bp, Chicken  19866894192361_4
  misc_feature (1)..(80): n is any nucleotide
nnnnnnnnnnnnnnnnnnnnnnnnnnnnnnnnnnnnnnnnnnnnnnnnnnnnnnnnnnnnnnnnnnnnnnnnnnnnnnnnaaaatcattaatcacccgttgtgtttgagtataaacatcccagagctagcaggcgggcgtttcgctcagctgagcagcagcragatggacaatcacattctgctgcttccaagctcaggtactcacagccagagctggtgctgcaggtacccggcgcccagcgcctctgtgtgccccaagaaatggtcgagctggatatggttaaccaataacttyrcawggcacattagtgagcccttctgccaaacggcatttccaattagtatcgaagttcagcagatccacactgtatcaatatcatccctctcttgcacaagcaaagtgagcttcttcacttctggtattttaaacagaatgtgtaattcttgtgtgacccatgggaggcacaaaactgcgtgagctgaatagcaccaaacaagatttcatgaaaagaaggcttttattcagaataaagccgtatcagcctatgtgttactcccttgttctaattatataggacagaatctatttaaactgcca

SEQ ID NO: 7399 - DNA, 600 bp, Chicken  19866894192361_5
tccacactgtatcaatatcatccctctcttgcacaagcaaagtgagcttcttcacttctggtattttaaacagaatgtgtaattcttgtgtgacccatgggaggcacaaaactgcgtgagctgaatagcaccaaacaagatttcatgaaaagaaggcttttattcagaataaagccgtatcagcctatgtgttactcccttgttctaattatataggacagaatctatttaaactgccaagttaatgacttcaaatttgatcaatagtctctgtttattcagcccagcaccactgacagkcaccagggatgaccagcaaaacaaacagcctggctggggcaaatccatggccgaggtggggtgagtaagaaaaagcaatccacaagagcaaatatcctttcatttagctgggaggtgggcagggaaggctcttccctctgaacacatcgagacagcccaattcctttgtggccatacgacatttatccatactattctgctartgaccaagtggtgagctgcgagcttgagcataactaacatcacagacacagaacaaatccaagccttatcttgtaccatctagctatgttaaatatt

SEQ ID NO: 7400 - DNA, 600 bp, Chicken  19866894192361_6
tctaattatataggacagaatctatttaaactgccaagttaatgacttcaaatttgatcaatagtctctgtttattcagcccagcaccactgacagkcaccagggatgaccagcaaaacaaacagcctggctggggcaaatccatggccgaggtggggtgagtaagaaaaagcaatccacaagagcaaatatcctttcatttagctgggaggtgggcagggaaggctcttccctctgaacacatcgagacagcccaattcctttgtggccatacgacatttatccatactattctgctartgaccaagtggtgagctgcgagcttgagcataactaacatcacagacacagaacaaatccaagccttatcttgtaccatctagctatgttaaatatttcgcatttgttttcagattaagccatggtagcacatgacaacaagaggagagcagtaagccttaggagtgcatgcaggaactcccctcastgtcaccatacccactgctgaaggaaatttgctttggagcagcttggagaaaggctggaaccagagccttgagagcaggatgacaaatgtccttgactaaatcttctgccaaa

SEQ ID NO: 7401 - DNA, 600 bp, Chicken  19866894192361_7
aatatcctttcatttagctgggaggtgggcagggaaggctcttccctctgaacacatcgagacagcccaattcctttgtggccatacgacatttatccatactattctgctartgaccaagtggtgagctgcgagcttgagcataactaacatcacagacacagaacaaatccaagccttatcttgtaccatctagctatgttaaatatttcgcatttgttttcagattaagccatggtagcacatgacaacaagaggagagcagtaagccttaggagtgcatgcaggaactcccctcastgtcaccatacccactgctgaaggaaatttgctttggagcagcttggagaaaggctggaaccagagccttgagagcaggatgacaaatgtccttgactaaatcttctgccaaaagatgctaggaatgttttagttacagacgagcttcagagagcaaaataaaaatagagtttagaatgaacagagatagcgtacagcgtgcacatagcgttctagcaaagacgtcttcacatgaaaaagaagatttgcaaattctgtttctcaacagcggcttaacagcaatgtatatggaaaccctcc

SEQ ID NO: 7402 - DNA, 599 bp, Chicken  19866894192362_1
  misc_feature (1)..(71): n is any nucleotide
nnnnnnnnnnnnnnnnnnnnnnnnnnnnnnnnnnnnnnnnnnnnnnnnnnnnnnnnnnnnnnnnnnnnnnntaagagggaggagagaggctgctgaaaagaaagtgcttgctctgacaataatcctgcactgttattcctgaagtgcttttaaaaacgaaccaacatcacgttagaaagctcacaccccatattcgaggtgcaaaggggtgagaatcagcagctgataggaattttctgcaagtggttctcagaaccagctctgacagaacttgcaattccaaagcatatttcctgaccrtttcatctgtcactgcgggtcacgcggggagatggaaacgcagccrggtttgaaaggaagcagctttagtggaggaatagggacgagtgcacggagcaacaggagcggagtgaataatgcatcatttattcacgaactgtcagctcactctcctcgctgaattgtcccggcttcctctgctttatccttcagccgaataacgcgggtgatgaaataccagctgtaattcatttcggagcagtaccctgacattacaaacagctgcggttgggctcagaggccacaagatacatcatgtt

SEQ ID NO: 7403 - DNA, 599 bp, Chicken  19866894192362_2
  misc_feature (1)..(25): n is any nucleotide
nnnnnnnnnnnnnnnnnnnnnnnnntaagagggaggagagaggctgctgaaaagaaagtgcttgctctgacaataatcctgcactgttattcctgaagtgcttttaaaaacgaaccaacatcacgttagaaagctcacaccccatattcgaggtgcaaaggggtgagaatcagcagctgataggaattttctgcaagtggttctcagaaccagctctgacagaacttgcaattccaaagcatatttcctgaccrtttcatctgtcactgcgggtcacgcggggagatggaaacgcagccrggtttgaaaggaagcagctttagtggaggaatagggacgagtgcacggagcaacaggagcggagtgaataatgcatcatttattcacgaactgtcagctcactctcctcgctgaattgtcccggcttcctctgctttatccttcagccgaataacgcgggtgatgaaataccagctgtaattcatttcggagcagtaccctgacattacaaacagctgcggttgggctcagaggccacaagatacatcatgtttctggctgagtgaacacaacctcgcggccctcggtcccaagcctgg

SEQ ID NO: 7404 - DNA, 600 bp, Chicken  19866894192367_1
gttgtggttcaggagctgcttccagcagtgcagggggacgtgctcgtggctggtcagggctggtttggtcgagtcctgcaagtcccgaggttttgttgaaacaatttccttttctctaagctttccaaagttttctgggatgttgtagttcctggcactgtgagaaaaaactatccaaagagtgagaggcagatgctttagatgcatgttagcaatggataacctcatgtttctggagctgaggatctctcatctactcagctgtaactgagcactggcactgctataggcccagccctyggtcctgtgctgtgcagggggttaggaacagcctgctccgtctcrtggcaattcgagcatcttttccctttgcctttgaagctgggagatctgcagtgtgtgctgccagctgtgctctcctttgtctctgcatggtgtaaattaagttgaaggaggccttttgttacagaagctsrgatgtgctgctgtgttgtatccagagccctgaagtcgcrcggtgctgttggtagggaaccggctttggcttctgctgccctcctcagtgtcatttttagcatccaagcaccacggcccccacat

SEQ ID NO: 7405 - DNA, 600 bp, Chicken  19866894192367_2
gtggctggtcagggctggtttggtcgagtcctgcaagtcccgaggttttgttgaaacaatttccttttctctaagctttccaaagttttctgggatgttgtagttcctggcactgtgagaaaaaactatccaaagagtgagaggcagatgctttagatgcatgttagcaatggataacctcatgtttctggagctgaggatctctcatctactcagctgtaactgagcactggcactgctataggcccagccctyggtcctgtgctgtgcagggggttaggaacagcctgctccgtctcrtggcaattcgagcatcttttccctttgcctttgaagctgggagatctgcagtgtgtgctgccagctgtgctctcctttgtctctgcatggtgtaaattaagttgaaggaggccttttgttacagaagctsrgatgtgctgctgtgttgtatccagagccctgaagtcgcrcggtgctgttggtagggaaccggctttggcttctgctgccctcctcagtgtcatttttagcatccaagcaccacggcccccacatgcacacagtggctcctgaagacacgggctggcacagcacctctct

SEQ ID NO: 7406 - DNA, 600 bp, Chicken  19866894192367_3
caaagagtgagaggcagatgctttagatgcatgttagcaatggataacctcatgtttctggagctgaggatctctcatctactcagctgtaactgagcactggcactgctataggcccagccctyggtcctgtgctgtgcagggggttaggaacagcctgctccgtctcrtggcaattcgagcatcttttccctttgcctttgaagctgggagatctgcagtgtgtgctgccagctgtgctctcctttgtctctgcatggtgtaaattaagttgaaggaggccttttgttacagaagctsrgatgtgctgctgtgttgtatccagagccctgaagtcgcrcggtgctgttggtagggaaccggctttggcttctgctgccctcctcagtgtcatttttagcatccaagcaccacggcccccacatgcacacagtggctcctgaagacacgggctggcacagcacctctctgcctcggcctctcctgcagagaggggaacccacctacctcgtcgcggagctgcggttgataatgttcacaaagtgctttttaatcccctgctgaaaggttctgtgcgagcgtgagttataattatgacat

SEQ ID NO: 7407 - DNA, 600 bp, Chicken  19866894192367_4
aaagagtgagaggcagatgctttagatgcatgttagcaatggataacctcatgtttctggagctgaggatctctcatctactcagctgtaactgagcactggcactgctataggcccagccctyggtcctgtgctgtgcagggggttaggaacagcctgctccgtctcrtggcaattcgagcatcttttccctttgcctttgaagctgggagatctgcagtgtgtgctgccagctgtgctctcctttgtctctgcatggtgtaaattaagttgaaggaggccttttgttacagaagctsrgatgtgctgctgtgttgtatccagagccctgaagtcgcrcggtgctgttggtagggaaccggctttggcttctgctgccctcctcagtgtcatttttagcatccaagcaccacggcccccacatgcacacagtggctcctgaagacacgggctggcacagcacctctctgcctcggcctctcctgcagagaggggaacccacctacctcgtcgcggagctgcggttgataatgttcacaaagtgctttttaatcccctgctgaaaggttctgtgcgagcgtgagttataattatgacatg

SEQ ID NO: 7408 - DNA, 600 bp, Chicken  19866894192367_5
tggataacctcatgtttctggagctgaggatctctcatctactcagctgtaactgagcactggcactgctataggcccagccctyggtcctgtgctgtgcagggggttaggaacagcctgctccgtctcrtggcaattcgagcatcttttccctttgcctttgaagctgggagatctgcagtgtgtgctgccagctgtgctctcctttgtctctgcatggtgtaaattaagttgaaggaggccttttgttacagaagctsrgatgtgctgctgtgttgtatccagagccctgaagtcgcrcggtgctgttggtagggaaccggctttggcttctgctgccctcctcagtgtcatttttagcatccaagcaccacggcccccacatgcacacagtggctcctgaagacacgggctggcacagcacctctctgcctcggcctctcctgcagagaggggaacccacctacctcgtcgcggagctgcggttgataatgttcacaaagtgctttttaatcccctgctgaaaggttctgtgcgagcgtgagttataattatgacatgaatgcctcatattttcctgcacgagccttcagcttgccg

SEQ ID NO: 7409 - DNA, 599 bp, Chicken  19866894192378_1
  misc_feature (1)..(10): n is any nucleotide
nnnnnnnnnncctatttcactccagacttccaaagccttaccttttaaattacactattcaacatttgttattataattgcacttttaaatcagttttttttgttagcgaagcatcaaacttacctgaagatttgctccagattttcactgggggcatttttcagccctgccagcatggtgtgaaggcggctcaagctgtatgtcgcgatggaaacaggcgtcacataggggttgctctccttaatgtacttgcggcccgtgaggggggtcgtcacccgaggtgatttagactaaaaagraaaaaaaaaagcagctatctgtatatcattacaaaacttagagcttgtaagagactcagaggtgccaggtgctagaattgtttcttaactggttacaayatatatctgggaaaagagagcaggtatcaaacaaaccaaaccaattcactctcagcagtagccagcagtgacaggtctatctgtcatttggatgtctgtgtcagatactaatgtagaagtgtctgagcagtgacaaaatgacctcacactgaaacgccagaattggacaacwccttctccacaaaaacagcaagggaccg

SEQ ID NO: 7410 - DNA, 599 bp, Chicken  19866894192378_2
  misc_feature (1)..(9): n is any nucleotide
nnnnnnnnncctatttcactccagacttccaaagccttaccttttaaattacactattcaacatttgttattataattgcacttttaaatcagttttttttgttagcgaagcatcaaacttacctgaagatttgctccagattttcactgggggcatttttcagccctgccagcatggtgtgaaggcggctcaagctgtatgtcgcgatggaaacaggcgtcacataggggttgctctccttaatgtacttgcggcccgtgaggggggtcgtcacccgaggtgatttagactaaaaagaraaaaaaaaagcagctatctgtatatcattacaaaacttagagcttgtaagagactcagaggtgccaggtgctagaattgtttcttaactggttacaayatatatctgggaaaagagagcaggtatcaaacaaaccaaaccaattcactctcagcagtagccagcagtgacaggtctatctgtcatttggatgtctgtgtcagatactaatgtagaagtgtctgagcagtgacaaaatgacctcacactgaaacgccagaattggacaacwccttctccacaaaaacagcaagggaccgt

SEQ ID NO: 7411 - DNA, 599 bp, Chicken  19866894192378_3; identical to SEQ ID NO: 7410
  misc_feature (1)..(9): n is any nucleotide

SEQ ID NO: 7412 - DNA, 600 bp, Chicken  19866894192378_4
tttgttagcgaagcatcaaacttacctgaagatttgctccagattttcactgggggcatttttcagccctgccagcatggtgtgaaggcggctcaagctgtatgtcgcgatggaaacaggcgtcacataggggttgctctccttaatgtacttgcggcccgtgaggggggtcgtcacccgaggtgatttagactaaaaagaaaaaaaaaaagcagctatctgtatatcattacaaaacttagagcttgtaagagactcagaggtgccaggtgctagaattgtttcttaactggttacaayatatatctgggaaaagagagcaggtatcaaacaaaccaaaccaattcactctcagcagtagccagcagtgacaggtctatctgtcatttggatgtctgtgtcagatactaatgtagaagtgtctgagcagtgacaaaatgacctcacactgaaacgccagaattggacaacwccttctccacaaaaacagcaagggaccgtgccagactcactctgtcaaagtgctgctgtaaattatgcttcacttgcactcgctcagctgtttccattcctgagggtgtatttaagcaccgtgtgaga

SEQ ID NO: 7413 - DNA, 600 bp, Chicken  19866894192378_5
gtcacccgaggtgatttagactaaaaagaaaaaaaaaaagcagctatctgtatatcattacaaaacttagagcttgtaagagactcagaggtgccaggtgctagaattgtttcttaactggttacaayatatatctgggaaaagagagcaggtatcaaacaaaccaaaccaattcactctcagcagtagccagcagtgacaggtctatctgtcatttggatgtctgtgtcagatactaatgtagaagtgtctgagcagtgacaaaatgacctcacactgaaacgccagaattggacaacwccttctccacaaaaacagcaagggaccgtgccagactcactctgtcaaagtgctgctgtaaattatgcttcacttgcactcgctcagctgtttccattcctgagggtgtatttaagcaccgtgtgagagttccaatttcttcatctgcatcttccccgagaaatattcgctcatcaagatttcctactgacaaaacgtactcctcataggccttgttgatggctttgctacagaggaacagagagagaaaacccctttatttagayagtgctttctttacctgctttctgactgagcaca

SEQ ID NO: 7414 - DNA, 600 bp, Chicken  19866894192378_6
tgacctcacactgaaacgccagaattggacaacwccttctccacaaaaacagcaagggaccgtgccagactcactctgtcaaagtgctgctgtaaattatgcttcacttgcactcgctcagctgtttccattcctgagggtgtatttaagcaccgtgtgagagttccaatttcttcatctgcatcttccccgagaaatattcgctcatcaagatttcctactgacaaaacgtactcctcataggccttgttgatggctttgctacagaggaacagagagagaaaacccctttatttagayagtgctttctttacctgctttctgactgagcacacttctggcctacctcagaagactacctcagagcttacttcagcctcagttaaaacctacaataccttaaacatgacaggagcatyatttttcctgtgtaactgatggcctgtcatttagtacggccacaggaggaatgcagtacaatgcagagaactggtggtatttggctggaaactcctcagaacttatgcagcatcacatcaccataaactgcacttaccacttctgtaccatttaaatgcacatcgcagtgcctctaggttt

SEQ ID NO: 7415 - DNA, 600 bp, Chicken  19866894192378_7
agctgtttccattcctgagggtgtatttaagcaccgtgtgagagttccaatttcttcatctgcatcttccccgagaaatattcgctcatcaagatttcctactgacaaaacgtactcctcataggccttgttgatggctttgctacagaggaacagagagagaaaacccctttatttagayagtgctttctttacctgctttctgactgagcacacttctggcctacctcagaagactacctcagagcttacttcagcctcagttaaaacctacaataccttaaacatgacaggagcatyatttttcctgtgtaactgatggcctgtcatttagtacggccacaggaggaatgcagtacaatgcagagaactggtggtatttggctggaaactcctcagaacttatgcagcatcacatcaccataaactgcacttaccacttctgtaccatttaaatgcacatcgcagtgcctctaggtttaaaaagcatggaacattaccacactcgattcttccctcctgcctgccccccactcagtgtgccccacagcttcttcttcctaacactttacattacatagaaaaaacccggaaacatat

SEQ ID NO: 7416 - DNA, 600 bp, Chicken  19866894192381_1
acctgtccaccatgacttttcaaatattatgtgtgactacatcagccatttctctcaggactctgggatgtatccaccaggatccatagactttaggttcctcaggtggtcacaaaactgaccttcacttacagcaggaaaggcattgctcccccagtccccaccttttgagccatacactcaaagtgtacatattcattctccttggttaacactagcccaaatattaccgtttttggagttactgtaagtcagagacagttactaaaagacagtatgtatgaggccaccttactttasgagtaagagtgttgtttaggaagttggtattttttttctaatgcttggtctcaggattgaaatacagaccctcatgaattgtatttactagtgaagttatagccaagctggctaaatttcaggttgcttctgcctgcagagtaatatacacctggattaaaatgttggttggactaaaatgatgggaagaaaattaatattttagcataggttccagaaaaaaatgacagaacgagcagcagcctgctgagggctcctgagcaaagcccttgccttaccctatgtgatactctggtaatt

SEQ ID NO: 7417 - DNA, 600 bp, Chicken  19866894192384_1
cttttggccctatgcaggagaggaaaggaaaaaaataaactgtattttccccctttgctgattacgttttttattaatatttaagtgcctgtaactaaacaggaggcagtttgttttcaataggggataacaccagcatcctgtagctatcagcagtgtctgctggccagagactaaacatcatccacctgttttgtagtctcttgacagacctctttcaccgagccccagactcagcaaactatttaaatataggcttcactggaaacaggaagagttatggagttaaaaaaaaggttygcatacagaaggaaaacttggctgaggtctccagagctgcatcagaccttcagtgcttcctagagcaggataggaaatcataggctcgcaaaagcaattgctgggggagatgcctgtagtttattacgggttaaaatattttgcttctctcaaagttayggggcgaagcagaaggttacaatgtgccaagagcttaaatatgtgtaataaacaagagcacataaggcatgagctgcgtgggggatttatttggtaacatagcaaaccatttgctgaggcacctcttacatcttgtttccc

SEQ ID NO: 7418 - DNA, 600 bp, Chicken  19866894192384_2
ctgctggccagagactaaacatcatccacctgttttgtagtctcttgacagacctctttcaccgagccccagactcagcaaactatttaaatataggcttcactggaaacaggaagagttatggagttaaaaaaaaggttygcatacagaaggaaaacttggctgaggtctccagagctgcatcagaccttcagtgcttcctagagcaggataggaaatcataggctcgcaaaagcaattgctgggggagatgcctgtagtttattacgggttaaaatattttgcttctctcaaagttayggggcgaagcagaaggttacaatgtgccaagagcttaaatatgtgtaataaacaagagcacataaggcatgagctgcgtgggggatttatttggtaacatagcaaaccatttgctgaggcacctcttacatcttgtttcccatcctcctagcacaccacttgtcaagagcgtggtgtcaggattgcagtgaattaacccaaaagcagcccctctagagccatgggaatatatcgtgtcgcaggggcctgaacgcaggggtgagctgcaaagtaaaagtagatggaaaaagcactgcttcc

SEQ ID NO: 7419 - DNA, 600 bp, Chicken  19866894192384_3
acaatgtgccaagagcttaaatatgtgtaataaacaagagcacataaggcatgagctgcgtgggggatttatttggtaacatagcaaaccatttgctgaggcacctcttacatcttgtttcccatcctcctagcacaccacttgtcaagagcgtggtgtcaggattgcagtgaattaacccaaaagcagcccctctagagccatgggaatatatcgtgtcgcaggggcctgaacgcaggggtgagctgcaaagtaaaagtagatggaaaaagcactgcttcccataattcacagattcamcgatttccaaagccaggaggagctgttagtccatctcacctgctgtcctgtttatcactgaccrtgctgtatcaccctgagtgcggttccttgtggctatctgcagcctctctgctggaagggcattaacaatcagccagaggtaaagaagccactttttcctcttgaatcacttcagcgcacagcttgtccccagcaagaccctgcctcgctgagcagtgcattttgtttccctttagtattgcaatacctcattttcaagaaaaaaagaaaaatcagataaagaatttttgtcaatcc

SEQ ID NO: 7420 - DNA, 600 bp, Chicken  19866894192384_4
ggatttatttggtaacatagcaaaccatttgctgaggcacctcttacatcttgtttcccatcctcctagcacaccacttgtcaagagcgtggtgtcaggattgcagtgaattaacccaaaagcagcccctctagagccatgggaatatatcgtgtcgcaggggcctgaacgcaggggtgagctgcaaagtaaaagtagatggaaaaagcactgcttcccataattcacagattcamcgatttccaaagccaggaggagctgttagtccatctcacctgctgtcctgtttatcactgaccrtgctgtatcaccctgagtgcggttccttgtggctatctgcagcctctctgctggaagggcattaacaatcagccagaggtaaagaagccactttttcctcttgaatcacttcagcgcacagcttgtccccagcaagaccctgcctcgctgagcagtgcattttgtttccctttagtattgcaatacctcattttcaagaaaaaaagaaaaatcagataaagaatttttgtcaatccatatgcttatcaaatgacactgagaccttggaatctttttccagaacatacctagctccagctt

SEQ ID NO: 7421 - DNA, 600 bp, Chicken  19866894192385_1
aacgtgcctgcagactacgggggtctgtaggagttggatcttcctcctcaggaaggtcaggaactgctgtgaccatttctattgcaggtgtttatcatgggttctcccagagctcagcattctgagtgctcctggacaaaaaccaaatacagaatgtcatcatcatgcagtgcatactcatcctggctgaaaataaacaggtttgttccatatacatcaggaaaaaagctagtgacataacacccagaaattcaagggggtcacaaccaactagttgtgaccacgaaccctgtacttccyaccaaagatgagaaaaaattggtgctcatattgtggcccagtataaagccccaacagccaggaagcagttcttgtggctgctcagctccgcgctccgatgacctcacgtcatgatgtgggaggaacacgggtcaggtacagggtgcgcagcacagaccccagagaataccccatggagaagcaaacagcctgcgaagggcactgctgcccagagcctgtccaccgtgaggttctaattttacttaatgactgccgacaggaattgaacaatcacaagcgagttttggctttcctgctggt

SEQ ID NO: 7422 - DNA, 600 bp, Chicken  19866894192385_2
aagcagttcttgtggctgctcagctccgcgctccgatgacctcacgtcatgatgtgggaggaacacgggtcaggtacagggtgcgcagcacagaccccagagaataccccatggagaagcaaacagcctgcgaagggcactgctgcccagagcctgtccaccgtgaggttctaattttacttaatgactgccgacaggaattgaacaatcacaagcgagttttggctttcctgctggttaatattgctatcacaaaattgttaataattcttagactccagtctgaggagcagcagaagygttgagattctcaagaagatgcagcccacgtggctcttgtgttgtgctttgcagcaatgtctttactgcaaacacgcctccactaatgcctgtcctggtcagagcccagaaatccctcctaactgattgaaagaagttctgctttctttaaacaccccaatcctagaccaaagacaatcatttggggacatgctctgctctcccaggagcagcatgcctggtatttgtgctgcagctgccactgcaggcagtgtgcagtgagcactgctgcactgaatggagaactgagatcatcctaaa

SEQ ID NO: 7423 - DNA, 600 bp, Chicken  19866894192405_1
aggaaacttttttctttagatcttccttctaaaaagtaactgttaaaaagcaagcaattaaaacttggtccccagagacctttacaaaggccacttgatgccatccttgagagacaactttattacctctcctctaccaacataccctaactcagcccagcttcaaaactacattttctctaacagatggttgaagtcattaacataactttgctaaactcagagaagtgttctcgacatgtatttatttagttttgaaggctgatgcttctatttcagacatgagaaacgacacttgcrtgtttaaaaggtcacctccctcagcagtatcaacaggcctaataaaagatgcaaccttctttccctgtaagccttgcccaaggagctgccactgctgcgtgtaccccagcacagctctttttgctgaaaccacccacacttctcattgctgacctgtgtttgtatttcagtcgataaacaccacgaacagcagctttcccctcgaagcacactgaggcttttgcctgctgtaaatattgtatttgctaccagcacagacagcatcttatcattccttccttagaccaagtgcccggggaa

SEQ ID NO: 7424 - DNA, 600 bp, Chicken  19866894192424_1
gcttttgtatttaaaagcatcctttcttttcttaggagttttctttatcttagattgtttctaaaaccaaccagtgacgtttggccatgcctattcattcttttcaggtacatatttgggtctttttttcttttttcaaatgaaggaagtggtacaaagttgagggataagcaaattcctaattgtgagctctcatggaactcatttgataaataaacttgtattttattgtcagaaggagtagaatcctgctgtcaagagttcctaaacagaatcacttaccactaaattgatcccttytttcatatgctggctaatttgaagcagacggatttctttagctgggatgaatatcagtatttcagagttaggtattttcagcagagggcagagcagcaaacagtccaaatacatgtttcacagtggagaactgttgggaccttaatcctcctccattccctgtggcaggcacaggaggaaaaattcaaaggaggcttttgtggaagtggttgctttcagtaggctgggctccatgacccaagaggatttgaaaagatctatgttccagtgtttttagagactgtgctgtctatcaccagg

SEQ ID NO: 7425 - DNA, 600 bp, Chicken  19866894192424_2
tgtgctgtctatcaccagggtgcaggctcttcacatcaataacccagcctttctaagccagtgaaggcaagaacatgagctttgtcttgctgccaccaaggagcgggtagcctttcactaatgaactcatgggctgcctctgtcagtgagataattcttggctcctgtcccagcacagaactcttcagccaccagatcctcatctcttatcttcagcatttctcttctgattctttagatttcctggaacagatttcacaagtaaccatgcctttccacgtcccccaacactgcagaaamattgactaaggaagtgacatagtccagtctctctctccaagcaggatggctgctgacagcagatgagatcacacctggtcaatccctgaaaacctccaagggcagaaattccccaacctgctccagtgctgtgcccttctgctggaagcgtgttccttatgtctaacctggctctctggagttactgcctgtggccctcagcccttcttgtgccatctgaaattgctaacaacagttaagctatcttacctttgtaactacccttcaagtaattgtacttctcctttcactcaacagaca

SEQ ID NO: 7426 - DNA, 600 bp, Chicken  19866894192434_1
cataattaaatagaaacactgtcaactttccattctacaggaaacagagaaaaaatgaacatgggagatggacaataatggaaaaactagttttgaagatttactcaagacttagctagcagaatcacataattactttcgtttcttaaattacatcagctatgtacaaattgttttctatcctttctacttttttagaatttcagaagtcactctcctctgatttttatatcaattctgtcaaaattatgtgttttatattttacatgagctactttacatgtcttggggattatctartctgtaccaatatcagtatctctctctgactttttggaatgacagaatggttagggttggaatgaggtcatctggccaaaccactctgctcaaacagaggtgcctacggcaagttttcaaggactatatccaggtggattttgaagatcaccaaggataaacttgtcatcagcaaacttgcttgagtgcaccctcagcaagtttgctgatgacaccaagctgtgggctgtgattgacacaccagaggggcaggatgacattcagagcattctagacaggcttgagcagtgggcccaggtg

SEQ ID NO: 7427 - DNA, 600 bp, Chicken  19866894192441_1
aaataccagccacatcagtgcattaactaagcacagttcagtgaatgcatccatatgcagttctctcactttcccagggcacatacaatttgcagtgaaactaccagtgtaaccttgaatgaaatatttaaggcagtcttggactatttcatgctcaaacagttccttagaaaagctcaggatattaatccaaatttccacaccccttaaactgactttgttgactccttaaaactaacttacaccagcaaaatctaactttcctttccaggaacatattaaaacaagatggaagtagtktccagcatcctccagtacaaacagtcagatctccatgtgagctaacagcatgagaactctttttaaataaaattcagaagaggtcagttaagcatcaaggaacactactgtattaattttgcctaagwtggtctgcattgctacgacagtagaattaattccaccactgaaaaaaatgtttaagaggacagaagaaggcacatgctgatggagaacagctaccagcaattctttctttcagataaataaccccatggctattgtttcatcaaaccttgaattcttttaaaaactaactat

SEQ ID NO: 7428 - DNA, 473 bp, Chicken  19866894192441_2
taaggcagtcttggactatttcatgctcaaacagttccttagaaaagctcaggatattaatccaaatttccacaccccttaaactgactttgttgactccttaaaactaacttacaccagcaaaatctaactttcctttccaggaacatattaaaacaagatggaagtagtktccagcatcctccagtacaaacagtcagatctccatgtgagctaacagcatgagaactctttttaaataaaattcagaagaggtcagttaagcatcaaggaacactactgtattaattttgcctaagwtggtctgcattgctacgacagtagaattaattccaccactgaaaaaaatgtttaagaggacagaagaaggcacatgctgatggagaacagctaccagcaattctttctttcagataaataaccccatggctattgtttcatcaaaccttgaattcttttaaaaactaactatt

SEQ ID NO: 7429 - DNA, 600 bp, Chicken  19866894192448_1
aaatcagacaagtgtgcacaccgtgcttcaccacctgcaaacagtcccttcctgcatcccccagacgtgcatccaaagccacccgtctctcgagggcatgcagctcacatgcattatgacacatcgctgtctcttgcacagcagtgaccactgcgagtcattctgggaaggcctgactctgcagagctggaaaccagtcttgcacaagggctgcaaagagaaaacaacccctaacatgctgagtaaaacaccagagtaacccgcttgtcatatgcaaactcagtttgggtttcacagccycagtaatccccacttagtagtttcatccattctactcagagctacaaaatcacttcgaatttggggcttccccactatgctttgctatgcaaaaagcagttcctttttgggttcttgcctcactgaaactgtgcggaggggcaggactacaaacattaaccttacccgagatcttgccctgaccctgctggcctttcagtgctctcagagcaccttcctttcccccactcagaagcccccttttgccaagagtcagaacaagagaaagtcttggtcacaacacagttgctcaaggtgtcc

SEQ ID NO: 7430 - DNA, 599 bp, Chicken  19866894192449_1
  misc_feature (1)..(144): n is any nucleotide
nnnnnnnnnnnnnnnnnnnnnnnnnnnnnnnnnnnnnnnnnnnnnnnnnnnnnnnnnnnnnnnnnnnnnnnnnnnnnnnnnnnnnnnnnnnnnnnnnnnnnnnnnnnnnnnnnnnnnnnnnnnnnnnnnnnnnnnnnnnnnnnngaaaaatgaggaactctgaaagagtttacttgtcatggcagactgtaagacttggagatgatcagcaagcacaggttgtcagagtggagctggactctgggtttctgagtcttgatgagtagctgaattaaagcttgtttacatacaagaagaaaygaaaacaaactaaaagagccttaaaagcactctggttggctttatgcagaagtgactgagtaaagaagagtactgagctcctcagtacaggagagatgtggaccagttggagcacacccagaggaaggccacaaaaatgattcaaggaatggaacacctctcctacaagggcaggctgagagagctgggggttgttcagcctggagaagagaagaytctcaggagacctgaaagcagcctttcaatatctgaaggggagatacagtaaagaaagggacagattctttagcagggtctgt

SEQ ID NO: 7431 - DNA, 600 bp, Chicken  19866894192449_2
aggttgtcagagtggagctggactctgggtttctgagtcttgatgagtagctgaattaaagcttgtttacatacaagaagaaaygaaaacaaactaaaagagccttaaaagcactctggttggctttatgcagaagtgactgagtaaagaagagtactgagctcctcagtacaggagagatgtggaccagttggagcacacccagaggaaggccacaaaaatgattcaaggaatggaacacctctcctacaagggcaggctgagagagctgggggttgttcagcctggagaagagaagaytctcaggagacctgaaagcagcctttcaatatctgaaggggagatacagtaaagaaagggacagattctttagcagggtctgttatgataggacaaggggaaayggtttcaaacaaaaaaaggagagatttaggttagatataaggaaaaagtcttttatagtgagtgtggtgaaacactggaacaggttgctcagagatttggtggatcttccatccttgtagacattcatgtctacatgggcactgagcaacctgatctagctatgggtgtccctgttcactgcaggggagttgaact

SEQ ID NO: 7432 - DNA, 600 bp, Chicken  19866894192449_3
ttaaaagcactctggttggctttatgcagaagtgactgagtaaagaagagtactgagctcctcagtacaggagagatgtggaccagttggagcacacccagaggaaggccacaaaaatgattcaaggaatggaacacctctcctacaagggcaggctgagagagctgggggttgttcagcctggagaagagaagaytctcaggagacctgaaagcagcctttcaatatctgaaggggagatacagtaaagaaagggacagattctttagcagggtctgttatgataggacaaggggaaayggtttcaaacaaaaaaaggagagatttaggttagatataaggaaaaagtcttttatagtgagtgtggtgaaacactggaacaggttgctcagagatttggtggatcttccatccttgtagacattcatgtctacatgggcactgagcaacctgatctagctatgggtgtccctgttcactgcaggggagttgaactagatgacctctaaaggtcttttcccagcgctaaggattctatgatttgtggtggataaaaactgaaataagaagaaaagataaaatccatgattcaaagttata

SEQ ID NO: 7433 - DNA, 600 bp, Chicken  19866894192463_1
caaatgtgtctgatctggaattgcttaagaagtaaattttgttagtataaaatgcgcagggctttctcagaatactacttgctatttggtgggaaaaaaagaaaaaaacaactatcagagttgtcactggtagcaaaggaatgtgaatacagtgcaaaaatgtacaaaaccaggcagtcttgcttgttcacacactgctgtattagtctcgcatttctgaaacctttcaaaatttttatttttttaatgaaaaaacacaaatgaaataggacaattaaaaatatcaatcattactctttrcagccaactcgttttttggatctactaatatttatgaacctccatattgcagctctgaacttgccccatgctaattgcagccactggactgctcgagtgaataacctgaagttccttaaatattttatgcatactttgggatcagacctatactctgcagaatagacacaactgtttccaagaaaaccatatgtgtggagagtcataggtggatatccaggtgttaggataatgaatgaccatttatgataataaacgatgatctattaaaaatgcctttaaaagatttgaacaacatct

SEQ ID NO: 7434 - DNA, 600 bp, Chicken  19866894192464_1
ggagtattggtctgagcagctgggaaaacctaccaataacaaaaatagcaataataaataatgtatgcttttctctgaagtatctgtactgtagctagtaaagccaatgcaagggaacctgataaccccatccaagggaccctaagcttcaatctgtactaaaatggatagaaaattttaatttcctactgatgttatgcagttcatggaatcagtgtgtaaatgcacatctgtggtataagcaaactggcgttaaatgaatgcaaatgcatgatatatatgcattagttgcgtatttgrggttttctgatattttattatggttttctgagctttgctaaagactatgaaatactactgtctgtttcctgtagcttcagatactcatacttaaaatctccatgattgtgagctgttctaacagaaaacctgcaaggaacctagatttagttttgtaggagaagagtccttacgttgtccagactatgcttgtcactaagctttcccatgaaatctgaacttagaaacctgttggagatcactgatagggtacgaaatagaaagctgtggagtttccaagtcatattgtaaaacaccgta

SEQ ID NO: 7435 - DNA, 600 bp, Chicken  19866894192464_2
ttctgagctttgctaaagactatgaaatactactgtctgtttcctgtagcttcagatactcatacttaaaatctccatgattgtgagctgttctaacagaaaacctgcaaggaacctagatttagttttgtaggagaagagtccttacgttgtccagactatgcttgtcactaagctttcccatgaaatctgaacttagaaacctgttggagatcactgatagggtacgaaatagaaagctgtggagtttccaagtcatattgtaaaacaccgtaaaacaaagatcagtgtcccctggtrttaatggttggacctggtgatcttgaaggccttttccaacctagaggtttctgtggttctgtgattgctccaagagggtgtgagctaatttgttaagagttcatcccagctgtgcacacatctctgcagaggtacctcccagtgctcccagcttcacgtttcagtgcagaactacccaagaaggcacygggtaagagcagcaatgggacagtttaggttggaaaccagcagtccagactgctacaccaaggtaattactgtaattattataaattgaagtattaacatttatagaaatag

SEQ ID NO: 7436 - DNA, 600 bp, Chicken  19866894192464_3
tctgaacttagaaacctgttggagatcactgatagggtacgaaatagaaagctgtggagtttccaagtcatattgtaaaacaccgtaaaacaaagatcagtgtcccctggtrttaatggttggacctggtgatcttgaaggccttttccaacctagaggtttctgtggttctgtgattgctccaagagggtgtgagctaatttgttaagagttcatcccagctgtgcacacatctctgcagaggtacctcccagtgctcccagcttcacgtttcagtgcagaactacccaagaaggcacygggtaagagcagcaatgggacagtttaggttggaaaccagcagtccagactgctacaccaaggtaattactgtaattattataaattgaagtattaacatttatagaaatagtttagtcccttaaagttaacaagctggaaaaaatctgatgcttttttttttaatgtttactgtgatctgttaggtcagggcttaaactgttgattgagcacctggtgaagggctgtggctggcccagggaggcacaggcaaattgtttgcacctgtgctcaacaggtgaccaaaaggggtcaacccag

SEQ ID NO: 7437 - DNA, 600 bp, Chicken  19866894192465_1
aaccacacattatttttctgtatagggtactaaatcatatttaacacgttggtagttgagaactgataaaacataaggttcctttccagggaagaacacttttaaatcagtgagagtaaagtatgctcagtgatgtacgaataatacctggtttgcttctccgtattactacaggaatcttttccaatttacttgatcatctgcctggaacaaacattatgcactgggatggagagaaatgtctgaattaccagtagctcagaggcatgcagaatttggtcttatccttagcagctacaraaattgtcatagtggaggtattctacttaatggtgacatttggtctgatgtatacaatagcaaacaaggaattaataaataagtagccacaatttaagtagctctctgcacttctgtgtccttgacattttgtctactatgagtcaacttgcaagatgaatgcagagcaaaagaaacccctgcctatatcttctcaccctgaacatccataaatatagaggaatctccttgcattctgcatttgttattacttgaaattatctgtttctcagggaatacatagctttttattttcatcag

SEQ ID NO: 7438 - DNA, 600 bp, Chicken  19866894192471_1
ctgtgataagaagggactagcttctctcagctgtagctcttcaaaggaaggtataactcccttccctataatatgaaggactccttgtgctgttcaactcaaaactgaagaattgataccacatgttcatgcttcagctacttttgaaaagatccatatgtttttataacgtgctcacagcctaacctaatggtttgtacttctgaattcttagtggggtttgcaacagtagattcccatgtccatcagaaataaggtaaaatttattgggagttctttttagcagattgtgattcaaaytcaagttcagtgcaagttttcttttttggacatctaaagccggataaataacaaaaagcaatactgcaaagagctatagatgattatatcacaaaccaacaatacatgtgaaattgatattttaagctaaaattttgtcctaaatagacccacgtagaaatacttgtgcagagtgaaaagccagaataaattctggtttcccacagaaattttatattgtgcttcatgctgctgggaagcatcagtggagatgattacttcatgaaaaggcaactgtgctatttgtgaaggaaagtgagc

SEQ ID NO: 7439 - DNA, 594 bp, Chicken  19866894192472_1
tttcttagccctcccaaagttgtacttcagataaatgtccttctctgaggctgtcaacacgagcacacaagctccttggtaagagcagtgtacttaaaaagtgactcatatgcatttctgtctggttaatcattataaaatctcagtatgcatccccttcttcggctccaagagggtgcagccatctgacagcagaaaggaaagccatccatcttgtcaagctgagtatgcgcgcagccttattcaagagtttgtgggaggacagcgttttacttgtgcttcccaaagaacagagcattytcctgccaagagctgcacagcagctgatgctgcacatgtggcaataacaaggatggagatgtgcaaagtgacgattcacagcctgaagataaacacttcgtttgcaaagctagcacagccctagcagtgcaaaagaagaggtgaaatcctggcactatttgaaggcagcagaagttccggctactgctgtattaaaatctctattagcaactaacagcataatgcgacttgtttaatttctaaaaagcatgaggcagcaaggagggttagatgtgaaatcatgcacagcctgtg

SEQ ID NO: 7440 - DNA, 600 bp, Chicken  19866894192473_1
ccttaacattcaaaagtgcagttgatgaagagagcagcaaaatcaggcatcaatggtggaaacacaatttgcaggttttaataagtgaacagccataagcagtcacaaagcttaattcttttctatgtgcaggtaggaggttactgctgtggctgtacacctctgcaactcctctcctgtagtgcaaataggccaacatgattatgtgtatttcagaaagcaaaggctattaattagatttagacaactgatcaaatttctaaccgagctgagctttgtccatgctcagatggacccaaygttactgttggggaaaagtcaaatgacaattccagtcaatttcttgagagggacaggagaaggcagcgataagaatgcccatgaggcgagccacttctccagccaatgctgtcttctcatcatcatactccatggcttacagttaaagttatgcccaaattacactgatcgtagaacacatcttgtgyttaaaagaggttcagttctaagcctgaaaacagcaatagctttgtactggagaccttgtcctgtattgaaggctgtcatgttttttttttttttgtggtgatgacagcaata

SEQ ID NO: 7441 - DNA, 600 bp, Chicken  19866894192473_2
taggccaacatgattatgtgtatttcagaaagcaaaggctattaattagatttagacaactgatcaaatttctaaccgagctgagctttgtccatgctcagatggacccaaygttactgttggggaaaagtcaaatgacaattccagtcaatttcttgagagggacaggagaaggcagcgataagaatgcccatgaggcgagccacttctccagccaatgctgtcttctcatcatcatactccatggcttacagttaaagttatgcccaaattacactgatcgtagaacacatcttgtgyttaaaagaggttcagttctaagcctgaaaacagcaatagctttgtactggagaccttgtcctgtattgaaggctgtcatgttttttttttttttgtggtgatgacagcaatacacattgacagttaccaatggaattagttgagttgcatagatttcttctcccttgtcagcacagctcaactagaagctatctggttttgtggaagaaggttaaatgaagtctgaattcttaagtgctgtttgaaaaacttttgctygtctgatgaaggaggaaaggcagagatgtctgcaacaagaag

SEQ ID NO: 7442 - DNA, 600 bp, Chicken  19866894192473_3
agttatgcccaaattacactgatcgtagaacacatcttgtgyttaaaagaggttcagttctaagcctgaaaacagcaatagctttgtactggagaccttgtcctgtattgaaggctgtcatgttttttttttttttgtggtgatgacagcaatacacattgacagttaccaatggaattagttgagttgcatagatttcttctcccttgtcagcacagctcaactagaagctatctggttttgtggaagaaggttaaatgaagtctgaattcttaagtgctgtttgaaaaacttttgctygtctgatgaaggaggaaaggcagagatgtctgcaacaagaagagtctattgctacagtggccgggtctgaaagagctgtggagaaggggaaaaagctcaaggctttcactggtgcaagctcacctggtgccactctccactggccaacagcagctgcctttgcagtccccactcccacccttgcccctctcagagtgctctctgccacaagttagccacttcagggggtgaaaacacaatgaggatgccagcaaagctaagatcattttacttgtgatataatccatagatgaaatctac

SEQ ID NO: 7443 - DNA, 542 bp, Chicken  19866894192477_1
  misc_feature (1)..(4): n is any nucleotide
nnnnctgcactgcagtagaaatgttggggccaaagcaagctctgccttgtccccatcattcctaaacccacatcaaagattgctcagcatcctcccacaagttccagctcagcacttggcttgccccaattcctgcagaagaccctggcccctcatcttgcagatccagctacaccaaaccttttcctgcagagcccaatgggacttttatcagggcagactttcccagattagccaaagttgctgtgaaataggtcaggtaggaagatttctggagtcagcgtcagggccctatccacygtgctcccctggagatgatcaccaatatctgcacttttccaaagctcacaagcctaaacttattcaggatttattcttgtttattcttgttgtgcaatttgaatgcataagccaagctttgtctacatataaaactcaaataccgaaataatgaaaattaagcataaaaggaattgaagcaaataggctttgcttccacaacagtctgctaataacaagagtactgatatttattttataaa

SEQ ID NO: 7444 - DNA, 600 bp, Chicken  19866894192480_1
aattttttgttccagagtatatcctcactcactagattttaaaataatcatttgtttatttctttatatgagatatccttagcaatggctatcaacatcttcttatcagtactggaaaatttctgttagaacagaagaggaaactattatcatgtttcagaggaacagagattttgaaacaaataatttgaagcaaataaaatgaaggatttcacaatatatttttaaataaactacaaccattccaaagcgagaaatagattgtaagtaatgagtcattttctttttatgaatattgarataaaatgttgacatgttcagaacatttccagcatgtttccagctaaaggatttacaaaaactgacctggtcctggaaacagtcttggctttagccaatcaggttttaacagagaggtgagttatggaaaaactcttgaggaatttttattttcagtagtatttcattagtatttatttcacagtttttatgtttcttagataagtgagaatgaacttcacaaacaagtgagtgttaattatagtatgttaagttaagcgactgaaagttcttgtttccactttgactgataccaaaata

SEQ ID NO: 7445 - DNA, 599 bp, Chicken  19866894192489_1
  misc_feature (1)..(189): n is any nucleotide
nnnnnnnnnnnnnnnnnnnnnnnnnnnnnnnnnnnnnnnnnnnnnnnnnnnnnnnnnnnnnnnnnnnnnnnnnnnnnnnnnnnnnnnnnnnnnnnnnnnnnnnnnnnnnnnnnnnnnnnnnnnnnnnnnnnnnnnnnnnnnnnnnnnnnnnnnnnnnnnnnnnnnnnnnnnnnnnnnnnnnnnnnnnnncagcagcgtgcagcaaatcagcactgttgttcctcccttttaatcatgctaaggattacatggaactgtaatactttctaagcactcgctttctaaattggacaatcttaygcataaagacactgctggatttggcactttgcttcattgtttttgtttaaaaaaactgtttcctgaaatatagtataaatggtaagagataacgtgagccacagtaacaccccattaacagttcagacatgcactccaaaatacgtgtctatacaaatttatctaagatttctycaaaattccactccaaaatgttttcaaatctaaatacatctttttaaactgttataaaggtattttcttccttgaaacgaccagagcttacctcaccttctgctcagaacacacaaatccgtgac

SEQ ID NO: 7446 - DNA, 599 bp, Chicken  19866894192489_2
  misc_feature (1)..(15): n is any nucleotide
nnnnnnnnnnnnnnncagcagcgtgcagcaaatcagcactgttgttcctcccttttaatcatgctaaggattacatggaactgtaatactttctaagcactcgctttctaaattggacaatcttaygcataaagacactgctggatttggcactttgcttcattgtttttgtttaaaaaaactgtttcctgaaatatagtataaatggtaagagataacgtgagccacagtaacaccccattaacagttcagacatgcactccaaaatacgtgtctatacaaatttatctaagatttctycaaaattccactccaaaatgttttcaaatctaaatacatctttttaaactgttataaaggtattttcttccttgaaacgaccagagcttacctcaccttctgctcagaacacacaaatccgtgacttttttgttgttgttgtttttcaaaggagaccacaaagcaggattaaaacatgaaaaacctgaaaagcattattaaaccacacctgtatttcagaatcacctttgaaatgtatattcactacatggaaataggaaggtgtatgtcatgtttgaaacttgcctggtcctctctca

SEQ ID NO: 7447 - DNA, 600 bp, Chicken  19866894192490_1
cggcaaaggctgacctctaaccctgcctactccacagagaagccccatttatacaggccactttcaagctccatcttggtcaaatctagaccacgtcctccactctgacccctgtatcaaataacaccccagtacccttttagggaaatagtttctaatgttccccatgcccacagttaaacggagtgagctgacactttggattgacgtcaagtaacttggagtaaaactaatttttattccgagtcaaagtaactcacagcagatggctataaatacatgtagagagagccggacagmgagtctgggctgcgtgaggtagatctggaccatggcaggcatgctgggcayggagagagtcattagagaaaggtaaggatgctttcagcttcttatctttttcttyttagccctcttcctagtgctaagatgctccttcagctcaatattttctcacatctgaacacaattgccttggctgtgttaccggagacaacacgacttacgacttttggctcagtgtcgacgaggaaaaggcggtttggaagtgtaccctgttgtccgtgtttgagtggctgttcatgcagtatagctgagccc

SEQ ID NO: 7448 - DNA, 600 bp, Chicken  19866894192490_2
tacaggccactttcaagctccatcttggtcaaatctagaccacgtcctccactctgacccctgtatcaaataacaccccagtacccttttagggaaatagtttctaatgttccccatgcccacagttaaacggagtgagctgacactttggattgacgtcaagtaacttggagtaaaactaatttttattccgagtcaaagtaactcacagcagatggctataaatacatgtagagagagccggacagmgagtctgggctgcgtgaggtagatctggaccatggcaggcatgctgggcayggagagagtcattagagaaaggtaaggatgctttcagcttcttatctttttcttyttagccctcttcctagtgctaagatgctccttcagctcaatattttctcacatctgaacacaattgccttggctgtgttaccggagacaacacgacttacgacttttggctcagtgtcgacgaggaaaaggcggtttggaagtgtaccctgttgtccgtgtttgagtggctgttcatgcagtatagctgagcccaattagtgtaaaaccagaatccggctgctccctttgctgtgagataaaaaa

SEQ ID NO: 7449 - DNA, 551 bp, Chicken  19866894192490_3
gacccctgtatcaaataacaccccagtacccttttagggaaatagtttctaatgttccccatgcccacagttaaacggagtgagctgacactttggattgacgtcaagtaacttggagtaaaactaatttttattccgagtcaaagtaactcacagcagatggctataaatacatgtagagagagccggacagmgagtctgggctgcgtgaggtagatctggaccatggcaggcatgctgggcayggagagagtcattagagaaaggtaaggatgctttcagcttcttatctttttcttyttagccctcttcctagtgctaagatgctccttcagctcaatattttctcacatctgaacacaattgccttggctgtgttaccggagacaacacgacttacgacttttggctcagtgtcgacgaggaaaaggcggtttggaagtgtaccctgttgtccgtgtttgagtggctgttcatgcagtatagctgagcccaattagtgtaaaaccagaatccggctgctccctttgctgtgagataaaaaatcttca

SEQ ID NO: 7450 - DNA, 600 bp, Chicken  19866894192501_1
aggatggttgatcagaagctaaaagaagcgatttgccaaggtcggtaggtattaactagttttagaagtctctcctgcatttgaacctgcctgccaaattgtcagcttttaccagtaactaaaaagcaggctggtgtttagaaacactttggtgccatgtcagcacgctcagattttggagagctggattccagcgacaaaactgcacctttcctacatgaaactcacggtgatggggacagtacacccgctgggaatcagagccagcagtcccagctgccattctgctcttacttcagygggacttgggttgtccttttccttttgtaataaagcacagcagggagggagactcagtctgcattactccagggtgctgctttgctctctgctaacggctccctgctttgctttggtgaagagacaaaaaaagagaggagaaagtccaaactctgatcgtcctgataaaacaggcaggaggttattgctttattaggtggtgtatcacacatcagcctcaagaacccagaagaaagcagcatctgagtgcgaagtgctgacaccagcattagcagagtgggctccgaaacactcacagtg

SEQ ID NO: 7451 - DNA, 600 bp, Chicken  19866894192507_1
ctacagggccctgtgaggagaaagcagtgttgggctgaactaaagcaggttttgtacacttgttttctacgaggccactgtctagattgtgctggtaaattcaatatggctaatgctgattaaccaccctcttgatggtgattatcgttgcattatttccagcccattcctcagtatcctgaacttgtgagggtgtggatatacaaaacacaactttccctccttcacattttcttccaatgcttcatgtgcacaagagaagtccagttctgggctgatttgaaagataagggaaggagrcctctaagaagctcagatctttgctttgctctccttggtttgtgcttcttgttctttgttcttctggtctgtgcgtacacgttgccttttctctgccagtttcttgcagcccatcgagtccatataaatgttgcaacagaagtgggtagaggtaggaataatggaaatgttcagagggcagggaagcagaaactcagtgcrtaagcttggatgaggtgctctgtagaggcttccacaaattaacctgtctacttagacattaatttacatggaaaataaggttcaaaagmaaataaaccc

SEQ ID NO: 7452 - DNA, 600 bp, Chicken  19866894192507_2
tacaaaacacaactttccctccttcacattttcttccaatgcttcatgtgcacaagagaagtccagttctgggctgatttgaaagataagggaaggagrcctctaagaagctcagatctttgctttgctctccttggtttgtgcttcttgttctttgttcttctggtctgtgcgtacacgttgccttttctctgccagtttcttgcagcccatcgagtccatataaatgttgcaacagaagtgggtagaggtaggaataatggaaatgttcagagggcagggaagcagaaactcagtgcrtaagcttggatgaggtgctctgtagaggcttccacaaattaacctgtctacttagacattaatttacatggaaaataaggttcaaaagmaaataaaccctggatatttggcatcttatttatggtagaggaaaaaaataaacagattattgctgatatttgttatacccatccagaaaaggtcgctttcacatataatagagacatatatcagagaaatggtgtatttcctttttgagacatagatcaacttggtttcgttcattgttttcactgggatgcatcagtcaggtcaaatcac

SEQ ID NO: 7453 - DNA, 600 bp, Chicken  19866894192507_3
gggaaggagrcctctaagaagctcagatctttgctttgctctccttggtttgtgcttcttgttctttgttcttctggtctgtgcgtacacgttgccttttctctgccagtttcttgcagcccatcgagtccatataaatgttgcaacagaagtgggtagaggtaggaataatggaaatgttcagagggcagggaagcagaaactcagtgcrtaagcttggatgaggtgctctgtagaggcttccacaaattaacctgtctacttagacattaatttacatggaaaataaggttcaaaagmaaataaaccctggatatttggcatcttatttatggtagaggaaaaaaataaacagattattgctgatatttgttatacccatccagaaaaggtcgctttcacatataatagagacatatatcagagaaatggtgtatttcctttttgagacatagatcaacttggtttcgttcattgttttcactgggatgcatcagtcaggtcaaatcacattaaaagcccgctctcacctcctccgtcagagacgtgtgattgtgatctgtgcagctttgaagcctctcctgcaaatgtgtggacgct

SEQ ID NO: 7454 - DNA, 599 bp, Chicken  19866894192510_1
  misc_feature (1)..(116): n is any nucleotide
nnnnnnnnnnnnnnnnnnnnnnnnnnnnnnnnnnnnnnnnnnnnnnnnnnnnnnnnnnnnnnnnnnnnnnnnnnnnnnnnnnnnnnnnnnnnnnnnnnnnnnnnnnnnnnnnnnnnttcttgtcttaaagagggatgtgatagatgattttcatcttcaaaatttaaagccatttatagtattctgtactagcagactaaaaacctgaactctgtgtgtttttataattaacagtgtgagcgagcagttctcattatgcctttcatttactgtgcacagtccaatgttgctctttttgtrtgctgtcatatttttgaaactaatttttggttttgcagtcttggtacttcttccatttttaatgtgtttctcatgctacgctctttaaaaatcctttttttcttaaaaatgactctcttcttcctctccctctcttgaaaatgttactgagggtgtttactggaacagtaagccttgtggcgtccccagtctagcataaagttaattaacattagttttaggtgataaaactttgtaataaatatgttgatctcatacttgcctgagttgcactatgtaaaccagagaaactttgaagt

SEQ ID NO: 7455 - DNA, 600 bp, Chicken  19866894192510_2
ttaaaaatcctttttttcttaaaaatgactctcttcttcctctccctctcttgaaaatgttactgagggtgtttactggaacagtaagccttgtggcgtccccagtctagcataaagttaattaacattagttttaggtgataaaactttgtaataaatatgttgatctcatacttgcctgagttgcactatgtaaaccagagaaactttgaagtcaacaggaatattatctgagtcagtggtagctgggctttttgagataacttgagactgaaaatagcgcatagtatatcaaagcargaattatatgagctctaatgataagattgccagccaggaagcaagactatgtgaaattgaaggaatatcctgatatcattttgttggcttttatgaattctggatggtgctgtgcattttggcttcagtggctaaaagtcttgttttattgtatttatagaccagacgtgtaatgtttttaatatgttaatgaatttcaatcttttatgtattcataacaattatttataattgagttaattgcattctaaaacatttattgctattttaatatggctattcgattaattattgaaatag

SEQ ID NO: 7456 - DNA, 483 bp, Chicken  19866894192515_1
atttaacaaagaagtggcaggtgagagttcagttcagtataatccaaatctcatctatgctgaaagaaactgagattagcagttgctgagaaaaagggtggaacagaagcattgtgaatatacaagccacaaagctcaagggaattgcagtaacagcagtcttgaatgcatggacaagtagcagtgctcatcttatcaccaactcaaaactgtgcttgctcatttccttagttatttgcaggtggctccagcagcttttcttcggagagaggagggacatatggaaaacccttccttacrcatggcacatgttcttttccatgatgaagtctagtaagtcacagaagttcaccttcttgtaaccagttgcacgtactatttcacttccaattactctcttctcttagaagagattctggagtctttcacaatggtaggaccacagtttggaattacatctcagcttccagcagcttgctcctt

SEQ ID NO: 7457 - DNA, 600 bp, Chicken  19866894192516_1
cactcccagtcagaaatacatctcttctgccataaaatgaccctgtagttcctcagatagttctagcaagattcttaggagctctccaaaagaaaacaacaaaatgctgagtggacataaaataccttttctttgagaattattgtcttccaaaataatccagcatttccagcaaactcaccttgcaatgcacataagatatgtatcctataaatctgcattaaataaacagatttaagtttcttaaggttcagcccagttcagctgtcaaacatgaagctgcactctgaaagatagatyagaggtttcttttggtatactattratttttkgggtttatacctaccaaaattacattaggcacatattgttctgagcagcactaatacacactgaagaaaagatgagtgcaaatggaaaataattctcagagaagaatactattcctgtccctttgtctgggaaatcttgagttctgagtagagatttcaaccatggcatagtcttcctatgtatctcagttcttcacctgtcatatttcttttgcctactttgtatttgtctgtatttgtttgtattcgttcactctttgcttatggt

SEQ ID NO: 7458 - DNA, 600 bp, Chicken  19866894192516_2
tctgccataaaatgaccctgtagttcctcagatagttctagcaagattcttaggagctctccaaaagaaaacaacaaaatgctgagtggacataaaataccttttctttgagaattattgtcttccaaaataatccagcatttccagcaaactcaccttgcaatgcacataagatatgtatcctataaatctgcattaaataaacagatttaagtttcttaaggttcagcccagttcagctgtcaaacatgaagctgcactctgaaagatagatyagaggtttcttttggtatactattratttttkgggtttatacctaccaaaattacattaggcacatattgttctgagcagcactaatacacactgaagaaaagatgagtgcaaatggaaaataattctcagagaagaatactattcctgtccctttgtctgggaaatcttgagttctgagtagagatttcaaccatggcatagtcttcctatgtatctcagttcttcacctgtcatatttcttttgcctactttgtatttgtctgtatttgtttgtattcgttcactctttgcttatggtacacagaaattatcttgcttacagt

SEQ ID NO: 7459 - DNA, 600 bp, Chicken  19866894192516_3
taaaatgaccctgtagttcctcagatagttctagcaagattcttaggagctctccaaaagaaaacaacaaaatgctgagtggacataaaataccttttctttgagaattattgtcttccaaaataatccagcatttccagcaaactcaccttgcaatgcacataagatatgtatcctataaatctgcattaaataaacagatttaagtttcttaaggttcagcccagttcagctgtcaaacatgaagctgcactctgaaagatagatyagaggtttcttttggtatactattratttttkgggtttatacctaccaaaattacattaggcacatattgttctgagcagcactaatacacactgaagaaaagatgagtgcaaatggaaaataattctcagagaagaatactattcctgtccctttgtctgggaaatcttgagttctgagtagagatttcaaccatggcatagtcttcctatgtatctcagttcttcacctgtcatatttcttttgcctactttgtatttgtctgtatttgtttgtattcgttcactctttgcttatggtacacagaaattatcttgcttacagtgtttagt

SEQ ID NO: 7460 - DNA, 600 bp, Chicken  19866894192517_1
cacatatgagctcatccattgaaactgctttttacctccataccgcctttagaaaagaaaaataatggcaacaggattcctgtatagacaccaagacacgtgtaaacaaacatttccaccaagacatcactgagaaatgagttttcatattttagtaaaatgtttttacattcgtgtagggaaatcccacatggatctgacagaaaatttctgcagaccaaggaaatgaccctgagcagatttggatgggctttcagtggagtcccgcctgctgctactgattttacaaagctaaaggcrtaagtgaacccattagggaatcagtaagttaaatttactgatcatgcttctagtcacatacatttaagtgcatagctagttactataatcaactatgatgacaactaatgatccaaaaccattaaagggaaataataatgatattgtgtcttgtcactgcacaagcactaagtctaaaggaaagaaaatattgtactcctcaccattctcaatggcagttttttcaaaagaggctctattgtcagcatttctagggtacttgcattttttttcttaagagacagtaccattcgtgcagca

SEQ ID NO: 7461 - DNA, 600 bp, Chicken  19866894192517_2
tataatcaactatgatgacaactaatgatccaaaaccattaaagggaaataataatgatattgtgtcttgtcactgcacaagcactaagtctaaaggaaagaaaatattgtactcctcaccattctcaatggcagttttttcaaaagaggctctattgtcagcatttctagggtacttgcattttttttcttaagagacagtaccattcgtgcagcatttatgtggacaggaatattagaagaggctctttccaaccagtgccttaatctcaacagcatggaattcggtttgaaaatctrcccatattcattctggttgtcattatgtggagcttttctcctctttcctgtatggaggagyggctgtggaggagttgtgtccattctgttcacgtctccttccagtgctgattgaaagtgggaggtgcaggggtacatggaagcagccagcctgctttggtcacaaataagacctctgagtggaagtctttggtacaggtggtgctgacttggtgcagttttcctcgggtataaagaaaaatcccatatggaatgcccaaagttggaggaagagacttatagggcactctgggggtctgt

SEQ ID NO: 7462 - DNA, 577 bp, Chicken  19866894192517_3
tgtgtcttgtcactgcacaagcactaagtctaaaggaaagaaaatattgtactcctcaccattctcaatggcagttttttcaaaagaggctctattgtcagcatttctagggtacttgcattttttttcttaagagacagtaccattcgtgcagcatttatgtggacaggaatattagaagaggctctttccaaccagtgccttaatctcaacagcatggaattcggtttgaaaatctrcccatattcattctggttgtcattatgtggagcttttctcctctttcctgtatggaggagyggctgtggaggagttgtgtccattctgttcacgtctccttccagtgctgattgaaagtgggaggtgcaggggtacatggaagcagccagcctgctttggtcacaaataagacctctgagtggaagtctttggtacaggtggtgctgacttggtgcagttttcctcgggtataaagaaaaatcccatatggaatgcccaaagttggaggaagagacttatagggcactctgggggtctgtccccagccacttacctcctagctgagaagccttcctca

SEQ ID NO: 7463 - DNA, 599 bp, Chicken  19866894192518_1
  misc_feature (1)..(79): n is any nucleotide
nnnnnnnnnnnnnnnnnnnnnnnnnnnnnnnnnnnnnnnnnnnnnnnnnnnnnnnnnnnnnnnnnnnnnnnnnnnnnnnctggaggagcggaggggctggtgtttggacaggaaccgagaagtggtagaaatcctcacttgtctgtttcctccctgcttggctctaagcccctctgctgctgctgggttgtccccgtcgctgtttgcagctggcaggcagttgtcctttggtcaaagccagggctcaccgcttggggtgcgccagggctgtacagcacggttcctgacccagaaccgtgyctcgatgatttcttttggcctttcatttcagcaggcagcgtttggccgaatgctgcggttgtggtgaggtgacragttgtacagagctgttacccgctgctttggtttcctctggcacatcagaactgctgaagctgtggttgtctgaggaagtcacttccaaacacttaaaaaaaaggctttgaaaacgatgttgctgaggtgtctcctcaggtgctgaggtgctgtgatgtctgcctccgcctctctcagcacacactgctttgtgctgcaggtgtttgggtgaggagttgcgggcg

SEQ ID NO: 7464 - DNA, 599 bp, Chicken  19866894192518_2
  misc_feature (1)..(5): n is any nucleotide
nnnnnctggaggagcggaggggctggtgtttggacaggaaccgagaagtggtagaaatcctcacttgtctgtttcctccctgcttggctctaagcccctctgctgctgctgggttgtccccgtcgctgtttgcagctggcaggcagttgtcctttggtcaaagccagggctcaccgcttggggtgcgccagggctgtacagcacggttcctgacccagaaccgtgyctcgatgatttcttttggcctttcatttcagcaggcagcgtttggccgaatgctgcggttgtggtgaggtgacragttgtacagagctgttacccgctgctttggtttcctctggcacatcagaactgctgaagctgtggttgtctgaggaagtcacttccaaacacttaaaaaaaaggctttgaaaacgatgttgctgaggtgtctcctcaggtgctgaggtgctgtgatgtctgcctccgcctctctcagcacacactgctttgtgctgcaggtgtttgggtgaggagttgcgggcgtgggggcagctttgcctgcaggtgtacacgggcgtagtgctcacctgtgtgtgaggagagctcattccttctgc

SEQ ID NO: 7465 - DNA, 600 bp, Chicken  19866894192519_1
tgacgcattctagccttagcatgtgattctcactgcactattagcatatgccttctagctttacctatttcaagaccatgtaataagcagctcaggccactgtaactttgtctttgacatttatctctttctcccagtgcatatttcattgcatttacaagcaaccgtacgttccctctatttgtgttcctgtcctcaaggtagctgcccttttcacaatgctccagcagtagcttattaccttgctcttagttccctgttatttctactgcctgaatatttagggtaattgcccctccratgcctgtatgtcttcagtggaataatgtgtgtgccctgtgtagaagcgattatacaatgtattagcaagaaggaaagtgttaagttttgaacaggaacaaatcctgcagaggcaaagtcagtcataaagcaggaggctaaacatcaccagtgggaagcctctatttttggacacctctctccctcctaggcctacttgcaggaaacctcagaggtcacacagaaatgctaagctagtttatctgaaatgagctggtaggttggggtttgcggagatgcctagagataaagctgctgttc

SEQ ID NO: 7466 - DNA, 600 bp, Chicken  19866894192519_2
ctgttcaacaaatctcttttaaaagtttgggcccaaaatacatttcttgaaatgaaagatgtggatgaaaaaaaaaagaaaaagcagagaaatgctgcagagcctacagaaattaatgggagtctttccaaagacatgaggagatttgcagaacattatacaaaactgcatggattttaagttcatctgagaaacaacttggaatgcagcttctcccactcagaacgcctagagttaaattagaagatgcccctttggcaggggggcatttgtcagtcccaggtggacctctgagcaggwgttgatagcaacttctctccaccatctcctatccttcctttacaaaatcggggggggggggttaactttacaaagtgtagattttaattttctctgaagaggttttgggaactccagtccttttttggcttgcagggcagtgggaaggatattttctgctggttttttattttttgttaggggcaaggaggaggaatgagtgttgatgagtgttggagggagagatagcaggaacttcctggtcagttagtactgttctgcacaaagaaagtaggccctcttgctctaaatactaccaca

SEQ ID NO: 7467 - DNA, 591 bp, Chicken  19866894192522_1
gaagagaaggctccaaggagacctcactgcagtcttccagtatttgaagtgagcttacaagtggggaaggggactgactttttacatggtctgatagtgataggacatggggaatggctttaaactaaaagaggtgagatttaagttagatgttaggaagaaaattttaatcagaaggtgatgagaacctggcacaggctgcccagataagctgtgggtaatccatccttggaggtgttcaaggccaggatggatggggctctgggcagcctgagcttgtgggtggcaaccctgtccacrgcaggtgggctggaactagatgacctttaaggtcccctccaacctaagctattttatgattctatgattctatgctcactgcatttatttgaacagctgctgggagactccctcttctaaggatacttatttcagtgtataaaattcgctggactatcaaaaacttaatacacagctgtattcaaggaaatcttgcctgaagagaatgtatgtgcagatctcatcttacagggaaaagaaatgtaattcataatcacaccaggttaacaatgataatcagtagattcatca

SEQ ID NO: 7468 - DNA, 600 bp, Chicken  19866894192525_1
tttgctcagaggtgacccagctttgagcaggagattggactggagtcctcatatggttctttccagcctgaattatacaatgagcatattctgtgattcagaaacagttcttaataatatgtctatgtaaactatgttgcaagatcaaactcgtttttagtaatgcaattggggctattccatgtaacaagcttcacggtgtggacttttggagagagtgtggtgaagaaaggctattcctagatctttctggagaatgtctacagccttaacttagagatccttggactggggtaagamtgggatctgcagtccttctgtatttaagcatcttctgggtaaaaattttgggaagctatatttgctgatagcaaaatacagcaaatatacaaaaatacagcttcttgatctcatgtttcacagtccatatctcttatactgaacccggtgaaaaaataggtggtatgtgagtaggaaagatggcattagggaaagcttcattttgagacctgagcgtgggtctgcacgttctcctgtaggatcgctactaaattttgcaccaacctaaggctacctagctatattcttgactgaagcata

SEQ ID NO: 7469 - DNA, 600 bp, Chicken  19866894192530_1
gtttgtaccgtgcacctcttggcacgcatgcggccaaggcctggggtgctggtgtgggatcagcatggcctggggtctcctgactggccttatgatcttcaggatgccactttacttcccccatacctccagctctcttcctaaagccagagagagccaacacatttgccttcccccagaccttccccttgcttgttttacatctctatgtaaacttgaagtgtatttcctagaatttgctggaagagttctgaggtgcaacatttttctgtgggccctcctctccccctgggaagcagyggagctctccctgaggacagccacccccttttcccctggccagcttttctttcctcatacccgaagaaaggactccctctgctcagtatggggcttcttgtagctgtgtttaggagaagagttttgaggactactaatgagtgtttctaccctgttttaagatagtcccacagtatttgggaccagacaaatcatattcattgtatgctaaccatttggccagaaggatcctcatcttctgacaagcttatagcttcattgcttcaccgtgataaaaatcatttgagagaggaaaccatt

SEQ ID NO: 7470 - DNA, 599 bp, Chicken  19866894192540_1
  misc_feature (1)..(189): n is any nucleotide
nnnnnnnnnnnnnnnnnnnnnnnnnnnnnnnnnnnnnnnnnnnnnnnnnnnnnnnnnnnnnnnnnnnnnnnnnnnnnnnnnnnnnnnnnnnnnnnnnnnnnnnnnnnnnnnnnnnnnnnnnnnnnnnnnnnnnnnnnnnnnnnnnnnnnnnnnnnnnnnnnnnnnnnnnnnnnnnnnnnnnnnnnnnnnccccaaatcaaagtccccccacatctccaaacacaccatcactgaccacccccacacacttacaacagagatgtccctcctcacagccatactgttctccaccatctccarttgyaggagaatggctccaagagcaaggacattgtgagtacgagtgctacgtgcactacccagkctatgagagcttgaagctgtcaaagcaaaaagaaaagctgaggctgcagttaagataagggggaagctagcctggggagagactaaggcaatggaatgtgaggaacagtgtgaaaagccgtgtgatgattaatgctggaccaatagctttgcgagcaagacacgtgatttctgtatgctaaccaatcgtgagctgtctatctccgtgtgcaccctgtatttctgtataagtatga

SEQ ID NO: 7471 - DNA, 599 bp, Chicken  19866894192540_2
  misc_feature (1)..(185): n is any nucleotide
nnnnnnnnnnnnnnnnnnnnnnnnnnnnnnnnnnnnnnnnnnnnnnnnnnnnnnnnnnnnnnnnnnnnnnnnnnnnnnnnnnnnnnnnnnnnnnnnnnnnnnnnnnnnnnnnnnnnnnnnnnnnnnnnnnnnnnnnnnnnnnnnnnnnnnnnnnnnnnnnnnnnnnnnnnnnnnnnnnnnnnnnnccccaaatcaaagtccccccacatctccaaacacaccatcactgaccacccccacacacttacaacagagatgtccctcctcacagccatactgttctccaccatctccarttgyaggagaatggctccaagagcaaggacattgtgagtacgagtgctacgtgcactacccagkctatgagagcttgaagctgtcaaagcaaaaagaaaagctgaggctgcagttaagataagggggaagctagcctggggagagactaaggcaatggaatgtgaggaacagtgtgaaaagccgtgtgatgattaatgctggaccaatagctttgcgagcaagacacgtgatttctgtatgctaaccaatcgtgagctgtctatctccgtgtgcaccctgtatttctgtataagtatgagctg

SEQ ID NO: 7472 - DNA, 599 bp, Chicken  19866894192540_3
  misc_feature (1)..(125): n is any nucleotide
nnnnnnnnnnnnnnnnnnnnnnnnnnnnnnnnnnnnnnnnnnnnnnnnnnnnnnnnnnnnnnnnnnnnnnnnnnnnnnnnnnnnnnnnnnnnnnnnnnnnnnnnnnnnnnnnnnnnnnnnnnnnnccccaaatcaaagtccccccacatctccaaacacaccatcactgaccacccccacacacttacaacagagatgtccctcctcacagccatactgttctccaccatctccarttgyaggagaatggctccaagagcaaggacattgtgagtacgagtgctacgtgcactacccagkctatgagagcttgaagctgtcaaagcaaaaagaaaagctgaggctgcagttaagataagggggaagctagcctggggagagactaaggcaatggaatgtgaggaacagtgtgaaaagccgtgtgatgattaatgctggaccaatagctttgcgagcaagacacgtgatttctgtatgctaaccaatcgtgagctgtctatctccgtgtgcaccctgtatttctgtataagtatgagctgatttgggcaataaatcaaagctccaccattacttctatgaagacatgtggttcgtttcgg

SEQ ID NO: 7473 - DNA, 600 bp, Chicken  19866894192540_4
gcctggggagagactaaggcaatggaatgtgaggaacagtgtgaaaagccgtgtgatgattaatgctggaccaatagctttgcgagcaagacacgtgatttctgtatgctaaccaatcgtgagctgtctatctccgtgtgcaccctgtatttctgtataagtatgagctgatttgggcaataaatcaaagctccaccattacttctatgaagacatgtggttcgtttcgggcaaccttcctggaagtggcgcccgaacagggacccgggaaagccgcacaagttgccaccgtggttcgaygtagaggcagcgggacactcgagagttgtcacagcggcttgatgtggaggcaatgggagcggggaaggttgctgcgagtaagtgccatttgccaagaggacggtagctcagagcatcgtgtgctgagaggacaacgactcagacccacagcggggtgagtgccgtgtgctgagcaggcagcaacttgggtaggaagtgtgcgcagcttcctcctccgccaactgctgctagcatggacagaccctgcttcttagtatccttgctaagcaaggggaggcagtgaaggataaggacttagct

SEQ ID NO: 7474 - DNA, 600 bp, Chicken  19866894192547_1
ggaaagaagacattttctctaatgagttttccttggttgttcaatatttactacaggtacttaaacagagcttttattacttaatgttccatttccttccaaaagtataacaccagtgtttgtgtaatactgcccaacagtctcataaaattgacagctactccaaacttttctcaggtgtaatcctaccagcatgccagcctaggcatatcgtgtattagggcaagactccaaagagccttctctgggaattctataatctctaccagcagcagcacaaatttacataagttgaaaacrtaaatagctttttatcctaccattttcccccatctatcctcatgcactcatccatacctccccatgtggctgagagacctgatgcctcccccatcgctttgagatggggaagcaagtcttgggactacgttcactttatataatgcttctctgtggagaagttgaacgttttggacagatctggtgccactgctgtggtaaagtgcaaggaaactaatccttgtgagggcaaaaagagccagcagcaggagggctgcagcgcacaggttgagtgctgaccctttctatgggatggatttt

SEQ ID NO: 7475 - DNA, 599 bp, Chicken  19866894192552_1
  misc_feature (1)..(95): n is any nucleotide
nnnnnnnnnnnnnnnnnnnnnnnnnnnnnnnnnnnnnnnnnnnnnnnnnnnnnnnnnnnnnnnnnnnnnnnnnnnnnnnnnnnnnnnnnnnnnnncccaccatgcctactaaccacgtccctcagtgccacatctccacggctcttgaatatctccaggggtggtgtctccaccaccttccctgggcagcctgtgccaatgcctcaccactctttctgagaagaaatgtttcctaatatccaacctgaacctcccctggcacaaggtaaggccattccctcttgtcctatcactgttaastgggagaagaggtcagcctctatctcactacaaccttctctcaggtagttgtggagaacaataacgtctcccctgagtcttctcttctccagaatcctttgggggaggtgatcctgtccctctcctctgcattggtgagacttcacgtgaagtaatccatccagatatggagactccagtacagaagagatgtggacctgttggagtatatccagagaaatgattcaagggatggaacgcctcccctgtgaggacaggctgagagagctggggctgttcagcctggagaagagaaggct

SEQ ID NO: 7476 - DNA, 600 bp, Chicken  19866894192567_1
tgttgctaataaaactgtttgaatcatacctatgagacagttttactgatattgtatcaggtccctaggttctttgtttgagatacgatgtcacaagaactataactatgcaaattctgtgatacaagatcccaccggacacgatattacatacgtaattcgcagtatgaaactgggcattaacaataattctagagttatataaacgaagctgctacgtttattgaaaagctcgctacactacaatgaaatcaaatttaaaaagcaataaaaagcaactgacatgccaatggtaaaaayggcaacattggtcttttttccccccaaacaacgtaaattcggctttgtgttcatttgacagcgctttgcagaaacttgtagcactgactctaaacaaatgcaagtgagctccctcctccagtgatattaattaatgatgtaaaataggaaacttctgagcttcactgttagaagtcaccgtgtgattttcagcaagaatctgaaatttactcctatgccattcgaggttcagattctactattctactactaacaaaagaataataatgattaatactaagaagcattgctgtaaaaaac

SEQ ID NO: 7477 - DNA, 600 bp, Chicken  19866894192569_1
tgtgtgtgcagctggactgtgtgcctcaaggctggaaactggtagtggtaggaagtacacactgcttctgtcacaggctgcaggggatagaaactgggaaaggcaacaacagagatgttatctagggatttaaggggcagcaaaatgacacaagagaggctcggagagatcaggcagacagagaactggaggaaagctatacctgaccaatggttttacaatatatttttcactggctgtttgaaagattgattaaagatgaaatacaagacatgacagagatataggccttgcaagagrggctgtaagtttgtgttcagaagatattctgacctgctcttttggacgtcagaactaaggctgactatgtgctgtcctgcacaaagatttctgatgcaggtccacccctagagagacatttgcttacactcagtagaaggcttgtttcaagcaacaccagtaccagtgccatcaacaaataaccaccccacaggagtatccggcgtccaaaacgatcaataatggagctctgagaagcaaaaaaaacacaaccatatatcactggggacatggccaaatctagctgtgagccttctaaca

SEQ ID NO: 7478 - DNA, 600 bp, Chicken  19866894192570_1
atggcaaccatgatttaaaagtttctgaaaaaaataaccaactgaagttcagagttatgtttgagctttgatgcaaagtttggtaggaaatactgttctcccataccaatgccaatatcctctgtctactgggataagagtagatgtctgggatattttgagacagtctcacaaccagagaaagcaaatatatgaaacttgtatacattttaagaatcatactttgcatgcacatgcttagataagtatggaggaagttaaatgcatcacatatggtctttttttgcttgtttgttttgwtttctagtcatgtttacctggttagtttccagagaccagccacaggttttatttctcattcagagattagagaaaatagaaaaatctgcttaattttctgttgtttatctgttcatttatttttacaattattctgtgagctttcacagtaaaagcaactaacaccaaaatatatattcccaaggctcaacacttttttatttcaaaaatgtgatagaaaatattcctgtgtcacagacatcagctcaagtattctctttgtaactggccaaactctgaggcaatgaaaatttggaaata

SEQ ID NO: 7479 - DNA, 600 bp, Chicken  19866894192570_2
tttgcttaaaactggcagtgtgctcagtgctgtgcaagatgtagatctcgtactatctagcctaaaaagttcataacatagagaagagaataaatagctcaagggatttctgggctttaaaacaaagaacaaaatcgaactaacattctccgtggcaaaagaattcatttaaattcacaatttgtcttttaataacagttgccactctgtacaacactcccactccttctccacacacatacagtagtgagaaaattcaccatagctcatcccctcatgaaatcagatggttttcttatwgaggaggaaaaaacaggctacagaacctctctattgatattgcctttattacaaaagcagtaaacagtgccagggtagaagggatagtgtggaagaaagagtgccaaataaaaactccagctgtccaaagagacaattttaagcaactatagtaggagcacacccggaagtgtgaaaatgtatttaaacagtgtttgtcatgaaatctcacatactatagaggcttcagatttcaaacaaattgcatctctataatcgtatgagcatcaatattcaaattacatttactgctcttttaca

SEQ ID NO: 7480 - DNA, 600 bp, Chicken  19866894192582_1
tcaagtggtaataaaaatcttgatactttggtcttagtaaatggcaattcacaaacattaaaaatggagacttgactggaaatgttaaaatattttacatataatatatataattatgctttgaactgttttctctaccagaagtttgcaactccttcaatcatttttctctcaacaagaaattaactttcagtgatggaagataagacaattatatacattttcagaactgttaggaccatgcaactttataaagaaatacaaactgttccttgccgtacgttttaaattacatttttytttccatagcccaaaggaaatattatttttcagaagtcagctttcagccttttttcctcaattctttcatctctctatttatacttcaacagcttcaaatctactctgagaggaacagcaggggagaaagaaatacacagtcacttcttcaatagcccataaatgagcaaattgaatttaataacagaaaataaactttttaaatgcatccatataatcacttttatttttaaaactccacatttttctaccttaaaaattttcagtaaatattgccaaataacaaagaagtgactggtc

SEQ ID NO: 7481 - DNA, 600 bp, Chicken  19866894192586_1
gcccgagcagaaagcagcaccgttcccatcctgaatggatctgctcctgctctgctgagaggagcccttccggcagcactctctcacaccccttcctccccaggcgcacggctgtgtctctcctcacctgagcaggtcccgaggcgctgcctccccatgcacctctctgccctcatccgtgtgggtaccaccgcaacctgaggattgctcaggagtccccttatgcctacacgtaaggctttgcagaatcaaacccgtgagtttctctgccctttcttattataaaaccaactttcagckctaagccaaccttcctcagaattgaacggtaagctgtgattccctctgaaagatgagcccttcagggaacttgctgcgagaagcagtaatatccctgtcttcctgctgtcagacaagtttgtgctgcagcgaacacttgcataaagctacttttcaagagagtgctttgtcaatctgctagggtgctatctggaaatagaattcctgtgtgatacttcgtgtttgttcttccaaattgctaaggctgtgagaaagaatcagtttcagcatgtacatttgtttgcccctcttctttttcat

SEQ ID NO: 7482 - DNA, 600 bp, Chicken  19866894192591_1
gagaggactactgccacacctgttaccaccagcacctccatgacctccatctccagcgaggccagccccaccagcagcccagaagtcccactgacaacgacactgactgcccccagcagtgctcccagcactaggctgtcatctgctgccccatccacagtcacctcctctcctccaacctccataatgaagtccacccctacaacactaaggcccaagccctcttccccagtgactagtgttcaaactgagttcttcacacctgcttcctccacactctccacagttaagaccagtccwctgctgtcattaacatcttccaccttctcaactatgtcctccacagcaatgagaacatcgcaacccagtaagtcttcctcctgcccttctcattcctctgcctgctcttcccagtttttgctcttcatttctggtctacagtgtacaccgatttattgtcactctcctttgcccactgatggtggcatttttgcttgtggtatttgtggtgttctgcttgtttggatggagtgagcagctgagtgaaggcttagctgctaatgaggattcaccattcaccacaggctgcccttccctaag

SEQ ID NO: 7483 - DNA, 498 bp, Chicken  19866894192591_2
caacccagtaagtcttcctcctgcccttctcattcctctgcctgctcttcccagtttttgctcttcatttctggtctacagtgtacaccgatttattgtcactctcctttgcccactgatggtggcatttttgcttgtggtatttgtggtgttctgcttgtttggatggagtgagcagctgagtgaaggcttagctgctaatgaggattcaccattcaccacaggctgcccttccctaaggccctctcagcattctgtcatcagggatttggggaattcacttggggcactggtttctcmcctggagcgtgccatactcagcttgatgcatgtaggcagtgccctctgcctatgtcttggctgagacaggcacatgtggagaggctcctcttccagtgagatacagagggtagtgaggtgccagagggcacccttaaagtgctgtccttgctgcaacgttctggacaggaggaggatggggagggaaagggcagaagc

SEQ ID NO: 7484 - DNA, 599 bp, Chicken  19866894192596_1
  misc_feature (1)..(1): n is any nucleotide
ntgaaggagcacaccaattcagtgagatgacatgccataaggtttcatctccagccccaatggtcaaaactttgtcttccattcccatctccaaaaggccattatgctgggggcgggcaagtggatgggaagggacattgcctggatatagagaacccagactgaccaaagggatgctgtgtggcatctgctcagcagggaaagctcagggaaaagagaaaaaaaaagggagacattcgtggttatggcctggaaggagtgaaagaaggtagttggcataacgaagttgaatcagcaacrgactagcacactgaagcatgcatttctctgtttgggccataggattttattacataccttttgtgttcttggcagcttttaggtcagtgaaaagtccctttgataaatttcattaaagcatcrccacaggaatatgaaaggttatgttctgccattagaatgacagatgtctcttctccctccttaacctttgaatcaatctgtgcagcacaaaataagcatgtcagctttgtgcctgtaagcacttctcatctagctgctgttttgtagctagtgaaagttgtagcagctaccacatc

SEQ ID NO: 7485 - DNA, 600 bp, Chicken  19866894192596_2
gatgggaagggacattgcctggatatagagaacccagactgaccaaagggatgctgtgtggcatctgctcagcagggaaagctcagggaaaagagaaaaaaaaagggagacattcgtggttatggcctggaaggagtgaaagaaggtagttggcataacgaagttgaatcagcaacrgactagcacactgaagcatgcatttctctgtttgggccataggattttattacataccttttgtgttcttggcagcttttaggtcagtgaaaagtccctttgataaatttcattaaagcatcrccacaggaatatgaaaggttatgttctgccattagaatgacagatgtctcttctccctccttaacctttgaatcaatctgtgcagcacaaaataagcatgtcagctttgtgcctgtaagcacttctcatctagctgctgttttgtagctagtgaaagttgtagcagctaccacatctaatttggaaaccaactccaaaagctaatctgtgccttctctgcaataaaatatttctaaccgattgaactcattaaaatgtgtttcttaaaagaaagatatttaagtttccttcaattaattc

SEQ ID NO: 7486 - DNA, 599 bp, Chicken  19866894192597_1
  misc_feature (1)..(10): n is any nucleotide
nnnnnnnnnntctgtgcgctccaaactgctttactcctgaagccctttcttcttttcacccttttctgcagggacaggagctgctcagcacacctggacatacctgctgtctgtatcgcactcttcagctcgtatacatcaagaaatccagaacaatttctgtcttccctcctgaagagatcctgaaaaccagcagaaaggcagatttcaggccttcatcaccgctctccaaacgtattgctacatctaattagggaggatgctttccttccttaataaactcactgcaaggaagccaasagataagacagggtgaccacgacaagacagaccatttccagaaggctcagtcaatatattgtaacataacaaaattccactttggggttgaagcccttttgctcactttcctggtttgtgtgcacaggcaacaataggaatactygtacttccactgacaaaaacacattgtctgtaatacattaaatctgccaggagtccctgtatccaagaatgtcatctttcccaacaaagctgaggtgctgtcagtgggaagggcattgctactcagcagggaactggcaccccattgtcctagc

SEQ ID NO: 7487 - DNA, 600 bp, Chicken  19866894192597_2
atccagaacaatttctgtcttccctcctgaagagatcctgaaaaccagcagaaaggcagatttcaggccttcatcaccgctctccaaacgtattgctacatctaattagggaggatgctttccttccttaataaactcactgcaaggaagccaasagataagacagggtgaccacgacaagacagaccatttccagaaggctcagtcaatatattgtaacataacaaaattccactttggggttgaagcccttttgctcactttcctggtttgtgtgcacaggcaacaataggaatactygtacttccactgacaaaaacacattgtctgtaatacattaaatctgccaggagtccctgtatccaagaatgtcatctttcccaacaaagctgaggtgctgtcagtgggaagggcattgctactcagcagggaactggcaccccattgtcctagctggccacagactgtcttgagagggtcaaaacaaagcacagcccacccacctcggaggcttcaaggaatcttccccttctgcattaagactggaggaagaaggacctgactcagggaagcagcctaaacttaggtgaggccctaaat

SEQ ID NO: 7488 - DNA, 600 bp, Chicken  19866894192600_1
acttatcacttgtttcaatactcctctgtgagacagtaatcgttgcaaggagatctttctgcttcatttcctcctctttgccagagcaggtgtcaaacatggcaaagagttaggaatctgctgcccagtgtatgggagacaacgtcagatttgcaacaggtctggcacgggtcagtggcacagtgaaggcacagaatgtacctattatagtgagatcagggtgtgggatgggacacgacaccacggacaggaaagaaagaaaacaaacaagcaaaaaataatgcttgtaataaaagaacrcatggagaaaatagttacctggtggcctgggagaaaggcagtgaggttttacaagttttctcttcactcctagatcaaattccctttgaacagcagaactcaatacatgacgctaaaggaaaaaaacagtaactcagttctttgctatgctgagcagcagtaattttggaattcacactcagaagctgtgttcagaaaagcttctgtctgtgcccatctgtgccctccctggcactaaggtcagtcctgagagcactggagacagacagaagttgtacagcttttcaattagcgtgtcac

SEQ ID NO: 7489 - DNA, 600 bp, Chicken  19866894192603_1
gtctaggaacgtcttctgttgtgggttctctctttcaatattgtgtctgagagcaggcaagacgtgattttctaacgtaaaattataacacagacccctctcagacctcttcatccatcacagcgagatgaaaaaggagagacacattttttcccctttgccagccacctctggatacagagaacaactgagctgctgttatttttctttgtcgctttttcatcccagtgattacaatgcagctcacttttgacagctgccactgaatcagccccactgtgtgtgagctgggtcagcccrgggatggactgactctgcaagaaagtggttgtccatctgcacctcctttggtcggctccttcrctgagagacagctgcctaggcaggatatggctcaggcataggggcacawttcaacatgccttttgacgtctctgttccactgtgagtcctgtgagaggggtgggcactgcctgaacagggggcacactgcagttggggtaatggcagtgaggcatcccaggcccttctgctgaacatctgagggtgcctggcatggtggccacacggtggggttaggagagctgccgcagctctgcc

SEQ ID NO: 7490 - DNA, 546 bp, Chicken  19866894192603_2
gtgattttctaacgtaaaattataacacagacccctctcagacctcttcatccatcacagcgagatgaaaaaggagagacacattttttcccctttgccagccacctctggatacagagaacaactgagctgctgttatttttctttgtcgctttttcatcccagtgattacaatgcagctcacttttgacagctgccactgaatcagccccactgtgtgtgagctgggtcagcccrgggatggactgactctgcaagaaagtggttgtccatctgcacctcctttggtcggctccttcrctgagagacagctgcctaggcaggatatggctcaggcataggggcacawttcaacatgccttttgacgtctctgttccactgtgagtcctgtgagaggggtgggcactgcctgaacagggggcacactgcagttggggtaatggcagtgaggcatcccaggcccttctgctgaacatctgagggtgcctggcatggtggccacacggtggggttaggagagctgccgcagctctgccaccaggaag

SEQ ID NO: 7491 - DNA, 497 bp, Chicken  19866894192603_3
atccatcacagcgagatgaaaaaggagagacacattttttcccctttgccagccacctctggatacagagaacaactgagctgctgttatttttctttgtcgctttttcatcccagtgattacaatgcagctcacttttgacagctgccactgaatcagccccactgtgtgtgagctgggtcagcccrgggatggactgactctgcaagaaagtggttgtccatctgcacctcctttggtcggctccttcrctgagagacagctgcctaggcaggatatggctcaggcataggggcacawttcaacatgccttttgacgtctctgttccactgtgagtcctgtgagaggggtgggcactgcctgaacagggggcacactgcagttggggtaatggcagtgaggcatcccaggcccttctgctgaacatctgagggtgcctggcatggtggccacacggtggggttaggagagctgccgcagctctgccaccaggaag

SEQ ID NO: 7492 - DNA, 599 bp, Chicken  19866894192604_1
  misc_feature (1)..(55): n is any nucleotide
nnnnnnnnnnnnnnnnnnnnnnnnnnnnnnnnnnnnnnnnnnnnnnnnnnnnnnncctaccgcatccggctgtaccgcgacgaggactacgatgcggtgcgctccctgtttgcccgtggcatcctcgagcacgccccggccatctaccggcatatgctgcgctcaacgcgagtgcagctggggctgctggccctgttcacggccgtgcgtgccgtagctggcagctggctgctggcactggcagccgtggcgctggtgctggcggccacctggcccgtgatgcgctccttcagcacgtcstatgttcaggaggcactgatcactgacctctgcgacatcgacagctgctacatgcgggcgcccgactcctgcttctgggtggtggaggccggcggggcggtggtgggtatggtggctgtggccccgccacaggacccggcgcagcgcggtgaggccctggagctgaaacggatgtcggtcagcaaggatcaccgtggccgaggcatctccaaggcgctgtgcggggaggtgctgcgcttcgcccaggcccggggctacagagccgtgatgctgtacacctccatagtgcaggtggtggc

SEQ ID NO: 7493 - DNA, 599 bp, Chicken  19866894192612_1
  misc_feature (1)..(52): n is any nucleotide
nnnnnnnnnnnnnnnnnnnnnnnnnnnnnnnnnnnnnnnnnnnnnnnnnnnnccatgcacagccgatctgtgtatgaaaatagcagtgtgtctgggtgcagctgtgagcgggcatcgcatccttttgtttgctgtgggctggagaagtgccatgcagtgtttgattgccctggaataccaggctgcacttcataaaacctcaggatcctttttcctttctgggtaggaggctcatgctgttatgccttatattcatgtgtgagagattattgactgagaggcagggcacatcctgcaatmcattttaataacagccttaagctgctattagattgttcttttacaacatgtattaaagtgatcatgtgtacaaaattagtgtacagcctctgtttgacagaacatgctttctaatcttggttcatcctctactaatagtggacttcacattagtttagatgtgcttcatttttctatcctactaagatcctgccaggaaaccatttatgttccttactaagtttaacttgctttattaagtcactgagaatacttacaaagcttgacctttattatgagaatgtctctaataatgagaa

SEQ ID NO: 7494 - DNA, 600 bp, Chicken  19866894192614_1
tccatagaagctggctggtccctaggagcagggaggttggagtggccagcatccacagacaggggacgttgacccatatccacatggattgcacagcagcagcagctgcaagcatcccactgggagatgggaccagcagctggtgcttactgatgcttgaggtgctgggctgcagtgaagtctgagcacaagtccctatccttttgtcccctttgtagggtgagggctcctggctctccttgctttccccagatgcccctcgctcccagcccagctcatatggggccatggggcaggatkccagggcagctccgtgtgcttgggaaaggtggtttaggcacctgctgtcaaaaagcatccccaacagtagcccaggaagggctcccagactgctcctgagctgcttctgacagtggccccagggcactgctgctgatctgctctgccgacgctctgcctttttcttttaatttctgcctttcttcttgccacttttttttttttctccaacagcttttcttgtttctgtcttctttctctctctcttccttcttcctgtccatgtgtcttccccccggcccgtccctctccttccccacc

SEQ ID NO: 7495 - DNA, 600 bp, Chicken  19866894192618_1
taagcttccagctgtagcctgaggttttagcacaattggattttactccatttccatgttttccacagctttgtgaacatatgtgtaaatgaccattctttatcctatgaaagagtcctgttaactatcttttgcagcattatttggtggagtattgccttagtttcccataatccatggattcactacaattatcactagggtttttttgtttgtttgttttctttggaatagctgattttgtttgttattttttggttttgaatacaaagtttaaattcgtattactgtaatatacaygtgaagataatggttatcattaaagtagactttgggtgttgtttttacttttcctttgttttctttttttcttcaagagaaaaaagggggaggagatggagggtggcatgcctggcttttgtagtactgcaaaatgaaatattgtgactgaggttgtattcttagctggttaattcacttcactaatattagaatcttcatgtaactatactgctagttaaggaactgattggagtttgctttgaaatctgtgatcagataattttcatacgttacggtcaatcactttacaagactatt

SEQ ID NO: 7496 - DNA, 599 bp, Chicken  19866894192623_1
  misc_feature (1)..(95): n is any nucleotide
nnnnnnnnnnnnnnnnnnnnnnnnnnnnnnnnnnnnnnnnnnnnnnnnnnnnnnnnnnnnnnnnnnnnnnnnnnnnnnnnnnnnnnnnnnnnnnncaacctggaggtgctgatggctctcgtctcaagccactgctccatccctcctgtacagacaggggacaccagtgcccacaggcactatgctcatgatgatggggatgctgcatggccaagggcacaggtgcacatcccccttggccacatctttctgctccatcccctgcggcatgcagactgtggcttggtcaccacagggcawgaaggcacacgatgggccaccagggcatgggcaaccagcagcatggaccgctttgctcaaagaaattggttctcagtgtaaaacatcactctgagtggctyagtgggaagggacwggcagacagacttgcccacactctgcccacacgtggggacaggactgatggtggcacacagcaccgggacagagcatccctgagcagcagtgagccacagcagaacagggatcgaaaggagggaactgcagccgagacaaataagatgctccagaagccagcmaaacaaatagcatccattgtt

SEQ ID NO: 7497 - DNA, 600 bp, Chicken  19866894192623_2
ggaggtgctgatggctctcgtctcaagccactgctccatccctcctgtacagacaggggacaccagtgcccacaggcactatgctcatgatgatggggatgctgcatggccaagggcacaggtgcacatcccccttggccacatctttctgctccatcccctgcggcatgcagactgtggcttggtcaccacagggcawgaaggcacacgatgggccaccagggcatgggcaaccagcagcatggaccgctttgctcaaagaaattggttctcagtgtaaaacatcactctgagtggctyagtgggaagggacwggcagacagacttgcccacactctgcccacacgtggggacaggactgatggtggcacacagcaccgggacagagcatccctgagcagcagtgagccacagcagaacagggatcgaaaggagggaactgcagccgagacaaataagatgctccagaagccagcmaaacaaatagcatccattgtttgtgcagcaggctggaataataacatttgctcacccagccttgcttgtcaccctctcagcgctgtgcctccacagagactggagtgaggcacagaggcaggc

SEQ ID NO: 7498 - DNA, 600 bp, Chicken  19866894192623_3
ctctcgtctcaagccactgctccatccctcctgtacagacaggggacaccagtgcccacaggcactatgctcatgatgatggggatgctgcatggccaagggcacaggtgcacatcccccttggccacatctttctgctccatcccctgcggcatgcagactgtggcttggtcaccacagggcawgaaggcacacgatgggccaccagggcatgggcaaccagcagcatggaccgctttgctcaaagaaattggttctcagtgtaaaacatcactctgagtggctyagtgggaagggacwggcagacagacttgcccacactctgcccacacgtggggacaggactgatggtggcacacagcaccgggacagagcatccctgagcagcagtgagccacagcagaacagggatcgaaaggagggaactgcagccgagacaaataagatgctccagaagccagcmaaacaaatagcatccattgtttgtgcagcaggctggaataataacatttgctcacccagccttgcttgtcaccctctcagcgctgtgcctccacagagactggagtgaggcacagaggcaggctgctattgtcactg

SEQ ID NO: 7499 - DNA, 548 bp, Chicken  19866894192623_4
tggcttggtcaccacagggcawgaaggcacacgatgggccaccagggcatgggcaaccagcagcatggaccgctttgctcaaagaaattggttctcagtgtaaaacatcactctgagtggctyagtgggaagggacwggcagacagacttgcccacactctgcccacacgtggggacaggactgatggtggcacacagcaccgggacagagcatccctgagcagcagtgagccacagcagaacagggatcgaaaggagggaactgcagccgagacaaataagatgctccagaagccagcmaaacaaatagcatccattgtttgtgcagcaggctggaataataacatttgctcacccagccttgcttgtcaccctctcagcgctgtgcctccacagagactggagtgaggcacagaggcaggctgctattgtcactggagtgggctggagcctattcataaaactcggtaaattggggctatttttgggatttactaggcatttgcaaacaactccatttggtatttgaaaacatgagccgggtgcca

SEQ ID NO: 7500 - DNA, 599 bp, Chicken  19866894192629_1
  misc_feature (1)..(110): n is any nucleotide
nnnnnnnnnnnnnnnnnnnnnnnnnnnnnnnnnnnnnnnnnnnnnnnnnnnnnnnnnnnnnnnnnnnnnnnnnnnnnnnnnnnnnnnnnnnnnnnnnnnnnnnnnnnnnnctttgtccccttggacacaacaagcgcagcactaccagggtgagaggaggatctccaaggccaaccctataataccactcaggattctccctctaccacagctggccatagaaactcctcatttgaattcatattaaggaaaaatatccgaaacttgatatttgcccccaccatcctcctcaccatcccrcactcttcccctgccctcccacctgtggagttctgcagcagcagccgrctcctgtacttgtggtgctcctccccgggcctcagcaggtacagctctggggagagcctgagtggagcaagtgaatgtttgatgtagtgrtgtgtgaggaaaaacagaatttgaacgatgagaaagatcaggaaaagcaacagcctgaaagaaagaaaaggtctggtcttattaaagctcagcccaggatatgtgcacgttagttaaagcaacatcaccccaacacgcagctactcaacggtactggatgg

SEQ ID NO: 7501 - DNA, 599 bp, Chicken  19866894192629_2
  misc_feature (1)..(62): n is any nucleotide
nnnnnnnnnnnnnnnnnnnnnnnnnnnnnnnnnnnnnnnnnnnnnnnnnnnnnnnnnnnnnnctttgtccccttggacacaacaagcgcagcactaccagggtgagaggaggatctccaaggccaaccctataataccactcaggattctccctctaccacagctggccatagaaactcctcatttgaattcatattaaggaaaaatatccgaaacttgatatttgcccccaccatcctcctcaccatcccrcactcttcccctgccctcccacctgtggagttctgcagcagcagccgrctcctgtacttgtggtgctcctccccgggcctcagcaggtacagctctggggagagcctgagtggagcaagtgaatgtttgatgtagtgrtgtgtgaggaaaaacagaatttgaacgatgagaaagatcaggaaaagcaacagcctgaaagaaagaaaaggtctggtcttattaaagctcagcccaggatatgtgcacgttagttaaagcaacatcaccccaacacgcagctactcaacggtactggatggcctcacatcttttacagtcatatctgaacacgaacaaattgcatcctg

SEQ ID NO: 7502 - DNA, 600 bp, Chicken  19866894192629_3
gcactaccagggtgagaggaggatctccaaggccaaccctataataccactcaggattctccctctaccacagctggccatagaaactcctcatttgaattcatattaaggaaaaatatccgaaacttgatatttgcccccaccatcctcctcaccatcccrcactcttcccctgccctcccacctgtggagttctgcagcagcagccgrctcctgtacttgtggtgctcctccccgggcctcagcaggtacagctctggggagagcctgagtggagcaagtgaatgtttgatgtagtgrtgtgtgaggaaaaacagaatttgaacgatgagaaagatcaggaaaagcaacagcctgaaagaaagaaaaggtctggtcttattaaagctcagcccaggatatgtgcacgttagttaaagcaacatcaccccaacacgcagctactcaacggtactggatggcctcacatcttttacagtcatatctgaacacgaacaaattgcatcctgccatttctctggcatgattcaaacaggttttggggattctgtgtacagcccacgaggccccgatactcacatcactctgacacatttgctc

SEQ ID NO: 7503 - DNA, 600 bp, Chicken  19866894192632_1
aagcaacccattcctggagctttagtttgtttggaaagggactttactcaatgtgacatcctatatcctcccttcatctgagcagtctaccacatttgcagtctttttttatttcattactgccgcataatgaagcctctactacatatagtaatgtaaatgacacctcttttgcagtagcaggaactcacacaaggaacatcttttcaactgcaattaaatggaatccagtcagactgtgttgagatgtaaatagattactaagctaaacttttttgataaagaactctacaatcaacrccatctcaaaaaaataaaaataaaaataaaaaaaaaatcagaagaactcaacaggaaatttttacaagtacaaaagcattttttttctttcttgaagaaaactaaaaagtcactctttttaacttctgggggtttttaattccacagatttaattttttttagtctttctaatcctgctattggaagagcacgcactgctatacatcaactatgtgctatatgtgctatgtgctacacatagaatcaatggaatgagattcattaaagtatatagttaggtataatacrgtattttattt

SEQ ID NO: 7504 - DNA, 600 bp, Chicken  19866894192632_2
tacaatcaacrccatctcaaaaaaataaaaataaaaataaaaaaaaaatcagaagaactcaacaggaaatttttacaagtacaaaagcattttttttctttcttgaagaaaactaaaaagtcactctttttaacttctgggggtttttaattccacagatttaattttttttagtctttctaatcctgctattggaagagcacgcactgctatacatcaactatgtgctatatgtgctatgtgctacacatagaatcaatggaatgagattcattaaagtatatagttaggtataatacrgtattttatttccagatgttttttgctctgttttcataaaattagctgatgaaagttatcacaacatttgttaattgcaagaaaatgccaaaagtggaggaaaaggtttgtgagattcctcctctcacagttggatgcagctcttccttgaaattctataataacaagagtctgtagctagattcatagtgtgccatttacactgaaatttgatctaaagcatctgttttttattgctgataaaaagtcacaggtcacagtcagcacaatgaaaataaagtaattgatttggcccatttt

SEQ ID NO: 7505 - DNA, 600 bp, Chicken  19866894201496_1
caagtgccagctctgtgcaccagctgggctgacagattcaccagccaagtcagcccagtgcagctctcctctggatagtgctgcaccgaggtcacttggggtctgggggacatttggtgattttatgggttgcggagggagagctaaatgaacgtgaaacgggtaatggataggaggggggtgagcagtgaggctcctctgtctggcacagagcagtttgaaacccatcaaaagcagcatctgcagttgctaagagattgagttgtgctacagcatcctgatgaatgagggagcggcctyctgggccaggagggaagacatgggtctgtaaaggggygggtgctggagctagtcactgggtgggcaagctaagggattacaggtgggggcagtgttttctgcatgcaggacctcatctaattcccagggagggtgggaggggaacttgcactgatgtgaaggaagcactgggggcagctgctttggaccaagtgccacctaaygaggccagcctggggtgtgctcctctcctgacccatctcctattctactgaggtcttctccctttgccccgtgttgccccgctgtgtgttttctgat

SEQ ID NO: 7506 - DNA, 600 bp, Chicken  19866894201496_2
tcaccagccaagtcagcccagtgcagctctcctctggatagtgctgcaccgaggtcacttggggtctgggggacatttggtgattttatgggttgcggagggagagctaaatgaacgtgaaacgggtaatggataggaggggggtgagcagtgaggctcctctgtctggcacagagcagtttgaaacccatcaaaagcagcatctgcagttgctaagagattgagttgtgctacagcatcctgatgaatgagggagcggcctyctgggccaggagggaagacatgggtctgtaaaggggygggtgctggagctagtcactgggtgggcaagctaagggattacaggtgggggcagtgttttctgcatgcaggacctcatctaattcccagggagggtgggaggggaacttgcactgatgtgaaggaagcactgggggcagctgctttggaccaagtgccacctaaygaggccagcctggggtgtgctcctctcctgacccatctcctattctactgaggtcttctccctttgccccgtgttgccccgctgtgtgttttctgatctttgtttctgctgccatcatcccttccctgcctata

SEQ ID NO: 7507 - DNA, 600 bp, Chicken  19866894201496_3
tggcacagagcagtttgaaacccatcaaaagcagcatctgcagttgctaagagattgagttgtgctacagcatcctgatgaatgagggagcggcctyctgggccaggagggaagacatgggtctgtaaaggggygggtgctggagctagtcactgggtgggcaagctaagggattacaggtgggggcagtgttttctgcatgcaggacctcatctaattcccagggagggtgggaggggaacttgcactgatgtgaaggaagcactgggggcagctgctttggaccaagtgccacctaaygaggccagcctggggtgtgctcctctcctgacccatctcctattctactgaggtcttctccctttgccccgtgttgccccgctgtgtgttttctgatctttgtttctgctgccatcatcccttccctgcctatatcccatagctgaagtctggtcccccagcccagaatacagcagccaagttgaggggctgtgggttgctgatagtaccttggtgtgttccctttgagtggccagctgggttcttgcagaagtttgctgttagatgaaccatgggatactgtctggggcagagtggtga

SEQ ID NO: 7508 - DNA, 600 bp, Chicken  19866894201516_1
gagcacctgatttgtctgtaggcatccctgttcattgcagggaggttggatcagatggcctttaagaatgccttcaaactcaaacaattctatgattgtgatttggcagagcctggagcacaggagaggcaccaatcagcatggaggcaaactgcctgtccacagctcactgcttaggtccatgtaggtgggtgacaagatcacttttgcttccagtaaggcacaaatgggactgtaaaaatactcctttcttaatcttgagcatttctgcagccctgtggggtctataatgcacaacasaatggtggcctcatttctgcaggaataagagaagaataacaggacattatctggctcggacaatgaggtttttgtccggtgatgggctctgtaatgatcctccagatcttttctcaccatcagcagggaacacacagtgctgtgtttactcaaaataaacttgttcttctgcaaaaaaaaattggtcattggagaaaaatggaaccgtggagtgtggtgactccctgccctccatgctacctaccccacatcactgctatacatgttcaaggtaaaaccctcataggtttccagaagaag

SEQ ID NO: 7509 - DNA, 600 bp, Chicken  19866894201519_1
ggaatgttaaagaagaaacaagttctgtctcagatggacaacaatgaagtgtaaggaactgaagttaagagtatacaagctaaaggagacgctttcaattatcctaaatttgcaagtttacctttttaaaaattcagagctcaaatcttgaaagacaccaattctactcctccccctcacaaacaagttattctcttaatatgagatactaatacaaactgaaattaaattttaaaacaaaacaacccaaaagatggaacatcctttttcttattgccataatttccacagagcaattcmaataatctctgaagaagaacaaggtgcaagagatgctctggtatgaaaaacaaagtgccaattcttttcatttatacaggctacattcagcttcccataacaacatttcttgttaagagttcaaattcataggaaagtcagtcagttgaacttaaacttgagaaaaaaaaattatctgctatccaaagaattcagtcacaagaaccctacttaacaagtactgacattggtgattttatcataaatgtactctcaaattcagctaaataggttacagaacacttcaaacatcaaaatttt

SEQ ID NO: 7510 - DNA, 600 bp, Chicken  19866894201529_1
tgatctgcaatgtgtggggtttccctgatgatggaaagcattaatagaaggtgttagaaaatttcctgaagataggttgttgttcttatccttgtccataaaacacaaatcctaagcaaaacatggagaaggatttggggttgattgtaggaggaaaacctagctcccattttgtgaggagtttagtttaaaatatgaaggatttaaatgccaaagaaggggaagaattgctttaaaaaaggtctgtagctaaggggacttgtaaatatcagagcagttcgatttctggttgctttctcytccccctggagtgttctaagacctaatgcccttaagataaagtctgacgaggacacagtgtagtgctgctgcctgtaggagtgtgcagctggaaccgatgactcaaaaggcttttccccagtcctgtgttattatgaatgtgctggtgtgtgcctggcaccaagtggttagacaagtcctccgtacctgtttgctattgaatatacatgcattctaaaaatgaacatgaggacagcatgcaagtcttcaagccaaacctttatctgtctgtgaacacctaatggcattacaattcagtgt

SEQ ID NO: 7511 - DNA, 600 bp, Chicken  19866894201534_1
tttttattgctcttgcatcctcatattatgcttaatgctatgaactgtacaggagttaaaggtttaaagaatcctggtgctttggtgttttttttgttctctgcaaattagttttgtttctggttactgttacattacgtggtcagtacagtggctctgtgggagccagaaaggaattgtgaagcaacagaggtgtagtgatgttgctctgtgtcaaacttcacgagttctgctatttctccactacttgtgctcattcaggtgcttctgcctcctattaaaaagcagtgcctacacttrygcttgttttgtgttttcttaatagtatcraaactccattttgtgcaaattccrttgtagttttatttatcatttaattgtaacttatgggaacaagttacgcaaacatggaatccatcaaggaagtccagtggcagcakccattgttcatttgaagggaagctgatatkaggggtaatgagttagcttcatcattgtcttgcgtaattactctctatcagatcagagtctaacaaaacctacaactacccaggcttgcaaataggtcagttattgttttaaaagcagctaggttttgat

SEQ ID NO: 7512 - DNA, 600 bp, Chicken  19866894201534_2
ttttattgctcttgcatcctcatattatgcttaatgctatgaactgtacaggagttaaaggtttaaagaatcctggtgctttggtgttttttttgttctctgcaaattagttttgtttctggttactgttacattacgtggtcagtacagtggctctgtgggagccagaaaggaattgtgaagcaacagaggtgtagtgatgttgctctgtgtcaaacttcacgagttctgctatttctccactacttgtgctcattcaggtgcttctgcctcctattaaaaagcagtgcctacacttrygcttgttttgtgttttcttaatagtatcraaactccattttgtgcaaattccrttgtagttttatttatcatttaattgtaacttatgggaacaagttacgcaaacatggaatccatcaaggaagtccagtggcagcakccattgttcatttgaagggaagctgatatkaggggtaatgagttagcttcatcattgtcttgcgtaattactctctatcagatcagagtctaacaaaacctacaactacccaggcttgcaaataggtcagttattgttttaaaagcagctaggttttgata

SEQ ID NO: 7513 - DNA, 600 bp, Chicken  19866894201534_3
cttaatgctatgaactgtacaggagttaaaggtttaaagaatcctggtgctttggtgttttttttgttctctgcaaattagttttgtttctggttactgttacattacgtggtcagtacagtggctctgtgggagccagaaaggaattgtgaagcaacagaggtgtagtgatgttgctctgtgtcaaacttcacgagttctgctatttctccactacttgtgctcattcaggtgcttctgcctcctattaaaaagcagtgcctacacttrygcttgttttgtgttttcttaatagtatcraaactccattttgtgcaaattccrttgtagttttatttatcatttaattgtaacttatgggaacaagttacgcaaacatggaatccatcaaggaagtccagtggcagcakccattgttcatttgaagggaagctgatatkaggggtaatgagttagcttcatcattgtcttgcgtaattactctctatcagatcagagtctaacaaaacctacaactacccaggcttgcaaataggtcagttattgttttaaaagcagctaggttttgatagcattgaagtacattaagatctgctgaag

SEQ ID NO: 7514 - DNA, 600 bp, Chicken  19866894201534_4
gttaaaggtttaaagaatcctggtgctttggtgttttttttgttctctgcaaattagttttgtttctggttactgttacattacgtggtcagtacagtggctctgtgggagccagaaaggaattgtgaagcaacagaggtgtagtgatgttgctctgtgtcaaacttcacgagttctgctatttctccactacttgtgctcattcaggtgcttctgcctcctattaaaaagcagtgcctacacttrygcttgttttgtgttttcttaatagtatcraaactccattttgtgcaaattccrttgtagttttatttatcatttaattgtaacttatgggaacaagttacgcaaacatggaatccatcaaggaagtccagtggcagcakccattgttcatttgaagggaagctgatatkaggggtaatgagttagcttcatcattgtcttgcgtaattactctctatcagatcagagtctaacaaaacctacaactacccaggcttgcaaataggtcagttattgttttaaaagcagctaggttttgatagcattgaagtacattaagatctgctgaagatctacagaagtcttcccaattct

SEQ ID NO: 7515 - DNA, 600 bp, Chicken  19866894201534_5
ggtcagtacagtggctctgtgggagccagaaaggaattgtgaagcaacagaggtgtagtgatgttgctctgtgtcaaacttcacgagttctgctatttctccactacttgtgctcattcaggtgcttctgcctcctattaaaaagcagtgcctacacttrygcttgttttgtgttttcttaatagtatcraaactccattttgtgcaaattccrttgtagttttatttatcatttaattgtaacttatgggaacaagttacgcaaacatggaatccatcaaggaagtccagtggcagcakccattgttcatttgaagggaagctgatatkaggggtaatgagttagcttcatcattgtcttgcgtaattactctctatcagatcagagtctaacaaaacctacaactacccaggcttgcaaataggtcagttattgttttaaaagcagctaggttttgatagcattgaagtacattaagatctgctgaagatctacagaagtcttcccaattctaccaacttcaagktttttttgtcatttatgcctgtggaagccaggcctggagatgaagggtgcagaatgtctgacttggtttccct

SEQ ID NO: 7516 - DNA, 600 bp, Chicken  19866894201534_6
aaggaattgtgaagcaacagaggtgtagtgatgttgctctgtgtcaaacttcacgagttctgctatttctccactacttgtgctcattcaggtgcttctgcctcctattaaaaagcagtgcctacacttrygcttgttttgtgttttcttaatagtatcraaactccattttgtgcaaattccrttgtagttttatttatcatttaattgtaacttatgggaacaagttacgcaaacatggaatccatcaaggaagtccagtggcagcakccattgttcatttgaagggaagctgatatkaggggtaatgagttagcttcatcattgtcttgcgtaattactctctatcagatcagagtctaacaaaacctacaactacccaggcttgcaaataggtcagttattgttttaaaagcagctaggttttgatagcattgaagtacattaagatctgctgaagatctacagaagtcttcccaattctaccaacttcaagktttttttgtcatttatgcctgtggaagccaggcctggagatgaagggtgcagaatgtctgacttggtttccctccctctaacttcagtatctgttcacctagc

SEQ ID NO: 7517 - DNA, 600 bp, Chicken  19866894201534_7
tatcatttaattgtaacttatgggaacaagttacgcaaacatggaatccatcaaggaagtccagtggcagcakccattgttcatttgaagggaagctgatatkaggggtaatgagttagcttcatcattgtcttgcgtaattactctctatcagatcagagtctaacaaaacctacaactacccaggcttgcaaataggtcagttattgttttaaaagcagctaggttttgatagcattgaagtacattaagatctgctgaagatctacagaagtcttcccaattctaccaacttcaagktttttttgtcatttatgcctgtggaagccaggcctggagatgaagggtgcagaatgtctgacttggtttccctccctctaacttcagtatctgttcacctagctactgaagttcaattccaattggtacagcaaaaagggaaacgacgcttgcccttttagatcactagctaaccactttggtcttcactctgcagcatggaatatcagtctagatactgtcatataggagtatcctctaggtgtaagccagcttcacccactgcctcatccgcagctacaaactatgttatgaaccatt

SEQ ID NO: 7518 - DNA, 600 bp, Chicken  19866894201534_8
ttccattttgttccctattagaaaaagtccccaaaagtttaaaataaccctttgagttctaaatttcagaagtctcagggcattgtcacttaaggcaatattccactccaacagttgagaaagcacgctgtttgcctgcagagtctaacaagtgccaattgattacagaaagtcatgtcttaaggcaatcaaagggttaattatgcttcttttcaactgtattaaggcttcccagccaaatattttcctcattaatttgggggtaatcccacagaaagtagcagcaagacagtgccttcrttattgaatggcacaaagccatgttatgtttaagttgtttaaacgtgatatggcagctgaagtgtggttctgctctggggaagaaaaagggaaggaggcattcaaaacccatcattaaaattctgttgggttttttttcccctctctaaacttgcattatttctaaaacaaaagctgttgatcgtaccataatattttccttagcatctgactgctaaaaattacccactaaaatactccgtaataggaattatgcttaagataagtgctcatccagctcaaacacagcttctaagaagc

SEQ ID NO: 7519 - DNA, 599 bp, Chicken  19866894201539_1
  misc_feature (1)..(89): n is any nucleotide
nnnnnnnnnnnnnnnnnnnnnnnnnnnnnnnnnnnnnnnnnnnnnnnnnnnnnnnnnnnnnnnnnnnnnnnnnnnnnnnnnnnnnnnnntttggtagactgccctatcttcttatagtattaggttagctgatatgacacatacatctgtaagcagtgctactattaagaagcaacaatgtacgggattagaacagctcatgaagtgaggaattctcagttaagccactgaagactaaattactccaggaaaacatttattgtagcccctttcttacaaatccaggtttatcttgacaamatctttgttccctagagattgaacagaagaaattatacttagctgctaactggaaaacttgcacattgatagagaagtcgtgttaaacagttatataacttgtcattccacagaggaaaggaggataaagaaagggaaaagcacaaatgccactcatgttaagaagttctgtgggcttaatatagcctgctcttctaactagtactttttaagccccccatttcctcccttgaaggaagcaaatttctctaatctgcgtgggtactcctcacacatttgagtgcacatttgattcatct

SEQ ID NO: 7520 - DNA, 600 bp, Chicken  19866894201543_1
taaatgttattaatatgtgaaacataaattaaggatggcttcttccctatctgacataaaaaataaaaataataaaaacaaggaaaccagaacagccctgatggattgaaaaggtccatggcatccaactctgtcaaggaagttaactgagtttgctacagaaaatgatttaaatcttgcacttttttctagtttggtacagactgagcagatgcagcgtgtgaaatctttggatctaatgaagaattagaactgataaagaagcagtatttcaaatgaaaatgctctgtcaattttatytacrtgacatggcaaaatactgactgtgagttttctatctgaaatgtttttactgtactcaccattttctcccccctacttgggaaatagcgactcatctgagagayaagaagatcctgtgagactgcttaatagcttaagaatattaagtggagagaatataattcttagctgtctttggaatggagtggaagggttccctacactcctgaactgtatctgcaagctaggcttacagctcaagtgtggtgtctaatacaaactatgcagtagttggtggaaagagcctgcactccacat

SEQ ID NO: 7521 - DNA, 600 bp, Chicken  19866894201543_2
tgttattaatatgtgaaacataaattaaggatggcttcttccctatctgacataaaaaataaaaataataaaaacaaggaaaccagaacagccctgatggattgaaaaggtccatggcatccaactctgtcaaggaagttaactgagtttgctacagaaaatgatttaaatcttgcacttttttctagtttggtacagactgagcagatgcagcgtgtgaaatctttggatctaatgaagaattagaactgataaagaagcagtatttcaaatgaaaatgctctgtcaattttatytacrtgacatggcaaaatactgactgtgagttttctatctgaaatgtttttactgtactcaccattttctcccccctacttgggaaatagcgactcatctgagagayaagaagatcctgtgagactgcttaatagcttaagaatattaagtggagagaatataattcttagctgtctttggaatggagtggaagggttccctacactcctgaactgtatctgcaagctaggcttacagctcaagtgtggtgtctaatacaaactatgcagtagttggtggaaagagcctgcactccacatttaa

SEQ ID NO: 7522 - DNA, 600 bp, Chicken  19866894201543_3
gaaaaggtccatggcatccaactctgtcaaggaagttaactgagtttgctacagaaaatgatttaaatcttgcacttttttctagtttggtacagactgagcagatgcagcgtgtgaaatctttggatctaatgaagaattagaactgataaagaagcagtatttcaaatgaaaatgctctgtcaattttatytacrtgacatggcaaaatactgactgtgagttttctatctgaaatgtttttactgtactcaccattttctcccccctacttgggaaatagcgactcatctgagagayaagaagatcctgtgagactgcttaatagcttaagaatattaagtggagagaatataattcttagctgtctttggaatggagtggaagggttccctacactcctgaactgtatctgcaagctaggcttacagctcaagtgtggtgtctaatacaaactatgcagtagttggtggaaagagcctgcactccacatttaagcatgcttcccttttcatctccttctttctaatgggaagctaattcagcacaacttctcttttctgcattttactatgcacagttaaacttgtctgcaaaggg

SEQ ID NO: 7523 - DNA, 600 bp, Chicken  19866894201543_4
tcttttctgcattttactatgcacagttaaacttgtctgcaaagggtatgtacaccaggttggcttcctggggcagaactaatccaatagtttatgagttcagcagatgtttctgcttttgtagccaggtgcaatctccttttccctggagtaaatgttatctgagcaaatggccaaaaatttaattaccttttttctttttttaactttctagatgtgtgtaacatcaccttaaaattagacttcctctcttttagggagcatataatgcttgcgcttatacttccagcaaagaataascactggttgcttaatatttacactagcattttcagagttgtatgagtgtgtttggtgtaactggaacatcccaagtggtgacagagtctgattagtggaatatatcctaatgaaaatgcctcttctttatattcatattcctttctgcttaactcaccaagagcttaattcatcatttctctaccctgttttactctgaagtgaatgtaaaactaaggtcagaactgggctaggaaagtgaaacatcagggctacaatgacagaagaaatgctttgagactctcaaaattactctttttg

SEQ ID NO: 7524 - DNA, 599 bp, Chicken  19866894201549_1
  misc_feature (1)..(56): n is any nucleotide
nnnnnnnnnnnnnnnnnnnnnnnnnnnnnnnnnnnnnnnnnnnnnnnnnnnnnnnnctgtaccagtggagaataattatcaacctatagagggcaatggaggaaaagaaaatgaaataggtaagggaaaaaaaaaaaaaaggaataaaaaatgcaagaggaaacattaggcaatcttctacattaaaatcacacgtgtatgcattgtatgtgtcagttatacacactccaggaaagagacccaaaagggaagattaagactgtaagtataaacagatcgcttgaggtataatatttacaygtaggacataagtgctaaactgcaaaaggatgtaaacttttagtccctgagcacagctgcaacagtcagaaatggctgcactgcatcaatcaaatcaggctgcaaccagctgcctccccagtgcaaagatggcttgtgtcagaggcataacttccctctccatggcatagcaggctgacaggaggaggtcaccacacagaaacttctacctctctactgcagaactttgcctcctgacctcctcctgtctcctgtgcccacagaacacagtctgtacagatcagaaagctatcactctc

SEQ ID NO: 7525 - DNA, 557 bp, Chicken  19866894201549_10
ataaaagctccctaagggcaggtgcacctctgtgcattaaagcctgggaaatgaattggccacttgatacttcacggcaagtgtgcagagtgtctgcaaaaaccaaggatttccatccagaytgctccttcagtagcacgtgagtttttcttcagaactccaactgccataaaattactcctgaaaagcaaatttaagctgaaatcttgtgaaaagacagaagtcacaaaaaataccagctaccagcacggctggtcacagtcaaatccagctccatgcatagcatgggcaaactgcctscctayatccctccactaaagcttcaccgtgaagtaccaagagcacggtttgtgtgttgaggtagtggcatgcaaaactccagtgcagctcctcctctctggtccatgctaatatacccccatgcttctcttaaaaaaaattaaaaggattagaaaatatcttaagaagaacacttcagaaacactacattacccaacttctatttaatactgctttttcctttgtccacagtagctagcacacttatccacctcgaa

SEQ ID NO: 7526 - DNA, 552 bp, Chicken  19866894201549_11
agctccctaagggcaggtgcacctctgtgcattaaagcctgggaaatgaattggccacttgatacttcacggcaagtgtgcagagtgtctgcaaaaaccaaggatttccatccagaytgctccttcagtagcacgtgagtttttcttcagaactccaactgccataaaattactcctgaaaagcaaatttaagctgaaatcttgtgaaaagacagaagtcacaaaaaataccagctaccagcacggctggtcacagtcaaatccagctccatgcatagcatgggcaaactgcctscctayatccctccactaaagcttcaccgtgaagtaccaagagcacggtttgtgtgttgaggtagtggcatgcaaaactccagtgcagctcctcctctctggtccatgctaatatacccccatgcttctcttaaaaaaaattaaaaggattagaaaatatcttaagaagaacacttcagaaacactacattacccaacttctatttaatactgctttttcctttgtccacagtagctagcacacttatccacctcgaa

SEQ ID NO: 7527 - DNA, 600 bp, Chicken  19866894201549_2
caccctcctttccttctgaatgtgtgctgttgggtgaggaggagccatccaccagggatttggagttcttatccaagctgtcatccttttcctcccggatatgagcatcacaagattcttcatccatgtctaaccacgaatccgatgaatagctgtctatgctgcgttttctctttgcatctgaaagttagaaaaggaatgctgaatctttacccgatataatttatagtttaacacttctatgactgggactaggagctgcctatttaaaaggacactggataatgcctagtcagtatrtgataagaatgagctttattcagcctgttttttgtgggytgttttttcatttgwttcatttttttaatgctggcctttttggttaacatctgctcagtttaaatgactgggaaacatttggggaaaaaatatgctttctttagcacttcaatcttctgtgacttcaattaagaagatgcacagttcacatacaattagtttttctggcaatccaaaagagatcagattcagtaaccttacagctttaaaataaaagttagcaaataaagaggaaaggaaaagcgatgggaaaaagcgtgt

SEQ ID NO: 7528 - DNA, 600 bp, Chicken  19866894201549_3
aggagccatccaccagggatttggagttcttatccaagctgtcatccttttcctcccggatatgagcatcacaagattcttcatccatgtctaaccacgaatccgatgaatagctgtctatgctgcgttttctctttgcatctgaaagttagaaaaggaatgctgaatctttacccgatataatttatagtttaacacttctatgactgggactaggagctgcctatttaaaaggacactggataatgcctagtcagtatrtgataagaatgagctttattcagcctgttttttgtgggytgttttttcatttgwttcatttttttaatgctggcctttttggttaacatctgctcagtttaaatgactgggaaacatttggggaaaaaatatgctttctttagcacttcaatcttctgtgacttcaattaagaagatgcacagttcacatacaattagtttttctggcaatccaaaagagatcagattcagtaaccttacagctttaaaataaaagttagcaaataaagaggaaaggaaaagcgatgggaaaaagcgtgttaaaatgcactacaacatctcttttaaagctactctgca

SEQ ID NO: 7529 - DNA, 600 bp, Chicken  19866894201549_4
gggatttggagttcttatccaagctgtcatccttttcctcccggatatgagcatcacaagattcttcatccatgtctaaccacgaatccgatgaatagctgtctatgctgcgttttctctttgcatctgaaagttagaaaaggaatgctgaatctttacccgatataatttatagtttaacacttctatgactgggactaggagctgcctatttaaaaggacactggataatgcctagtcagtatrtgataagaatgagctttattcagcctgttttttgtgggytgttttttcatttgwttcatttttttaatgctggcctttttggttaacatctgctcagtttaaatgactgggaaacatttggggaaaaaatatgctttctttagcacttcaatcttctgtgacttcaattaagaagatgcacagttcacatacaattagtttttctggcaatccaaaagagatcagattcagtaaccttacagctttaaaataaaagttagcaaataaagaggaaaggaaaagcgatgggaaaaagcgtgttaaaatgcactacaacatctcttttaaagctactctgcacagcacaaaaccaac

SEQ ID NO: 7530 - DNA, 600 bp, Chicken  19866894201549_5
agagatcagattcagtaaccttacagctttaaaataaaagttagcaaataaagaggaaaggaaaagcgatgggaaaaagcgtgttaaaatgcactacaacatctcttttaaagctactctgcacagcacaaaaccaacttctcagtactctctctttgcaagcaaccactggtaaaacaagaactacaacttgtgactgcacaaatactcattgctcttcagagacagaagattacagttgtgcttatttcacagacaagtagcctaaacacactgagaaatgcaaggacagagagtcckgtggtactgcttttctgattgcagcccctgatacattctaggtackttttgggaaaatttaaatccaagtttctaagtctaaagaaccgttagtcttagtttcacactgtttcccctaaaaatccccactgttacccaactgtatgcaatcgagccatgaaaccaaaggaggaacctagtggccaagattctccaatgcactgctcyttcctagtttgttagacacaactgcctttgctaagtgaacagcactgagtgcagaccagcagcagtttggttttctgtggaaaatacagttaa

SEQ ID NO: 7531 - DNA, 600 bp, Chicken  19866894201549_6
aataaagaggaaaggaaaagcgatgggaaaaagcgtgttaaaatgcactacaacatctcttttaaagctactctgcacagcacaaaaccaacttctcagtactctctctttgcaagcaaccactggtaaaacaagaactacaacttgtgactgcacaaatactcattgctcttcagagacagaagattacagttgtgcttatttcacagacaagtagcctaaacacactgagaaatgcaaggacagagagtcckgtggtactgcttttctgattgcagcccctgatacattctaggtackttttgggaaaatttaaatccaagtttctaagtctaaagaaccgttagtcttagtttcacactgtttcccctaaaaatccccactgttacccaactgtatgcaatcgagccatgaaaccaaaggaggaacctagtggccaagattctccaatgcactgctcyttcctagtttgttagacacaactgcctttgctaagtgaacagcactgagtgcagaccagcagcagtttggttttctgtggaaaatacagttaaaaatgacaacacccagttaggtcaatgcggattttaatagcaactg

SEQ ID NO: 7532 - DNA, 600 bp, Chicken  19866894201549_7
ctcattgctcttcagagacagaagattacagttgtgcttatttcacagacaagtagcctaaacacactgagaaatgcaaggacagagagtcckgtggtactgcttttctgattgcagcccctgatacattctaggtackttttgggaaaatttaaatccaagtttctaagtctaaagaaccgttagtcttagtttcacactgtttcccctaaaaatccccactgttacccaactgtatgcaatcgagccatgaaaccaaaggaggaacctagtggccaagattctccaatgcactgctcyttcctagtttgttagacacaactgcctttgctaagtgaacagcactgagtgcagaccagcagcagtttggttttctgtggaaaatacagttaaaaatgacaacacccagttaggtcaatgcggattttaatagcaactgcaataggtatgagatcaagtcgtagacaaaaacactgcaaaggaagtggaagtcatacagaaaaacaagtgaacaattaatgagaagtttctttcacagctttgcttacatattttcagcaggtcaaaaccctgagcaccttcatgttttgtgttgcagtg

SEQ ID NO: 7533 - DNA, 600 bp, Chicken  19866894201549_8
aacaattaatgagaagtttctttcacagctttgcttacatattttcagcaggtcaaaaccctgagcaccttcatgttttgtgttgcagtgattttggattaggagtatgtgaatcatgcttaaggaatgattaaacgaaaattaaagaaaaagctcagcagttggttgtttaacagcaagactcaaaacaaatgctgaagcccagttccaagctggcacatccatccttatcacagaaaccttgtttcttgtatcatctcacataaataggtgttacttgtcagctagggagcaaagatktagcaggtaccaatggcgcatctgtccgagggctgctaccctacttgcttggctttgcaatttaaaataaaagctccctaagggcaggtgcacctctgtgcattaaagcctgggaaatgaattggccacttgatacttcacggcaagtgtgcagagtgtctgcaaaaaccaaggatttccatccagaytgctccttcagtagcacgtgagtttttcttcagaactccaactgccataaaattactcctgaaaagcaaatttaagctgaaatcttgtgaaaagacagaagtcacaaaaaat

SEQ ID NO: 7534 - DNA, 600 bp, Chicken  19866894201549_9
caaatgctgaagcccagttccaagctggcacatccatccttatcacagaaaccttgtttcttgtatcatctcacataaataggtgttacttgtcagctagggagcaaagatktagcaggtaccaatggcgcatctgtccgagggctgctaccctacttgcttggctttgcaatttaaaataaaagctccctaagggcaggtgcacctctgtgcattaaagcctgggaaatgaattggccacttgatacttcacggcaagtgtgcagagtgtctgcaaaaaccaaggatttccatccagaytgctccttcagtagcacgtgagtttttcttcagaactccaactgccataaaattactcctgaaaagcaaatttaagctgaaatcttgtgaaaagacagaagtcacaaaaaataccagctaccagcacggctggtcacagtcaaatccagctccatgcatagcatgggcaaactgcctscctayatccctccactaaagcttcaccgtgaagtaccaagagcacggtttgtgtgttgaggtagtggcatgcaaaactccagtgcagctcctcctctctggtccatgctaatatacccccat

SEQ ID NO: 7535 - DNA, 599 bp, Chicken  19866894201555_1
  misc_feature (1)..(131): n is any nucleotide
nnnnnnnnnnnnnnnnnnnnnnnnnnnnnnnnnnnnnnnnnnnnnnnnnnnnnnnnnnnnnnnnnnnnnnnnnnnnnnnnnnnnnnnnnnnnnnnnnnnnnnnnnnnnnnnnnnnnnnnnnnnnnnnnnnnaacatggggatctctcctcactctcactgaaggataaagccagccacccaacatttcatcacacaaatccagcccaccttagccccatcctagatagggcaggtgctaagcagcggagctgttgctggcctgagcagtgcttgtaatttgggaagggtttgttgtttgraagttcacccaaggacatcatgctacagtgttttttactctgttctcttttctgctttcctctcgtttcatagctcaaaataggtgcctgcagacagaatcctcagaaaatacccttgctgtatttgtgaatttatttggtgtttttaatttccactcagtttctagagataaacaaccagctgtgtttttaagtatcttgttatggaaaagtattcatcccaaaatacacagcctccgtaacacagagcgcaagtaataatagcaaggagttcctttaaataccatgtaatgaaatag

SEQ ID NO: 7536 - DNA, 599 bp, Chicken  19866894201561_1
  misc_feature (1)..(128): n is any nucleotide
nnnnnnnnnnnnnnnnnnnnnnnnnnnnnnnnnnnnnnnnnnnnnnnnnnnnnnnnnnnnnnnnnnnnnnnnnnnnnnnnnnnnnnnnnnnnnnnnnnnnnnnnnnnnnnnnnnnnnnnnnnnnnnnnaaaaaaaaagccagccagccagtgcactcctaatggtaattaaagcacaaatttaaaaccatttatcatttctgttttgttgatctctgacatagcattattgtacctgccaggaatggaagattcttgaatagcaataatgtcagccaacacccctaatccagaacaagaracagcggatgacatactttggaacgcttgctcctttatacttaaagctttccctgctaccagaaggctggtcaaggaaagcctagaaggaaataagcaataaacacgttttactatgcactacaatcttacccagtcagaaaccttcaattgaagaggatgtgcaagacattccccattttgtcaagcagcagcttctcattcaacctgaaaattaaagaaattactcttaccttgttttcaaaacctccaaccactctttttaattcatgaaaaattttaaaggcaaaccttacctat

SEQ ID NO: 7537 - DNA, 600 bp, Chicken  19866894201568_1
cactcaacacttcaagtgagaatggaatgcaaagtaagggtgtgcatggaaatgctcacatccagccacagacccgcgttacagtaacacttgccagagcactaaagcgaccactacctggactcaggagagatccagagccacgactagtggaaccttgctttctttctaatttaaattgacaaaccgtggctgtcagccatcctgcagagcaacccaagagcagcagacagcctcgggatggtgcggagcccagaaaactgcacttcaactggtggttacccatctcctcggcatgcrtgcatgcacacacacacacttggacagtactgagggtggaacactgaaacgttactacgactcacaagatgaagtgaaggagagaaaaaattgtgctaaacagactgcccagcaccacgagcttcgactgctatctcagaggaagtggtagaactcttcagaatgagcccagatacagagcctgaaaaactggcaaagaataatcctgagaaggcgagggaaaattacatcttttccaaacaaggtctggttcacctctgaactgaactcttcacgttcaagaattgctatgcaaaaaat

SEQ ID NO: 7538 - DNA, 527 bp, Chicken  19866894201573_1
cactggcaggtgaaaagccaaatgtttctcgtttggtgacttctagagttttgtgtagggaaactaaatttgaatgcttacgaaccaaaccatgtcagagagaaaaccaaaagtgaagcttttgaaattagttggcatttgtttctggttactaccaatggattcttttctttgagctgtggcctgcgaggaaaatggtgtgaagggaagcactgtgctatattttgacattctaatgcttggcttttgcagaataactgttttgatagaggatttctaatttatatgtattccagtgcrgggaaataaaaagcccagaaccctcatgcttcatggaagcccatcttcctcacctaagggttatcacctcaattcagaggaacagacagaccacttcagtgaacatagtagctgttcacagtaatgtgctgcataaggggcacctatggagtttgccgttggagggatgctgcacaagttgtaacaagctctatagctgtcaccacttttgtattaacatcaaaaca

SEQ ID NO: 7539 - DNA, 600 bp, Chicken  19866894201574_1
atttctgtttaattttgtttaagtgttctgtgctatcagttgcagcttgaattaaatgaaaagcaatttcagtggtaaactgaacctttaaatgtaagaaaaaatttccattttcttctgagctatgatcttaaattatagcagtgcccactagagctgtttgtgctcagattgtgttggtgtgttttttataatgaaccccatacttaagcaggattatgacttggacacaatacctagcagaactaaaggtaacaggaaaagtcttatgctgggaaaaatatatatatatatattttraatcctcctaagtttatcactttaaaggggatattgttaacattgttacttattaaaataaacagattttgacagctgcttcatttgatcacaagtacaattaggacttttaaatgatccttgttttgagtctcgtttttaaagtacaatacagagcatttccactgtgagaaaacatttgtaataattgaaattctagtggtgatttttagtatttcagtaagtgaaataaaaagagaaatcaatataaaaaaataattcaaaaatttttttgcaccgcttgaaaatcagcttcatacc

SEQ ID NO: 7540 - DNA, 562 bp, Chicken  19866894201574_2
cattgttacttattaaaataaacagattttgacagctgcttcatttgatcacaagtacaattaggacttttaaatgatccttgttttgagtctcgtttttaaagtacaatacagagcatttccactgtgagaaaacatttgtaataattgaaattctagtggtgatttttagtatttcagtaagtgaaataaaaagagaaatcaatataaaaaaataattcaaaaatttttttgcaccgcttgaaaatcagcttcataccaaagtaacagtgaacagtttatatacatcatcgacaatayagagccatgagccctacaggaatcttttgaaatatatgctctaatttcaaaaaataatagtaattttgtaatcttatatatgaagctgaattgaaatagtcattgctgatataaaatgtccctcactggtatgcagcagccattttaggtattcaggttgttgtattggtttctagtggcatttattcagcagaaatacaaatactctaagtatggtgaattctatcagtttatcatatatacagagcattatttcaggaca

SEQ ID NO: 7541 - DNA, 600 bp, Chicken  19866894201595_1
ggaagctaataggcctatattcagagctgtatctacttatatgacataggagttttagtgatatcaactagtgagaatcatttttgagttagataatttacaaatttaggagagtggaacctttgtagaactttactattacaatgattacaatacacagtaaatatcttaaaaatgtaaaaaaataaaaataaacatttagatttagcaaaaaatgtgtaaggacatgcaaactaactctcataaagactgatgcctctaggcagcgttgaagaatatcaggcatagtaggtagtattrtgtcttcagactgcaccaaattggtactcagattggtacagattgrtactcagacaatcaagatctcccagagtggagtaaggattgattacctgagttaacacttctagcattgttcacttcaatgatttacagttgcaactgtattactttgtagtctttaagaaagtttttscttacctcaagctttagcatttactttaaaagattcaagtatgagaaactgtaggtgttggtagtctgatttgaaaytgtagaaaaaaaaacatgcaaatatggtgacctcatttgataacattc

SEQ ID NO: 7542 - DNA, 600 bp, Chicken  19866894201595_2
taggagttttagtgatatcaactagtgagaatcatttttgagttagataatttacaaatttaggagagtggaacctttgtagaactttactattacaatgattacaatacacagtaaatatcttaaaaatgtaaaaaaataaaaataaacatttagatttagcaaaaaatgtgtaaggacatgcaaactaactctcataaagactgatgcctctaggcagcgttgaagaatatcaggcatagtaggtagtattrtgtcttcagactgcaccaaattggtactcagattggtacagattgrtactcagacaatcaagatctcccagagtggagtaaggattgattacctgagttaacacttctagcattgttcacttcaatgatttacagttgcaactgtattactttgtagtctttaagaaagtttttscttacctcaagctttagcatttactttaaaagattcaagtatgagaaactgtaggtgttggtagtctgatttgaaaytgtagaaaaaaaaacatgcaaatatggtgacctcatttgataacattcctcagcacaaatttggggaaattattctatgcattcattctgaatt

SEQ ID NO: 7543 - DNA, 600 bp, Chicken  19866894201595_3
tgtaaaaaaataaaaataaacatttagatttagcaaaaaatgtgtaaggacatgcaaactaactctcataaagactgatgcctctaggcagcgttgaagaatatcaggcatagtaggtagtattrtgtcttcagactgcaccaaattggtactcagattggtacagattgrtactcagacaatcaagatctcccagagtggagtaaggattgattacctgagttaacacttctagcattgttcacttcaatgatttacagttgcaactgtattactttgtagtctttaagaaagtttttscttacctcaagctttagcatttactttaaaagattcaagtatgagaaactgtaggtgttggtagtctgatttgaaaytgtagaaaaaaaaacatgcaaatatggtgacctcatttgataacattcctcagcacaaatttggggaaattattctatgcattcattctgaattgtgccacataaatcagatcccaaaacttagggtctggcaggacagataaaaattacctgacagttagaaatatataatttttccattcatcagtctttacattttggcatttgattattttgattattt

SEQ ID NO: 7544 - DNA, 600 bp, Chicken  19866894201595_4
atgcctctaggcagcgttgaagaatatcaggcatagtaggtagtattrtgtcttcagactgcaccaaattggtactcagattggtacagattgrtactcagacaatcaagatctcccagagtggagtaaggattgattacctgagttaacacttctagcattgttcacttcaatgatttacagttgcaactgtattactttgtagtctttaagaaagtttttscttacctcaagctttagcatttactttaaaagattcaagtatgagaaactgtaggtgttggtagtctgatttgaaaytgtagaaaaaaaaacatgcaaatatggtgacctcatttgataacattcctcagcacaaatttggggaaattattctatgcattcattctgaattgtgccacataaatcagatcccaaaacttagggtctggcaggacagataaaaattacctgacagttagaaatatataatttttccattcatcagtctttacattttggcatttgattattttgattattttgatctagaaaataataataataataaaaagaagtaaataaaagtaaataaagaagatgagttaaagatggtaattg

SEQ ID NO: 7545 - DNA, 600 bp, Chicken  19866894201595_5
ctaggcagcgttgaagaatatcaggcatagtaggtagtattrtgtcttcagactgcaccaaattggtactcagattggtacagattgrtactcagacaatcaagatctcccagagtggagtaaggattgattacctgagttaacacttctagcattgttcacttcaatgatttacagttgcaactgtattactttgtagtctttaagaaagtttttscttacctcaagctttagcatttactttaaaagattcaagtatgagaaactgtaggtgttggtagtctgatttgaaaytgtagyaaaaaaaacatgcaaatatggtgacctcatttgataacattcctcagcacaaatttggggaaattattctatgcattcattctgaattgtgccacataaatcagatcccaaaacttagggtctggcaggacagataaaaattacctgacagttagaaatatataatttttccattcatcagtctttacattttggcatttgattattttgattattttgatctagaaaataataataataataaaaagaagtaaataaaagtaaataaagaagatgagttaaagatggtaattgccaaat

SEQ ID NO: 7546 - DNA, 600 bp, Chicken  19866894201596_1
taaatacatttgcaaaattaataaggctttgcatcctagaatcggaatgtttctcaaacaaagagaaataagggcactgcctaaaaggaatgcaatagttgattttgctgaaaggggcgtatttggagacaaatcacaaataacatttctcaaggataacttgactcacaaattcattatttttacaaacggcccttgcaaaaatgtgtttgggaagttcgccaattacagttaatacagaaaaagaccacaccattatatccttctagactgtttatttctgagtaaaaacagacacartatgaaaattaacagtacaaaatacaataccaagtacttggaacaatacaaatagaagttaaaagctgggatttctttgactagacacaattattgagggggaatattgttggtttaaaaatctatcatcttattcaatattgaacaaacattcaatccattaagttgtccactagttcaccacttttcttatgtgcacatagcaataaatacagaatccattttatagacgcttccaaaaaaaaaaaacccagcagcattgcaatgaactgtcacaatcctaacatttgcaaatgtaaa

SEQ ID NO: 7547 - DNA, 599 bp, Chicken  19866894201598_1
  misc_feature (1)..(150): n is any nucleotide
nnnnnnnnnnnnnnnnnnnnnnnnnnnnnnnnnnnnnnnnnnnnnnnnnnnnnnnnnnnnnnnnnnnnnnnnnnnnnnnnnnnnnnnnnnnnnnnnnnnnnnnnnnnnnnnnnnnnnnnnnnnnnnnnnnnnnnnnnnnnnnnnnnnnnnccaagtaaataaatggagccttgtgctgtggcaaagatagcatcaggagcagtgacttcactgggacttaaagcagccacagactgcctgggcatgatgatggtcctcctgccttttcctcatgctggcagcagcacggttcattttacyatggattggatcactgagcaccctgctttttagacatccagcctatctctgatgccaagcactactgattaacaaaataaatttggtcctaagcatacttttggcatagtcttgccatagtcgtgagatactgctgagtttttttgcttttgtgagtactttagttagatccatacatggttgatgctcctgcatcttgtgaaggtctttctgcagcattgggacatccacctcaggtggagaggggctgcagtgacatttcttgtccctctcctagaagtgagcagaacagggcagtt

SEQ ID NO: 7548 - DNA, 600 bp, Chicken  19866894201610_1
gctttcaaactgccacttaaactagcgggtgagatttcatattttaaaggcttatctctccaaaataaaaccctttgcagccattgagccaagatcctgtcctttttggcataaaagcattctgtaatgcccattttgtttccactgcaacacactggagaaagctgctttttggttttttttaatcctctaaaagcagtggctttgtggtagcatccccgtgctgagtcccctggatcctagaggtcctgggctttgtaggacatgcagagctcctgggccatttgcttccatccaagrttggagcaggagtgggtgcagaggacacctcttctccaggctctactagctagggactaatggccagtcccactggggtatggaaggtggcttgtgagcttgaactaaagagctttggattggtatgtggatttttagcttttgtgatatactgatgccaaaggtctagggttctacaaaccccatcaggtggcagaaacctggggggtgcagatgttgctaccataccagctactgcttgaaaacagatgctgcacactcacctgggctgcagtgaaaaagtcttaaacctattctttt

SEQ ID NO: 7549 - DNA, 600 bp, Chicken  19866894201611_1
atgatgtttcagtggcagctttcttttaaagtgatacaaaagcttccatttattcccggcccagcctaactttatggaaggaactacctgtcacacagtacatttaatgagaagagatcttttggattcattaagtgcaaactctcgcaattagaggtgactgcatcacagaatcaccttctaacaaaactgatgcactccactttgaagctagtttatttatttatttttttccctcactacttttggtggttgtatgggaattgctaagtcatggcctgaaccaatgactgagcaccygttgtagggacacagccagcyctgggagcacaggtggaaccgggtttcacccctcccaaagcctcatttaagggttggctgccaccagggaaaggtctctacctggagatycctttctctggagtatttggtgagccctaatccttaggacaggtaagcacatgtttctttctctaactggattgtgaccatcaccctttttttggggggggtaatttagaactggttatctgttattatctttccctccagtggggaggatattgcacaaccttactgctgaggtatctgaaaaaagta

SEQ ID NO: 7550 - DNA, 600 bp, Chicken  19866894201611_2
tcttttaaagtgatacaaaagcttccatttattcccggcccagcctaactttatggaaggaactacctgtcacacagtacatttaatgagaagagatcttttggattcattaagtgcaaactctcgcaattagaggtgactgcatcacagaatcaccttctaacaaaactgatgcactccactttgaagctagtttatttatttatttttttccctcactacttttggtggttgtatgggaattgctaagtcatggcctgaaccaatgactgagcaccygttgtagggacacagccagcyctgggagcacaggtggaaccgggtttcacccctcccaaagcctcatttaagggttggctgccaccagggaaaggtctctacctggagatycctttctctggagtatttggtgagccctaatccttaggacaggtaagcacatgtttctttctctaactggattgtgaccatcaccctttttttggggggggtaatttagaactggttatctgttattatctttccctccagtggggaggatattgcacaaccttactgctgaggtatctgaaaaaagtattttacaacttcaaatcccag

SEQ ID NO: 7551 - DNA, 600 bp, Chicken  19866894201611_3
aagagatcttttggattcattaagtgcaaactctcgcaattagaggtgactgcatcacagaatcaccttctaacaaaactgatgcactccactttgaagctagtttatttatttatttttttccctcactacttttggtggttgtatgggaattgctaagtcatggcctgaaccaatgactgagcaccygttgtagggacacagccagcyctgggagcacaggtggaaccgggtttcacccctcccaaagcctcatttaagggttggctgccaccagggaaaggtctctacctggagatycctttctctggagtatttggtgagccctaatccttaggacaggtaagcacatgtttctttctctaactggattgtgaccatcaccctttttttggggggggtaatttagaactggttatctgttattatctttccctccagtggggaggatattgcacaaccttactgctgaggtatctgaaaaaagtattttacaacttcaaatcccagtgacaatcagcctgcagttattgctacttctgttaagtgtccattagcttaatatagtttttcctcccctagtgttcattctggaatact

SEQ ID NO: 7552 - DNA, 600 bp, Chicken  19866894201616_1
gagagtgttattcttcagctgaaattaggcagatgttgattactagtcaaatgatgtggtggtatttgaggctcgtgaagtagagagaaatatttctggtaacatgagtagcagctgtaaaaacagtgcagaaaaataaaagtgaccttgaacagtattaggaaatcatgctgttttttaagtaataaataagttaagactagtgcatatctgttaaaaaaaatcacctcttccatgtgaatgtttataaaaacctcgctcttacaaattgaatatattcttctgataataacaataaawggactgcataatctggtttaacaaggaagccaaactaaatcaactcttcccttcaacacaaggaatttttgcatcccaagccaaaaacacacagggactcacaaaatcctgacctaccagaaagtcctaatgagcttcaaaagaaatgcattttagatgcagactagaactaccactaataaaacacagcacaataatcaaagtctgcaaagcatttatgttgaaaaaagttgataatcagtgcaaattagtacccgtataaaatagtgatataacaattatttggtttctgctttagag

SEQ ID NO: 7553 - DNA, 600 bp, Chicken  19866894201624_1
cattgtgtgtaaggccaacatcaatcctgaactcagacaagtttggattggccccgttgtgggtgggcacactgaaacctttgagtttcattaaacggtggagtgtttgatttttgttttccattctaccatgctgctgtccctagcaggactgtgtgatgtgaggaatgggtgtacccagcaacttgcattatctcctggtaactaatagagaagtaagggctgctttgttcatagcagagagatgcaggcacagcaaggatttgggatgggattcctggtcaggttatctaagttgcrttgcctgacccatggtttagagkgtggctcagaaggtgctccgtcatggtaggagggaagtatttcaaggcaagatgattgtctarcagtaaaacagaagtctgtgctgcagcggtgtggaaaaggaaagagcagagctcttctggtgtgyaaagctgtggctgatgtggttccctgtggtcatgctgtttcttcctgtcttactcaagaggtgtttgcttagcccttcagccttatgagtttgtggactcatttggattttcccttgctagtacaggcttctggttgactacttaggtc

SEQ ID NO: 7554 - DNA, 600 bp, Chicken  19866894201624_2
atcctgaactcagacaagtttggattggccccgttgtgggtgggcacactgaaacctttgagtttcattaaacggtggagtgtttgatttttgttttccattctaccatgctgctgtccctagcaggactgtgtgatgtgaggaatgggtgtacccagcaacttgcattatctcctggtaactaatagagaagtaagggctgctttgttcatagcagagagatgcaggcacagcaaggatttgggatgggattcctggtcaggttatctaagttgcrttgcctgacccatggtttagagkgtggctcagaaggtgctccgtcatggtaggagggaagtatttcaaggcaagatgattgtctarcagtaaaacagaagtctgtgctgcagcggtgtggaaaaggaaagagcagagctcttctggtgtgyaaagctgtggctgatgtggttccctgtggtcatgctgtttcttcctgtcttactcaagaggtgtttgcttagcccttcagccttatgagtttgtggactcatttggattttcccttgctagtacaggcttctggttgactacttaggtctaatgacaatggtgagtaattct

SEQ ID NO: 7555 - DNA, 600 bp, Chicken  19866894201624_3
ttcattaaacggtggagtgtttgatttttgttttccattctaccatgctgctgtccctagcaggactgtgtgatgtgaggaatgggtgtacccagcaacttgcattatctcctggtaactaatagagaagtaagggctgctttgttcatagcagagagatgcaggcacagcaaggatttgggatgggattcctggtcaggttatctaagttgcrttgcctgacccatggtttagagkgtggctcagaaggtgctccgtcatggtaggagggaagtatttcaaggcaagatgattgtctarcagtaaaacagaagtctgtgctgcagcggtgtggaaaaggaaagagcagagctcttctggtgtgyaaagctgtggctgatgtggttccctgtggtcatgctgtttcttcctgtcttactcaagaggtgtttgcttagcccttcagccttatgagtttgtggactcatttggattttcccttgctagtacaggcttctggttgactacttaggtctaatgacaatggtgagtaattcttggtgatctgttgctgatctcttaagagttgaacattccagttgattgaaaactattggaggc

SEQ ID NO: 7556 - DNA, 600 bp, Chicken  19866894201624_4
ctgtgtgatgtgaggaatgggtgtacccagcaacttgcattatctcctggtaactaatagagaagtaagggctgctttgttcatagcagagagatgcaggcacagcaaggatttgggatgggattcctggtcaggttatctaagttgcrttgcctgacccatggtttagagkgtggctcagaaggtgctccgtcatggtaggagggaagtatttcaaggcaagatgattgtctarcagtaaaacagaagtctgtgctgcagcggtgtggaaaaggaaagagcagagctcttctggtgtgyaaagctgtggctgatgtggttccctgtggtcatgctgtttcttcctgtcttactcaagaggtgtttgcttagcccttcagccttatgagtttgtggactcatttggattttcccttgctagtacaggcttctggttgactacttaggtctaatgacaatggtgagtaattcttggtgatctgttgctgatctcttaagagttgaacattccagttgattgaaaactattggaggcctgcagaactccatttcatgaaatgctagctttaaagctatgaaggtgacctaaaaaatcttcct

SEQ ID NO: 7557 - DNA, 600 bp, Chicken  19866894201630_1
acctcattcacaaatcccagaccacattatacttccatatgatctcacccaagtctcattctcatttaatctgaatatgtgtttttcttgggagagtgcataggaagcaaaattcatactttgttcttaatggtttatgagtttcgatcctttctgtccaaactgggtctgaaaattttatgggtgtaatgtttatcagtgttaaatcacacaagtgaagggatcaccttgatccggtgccattttccaacttggatcatcttggacattcgcaagtagtgatgtggaaaattagagagycttggagaagtgagtccaccaaggctgagccaaagtacattgtcaatagaattctaaacaatatcaccatttctgtcaacaagctcttcaggaaagggaaaagcactgcacagggagttacataataaacagatgtcaaataaatcttagggcaaagccattgtctacatcttgaaaaattgtcaatgtattaaaaattataatttccccattgaaagtgagtctaaaagaatttgcctttataaagaacatatggcattgcagtccaactgctgtcactagctgtaggctcgtaactgt

SEQ ID NO: 7558 - DNA, 600 bp, Chicken  19866894201640_1
cctctcctcctagtagagtaaagccggaatggagaagctccttcacacagttccccaaatatcactcaccttcaagcatttctgcttctgcttccagtgcaggagcagcaagccctttcacctcctctcttctgcccagatcacattgcagtttgagtagaatttcccagacattgtctcttgagatactcgtaactgatgccaaaatctgggactacaagttaggcagcactctctgctgcagaacttgtcaggcagagctgtgaaattgcactagtagagaggcaaagaccactgagmtccaaaattaacaactgctacctaaacatcgataatcccatttgggtatggctaaggaaagaggtcaattcacggaaggcctcagttcccaggcaacaggtcacacagtgcttcacaaaggctggtggctgtaggctgtgctrcacgtgaagcagtgatgctcagcacctcccaggagcagggccaccaaggcttacaacactgtaaaatgtgygtgcagagtttaaatgacagcctggggaagaccaaaaaaaattcctcaagcgtcttctccattgcagtgtattgaatggtgggaca

SEQ ID NO: 7559 - DNA, 600 bp, Chicken  19866894201640_2
cattgcagtttgagtagaatttcccagacattgtctcttgagatactcgtaactgatgccaaaatctgggactacaagttaggcagcactctctgctgcagaacttgtcaggcagagctgtgaaattgcactagtagagaggcaaagaccactgagmtccaaaattaacaactgctacctaaacatcgataatcccatttgggtatggctaaggaaagaggtcaattcacggaaggcctcagttcccaggcaacaggtcacacagtgcttcacaaaggctggtggctgtaggctgtgctrcacgtgaagcagtgatgctcagcacctcccaggagcagggccaccaaggcttacaacactgtaaaatgtgygtgcagagtttaaatgacagcctggggaagaccaaaaaaaattcctcaagcgtcttctccattgcagtgtattgaatggtgggacagaagaccttctgtttttccaaggcaagattgtaaatatatttaacagttaagcagaagtattttcagatgttaatcatgctaaagtgacagcaagaggttctaccagtcttaatatctttcaggcagctttgctcagccaaac

SEQ ID NO: 7560 - DNA, 600 bp, Chicken  19866894201640_3
ctacaagttaggcagcactctctgctgcagaacttgtcaggcagagctgtgaaattgcactagtagagaggcaaagaccactgagmtccaaaattaacaactgctacctaaacatcgataatcccatttgggtatggctaaggaaagaggtcaattcacggaaggcctcagttcccaggcaacaggtcacacagtgcttcacaaaggctggtggctgtaggctgtgctrcacgtgaagcagtgatgctcagcacctcccaggagcagggccaccaaggcttacaacactgtaaaatgtgygtgcagagtttaaatgacagcctggggaagaccaaaaaaaattcctcaagcgtcttctccattgcagtgtattgaatggtgggacagaagaccttctgtttttccaaggcaagattgtaaatatatttaacagttaagcagaagtattttcagatgttaatcatgctaaagtgacagcaagaggttctaccagtcttaatatctttcaggcagctttgctcagccaaaccgcaacagcattctcccagtggtgattaatgctctccatgcaggtgaggttcttaccatagataactcaga

SEQ ID NO: 7561 - DNA, 600 bp, Chicken  19866894201640_4
ggggaagaccaaaaaaaattcctcaagcgtcttctccattgcagtgtattgaatggtgggacagaagaccttctgtttttccaaggcaagattgtaaatatatttaacagttaagcagaagtattttcagatgttaatcatgctaaagtgacagcaagaggttctaccagtcttaatatctttcaggcagctttgctcagccaaaccgcaacagcattctcccagtggtgattaatgctctccatgcaggtgaggttcttaccatagataactcagacagcagttatgcagcatctacaktcagacactggcttatgagtttgcagcgttaagttgatgctaaccatgcrgcacatcttttacacagtcttcacacttccttctcccaggagaaaacattctgtggtgcccgggagtcagcagaggcaggaggtgagggcctgagggggtagtgtgcaacctgcccctacttgcctgggagtaccaaggagttgatgctgtggaacagttcactgacctctgcaacccagctggctgtgccacaagcagcagcctttgaatacagcctgggtatttccattgcagccattctgtcactgg

SEQ ID NO: 7562 - DNA, 575 bp, Chicken  19866894201640_5
gaatggtgggacagaagaccttctgtttttccaaggcaagattgtaaatatatttaacagttaagcagaagtattttcagatgttaatcatgctaaagtgacagcaagaggttctaccagtcttaatatctttcaggcagctttgctcagccaaaccgcaacagcattctcccagtggtgattaatgctctccatgcaggtgaggttcttaccatagataactcagacagcagttatgcagcatctacaktcagacactggcttatgagtttgcagcgttaagttgatgctaaccatgcrgcacatcttttacacagtcttcacacttccttctcccaggagaaaacattctgtggtgcccgggagtcagcagaggcaggaggtgagggcctgagggggtagtgtgcaacctgcccctacttgcctgggagtaccaaggagttgatgctgtggaacagttcactgacctctgcaacccagctggctgtgccacaagcagcagcctttgaatacagcctgggtatttccattgcagccattctgtcactggagcgaagctggagtgaaccaaagca

SEQ ID NO: 7563 - DNA, 600 bp, Chicken  19866894201641_1
ggctgattggcatttggttttcaacttacctcttcaaagtacagtaagtgtacagcttggttcttcttaagcatttatgaacgtagctgaaatggaagtatagatcccatctgtcctcgagcctgtgtgaaaagaaagtgctgatactcacttctgtgctctgaaaaatgctcctgggtcctactggcatacactgctccatttcaaccactgctgttacaaaagccccttggaacaaagacattcgttttatttttgtgtagtacttagagttgtaatgtcctggtctgtgactgggamcctgaggtgcaacgggaatagaaataatactgcaataaaggcacttggaaaattctgctcagctggctttctcttgctggaatttggctttgctcttaatgaggtcatgtggaaggagcatttatttatttattcattatttatgcatatgtacaaaagggtttgggaagtgcattctcagcaccttttacacagctactaattataaaaataacattccacccaagtgcagagcagccactcaaaataagtagttaaaaatacatttggcaaatgaaaagctggaatcacattgmtaca

SEQ ID NO: 7564 - DNA, 600 bp, Chicken  19866894201641_2
ggamcctgaggtgcaacgggaatagaaataatactgcaataaaggcacttggaaaattctgctcagctggctttctcttgctggaatttggctttgctcttaatgaggtcatgtggaaggagcatttatttatttattcattatttatgcatatgtacaaaagggtttgggaagtgcattctcagcaccttttacacagctactaattataaaaataacattccacccaagtgcagagcagccactcaaaataagtagttaaaaatacatttggcaaatgaaaagctggaatcacattgmtacaccagtgagattytgctccatcgcagtcctgcctagggaaaaatgagggcctttgcacggaacccataaagaccacagaaattaatgcttttagactgcaagaagctgataaatttcaggacctgaaagccaaccgtgaactctgtgcaagaatttggaatgtcaggtgacttcgttggcatagcaaagagatgtgtgtgtgagaccttgtatcctgctatcttgggttccaatcaatcagtaaattacatctttttcttccagctatttctgtttctgaagttctaccaaaataaa

SEQ ID NO: 7565 - DNA, 600 bp, Chicken  19866894201641_3
cgggaatagaaataatactgcaataaaggcacttggaaaattctgctcagctggctttctcttgctggaatttggctttgctcttaatgaggtcatgtggaaggagcatttatttatttattcattatttatgcatatgtacaaaagggtttgggaagtgcattctcagcaccttttacacagctactaattataaaaataacattccacccaagtgcagagcagccactcaaaataagtagttaaaaatacatttggcaaatgaaaagctggaatcacattgmtacaccagtgagattytgctccatcgcagtcctgcctagggaaaaatgagggcctttgcacggaacccataaagaccacagaaattaatgcttttagactgcaagaagctgataaatttcaggacctgaaagccaaccgtgaactctgtgcaagaatttggaatgtcaggtgacttcgttggcatagcaaagagatgtgtgtgtgagaccttgtatcctgctatcttgggttccaatcaatcagtaaattacatctttttcttccagctatttctgtttctgaagttctaccaaaataaaaggaccagactcaaac

SEQ ID NO: 7566 - DNA, 600 bp, Chicken  19866894201641_4
atgcttttagactgcaagaagctgataaatttcaggacctgaaagccaaccgtgaactctgtgcaagaatttggaatgtcaggtgacttcgttggcatagcaaagagatgtgtgtgtgagaccttgtatcctgctatcttgggttccaatcaatcagtaaattacatctttttcttccagctatttctgtttctgaagttctaccaaaataaaaggaccagactcaaactggatatgaaatatttagaccattttcccatcaacagctccggatgaaagtaaagatgcagaaaaattatyggttcattattaggttagggtctctcctaagatagaaatgacgctattgcatctcgaagtgttttgttgttgatttttattttagttataagaaaatctaaagattttatggaactagcctgtgctgaaagtttcaaaatcatcttctggggtgatgtttatttgtgaacactgtactctgaaaagatgtgatggcttagatatttgagatgatatattttgctaggcattgcaaattgagcgatgttccttaggagtagtgcttaataaagattagtttagtttagtttagtttaaagt

SEQ ID NO: 7567 - DNA, 600 bp, Chicken  19866894201645_1
ttcagaaatgagtgctcagccttgctgaaggacttggagaagtgctttcttccttaaataagctactctgaatacagcttcttgtttagatcttatattttaactggtctttgacagatttaagtttagtctgggcaccataacagtctatactgtcactgttcgtcagctgagtttaaagtgacttgctttttcgttccctaccctcctccgatcacctgggagttttctatgtttctttcaagagcaagatacgcaacataaattgacagactaatttctttaagtgtataaacctgyacttggtctgactgagatggagttagttttcttcctagtagcctgtgttgtgctgtgctttgaatttatgatcgaaatagtgttgatagcataccagcattttggttaaggctgagcagtacttgcacagtgtgaaggctttctatctttgccyggtaaggacttggagggtacatacctggaattaaactttattatgaattaagtaacactgattaatttaatctaatcaaaatctgtggagagatataacaactcccctaggaaaatcatgttaaaaaaataaattcttatttcacc

SEQ ID NO: 7568 - DNA, 600 bp, Chicken  19866894201645_2
gtcactgttcgtcagctgagtttaaagtgacttgctttttcgttccctaccctcctccgatcacctgggagttttctatgtttctttcaagagcaagatacgcaacataaattgacagactaatttctttaagtgtataaacctgyacttggtctgactgagatggagttagttttcttcctagtagcctgtgttgtgctgtgctttgaatttatgatcgaaatagtgttgatagcataccagcattttggttaaggctgagcagtacttgcacagtgtgaaggctttctatctttgccyggtaaggacttggagggtacatacctggaattaaactttattatgaattaagtaacactgattaatttaatctaatcaaaatctgtggagagatataacaactcccctaggaaaatcatgttaaaaaaataaattcttatttcacctttctctaagtatgtactgctgttttaaattaatttttttctaaatatatgttcattttacaagtggtgtatcagatggagaacaagttcagtatttttatttcagcttaaggaactcagatcaaattattttaattattttattgtgttagtt

SEQ ID NO: 7569 - DNA, 549 bp, Chicken  19866894201646_1
  misc_feature (1)..(98): n is any nucleotide
nnnnnnnnnnnnnnnnnnnnnnnnnnnnnnnnnnnnnnnnnnnnnnnnnnnnnnnnnnnnnnnnnnnnnnnnnnnnnnnnnnnnnnnnnnnnnnnnnntgctgcagcgtgtgcccggcgcctctggtcctgctgctgggcaccgctgggtgcagcccggctccgtcctctctgcacctccctgcagggactgatggccgtgcctgggatccccctgagcctcctctcctgcaggccgagccgccccagctctcccgcaatcccagcccaaccattccccatccctacgttcccacccagkgctgactgaggaggggaggggattttggaggcagggagggacggggctgctggttgcagtgctatgacgctgccgttggtgctgccccgtccttacccggaggtgggcacggggatggggggtgggggggtcaccggagctgcagaaacgactgcgggcggaagtgctgagaaagcaaagctccacctttaatcatttcacacacagagcacgaagcggagagatgagcgcgttcccaaccagttccca

SEQ ID NO: 7570 - DNA, 599 bp, Chicken  19866894201648_1
  misc_feature (1)..(18): n is any nucleotide
nnnnnnnnnnnnnnnnnnggtggggaatggttgggctgggattgcgggagagctggggcggctcggcctgcaggagaggaggctcagggggatcccaggcacggccatcagtccctgcagggaggtgcagagaggacggagccgggctgcacccagcggtgcccagcagcaggaccagaggcgccgggcacacgctgcagccctgcaggttcccccgtagtgccacgggtcaagagctgcagctcctccagctcctcctcactaacggacttcatcaccatcgctgctgccaatgccccyatcgcctcgttttgtgcctggggaaggagatggccacgtactgagcactgggtgtgttgacctggcggcactgggcaggactggtggccctgggaggctattgagggccgcagaaagcactgggctcgtgcggagcactgggtcagttctgggctccccagcgcaaggcagactctcccgtgcaaccgctgcagcagagctgctgtggggggaggttgtgctgcggtcatctgcagaggtcccttccagcccctgtgcttctgtgacaggcggatgtgtgaagggacacagcgagcagg

SEQ ID NO: 7571 - DNA, 600 bp, Chicken  19866894201652_1
gttgcaattatgttttattttctttcctatgtcacttccagaaaaaaagaacaaaaagaacaaacaaacaaacaaacaaacaaaaactgataaaaggtagatgttaatgtccgaatttacagaacattaaatgacattaattacatgatcctttccacacattgtgaagagaaaacttgtgaagagaaaactaatttttaggaaaatcctcctgctttccctgggtaaattaatttgcgttatttcagaaacagcaacaacaactatatgtgtgtataccttatatatatatatatatawgatttccaagaaaaagaaaaaaaaaaaaaaaaaaggaactgtcatctgaatatagacactggcatacagggaataagactgggggttccaaaatgcatgtggagcttaatatgttgaatgatctaaatttggcagccatactagtgttaataagttagttaccatgaaatttcatttggagaagctggatatgtaaaggatgcatactcagcttgtgtagtcaatactttatacaaacttatgatcttttgaaatttacagcctgaaatcagatgaggaagtataaaagtaggtgattga

SEQ ID NO: 7572 - DNA, 600 bp, Chicken  19866894201669_1
ttggtggttatgacaagccaaatcttttgtgtgccaaaaagatatgatagccagaaccagctgaatataaatttaatcatctcattatgtaacgttgttcgttagagattagcaactaagctgaaagtgatgagttttcagaatcaagctccagcactaacaattatttatcccgctattaaatgctcaaccattatttattaattacagaaggaaatctgtgtagtgtgctgatgaaaagggaaaaagaagtgtgctgaggggaagctacagcagtacagtacagtagtgggggaaaaraacgaaggagaataagtaaagtctgatttcacatctactaataggaaagagagtagcatcaggactacaatatctcttcctggtgcctgctgactttgtgcctgccaggggtcttctgctttgcaggaggcagcctgttttcctgtgctaggagaaacatggcaggaacagctgatgtccatgtctaactttggaacaggcatcctgaaagcagccatttttcccctcaaagagcactcactgtacagagccatgtacgaccacatactgtcccccttcaaggactgcacagtcataact

SEQ ID NO: 7573 - DNA, 600 bp, Chicken  19866894201673_1
agcaacagtctgtgatgctggaattcatttatcttccacagttttgtgttgcagtgtgcagtgtgcaacctaacgggatttcatactgaaattttctgtctgattacccagtcgtggtgttttagcccgaatggacaactgtagtctactacaccactctcttagtccccttcctcaaaggaagagtaggtaatatgatgaaaaaacaaaaacaacaacaacaacaacaaaactcacaagttcatataaggatcatttacttaagggaaagagaaaaaacccacacagattaaataaatraataaatatcccaaaaagtaataaacaagcaaagtccatggggaagcaaagagcgagagaaaacagttattcttacttcaaattagcaagagatgtttggccatatctggggatggaaggctacagtgcacgtagcagttgctcaggagaacatatgtttcataaacaagagcctctccctttctcccttcccttcccggttttttattgtggagtatgacaccatatgttatggaatatacctctggtaggtgagggtcagttgccctggtgatgtctcttcccttactgtccttgctt

SEQ ID NO: 7574 - DNA, 600 bp, Chicken  19866894201682_1
atggagctcctgctgccctgcagggatctgactgcatacacacagcccaaaagataagagtttgtgggcaggccaggtgtagagatgacccagacaccagggacgggacccacgttgccccagaacagccctatggctgcgtccctgttggcaatacctacaagaccatgcccaggtgggttgtagagaagccaaaccctctgggttaagacaaggggcagaaaacagctacctgctgccccagcagaactgatcaacacggttatccacctggacccacgtgagaaacacagcccaagraasccaarcaacacctggggatgtccttcaccacctgctgaactcccctgaccttcactggcagctgaagccccatccgagtgatggggccgggcaggtgctgccttgtttttagcaacatcattgaaatttaaattgatttgttatttatccatctgacaacaaagagagaaaaaaagtcataattctgtgcgctggggagattgggttcctgtatcactgtcagctacattaacttacttcctggatctaaattcaattagggcagcattccctagcattaataaatcaataccaatg

SEQ ID NO: 7575 - DNA, 600 bp, Chicken  19866894201682_2
gagctcctgctgccctgcagggatctgactgcatacacacagcccaaaagataagagtttgtgggcaggccaggtgtagagatgacccagacaccagggacgggacccacgttgccccagaacagccctatggctgcgtccctgttggcaatacctacaagaccatgcccaggtgggttgtagagaagccaaaccctctgggttaagacaaggggcagaaaacagctacctgctgccccagcagaactgatcaacacggttatccacctggacccacgtgagaaacacagcccaagraasccaarcaacacctggggatgtccttcaccacctgctgaactcccctgaccttcactggcagctgaagccccatccgagtgatggggccgggcaggtgctgccttgtttttagcaacatcattgaaatttaaattgatttgttatttatccatctgacaacaaagagagaaaaaaagtcataattctgtgcgctggggagattgggttcctgtatcactgtcagctacattaacttacttcctggatctaaattcaattagggcagcattccctagcattaataaatcaataccaatgcca

SEQ ID NO: 7576 - DNA, 600 bp, Chicken  19866894201682_3
cctgctgccctgcagggatctgactgcatacacacagcccaaaagataagagtttgtgggcaggccaggtgtagagatgacccagacaccagggacgggacccacgttgccccagaacagccctatggctgcgtccctgttggcaatacctacaagaccatgcccaggtgggttgtagagaagccaaaccctctgggttaagacaaggggcagaaaacagctacctgctgccccagcagaactgatcaacacggttatccacctggacccacgtgagaaacacagcccaagraasccaarcaacacctggggatgtccttcaccacctgctgaactcccctgaccttcactggcagctgaagccccatccgagtgatggggccgggcaggtgctgccttgtttttagcaacatcattgaaatttaaattgatttgttatttatccatctgacaacaaagagagaaaaaaagtcataattctgtgcgctggggagattgggttcctgtatcactgtcagctacattaacttacttcctggatctaaattcaattagggcagcattccctagcattaataaatcaataccaatgccattttg

SEQ ID NO: 7577 - DNA, 600 bp, Chicken  19866894201688_1
aaggaagagaagcgctgccacaggaacaaatagcaataacactgccgatagcacttaacacttttccagagcttcacaaacattaatttgtgccggtacacacttcggtgcacggttcccattttacccactaggaagagaagtggccattttaatttaacttcactcctctttcatttaacgcagaggcacttgcaggaaaacccggagcccatttcagagctcctgcgagggacagccgtgctccaaagggtgacacgtggaaccgcagcaccagcagtgcctttccaagctatcccycatcccagmacaaaatgtggggcccagaatggtgcaaacagtccaggcacccatggcttcaccacggccctccaggctctccctgcagcagcagcagctcgccgtgcctttgctttccttccctttgcttttgtgccttcccgcatcctgtctccacaccaggttgcctygttaagtgtctgactttaatttctctccaccaagagccgggcctaagcaattacataataatgagctattcatccagagggagggcacggatctaggttaattgggctgacaattgaactcaagcctttc

SEQ ID NO: 7578 - DNA, 600 bp, Chicken  19866894201688_2
aagcgctgccacaggaacaaatagcaataacactgccgatagcacttaacacttttccagagcttcacaaacattaatttgtgccggtacacacttcggtgcacggttcccattttacccactaggaagagaagtggccattttaatttaacttcactcctctttcatttaacgcagaggcacttgcaggaaaacccggagcccatttcagagctcctgcgagggacagccgtgctccaaagggtgacacgtggaaccgcagcaccagcagtgcctttccaagctatcccycatcccagmacaaaatgtggggcccagaatggtgcaaacagtccaggcacccatggcttcaccacggccctccaggctctccctgcagcagcagcagctcgccgtgcctttgctttccttccctttgcttttgtgccttcccgcatcctgtctccacaccaggttgcctygttaagtgtctgactttaatttctctccaccaagagccgggcctaagcaattacataataatgagctattcatccagagggagggcacggatctaggttaattgggctgacaattgaactcaagcctttccggttttgc

SEQ ID NO: 7579 - DNA, 600 bp, Chicken  19866894201688_3
ctttcatttaacgcagaggcacttgcaggaaaacccggagcccatttcagagctcctgcgagggacagccgtgctccaaagggtgacacgtggaaccgcagcaccagcagtgcctttccaagctatcccycatcccagmacaaaatgtggggcccagaatggtgcaaacagtccaggcacccatggcttcaccacggccctccaggctctccctgcagcagcagcagctcgccgtgcctttgctttccttccctttgcttttgtgccttcccgcatcctgtctccacaccaggttgcctygttaagtgtctgactttaatttctctccaccaagagccgggcctaagcaattacataataatgagctattcatccagagggagggcacggatctaggttaattgggctgacaattgaactcaagcctttccggttttgcccagttttccctattttttttttatcattattttttttgtcctcttcttctgcacaatctctgcaaagctctcagcctcgttaattaataaggtaacttccccccgagggctgttttgttctcccctccctcctgccaatgcttgggtagaagaaggagca

SEQ ID NO: 7580 - DNA, 600 bp, Chicken  19866894201688_4
ccagaatggtgcaaacagtccaggcacccatggcttcaccacggccctccaggctctccctgcagcagcagcagctcgccgtgcctttgctttccttccctttgcttttgtgccttcccgcatcctgtctccacaccaggttgcctygttaagtgtctgactttaatttctctccaccaagagccgggcctaagcaattacataataatgagctattcatccagagggagggcacggatctaggttaattgggctgacaattgaactcaagcctttccggttttgcccagttttccctaytttttttttatcattattttttttgtcctcttcttctgcacaatctctgcaaagctctcagcctcgttaattaataaggtaacttccccccgagggctgttttgttctcccctccctcctgccaatgcttgggtagaagaaggagcaagaattagctagctggtaacgaagcagccggcgctgggcaggatagagctggtttgctccgacggctgtgcaggctgcgtggggctgctgctgccctcctgggtttgggggaaacaatgctgcatgtgccacgcaggtgctgcagcaacacag

SEQ ID NO: 7581 - DNA, 600 bp, Chicken  19866894201688_5
cagaatggtgcaaacagtccaggcacccatggcttcaccacggccctccaggctctccctgcagcagcagcagctcgccgtgcctttgctttccttccctttgcttttgtgccttcccgcatcctgtctccacaccaggttgcctygttaagtgtctgactttaatttctctccaccaagagccgggcctaagcaattacataataatgagctattcatccagagggagggcacggatctaggttaattgggctgacaattgaactcaagcctttccggttttgcccagttttccctatyttttttttatcattattttttttgtcctcttcttctgcacaatctctgcaaagctctcagcctcgttaattaataaggtaacttccccccgagggctgttttgttctcccctccctcctgccaatgcttgggtagaagaaggagcaagaattagctagctggtaacgaagcagccggcgctgggcaggatagagctggtttgctccgacggctgtgcaggctgcgtggggctgctgctgccctcctgggtttgggggaaacaatgctgcatgtgccacgcaggtgctgcagcaacacagg

SEQ ID NO: 7582 - DNA, 600 bp, Chicken  19866894201688_6
cctgaatgcttgggcgcttctgaagccctctgagccaccaggaacatgggggtgatgagcaggggtgcagcccagcactgtgactgcagtgacgctcaggcggtccccagcattgtcccaccaaactgggatgctgtggggagggatggagggaatggacctagctgtcctgccatgcaccaggtgccaccaccatgggggcaggtcctgctgctgctctggcagccgcatgttttctctgttttgctttgcagcatcacatgcatgcagtttgccagctccgtcctggctggtacccaygcatgtgccggatggaaacacatccatttccccatcattttcctgcaccggggacgtacagagctggacggggccaaacccttcccctaaccacgctcctgctccaggaccccgagcctcagagaagagccacttatgggatgctgcggcaggttatgggttggcagcatggtggcctcgtgctgaggaaacagccgtgagctccagccctggggagggactgaggggtagaggccctacacagcgtgttccttcagagtgtttgtcagcacagacacaaacaaacattttgtggggcct

SEQ ID NO: 7583 - DNA, 600 bp, Chicken  19866894201694_1
gcatgtccaatctgcattgttcatctcatccagcatctgtggacatattaatttttaacctgttttaaattgagttacaagaccatggtcatttcacagcaaataaccccaaagtgagaggctgttgtgtatgatgcacgattcactccagttgatcaagagctcccacgactgtgccaggaaaagctgttgcacagctgaccttttctgcaataatttggggaatgactcagctgacataatattcccaggatgaaatgcccactgtagcttcatcaggaagagatgagcaccaggagrcagcaggtctggcggccatcaggtgctgccttgatggtgggtgatgcagtggctggtggggcagtgactggggctgcagaagcaagggctaaaatccttcctcttctcctaagctgtaggcaatgcctgagttcttttctactccctgtgatttctacccttcctaaaattttcatgtcattacacaactccaggtgcatgcctttcttctgggtgatctgtttggttccaatagtttaccagaaatttcaactatccaytcagtttaatagagctctcagtastcgcttttgctccatg

SEQ ID NO: 7584 - DNA, 600 bp, Chicken  19866894201694_2
cccactgtagcttcatcaggaagagatgagcaccaggagrcagcaggtctggcggccatcaggtgctgccttgatggtgggtgatgcagtggctggtggggcagtgactggggctgcagaagcaagggctaaaatccttcctcttctcctaagctgtaggcaatgcctgagttcttttctactccctgtgatttctacccttcctaaaattttcatgtcattacacaactccaggtgcatgcctttcttctgggtgatctgtttggttccaatagtttaccagaaatttcaactatccaytcagtttaatagagctctcagtastcgcttttgctccatgctgggggtagccaaaggcatcgtacatagcaagaattacttttttaaagggaacttgcagtacaagatacaaacattaccttaacaagtgaaactgaccgtttacagcatccctgtaaatatacgtgtaatttttcagaaactgtctgcaagggtctttctccagtgtgtaacagaacccctttctgtcccaagagcctaaagctttttgccaactcttccctttctgatgaaatagaaattaacaattgtttgccttcc

SEQ ID NO: 7585 - DNA, 600 bp, Chicken  19866894201694_3
gatgagcaccaggagrcagcaggtctggcggccatcaggtgctgccttgatggtgggtgatgcagtggctggtggggcagtgactggggctgcagaagcaagggctaaaatccttcctcttctcctaagctgtaggcaatgcctgagttcttttctactccctgtgatttctacccttcctaaaattttcatgtcattacacaactccaggtgcatgcctttcttctgggtgatctgtttggttccaatagtttaccagaaatttcaactatccaytcagtttaatagagctctcagtastcgcttttgctccatgctgggggtagccaaaggcatcgtacatagcaagaattacttttttaaagggaacttgcagtacaagatacaaacattaccttaacaagtgaaactgaccgtttacagcatccctgtaaatatacgtgtaatttttcagaaactgtctgcaagggtctttctccagtgtgtaacagaacccctttctgtcccaagagcctaaagctttttgccaactcttccctttctgatgaaatagaaattaacaattgtttgccttccaccattccatgctggtcaaaccac

SEQ ID NO: 7586 - DNA, 600 bp, Chicken  19866894201706_1
aagcactcatgtttcagtcaaactttgcaactccaacagaattaatggtttaatcttttactgtcatcaaaatacagtaaatacagtgacaggacacagacacagataacatatttggaagaatttagattcaatgaatgaaatagtttttctatttttctctcagaatttccacacagaatacctgctgtccagagctatgaaacaggctaacacagacaattttccaactgccatttagtaacactgtgatcatactgaagtaatcattttcacatcatgctgaattccaagatgaaraaaaattaagtttcaaaaggaacatcgtgttttaactagtcactaaataaaatatataaaattagagacaaaaatattttcttctacatctccacttattttcataatcataacttcagataataaaaatcaaactttcatacaaaatagctttagaaatacatacatgatttaatagtggtgtagtactgtaggctatgcgaggacactaaaagactatgagataaaatgaaaagcactttcatgcttaaatagaacaatagtttaagcatttaaaactaaggatagattaaagtggtt

SEQ ID NO: 7587 - DNA, 562 bp, Chicken  19866894201707_1
ttgaaagaactgccaaggttaaaaatcaagggtcagttctcctcccctaatgcacaggcgcagtttgcctttaatagtaacaacttgtttcaatggcacattatagctttaacaacttagagccagcaacttatagccaaaagcaccgtgtaactactaagaaaaaaaccttacagcggcactggctaacagacaccaactatttcacgacttattccatactccaggaaaacatcagatatgctgaacaaaaaggtcaatattacacagtcagattggagcaaagtcaaaagacacgtrtaagaactcttgctccaaccttctctacttyggacarttttccttttcctaacagccacccaaaacgacacactggacttgagagaggagaagagatccttcatcgttaaaaaagaaaagaaactgttagatataaatgaaaccgaaaaaataagatcgtatttatagcagcgaagaaagaaatgtctttgtctgtacccgttcaacatttcagatgcaaaagagcaggggtttgtgctgacatttttctttacagacattt

SEQ ID NO: 7588 - DNA, 531 bp, Chicken  19866894201707_2
gtcagttctcctcccctaatgcacaggcgcagtttgcctttaatagtaacaacttgtttcaatggcacattatagctttaacaacttagagccagcaacttatagccaaaagcaccgtgtaactactaagaaaaaaaccttacagcggcactggctaacagacaccaactatttcacgacttattccatactccaggaaaacatcagatatgctgaacaaaaaggtcaatattacacagtcagattggagcaaagtcaaaagacacgtrtaagaactcttgctccaaccttctctacttyggacarttttccttttcctaacagccacccaaaacgacacactggacttgagagaggagaagagatccttcatcgttaaaaaagaaaagaaactgttagatataaatgaaaccgaaaaaataagatcgtatttatagcagcgaagaaagaaatgtctttgtctgtacccgttcaacatttcagatgcaaaagagcaggggtttgtgctgacatttttctttacagacattt

SEQ ID NO: 7589 - DNA, 525 bp, Chicken  19866894201707_3
tctcctcccctaatgcacaggcgcagtttgcctttaatagtaacaacttgtttcaatggcacattatagctttaacaacttagagccagcaacttatagccaaaagcaccgtgtaactactaagaaaaaaaccttacagcggcactggctaacagacaccaactatttcacgacttattccatactccaggaaaacatcagatatgctgaacaaaaaggtcaatattacacagtcagattggagcaaagtcaaaagacacgtrtaagaactcttgctccaaccttctctacttyggacarttttccttttcctaacagccacccaaaacgacacactggacttgagagaggagaagagatccttcatcgttaaaaaagaaaagaaactgttagatataaatgaaaccgaaaaaataagatcgtatttatagcagcgaagaaagaaatgtctttgtctgtacccgttcaacatttcagatgcaaaagagcaggggtttgtgctgacatttttctttacagacattt

SEQ ID NO: 7590 - DNA, 599 bp, Chicken  19866894201717_1
  misc_feature (1)..(117): n is any nucleotide
nnnnnnnnnnnnnnnnnnnnnnnnnnnnnnnnnnnnnnnnnnnnnnnnnnnnnnnnnnnnnnnnnnnnnnnnnnnnnnnnnnnnnnnnnnnnnnnnnnnnnnnnnnnnnnnnnnnnnaaaagtccctccacagctttcctgtaggccccttcagatactggaaggccactataaggtgtccttggagccttttccaggctgaaaagccccagatctctcagcctgtcctcacaggggagctgctccagccctctgataatctttgtggccctcctctggacctgctccaacagtttgatrttcttcttgtgttggggaccccagaaatagacacagtactccaggtggggtctcaygaaagcagagcaggggggcagaatcacctcccctcaccctgctgwtcacaattctcttgatgcaacccaggacacagttgttcttctgggctgcaagtgctcattatcagctcatgttaaatctttgatcaaccaacaccccaaatccttctccttagggctgttctcaagccattctctacccaatctacgtctgtgtctgtgcttgagactgcaaagcccactgaagacaataattttttt

SEQ ID NO: 7591 - DNA, 599 bp, Chicken  19866894201717_2
  misc_feature (1)..(61): n is any nucleotide
nnnnnnnnnnnnnnnnnnnnnnnnnnnnnnnnnnnnnnnnnnnnnnnnnnnnnnnnnnnnnaaaagtccctccacagctttcctgtaggccccttcagatactggaaggccactataaggtgtccttggagccttttccaggctgaaaagccccagatctctcagcctgtcctcacaggggagctgctccagccctctgataatctttgtggccctcctctggacctgctccaacagtttgatrttcttcttgtgttggggaccccagaaatagacacagtactccaggtggggtctcaygaaagcagagcaggggggcagaatcacctcccctcaccctgctgwtcacaattctcttgatgcaacccaggacacagttgttcttctgggctgcaagtgctcattatcagctcatgttaaatctttgatcaaccaacaccccaaatccttctccttagggctgttctcaagccattctctacccaatctacgtctgtgtctgtgcttgagactgcaaagcccactgaagacaataatttttttggtactgacccttgtgtctttggataattttcctgcgggtgacacagtcaacatca

SEQ ID NO: 7592 - DNA, 599 bp, Chicken  19866894201717_3
  misc_feature (1)..(16): n is any nucleotide
nnnnnnnnnnnnnnnnaaaagtccctccacagctttcctgtaggccccttcagatactggaaggccactataaggtgtccttggagccttttccaggctgaaaagccccagatctctcagcctgtcctcacaggggagctgctccagccctctgataatctttgtggccctcctctggacctgctccaacagtttgatrttcttcttgtgttggggaccccagaaatagacacagtactccaggtggggtctcaygaaagcagagcaggggggcagaatcacctcccctcaccctgctgwtcacaattctcttgatgcaacccaggacacagttgttcttctgggctgcaagtgctcattatcagctcatgttaaatctttgatcaaccaacaccccaaatccttctccttagggctgttctcaagccattctctacccaatctacgtctgtgtctgtgcttgagactgcaaagcccactgaagacaataatttttttggtactgacccttgtgtctttggataattttcctgcgggtgacacagtcaacatcagaatttttttgcagagaatggaaaggtatgatttctacagtattc

SEQ ID NO: 7593 - DNA, 600 bp, Chicken  19866894201718_1
ctgatttcttcgggctttcaatcaaggtcttcactgctccaacagtcactccagctgttgagcaatgtgaacaaatatttactacacaccagaatgaaacaagtgaagtcaatctctagccaatatttgagtgaggctctgtatttgtttttatatctcttgaaagagctgtttacagcagacagacaaaacccacccttctcttgaggaaggcagtagcagatttcaagctacctgtcattaagaattaggaagatttaagacaggaaaaaatacctcacccaaagaaatgggctaagygttgtgtttttagttcccaaaagcttgcatcaatctctcttttagtttggctcatatggaaactgcctgttctccaacttccagcagcttaaagtactaaaaggaaaacagccagaagtaccaaattttcaatgaaaaacatgtgaagccatcaagtttaacactgtttccaacctcagctataaatcagctcagtctgcaaaaaaaattatactcttcagcaaaacctaatcgcagccttaagtctgcagtgaaacataaaacagggcaaatttcacctgattttgttacagtacaata

SEQ ID NO: 7594 - DNA, 600 bp, Chicken  19866894201718_2
tcttttagtttggctcatatggaaactgcctgttctccaacttccagcagcttaaagtactaaaaggaaaacagccagaagtaccaaattttcaatgaaaaacatgtgaagccatcaagtttaacactgtttccaacctcagctataaatcagctcagtctgcaaaaaaaattatactcttcagcaaaacctaatcgcagccttaagtctgcagtgaaacataaaacagggcaaatttcacctgattttgttacagtacaatagcataccctaatgtaaggtttcatttatattttcctkctacttcctataaaaaaaaaaaaccacaaaatttgttaaacaatactctgcctgaatgatcaaagttgtaaataaagcatagatgctgacagaactgtgataaacagtatatttactttacaaaacaattctgttttatggaggtatacttcttctccttttcgtttgcacaattaaaacatttcacttgataggaatcatggtggagatactccactactacaattcttgtttatgtttttaaaactgacagcatttaaatcttgcaaaggtgatgtctatttatgaaaagaacttctt

SEQ ID NO: 7595 - DNA, 600 bp, Chicken  19866894201718_3
gctcatatggaaactgcctgttctccaacttccagcagcttaaagtactaaaaggaaaacagccagaagtaccaaattttcaatgaaaaacatgtgaagccatcaagtttaacactgtttccaacctcagctataaatcagctcagtctgcaaaaaaaattatactcttcagcaaaacctaatcgcagccttaagtctgcagtgaaacataaaacagggcaaatttcacctgattttgttacagtacaatagcataccctaatgtaaggtttcatttatattttcctkctacttcctatkaaaaaaaaaaaccacaaaatttgttaaacaatactctgcctgaatgatcaaagttgtaaataaagcatagatgctgacagaactgtgataaacagtatatttactttacaaaacaattctgttttatggaggtatacttcttctccttttcgtttgcacaattaaaacatttcacttgataggaatcatggtggagatactccactactacaattcttgtttatgtttttaaaactgacagcatttaaatcttgcaaaggtgatgtctatttatgaaaagaacttcttccacagtgagtc

SEQ ID NO: 7596 - DNA, 600 bp, Chicken  19866894201724_1
acccaaaaaaacaactgtgatatatttcttgagcttcaaagaatggaggagccctgtggaaaaataataattggaaataatagtaaacaaatgtattgattacccaaatttccctactgaatgaactgttggatagtttctgtctatattgactccctaatagctagaaatgaattcagtgtcagccaggctagttaggtaattgaggtcagaaaatgtatacacaagtggtaaagatcaataacttgcatacagcatacagatagtaaagtttatacctacaatggaaacataaatacrtataaattcgatgcctatatgtatactacatatatttacataagtgtacatatatatgtgtaactgcataaacattcatttatatacatctaaatattccacccaacccaatgtatcatawagaaarytgccataaaataatttttgcttctaaaagaataatattttgtaagatatgtaaactacagtcaagtctgtattgaactactcaagaattatttggttaaagggtaaatacaccttgtaactcataatgaaaatcttaaaggtaggggtggagattaacactgcaggctgtct

SEQ ID NO: 7597 - DNA, 600 bp, Chicken  19866894201724_2
tgaactgttggatagtttctgtctatattgactccctaatagctagaaatgaattcagtgtcagccaggctagttaggtaattgaggtcagaaaatgtatacacaagtggtaaagatcaataacttgcatacagcatacagatagtaaagtttatacctacaatggaaacataaatacrtataaattcgatgcctatatgtatactacatatatttacataagtgtacatatatatgtgtaactgcataaacattcatttatatacatctaaatattccacccaacccaatgtatcatawagaaarytgccataaaataatttttgcttctaaaagaataatattttgtaagatatgtaaactacagtcaagtctgtattgaactactcaagaattatttggttaaagggtaaatacaccttgtaactcataatgaaaatcttaaaggtaggggtggagattaacactgcaggctgtctacagaatattaataaaattcaatatattttctaaaaggtgtaatttatattttgtggaaatgagtctcttttctaataaagttcttctgtccttcattctgttcatataatttttctataa

SEQ ID NO: 7598 - DNA, 600 bp, Chicken  19866894201724_3
gttggatagtttctgtctatattgactccctaatagctagaaatgaattcagtgtcagccaggctagttaggtaattgaggtcagaaaatgtatacacaagtggtaaagatcaataacttgcatacagcatacagatagtaaagtttatacctacaatggaaacataaatacrtataaattcgatgcctatatgtatactacatatatttacataagtgtacatatatatgtgtaactgcataaacattcatttatatacatctaaatattccacccaacccaatgtatcatawagaaarytgccataaaataatttttgcttctaaaagaataatattttgtaagatatgtaaactacagtcaagtctgtattgaactactcaagaattatttggttaaagggtaaatacaccttgtaactcataatgaaaatcttaaaggtaggggtggagattaacactgcaggctgtctacagaatattaataaaattcaatatattttctaaaaggtgtaatttatattttgtggaaatgagtctcttttctaataaagttcttctgtccttcattctgttcatataatttttctataaatcatc

SEQ ID NO: 7599 - DNA, 600 bp, Chicken  19866894201724_4
ttggatagtttctgtctatattgactccctaatagctagaaatgaattcagtgtcagccaggctagttaggtaattgaggtcagaaaatgtatacacaagtggtaaagatcaataacttgcatacagcatacagatagtaaagtttatacctacaatggaaacataaatacrtataaattcgatgcctatatgtatactacatatatttacataagtgtacatatatatgtgtaactgcataaacattcatttatatacatctaaatattccacccaacccaatgtatcatawagaaarytgccataaaataatttttgcttctaaaagaataatattttgtaagatatgtaaactacagtcaagtctgtattgaactactcaagaattatttggttaaagggtaaatacaccttgtaactcataatgaaaatcttaaaggtaggggtggagattaacactgcaggctgtctacagaatattaataaaattcaatatattttctaaaaggtgtaatttatattttgtggaaatgagtctcttttctaataaagttcttctgtccttcattctgttcatataatttttctataaatcatcc

SEQ ID NO: 7600 - DNA, 600 bp, Chicken  19866894201724_5
ctaaaagaataatattttgtaagatatgtaaactacagtcaagtctgtattgaactactcaagaattatttggttaaagggtaaatacaccttgtaactcataatgaaaatcttaaaggtaggggtggagattaacactgcaggctgtctacagaatattaataaaattcaatatattttctaaaaggtgtaatttatattttgtggaaatgagtctcttttctaataaagttcttctgtccttcattctgttcatataatttttctataaatcatcctgtaggatttttttctaaatawtcatctcagatagaacctatttaaataagccctcttagcaagatatttctgaattaaaattacaccatgagcaatactttatccaatatgcttcctcctatagaatttctttgtgactaaaacaatatkttgtcgaattacattatgttaaaataaatgatttgaagtgatgctcccagtatataaatactgtgtaaaaagatcaacaaatkatctttaaccattttaatttaaccattccctgaacttgtgagaaagggctgattttctctccacatctatatgtattgtgaaaaaacc

SEQ ID NO: 7601 - DNA, 477 bp, Chicken  19866894201724_6
gattaacactgcaggctgtctacagaatattaataaaattcaatatattttctaaaaggtgtaatttatattttgtggaaatgagtctcttttctaataaagttcttctgtccttcattctgttcatataatttttctataaatcatcctgtaggatttttttctaaatawtcatctcagatagaacctatttaaataagccctcttagcaagatatttctgaattaaaattacaccatgagcaatactttatccaatatgcttcctcctatagaatttctttgtgactaaaacaatatkttgtcgaattacattatgttaaaataaatgatttgaagtgatgctcccagtatataaatactgtgtaaaaagatcaacaaatkatctttaaccattttaatttaaccattccctgaacttgtgagaaagggctgattttctctccacatctatatgtattgtgaaaaaacctaaggg

SEQ ID NO: 7602 - DNA, 394 bp, Chicken  19866894201724_7
agtctcttttctaataaagttcttctgtccttcattctgttcatataatttttctataaatcatcctgtaggatttttttctaaatawtcatctcagatagaacctatttaaataagccctcttagcaagatatttctgaattaaaattacaccatgagcaatactttatccaatatgcttcctcctatagaatttctttgtgactaaaacaatatkttgtcgaattacattatgttaaaataaatgatttgaagtgatgctcccagtatataaatactgtgtaaaaagatcaacaaatkatctttaaccattttaatttaaccattccctgaacttgtgagaaagggctgattttctctccacatctatatgtattgtgaaaaaacctaaggg

SEQ ID NO: 7603 - DNA, 600 bp, Chicken  19866894201729_1
tacataaatcaggtgaggaagaaatgaaactttagctgctaattcaatttgacagagcacaaattacaccattcagtgtgccaatgtaccacccaatattggacccaaagatctcccttatatacacatcggtcaaagagaagactgtcatctcaccagctgaatcccaaaagattgtccaacacagacacaaggcttcttggtgctgtgcaacaaaagttgaatacttccagtgtgggtgacaatactatgaccacagtttaagaatttaacaaaaatatcattgctttgaagtagttwctgtatctctaaaagcctctggaacacatgttgttctaagctttcttttgatgcaagatcatttggaacagtatttcaggataccacaaaaggtcaaacatgttcttagtctctacagttgaagtgagaatacctaaatatgcaggagaacacagctcaggcactatgaagtccttggagctctttgcttattgtgagtaaattgaagaatgacttcaacaaagccacgaaatttctggggccaagtttctctgttaagggaacacattaaccaggaaaaaaagtcacaggaattaggac

SEQ ID NO: 7604 - DNA, 599 bp, Chicken  19866894201731_1
  misc_feature (1)..(37): n is any nucleotide
nnnnnnnnnnnnnnnnnnnnnnnnnnnnnnnnnnnnntttagcatggaaaagttaacacaaaacaggctgattattataaatctcaacaatgtagagaagagcagtctgttaaaatgtagactacagatagtacttaactctgactttcaatgagaagcttgagccaaagcgatattccattaagtcatagttacagtgtaatttatccatcactgtattaatttttacattaccaattcctaactgcttcagcattccttcactctttacatggactaagagtctctgtggcactgtgygacaccatgttgcacgyattttttatcaatagtatctcttgttttctaaagtatttgctgtcctctctatgcagagggcacacatttttcagttcccagaaaatagaacgcagagatttttgggtctggatctttgtgtaactgaactacttcttcatctattagagttgagtaggttcccagctgaaagggatagctaaaattatatttacagctatttttcagaccatttagtttgatttttgtcattggctatctgaaaggagttgtcgaaacaaagaccacctcaacctgtgttg

SEQ ID NO: 7605 - DNA, 599 bp, Chicken  19866894201731_2
  misc_feature (1)..(20): n is any nucleotide
nnnnnnnnnnnnnnnnnnnntttagcatggaaaagttaacacaaaacaggctgattattataaatctcaacaatgtagagaagagcagtctgttaaaatgtagactacagatagtacttaactctgactttcaatgagaagcttgagccaaagcgatattccattaagtcatagttacagtgtaatttatccatcactgtattaatttttacattaccaattcctaactgcttcagcattccttcactctttacatggactaagagtctctgtggcactgtgygacaccatgttgcacgyattttttatcaatagtatctcttgttttctaaagtatttgctgtcctctctatgcagagggcacacatttttcagttcccagaaaatagaacgcagagatttttgggtctggatctttgtgtaactgaactacttcttcatctattagagttgagtaggttcccagctgaaagggatagctaaaattatatttacagctatttttcagaccatttagtttgatttttgtcattggctatctgaaaggagttgtcgaaacaaagaccacctcaacctgtgttgtcagctaggtggctttc

SEQ ID NO: 7606 - DNA, 600 bp, Chicken  19866894201733_1
gttcctcaggggttgatgttggggcctgtccagtatctctattgatgacctggatgagaggacagagtgcaccctcagtaaggttgcagatgacaccaatttggggggggaagtgttgatctgcctgatggtaggaagactctgcagagggacctatttaggttggattgatggcctgaggccagtgggattaagttcagcaagacaaaatgctgggtcctgcactttggccacaacaaccccaggcaacactacaggcttggggcagagtggttggaagactgtgtagaggaaacagasctggtggtattgtttgatgcttggctgaatgtgagccagcagtgtgctcaggtggccaagaaggccaatggcgtcctggcttgtattggaaatagcattgccagcaggagcagggaagtgatcatccctctgtacttggcttcagtgaggccacgcctcgagtactgtgttcagttttgggcccctcactacaagaaaggcattcaggcactggagcatgttcagagaagggcaacaaagctgtggggtctggagcacatgtcttacggggagcagctgagggaactgggattgtttagt

SEQ ID NO: 7607 - DNA, 600 bp, Chicken  19866894201740_1
gcagcaagatatgacgttatccgtcctctgctagcaacacgctctttgctaggactccagccttatcagctcgcacaagcagactggaaccatcagcacaacacacacaccaggaaagcaagccctgcaagaccacaggtggcagcctgctgaagacctgcacaaagtaggaaaacagaacggggaggtgcatagcggttgagcttccaacagcacaatggcagccagcagcagccaagccctcctgcaggcaccatgtgcccagcctgcagctcccaccccacagcacaaagggggaaytgcacagccccaagcaggatttggcccatacacagcgatatgagtcacgcrgtgcagggatgggaaccatttgtaactgctgctaaattaattgccattgttgttatttgatttgctaaaacctccagggctggattttattttagaaaaatacaaacacatcagattaatcaacttaaaataaatcagtttgatttatttatctctgctatatctactcctctttaggcttggcaagtggcwgcattctttccatcccgtgaaagaagaagagcaggggttttggttcatcrttgcttt

SEQ ID NO: 7608 - DNA, 600 bp, Chicken  19866894201740_2
ggactccagccttatcagctcgcacaagcagactggaaccatcagcacaacacacacaccaggaaagcaagccctgcaagaccacaggtggcagcctgctgaagacctgcacaaagtaggaaaacagaacggggaggtgcatagcggttgagcttccaacagcacaatggcagccagcagcagccaagccctcctgcaggcaccatgtgcccagcctgcagctcccaccccacagcacaaagggggaaytgcacagccccaagcaggatttggcccatacacagcgatatgagtcacgcrgtgcagggatgggaaccatttgtaactgctgctaaattaattgccattgttgttatttgatttgctaaaacctccagggctggattttattttagaaaaatacaaacacatcagattaatcaacttaaaataaatcagtttgatttatttatctctgctatatctactcctctttaggcttggcaagtggcwgcattctttccatcccgtgaaagaagaagagcaggggttttggttcatcrttgctttaaaggaacctctgcaaagctcagcgagcacaaaccacagcacaggtatgct

SEQ ID NO: 7609 - DNA, 600 bp, Chicken  19866894201740_3
cctgcaggcaccatgtgcccagcctgcagctcccaccccacagcacaaagggggaaytgcacagccccaagcaggatttggcccatacacagcgatatgagtcacgcrgtgcagggatgggaaccatttgtaactgctgctaaattaattgccattgttgttatttgatttgctaaaacctccagggctggattttattttagaaaaatacaaacacatcagattaatcaacttaaaataaatcagtttgatttatttatctctgctatatctactcctctttaggcttggcaagtggcwgcattctttccatcccgtgaaagaagaagagcaggggttttggttcatcrttgctttaaaggaacctctgcaaagctcagcgagcacaaaccacagcacaggtatgctgcagaggaggacaagtgcagggctgggggctgttctcatttcatctcatgcaggcaccggccctgcgcccaggtgctcaggagtgaagtggagagatgggtttggatctcctctagcaagcctacaccatccctggctcctccacaagcagccagcatccttccccctctgactccctgccctcagctacag

SEQ ID NO: 7610 - DNA, 600 bp, Chicken  19866894201740_4
ggggaaytgcacagccccaagcaggatttggcccatacacagcgatatgagtcacgcrgtgcagggatgggaaccatttgtaactgctgctaaattaattgccattgttgttatttgatttgctaaaacctccagggctggattttattttagaaaaatacaaacacatcagattaatcaacttaaaataaatcagtttgatttatttatctctgctatatctactcctctttaggcttggcaagtggcwgcattctttccatcccgtgaaagaagaagagcaggggttttggttcatcrttgctttaaaggaacctctgcaaagctcagcgagcacaaaccacagcacaggtatgctgcagaggaggacaagtgcagggctgggggctgttctcatttcatctcatgcaggcaccggccctgcgcccaggtgctcaggagtgaagtggagagatgggtttggatctcctctagcaagcctacaccatccctggctcctccacaagcagccagcatccttccccctctgactccctgccctcagctacagcaatgcagcaatgcctctgctagcgcactccaaagaaaagctctcacata

SEQ ID NO: 7611 - DNA, 600 bp, Chicken  19866894201740_5
caaggagagaaatgttgatttccatgtatcttgtgctattactcacctctattaatttttctaccagcacaacgttagtcatgatgatttcctgttattcagaccggagcccagccggcacaacgtgccaagcaaggagagcgagcggggacctctcctcagctggctccaataagcagcaccaaagtcattcacctgcctaccgtaaggagaaaccaggatgctcaagaaggctctacgcccttccaagcacaacaagaccagagcctcatggaaagagtgcagcccatggacagcagygcaaactcagcctgagcgtttytgggtatctcacaagcagggtagcaggtttaaaggccagaaggaacattctgatgacatcgcacaaagtaaggaaggaaagcaagtcttggaagatgggctttttgctagacatgatacacaatggagaactggcttgacaaatggagagattcatactttctgtttaaatctcatcagcctgcgcaaagaggaacaactttttaactccaattcccaggctccatcctctctttcacagctcctagaaaaactctaagactacataataaacgtcag

SEQ ID NO: 7612 - DNA, 600 bp, Chicken  19866894201740_6
catgtatcttgtgctattactcacctctattaatttttctaccagcacaacgttagtcatgatgatttcctgttattcagaccggagcccagccggcacaacgtgccaagcaaggagagcgagcggggacctctcctcagctggctccaataagcagcaccaaagtcattcacctgcctaccgtaaggagaaaccaggatgctcaagaaggctctacgcccttccaagcacaacaagaccagagcctcatggaaagagtgcagcccatggacagcagygcaaactcagcctgagcgtttytgggtatctcacaagcagggtagcaggtttaaaggccagaaggaacattctgatgacatcgcacaaagtaaggaaggaaagcaagtcttggaagatgggctttttgctagacatgatacacaatggagaactggcttgacaaatggagagattcatactttctgtttaaatctcatcagcctgcgcaaagaggaacaactttttaactccaattcccaggctccatcctctctttcacagctcctagaaaaactctaagactacataataaacgtcagagctgataagaaaagtcttatc

SEQ ID NO: 7613 - DNA, 600 bp, Chicken  19866894201747_1
atttcttaaacactacttctggaaaggtcaagaacgatactggactcaactttcaactttatcctcaatctgttaaagtcagtaaaactactctcctgtgttgttccgtttctttgtttttttattgagtattttattcttacactaatcctcatgtgttagagtttaaccaatgttttcctatatgacaacatatcaaatgatttactgaagtccagttagaataaacatattgtcttttcttcatatataaaaacaattaactgaccaaagaaaaatttccactgaggataatgtgayctaycttcagtgaattcatttctatttacttccatgtatataattatttcttcttttaaagtatgttctaaatcctgcataatgtgacagtcaaattaatggctctacagctgtctaaatccctttctttcccattcttatatcattatcattattttttattactattggtatataatttttcaaatatatttcatttgcacaacagcagattgttgctttcagtggrtatttagtatattacccaattgcatttgggtattgcaatttctttttccagttcttgaaggtgcagtgcaa

SEQ ID NO: 7614 - DNA, 600 bp, Chicken  19866894201747_2
cttaaacactacttctggaaaggtcaagaacgatactggactcaactttcaactttatcctcaatctgttaaagtcagtaaaactactctcctgtgttgttccgtttctttgtttttttattgagtattttattcttacactaatcctcatgtgttagagtttaaccaatgttttcctatatgacaacatatcaaatgatttactgaagtccagttagaataaacatattgtcttttcttcatatataaaaacaattaactgaccaaagaaaaatttccactgaggataatgtgayctaycttcagtgaattcatttctatttacttccatgtatataattatttcttcttttaaagtatgttctaaatcctgcataatgtgacagtcaaattaatggctctacagctgtctaaatccctttctttcccattcttatatcattatcattattttttattactattggtatataatttttcaaatatatttcatttgcacaacagcagattgttgctttcagtggrtatttagtatattacccaattgcatttgggtattgcaatttctttttccagttcttgaaggtgcagtgcaaatca

SEQ ID NO: 7615 - DNA, 600 bp, Chicken  19866894201747_3
atattgtcttttcttcatatataaaaacaattaactgaccaaagaaaaatttccactgaggataatgtgayctaycttcagtgaattcatttctatttacttccatgtatataattatttcttcttttaaagtatgttctaaatcctgcataatgtgacagtcaaattaatggctctacagctgtctaaatccctttctttcccattcttatatcattatcattattttttattactattggtatataatttttcaaatatatttcatttgcacaacagcagattgttgctttcagtggrtatttagtatattacccaattgcatttgggtattgcaatttctttttccagttcttgaaggtgcagtgcaaatcacactcccatagactttctgttgcctcataaaattagtagataatcataggttctttagtctatgattacataaattgttatatttgaatgactggagaaccggcctgatgtgttgggtgcaatctagctgtggcagtacttctagctgccaagtcttaatgcacaccctggacggtgtcccatctgtatgtccagagaaaatgtgagtgtgaattatttctcttg

SEQ ID NO: 7616 - DNA, 600 bp, Chicken  19866894201752_1
gggttggaattcaggagggagaacaaactgaaaagcaagagcgtgcctgcacttccctgctaaaaaatccctggtgtagaggggagagggtgttgtctccacagagtacaaagctgatgagcatctgaaaactttccacttggcaggactggatccggagctgtctggtggggtgggatgaaaactcagatggctgctgtctgtcctgtggctgaaaggcttccctccccagtgcagtgaaggagcatggagcttctcgttcagccctgttgcagaaacttgtcttcaggaaattcctcrttgccgtaatgatggctttggatgggagcttctcctggaaagctcagatgtatgcattgacttgaagtgggggctttctggagtggcagcttgcaaagctgtcttgttctgcaggtgtgcggtcctctaaggaaaacatttcgtgcagtaacatgggggatgaggccaactttttggggaattcgtttgtatctggcttggatctgaagcaggtctccattccaacacacgtggtggaaatcttctggcttttacaaaggtgttgaactgtttctaggtcactttgacctcccagtagcc

SEQ ID NO: 7617 - DNA, 600 bp, Chicken  19866894201752_2
gtaatgatggctttggatgggagcttctcctggaaagctcagatgtatgcattgacttgaagtgggggctttctggagtggcagcttgcaaagctgtcttgttctgcaggtgtgcggtcctctaaggaaaacatttcgtgcagtaacatgggggatgaggccaactttttggggaattcgtttgtatctggcttggatctgaagcaggtctccattccaacacacgtggtggaaatcttctggcttttacaaaggtgttgaactgtttctaggtcactttgacctcccagtagcccccayggaaccattgcagccaacgaaaaatgggggctgggaggggggaagtgacttttgttgttactgtaagaatccaccgaacaacagatgtgtctgagcagtgtttttgtgcgtacgttaacctgtctttgtggcacatccattgtggcgctgaccaccaacatggtcagtgagcacggtgggatgggttggggctggacttgggggtctgrgaggtcttttctaaccttaatgactctatgattctatttagagacatggtctgtgggcacggtgggatgggtgggagttgggcttggggat

SEQ ID NO: 7618 - DNA, 600 bp, Chicken  19866894201752_3
ctccattccaacacacgtggtggaaatcttctggcttttacaaaggtgttgaactgtttctaggtcactttgacctcccagtagcccccayggaaccattgcagccaacgaaaaatgggggctgggaggggggaagtgacttttgttgttactgtaagaatccaccgaacaacagatgtgtctgagcagtgtttttgtgcgtacgttaacctgtctttgtggcacatccattgtggcgctgaccaccaacatggtcagtgagcacggtgggatgggttggggctggacttgggggtctgrgaggtcttttctaaccttaatgactctatgattctatttagagacatggtctgtgggcacggtgggatgggtgggagttgggcttggggatctgagaggtcttttccaaccttaaggattccgggattctcatatctcctgatgatcttttcttggcagtttaaactaactcttttaaacctccttcctcccatggataacaatggggggatcagcagtgctaaggcactgatgaggaatttgggtagtccgtgtagaacgtgacccaaacttgactattgtagtttctttaatgaagca

SEQ ID NO: 7619 - DNA, 599 bp, Chicken  19866894201754_1
  misc_feature (1)..(214): n is any nucleotide
nnnnnnnnnnnnnnnnnnnnnnnnnnnnnnnnnnnnnnnnnnnnnnnnnnnnnnnnnnnnnnnnnnnnnnnnnnnnnnnnnnnnnnnnnnnnnnnnnnnnnnnnnnnnnnnnnnnnnnnnnnnnnnnnnnnnnnnnnnnnnnnnnnnnnnnnnnnnnnnnnnnnnnnnnnnnnnnnnnnnnnnnnnnnnnnnnnnnnnnnnnnnnnnnnnnnnnttttggtcctctaaaatgctggattttcagagaaacaaagcatgtttgtgacagtaaataaataaataaaagaagaaaaagtcatrcatagtaactgatcatttcttcagaatatttggaagaatgttatttgttggttaacaaatttgaggaataatattggtattaactgaagaatagataactgcatgcagttgatttagtgataaaaagctgaaagtagcctattgcatatattactaatgtctcaaagatgcrttgcttttaattaaaggaagaattgaaataagaaaatggtccacatgactttctgctagtgcttattacaggagttacttgaacttccttgccacttgggaggaaaacagagctttttggtttgttt

SEQ ID NO: 7620 - DNA, 599 bp, Chicken  19866894201754_2
  misc_feature (1)..(42): n is any nucleotide
nnnnnnnnnnnnnnnnnnnnnnnnnnnnnnnnnnnnnnnnnnttttggtcctctaaaatgctggattttcagagaaacaaagcatgtttgtgacagtaaataaataaataaaagaagaaaaagtcatrcatagtaactgatcatttcttcagaatatttggaagaatgttatttgttggttaacaaatttgaggaataatattggtattaactgaagaatagataactgcatgcagttgatttagtgataaaaagctgaaagtagcctattgcatatattactaatgtctcaaagatgcrttgcttttaattaaaggaagaattgaaataagaaaatggtccacatgactttctgctagtgcttattacaggagttacttgaacttccttgccacttgggaggaaaacagagctttttggtttgtttgttttttccaagctgcagataggaatgycctacatgctaaagttatctcaagttctgtttgcttcagtagagtagcagtttgtcattatttcatctttgcaatattttatgttccattttgaaaatacttttttttttttttgtctcttgcttcttyctaataaattattta

SEQ ID NO: 7621 - DNA, 600 bp, Chicken  19866894201754_3
atttggaagaatgttatttgttggttaacaaatttgaggaataatattggtattaactgaagaatagataactgcatgcagttgatttagtgataaaaagctgaaagtagcctattgcatatattactaatgtctcaaagatgcrttgcttttaattaaaggaagaattgaaataagaaaatggtccacatgactttctgctagtgcttattacaggagttacttgaacttccttgccacttgggaggaaaacagagctttttggtttgtttgttttttccaagctgcagataggaatgycctacatgctaaagttatctcaagttctgtttgcttcagtagagtagcagtttgtcattatttcatctttgcaatattttatgttccattttgaaaatacttttttttttttttgtctcttgcttcttyctaataaattatttactgtgcttcattctgttgctggcagggaagaaactatagcaaaagaagtgtatatattccttcccacatcttagggtatgtatgtatgcagacacatacatgcatgcacagaaacattctgaaacaattgaaatgacagacttgttattctgaact

SEQ ID NO: 7622 - DNA, 600 bp, Chicken  19866894201754_4
atgtctcaaagatgcrttgcttttaattaaaggaagaattgaaataagaaaatggtccacatgactttctgctagtgcttattacaggagttacttgaacttccttgccacttgggaggaaaacagagctttttggtttgtttgttttttccaagctgcagataggaatgycctacatgctaaagttatctcaagttctgtttgcttcagtagagtagcagtttgtcattatttcatctttgcaatattttatgttccattttgaaaatacttttttttttttttgtctcttgcttcttyctaataaattatttactgtgcttcattctgttgctggcagggaagaaactatagcaaaagaagtgtatatattccttcccacatcttagggtatgtatgtatgcagacacatacatgcatgcacagaaacattctgaaacaattgaaatgacagacttgttattctgaactgtattcctttatatgtatgtgctcacaccctattactcaattggcaagacagttcttttactgttcctctctactgtctaagtatttttttgagctgctttgagcaggtcatttgacttccattcctat

SEQ ID NO: 7623 - DNA, 600 bp, Chicken  19866894201754_5
gcacagaaacattctgaaacaattgaaatgacagacttgttattctgaactgtattcctttatatgtatgtgctcacaccctattactcaattggcaagacagttcttttactgttcctctctactgtctaagtatttttttgagctgctttgagcaggtcatttgacttccattcctatgctttgcctctgatgaattttatatatggtacgaatctctatgtctgcttttggttttcttgtcatatatttacttgtttctaatattttccttagtagtgactatagatggtgagtaamgagttcttccattagaatgtaagtttttgctgagcttgctccttgcctttgtcaattaggatatttttttaccagctctaagtttctacaatatccataaaatatcatgtgcagaactgtgccaatgacctgaagatagtatttcaattaacagtgctagcaggtgcttcttttctacttgcaatctgacaacagatctttgtacatactctggaccattaatttcatttcagataattattccatcaagagttgtgtgagatttgacaaaaaaagttgtttcataactcagaacatctg

SEQ ID NO: 7624 - DNA, 600 bp, Chicken  19866894201755_1
gtccggcgaggtggcccggcactcaggaaccgccgcagcgtggcgaggctgtcccacacctcaggctctgaggggcacggccgcaccgccaccggttccccagagtcctcaccctcctccacagccctctcccagtcctctgcctcggccgtgtcaacgtctgcaaggcgctccagcccctcatccatcaacccaaagctctccagctgctcccggccaagccagacgggtgccagcggcgcgtcagggctgctattggggctgaagctggcggcacggaagcagctggtgatgagcccygggcgcacgtcaccccacgcttgtgccagcatgtgcagggcgtccagcagggtgggtggctccgagctctgcgccgctgggagttgggtcagcagccggcgccggtagtggcccttcaggtccctggcgatgccacggtgcaggggctgtgccagcacggccgcaggcggcgtgaaaaccatccggacgttggacagctcgaggtaggggtgctcctcgcgctcctcgacgagcagcaggacgctcttccccttgcgccgcatctcctcattgaagtcccgcagccactcggcaaacagc

SEQ ID NO: 7625 - DNA, 600 bp, Chicken  19866894201757_1
aagcttgaaaaagtgggccttcagtaacctaataacgttcagtacattgaagtacaacaccttgcaaaccctgcacagcaatcccagatatgtttacagactggacaaagaactcattgagaccagccctgcagagaacaacatggggtcatgatggatgaaaagctggacaagaaccagaagtgtgctcatgcagtccagaaggccagcagtatactgcatcaacagaaggatggacagcagagagagggaggtgaatgtcctcctctactccaccctcatgtgcctccatcctggagyccaggactggggctcaccaacgcaagaaacactgggtccagaggaggaccatgaagatgatcagagggcttggagtatatctcttacaaagaaagtttgagggagctgggcatgtttagcctggagaagagaagagtacccattgtggtacttgaggggaacttatgaacagaacagaaactgattttttacacggtctgatagtgacagaataagggggaatggttttgaactaaaacagaggagattcaggtttcacattagctggaattttttttcactcagagggtggtgaggcac

SEQ ID NO: 7626 - DNA, 600 bp, Chicken  19866894201761_1
gcaaatcccacatttaacccgaaaatcatgcgttttctcttcgcagatcccccatttaagcgaaaatcacgcgttttctcttcgcaaatcccacatttatgtgaaaatcacgcattttctctttgcaaatcccccatttaagcgaaaatcaagcgttttctcttcgcaaatcccacatttaactcgaaaatcacgtgttttctcttcgcaaatcccccatttaacccgaaaatcatgcgttttctcttcgcaaatcccacatttaagtgaaaatcacgcattttctcttcgcaaatcccscatttaagcgaaaatcacgcgttttctcttcgcaaatccatcatttaagcgaaaatcacgcattttctcttcgcaattcccccatttaagcaaaaatcgcgcgttatcgcttcgagaatcccccatttaagcgaaaatcaagcgttttctcttcgcaagtccatcatttaagcgaaaatcatgcgttttcccttcgagaatcccccatttaacccgaaaatcacgcgttttctcttcgaaaatccccatttaaccagaaaatcacgcgtgtcctctttgcaaatcccacatttatgtgaa

SEQ ID NO: 7627 - DNA, 599 bp, Chicken  19866894201763_1
  misc_feature (1)..(73): n is any nucleotide
nnnnnnnnnnnnnnnnnnnnnnnnnnnnnnnnnnnnnnnnnnnnnnnnnnnnnnnnnnnnnnnnnnnnnnnnntcccgtggtgctagctacttgtctccagagtatgaatccacgtgcaggatttacaaggcgttccacagtatgagtaaccaagtgacctggaacagcacatatgttgctcccatatgtttccaaaatacgttgtccagctgtctcaatgcataccttatgcagcgagacagctgggcctgccttctaagaagcaatctgaagcacacagctgctctctcctgaccccytatatacattgtgctaccctgacaaacacaccttggccctcaggttgtcattaagtgaactcccggatggatagacttttgctcccacactgagggaaaaaacagggggacttatgatagagaactgttagcagtatggcagaatggattggaaaatattctctgctcagggggtgatgaactctcttgcctctgtgaatgttagccatgcttcctggaaatagaatttgatctgattatataattcagtgatgtggttcacaacatggaaactggaaccccttaaactctgttctcat

SEQ ID NO: 7628 - DNA, 600 bp, Chicken  19866894201766_1
ggtagcacttaatgttgcatgcagccagcataggaggaggaacactggaaaaagagaagctggagcagttattacaccagtgggaaattcattacttagcaaaactggccagagactaaaacgaaggaggctttagctcaaatggaggcaggcataaaatacgaagactctgcacagttaatataaagcagagcagtggagcataatcacgtttttctttaatttcattttcccctcgcttttaaactctgcatgcaagcacccaaaacctggtggaacagcagcttggtgagaacttcrcatgaagatgccgagtggatgctgccagggaggcatcggtgagggtattgctcccaggtggaagggctgcctccatgtgaaagcagcctttatctccaggtgctttgccgtcagctcgggtggagggtgggtgctgggtgcttctagccgagagggacacttctattttgtttcttgccgttcggtactctaaaaaattgtgaaatggaaatttaattctatagagtttattctgtagagagtaggattttatcactcctacaaacggtcgttgtcctgaaagcccctcctgccgtttct

SEQ ID NO: 7629 - DNA, 600 bp, Chicken  19866894201769_1
cctcttatgaagggatgctgaatatctcattgtttcctctttggtgaccagatacatggtttgagaaataacacagtctgactcactttggaagcttgaggtggtcttaagtattgctattttgaaagctgcaagagctgcaagacatctcagtggatctcataccgatgaacacaggagctaagcttgtctcagcatattttataacagcgatataactaatttggttaagtcttaccttttcttcttggccattttagtcaatctttaactagaaggctctgacatcagttattcaaygatagtttgcctcaggcaagatgtgtgtctttccatgaatagccatttgtatctacatttcttggaaacaataaggaagccagagagtcttgaacagctttctgaggtcccatacgatatagaagtttgtcatttaagtaactgggaatgttcagtttttgagactgctgctaggtgctgacagtgtcatcagtaccatgctgaaggtttgaactataaaagraggttagatttccgggaaaaatacagcctttcttaggtccatggacagatgttcatgtgcctgatactgagtgaatg

SEQ ID NO: 7630 - DNA, 600 bp, Chicken  19866894201769_2
ttggttaagtcttaccttttcttcttggccattttagtcaatctttaactagaaggctctgacatcagttattcaaygatagtttgcctcaggcaagatgtgtgtctttccatgaatagccatttgtatctacatttcttggaaacaataaggaagccagagagtcttgaacagctttctgaggtcccatacgatatagaagtttgtcatttaagtaactgggaatgttcagtttttgagactgctgctaggtgctgacagtgtcatcagtaccatgctgaaggtttgaactataaaagraggttagatttccgggaaaaatacagcctttcttaggtccatggacagatgttcatgtgcctgatactgagtgaatgtttctcagaagtactaagtaatcctattaatcttttgttcctaacttgcactctttttctttacgttgtgtataaatttcaaggacgatagttcatctatgaatttttagacaaggacttgcatttatttttaaaaaaaagtcacagtagtgcatcaaaaatccaatccagattgaagatattttcatactacaaatttcacaggttcttacagataatttct

SEQ ID NO: 7631 - DNA, 600 bp, Chicken  19866894201770_1
aattactcttaggcatctgtaggctgctctcgtgtactttacatcttccccgtgagccttcaaaacagagtatttcagttgtgttgtagcaaagtcttgttcttctatcctttggacagtacagaaatgggctgacaaatgctgaaaggaatactgaatgcagataacgaacacattggccattacctctgttggttactatggagtaatttaagcctttgtgagcaatgtggattgtgcacagggtaggaaataggaatccctcaaacatgacagttttagataatacagtattttaaygcaagatgcagaaagcaatttttatcttactgcattattgtccatgttaatgactttagtctgtactcatttaggtaaatgccattatcagattagctgtctacttttcattagccttttgctgaaacccatttgaaaccactaagattaaaaccaattatgcttccttgttttctctcttaccttagcaatacttaaccatgtgtttatagttagatacgtctccattgtaaaggagttcaatatttcacacacaaggagattatattgcaataatatggcaaaattgtcttaattttg

SEQ ID NO: 7632 - DNA, 599 bp, Chicken  19866894201772_1
  misc_feature (1)..(13): n is any nucleotide
nnnnnnnnnnnnnctggtcttaacttgggccaaagaggcctgcttccttttgagcctccctgtcttgttcagctgtgccaaagccccattcattaagctcaattatgtgttaacttcaaacaacccctggtaattttttttttctctttttctcccaaacctaccacagcacaaagacatcctttggtgaaaatggatttctcgaaactgaaccaaatcaaacaaatccacttctactagccaggcaactgaagagggagctcagaaggaattcccctccacttcaccttgcgacgtaaycttctcattctggagcaagcacgcatgcacactcatccacaaacacttccacagcattcaccttgctaagccaactggcagagatcttactttctaagccagccttattttgctgcctcctctcaggagcccctccttcaggaggggacacgggctgtgcacttcaagcggaggacatactgagctcgcccccraggccacttcattaagtttcacagtgtttccagtggactttggattgggccccacagcacagcatccaggcaacacaaggcatttgcagtccatctaggctcgtt

SEQ ID NO: 7633 - DNA, 600 bp, Chicken  19866894201772_2
ggatttctcgaaactgaaccaaatcaaacaaatccacttctactagccaggcaactgaagagggagctcagaaggaattcccctccacttcaccttgcgacgtaaycttctcattctggagcaagcacgcatgcacactcatccacaaacacttccacagcattcaccttgctaagccaactggcagagatcttactttctaagccagccttattttgctgcctcctctcaggagcccctccttcaggaggggacacgggctgtgcacttcaagcggaggacatactgagctcgcccccraggccacttcattaagtttcacagtgtttccagtggactttggattgggccccacagcacagcatccaggcaacacaaggcatttgcagtccatctaggctcgttttggcaaggggaaatacaacccagcagcagcaaagcaaagtccagatgctacttaagccacacgttatcttcactagccaacaaagaagtcacggggaaagcaagaggtagagaaaatcccaacatccaaaaataacaataaaaatacagagcccagtggcagcccttctgcacgcactttccccaggaaatatt

SEQ ID NO: 7634 - DNA, 600 bp, Chicken  19866894201774_1
cacatggcattattcgagtgcgtaaattaatgcgatgatatacagtcgttgtgattaaaaataagaaaacacagaaaaatcaagagttaaaccacttaaagcaacgccagtttcagcaggcatcacatacgccttacatttcaggatgcggaacaagaaagaatggcctcaaaagttgtgccagaggaggttcgggttggatattaggaagaatttcttctcagaaggagcagtgatgcactggcataggctgcccagggacgtgggggagtcaccatccctggaggtgtttaagggaarggtagatggagtactttgggacacggcttggtgggcagtactggtgataggtagatggctgcactaggtgaccttagaggtcttttccagccgtaatgattctatgaaaacagggcaattgaaaactactctgaagtgtcagctagtaatgctgcttcgtgtataaactcgctttgcattgatttctgtatcagcaggccatctgcagccaaagaaattgcaaacacagccctgtgccaaagaaaaccccaacaatataaacttgtggtcatcccttcagccacttccccacagccagtg

SEQ ID NO: 7635 - DNA, 514 bp, Chicken  19866894201777_1
atagtcttacctgctttctgtgaaagactattctcatctggagctggacactcatggctgtggattgcactgttcttctctgagcgacccctcccaggacctccagttcatcgtagcaggaaatgaatgtgtgtacctttatcaaccagatgaacgaggcccctgctttgctttcgagggacaaaagctgattgttcactggtatcgggggtacctcatcattgtctccaaggaccgaaagacttctccaaagtatgtcttgttggaatagttgatttttcttttctgttgttgcagttyctggctttccctcttttttttccccttccctttgaaactttgctctaggaactgattgtaatgttgtcaatgagttttaaaattaatcaagacccacgcgctaattaacttctgttgctagtgcagcgtagtcaagcatgctgaacatgggggggatttctttctgctcctattaatggtctcagtctaacacactgatcacgcttgtggataa

SEQ ID NO: 7636 - DNA, 600 bp, Chicken  19866894201778_1
aaatgagtgttgctggattaaaagtctagttagggaggtaaagtattatcttgccgtgaaacagcagaacctgctttctatgatgggatttgactcaactgaaatatgaacaagcctgactatttacttgaaaagattggtccaaggtagaatggttcaaacaagccggttctgttttcttaagtttctgtttagagttcaggataggaagctttcttgtggggtcaaatgctgggattaattctaatgatactgtggaagttctgagtgcatttgcttaaattatttgatcttgaactyaaatcaagtttcatactggtgttctgttagcccaaayggaccatasatattctagctaaatatttgtaggttcttcctctctaccaaccctctttcatccaacattactcagagttaacagaaaaaaacaagtacagggaaaaggtaagtggaattttcaaagcaagatgcagcaagragtgcagctggaattattttaccttgatgaatgcggcagtgaaaaggagtcytgaaaatgttccagcttcaaatgaaacatctgcctatctgtgcaggtttagtgatgtcaagaagcagccc

SEQ ID NO: 7637 - DNA, 600 bp, Chicken  19866894201778_2
gtaaagtattatcttgccgtgaaacagcagaacctgctttctatgatgggatttgactcaactgaaatatgaacaagcctgactatttacttgaaaagattggtccaaggtagaatggttcaaacaagccggttctgttttcttaagtttctgtttagagttcaggataggaagctttcttgtggggtcaaatgctgggattaattctaatgatactgtggaagttctgagtgcatttgcttaaattatttgatcttgaactyaaatcaagtttcatactggtgttctgttagcccaaayggaccatasatattctagctaaatatttgtaggttcttcctctctaccaaccctctttcatccaacattactcagagttaacagaaaaaaacaagtacagggaaaaggtaagtggaattttcaaagcaagatgcagcaagragtgcagctggaattattttaccttgatgaatgcggcagtgaaaaggagtcytgaaaatgttccagcttcaaatgaaacatctgcctatctgtgcaggtttagtgatgtcaagaagcagccccacgtgtgccacatgcaaaccagaagttaatttctgt

SEQ ID NO: 7638 - DNA, 600 bp, Chicken  19866894201778_3
tatcttgccgtgaaacagcagaacctgctttctatgatgggatttgactcaactgaaatatgaacaagcctgactatttacttgaaaagattggtccaaggtagaatggttcaaacaagccggttctgttttcttaagtttctgtttagagttcaggataggaagctttcttgtggggtcaaatgctgggattaattctaatgatactgtggaagttctgagtgcatttgcttaaattatttgatcttgaactyaaatcaagtttcatactggtgttctgttagcccaaayggaccatasatattctagctaaatatttgtaggttcttcctctctaccaaccctctttcatccaacattactcagagttaacagaaaaaaacaagtacagggaaaaggtaagtggaattttcaaagcaagatgcagcaagragtgcagctggaattattttaccttgatgaatgcggcagtgaaaaggagtcytgaaaatgttccagcttcaaatgaaacatctgcctatctgtgcaggtttagtgatgtcaagaagcagccccacgtgtgccacatgcaaaccagaagttaatttctgtgttgcacag

SEQ ID NO: 7639 - DNA, 600 bp, Chicken  19866894201778_4
cttaagtttctgtttagagttcaggataggaagctttcttgtggggtcaaatgctgggattaattctaatgatactgtggaagttctgagtgcatttgcttaaattatttgatcttgaactyaaatcaagtttcatactggtgttctgttagcccaaayggaccatasatattctagctaaatatttgtaggttcttcctctctaccaaccctctttcatccaacattactcagagttaacagaaaaaaacaagtacagggaaaaggtaagtggaattttcaaagcaagatgcagcaagragtgcagctggaattattttaccttgatgaatgcggcagtgaaaaggagtcytgaaaatgttccagcttcaaatgaaacatctgcctatctgtgcaggtttagtgatgtcaagaagcagccccacgtgtgccacatgcaaaccagaagttaatttctgtgttgcacagcatgtgcatctagcttcaagctaatttcataacaggtatagatcacaaactgggcaggtcccaaaggaagggctcggaattcatgctgcttctatgcccatgctatagctgtgttgtcctcagtctgaaaaa

SEQ ID NO: 7640 - DNA, 600 bp, Chicken  19866894201778_5
gctgggattaattctaatgatactgtggaagttctgagtgcatttgcttaaattatttgatcttgaactyaaatcaagtttcatactggtgttctgttagcccaaayggaccatasatattctagctaaatatttgtaggttcttcctctctaccaaccctctttcatccaacattactcagagttaacagaaaaaaacaagtacagggaaaaggtaagtggaattttcaaagcaagatgcagcaagragtgcagctggaattattttaccttgatgaatgcggcagtgaaaaggagtcytgaaaatgttccagcttcaaatgaaacatctgcctatctgtgcaggtttagtgatgtcaagaagcagccccacgtgtgccacatgcaaaccagaagttaatttctgtgttgcacagcatgtgcatctagcttcaagctaatttcataacaggtatagatcacaaactgggcaggtcccaaaggaagggctcggaattcatgctgcttctatgcccatgctatagctgtgttgtcctcagtctgaaaaacaccccatgcctcctctgtctgagaagagctatttcagtgctctgttctgct

SEQ ID NO: 7641 - DNA, 600 bp, Chicken  19866894201779_1
tgacttctgaaaactctttttttagaacgctggagcagtgattggaaaaggtggcaaaaacattaaggcacttcgtacagacgtgagtatatatgagtttgaactaatttaacaccaattctttcagagcactacatcgaaagcttggttgcattcatatttagaaatgggagccattcaactctagacaccagtagtctagctacaatctatctgtagattgttagagtaggaaacttagtaattaaagcccagcttgactcgtgggagaagaggtttatattaaaacctctttgtttygaatagaattccactaaattacacacttcaaatgagttaacatcctaatgagaaatactgatgaagcttaaagcccttaattgtaccatttcccatatgtgtgaatcaattgcagtgctgctgaaaccattgcaggtggctggcataacccagtgatagaggagttctttaacttccttcaaaaaaacaagaacaaacacgcacgacaaaacaggaaaatggtctgtccattcctttacagcttgcacatgaaacacaaaagcattagtgttaggcttacttgattaaaatatgggcata

SEQ ID NO: 7642 - DNA, 599 bp, Chicken  19866894201781_1
  misc_feature (1)..(138): n is any nucleotide
nnnnnnnnnnnnnnnnnnnnnnnnnnnnnnnnnnnnnnnnnnnnnnnnnnnnnnnnnnnnnnnnnnnnnnnnnnnnnnnnnnnnnnnnnnnnnnnnnnnnnnnnnnnnnnnnnnnnnnnnnnnnnnnnnnnnnnnnnntgagccgctggatcctcggcgtgaagtgaagtttgtcaacgtcacacgcaaatggaggctgccagtcctgggaaaacagaagtgccccatcaacggggcaggaggggagcggggctgcccagcacagcacagagcagcagagcttccagccccaaattccaygtctgcaaacagctgggagcagccggagtgcgagcaattaaacctgagcatcaccagcaaaacaaaacacctgcaaagcaccgctgctgttggtaaatacgactacaaaggaacgttatctctcagatctccaacaccgaccacgtgccggcggtttggcaacacgcagctttgctgaactacattagatttgatctgaacttgacagtaatttattacttataaagcaatctgattatcactaattacggaatgaagataacgtgcacagcagtgctgaaacgggagagctccgcgcc

SEQ ID NO: 7643 - DNA, 600 bp, Chicken  19866894201789_1
ttaatcagcagtgattcagcactcctcgctcccatctcatacatccctccctcctgacaccaccccaaacccgggagcagccatgaaatacgggagccaaattgcaggaggaagcctgaaataggactccgggacaatgtcagcccgctgcgcatgaaggccgcaggttgcacatgctcagagatctcatgccgatgcatgcagaacaccagaagccctatccagtaggggaccatgcgtgtggaggtacccaatcaaacagtggatcgggctgcccagggttgggggagtcactgtccrcagaggtggtcaagaactgcagaggtgtggcactgagtgacatggtcagtgggaaataccagtgctaggtggacagctggactagatgatcttagaggtcttttccaaccttcatgattctgtgatttctaggcctggagtgagatttggcctctccaaagccctccatgaaatctaataaggactttgcaagtgaaagaagaaagctcccagaggacaccccggaccctggagggaggtctctgctcttttggttgagtgtttcagccctgtgaagttcagcgctgataaaactgacaa

SEQ ID NO: 7644 - DNA, 599 bp, Chicken  19866894201799_1
  misc_feature (1)..(86): n is any nucleotide
nnnnnnnnnnnnnnnnnnnnnnnnnnnnnnnnnnnnnnnnnnnnnnnnnnnnnnnnnnnnnnnnnnnnnnnnnnnnnnnnnnnnnncatccctgttcactactccctggtccttcacctgtactaccaaaaacatcagctctttctcaaaccttctgtcctggtgctgcatatcaaacaccagagctactgggactggttagagcacagcacgggccttcaaaagctattagggattcgttaagtccaccaccgaagtcagtagctggtccctttgctacaaagaaggaaatgctttcasccaccctcaccccacaagagcaggcagaagcgcaccaagcctcctccccccactggcagcagacctgttggcaacagacccccaggtcccatctgcccctctgctgagcaaaagatgagcttggagtaacttgaaaggattttagcatatttactccctcagtgcctgacgtgtccaaagaacacgggtaagggcttcagtctctgaccctctaagcacaagcagaaaggtgatgactgtaaaygctgtagctcagaacaaagagcagggctggaatcctgcttagccaytagggcaga

SEQ ID NO: 7645 - DNA, 600 bp, Chicken  19866894201799_2
tccaccaccgaagtcagtagctggtccctttgctacaaagaaggaaatgctttcasccaccctcaccccacaagagcaggcagaagcgcaccaagcctcctccccccactggcagcagacctgttggcaacagacccccaggtcccatctgcccctctgctgagcaaaagatgagcttggagtaacttgaaaggattttagcatatttactccctcagtgcctgacgtgtccaaagaacacgggtaagggcttcagtctctgaccctctaagcacaagcagaaaggtgatgactgtaaaygctgtagctcagaacaaagagcagggctggaatcctgcttagccaytagggcagatacagacacaaggacatcattyctmatagcttttgttgatctgcaatcaattcagttttggggcagctcccattctgattgacattaaagtcattttttttccctttttaagactgtaattgttaccattatgttacaatttaactcatgcaatagactcatggcaggatattactttttacaagctattaagcaacgtgcaaygaagacacataaacatcaacctaaatgccctgctaggcacc

SEQ ID NO: 7646 - DNA, 600 bp, Chicken  19866894201799_3
atgctttcasccaccctcaccccacaagagcaggcagaagcgcaccaagcctcctccccccactggcagcagacctgttggcaacagacccccaggtcccatctgcccctctgctgagcaaaagatgagcttggagtaacttgaaaggattttagcatatttactccctcagtgcctgacgtgtccaaagaacacgggtaagggcttcagtctctgaccctctaagcacaagcagaaaggtgatgactgtaaaygctgtagctcagaacaaagagcagggctggaatcctgcttagccaytagggcagatacagacacaaggacatcattyctmatagcttttgttgatctgcaatcaattcagttttggggcagctcccattctgattgacattaaagtcattttttttccctttttaagactgtaattgttaccattatgttacaatttaactcatgcaatagactcatggcaggatattactttttacaagctattaagcaacgtgcaaygaagacacataaacatcaacctaaatgccctgctaggcaccacaagtgtttgtatgccactcaaagctcacacttcgttccttctgg

SEQ ID NO: 7647 - DNA, 600 bp, Chicken  19866894201799_4
aggcagaagcgcaccaagcctcctccccccactggcagcagacctgttggcaacagacccccaggtcccatctgcccctctgctgagcaaaagatgagcttggagtaacttgaaaggattttagcatatttactccctcagtgcctgacgtgtccaaagaacacgggtaagggcttcagtctctgaccctctaagcacaagcagaaaggtgatgactgtaaaygctgtagctcagaacaaagagcagggctggaatcctgcttagccaytagggcagatacagacacaaggacatcattyctmatagcttttgttgatctgcaatcaattcagttttggggcagctcccattctgattgacattaaagtcattttttttccctttttaagactgtaattgttaccattatgttacaatttaactcatgcaatagactcatggcaggatattactttttacaagctattaagcaacgtgcaaygaagacacataaacatcaacctaaatgccctgctaggcaccacaagtgtttgtatgccactcaaagctcacacttcgttccttctggatgggaaagaagaatgacagaatgcatctaa

SEQ ID NO: 7648 - DNA, 600 bp, Chicken  19866894201799_5
cagaagcgcaccaagcctcctccccccactggcagcagacctgttggcaacagacccccaggtcccatctgcccctctgctgagcaaaagatgagcttggagtaacttgaaaggattttagcatatttactccctcagtgcctgacgtgtccaaagaacacgggtaagggcttcagtctctgaccctctaagcacaagcagaaaggtgatgactgtaaaygctgtagctcagaacaaagagcagggctggaatcctgcttagccaytagggcagatacagacacaaggacatcattyctmatagcttttgttgatctgcaatcaattcagttttggggcagctcccattctgattgacattaaagtcattttttttccctttttaagactgtaattgttaccattatgttacaatttaactcatgcaatagactcatggcaggatattactttttacaagctattaagcaacgtgcaaygaagacacataaacatcaacctaaatgccctgctaggcaccacaagtgtttgtatgccactcaaagctcacacttcgttccttctggatgggaaagaagaatgacagaatgcatctaacac

SEQ ID NO: 7649 - DNA, 600 bp, Chicken  19866894201799_6
ctgaccctctaagcacaagcagaaaggtgatgactgtaaaygctgtagctcagaacaaagagcagggctggaatcctgcttagccaytagggcagatacagacacaaggacatcattyctmatagcttttgttgatctgcaatcaattcagttttggggcagctcccattctgattgacattaaagtcattttttttccctttttaagactgtaattgttaccattatgttacaatttaactcatgcaatagactcatggcaggatattactttttacaagctattaagcaacgtgcaaygaagacacataaacatcaacctaaatgccctgctaggcaccacaagtgtttgtatgccactcaaagctcacacttcgttccttctggatgggaaagaagaatgacagaatgcatctaacacttagtctggtctgtgctgcatactggaaagcatcacttcattgtctagttcattctctaactacctggtgcatggaaaaaatcctcatcacaactgcaacataaagactatttttgtagtggcatcaaaaaagatgctaaacagtaaaactggatgtttgagtacaagcaaggcgttga

SEQ ID NO: 7650 - DNA, 600 bp, Chicken  19866894201803_1
gtatctggacaatgctctcagttgtatggtctgatttttgggtggtcctgtgtggaaccaggatctcatggactctatgatccccatggatcctttccaactcaggatattttatgattcaaattttattgttgggtaagggtaaaactggcagaaagtccttacactatttaatgcaggatccactggggaccctgattcacatcctagaggtgacaaagaagaggggagatttaaaaggatatcactgctagatgtagcagaaagagcagagacaaaaatcgacgcatggacagaagyggactcgaagtggactttgtgaagaagccagggacttaaatgattctagaaaatctaaatgaagtcagtaaaaatgagaatatagagctgagataaagcagacacagaactgtgtgcayagcacttggattttaccaaatttctmtattccccatgctatactactgaggygttttttagaacttttgttagatatgagcatcttccttacttcaggcagagtatgttccagaacaaataatccatcaactctgaatagtcataaggttggaaccacawaaaagatgtaagcaacagatc

SEQ ID NO: 7651 - DNA, 600 bp, Chicken  19866894201803_2
caaattttattgttgggtaagggtaaaactggcagaaagtccttacactatttaatgcaggatccactggggaccctgattcacatcctagaggtgacaaagaagaggggagatttaaaaggatatcactgctagatgtagcagaaagagcagagacaaaaatcgacgcatggacagaagyggactcgaagtggactttgtgaagaagccagggacttaaatgattctagaaaatctaaatgaagtcagtaaaaatgagaatatagagctgagataaagcagacacagaactgtgtgcayagcacttggattttaccaaatttctmtattccccatgctatactactgaggygttttttagaacttttgttagatatgagcatcttccttacttcaggcagagtatgttccagaacaaataatccatcaactctgaatagtcataaggttggaaccacawaaaagatgtaagcaacagatcactggaaattagtaccacagaagtgrgaataaatatgaagaaaaaataactcatgcaacccagggcagctagacaggataggatgccactttccttataggggagaaatggaatttgtg

SEQ ID NO: 7652 - DNA, 600 bp, Chicken  19866894201803_3
aactggcagaaagtccttacactatttaatgcaggatccactggggaccctgattcacatcctagaggtgacaaagaagaggggagatttaaaaggatatcactgctagatgtagcagaaagagcagagacaaaaatcgacgcatggacagaagyggactcgaagtggactttgtgaagaagccagggacttaaatgattctagaaaatctaaatgaagtcagtaaaaatgagaatatagagctgagataaagcagacacagaactgtgtgcayagcacttggattttaccaaatttctmtattccccatgctatactactgaggygttttttagaacttttgttagatatgagcatcttccttacttcaggcagagtatgttccagaacaaataatccatcaactctgaatagtcataaggttggaaccacawaaaagatgtaagcaacagatcactggaaattagtaccacagaagtgrgaataaatatgaagaaaaaataactcatgcaacccagggcagctagacaggataggatgccactttccttataggggagaaatggaatttgtgcctataactaaggttccacacctgga

SEQ ID NO: 7653 - DNA, 600 bp, Chicken  19866894201803_4
taatgcaggatccactggggaccctgattcacatcctagaggtgacaaagaagaggggagatttaaaaggatatcactgctagatgtagcagaaagagcagagacaaaaatcgacgcatggacagaagyggactcgaagtggactttgtgaagaagccagggacttaaatgattctagaaaatctaaatgaagtcagtaaaaatgagaatatagagctgagataaagcagacacagaactgtgtgcayagcacttggattttaccaaatttctmtattccccatgctatactactgaggygttttttagaacttttgttagatatgagcatcttccttacttcaggcagagtatgttccagaacaaataatccatcaactctgaatagtcataaggttggaaccacawaaaagatgtaagcaacagatcactggaaattagtaccacagaagtgrgaataaatatgaagaaaaaataactcatgcaacccagggcagctagacaggataggatgccactttccttataggggagaaatggaatttgtgcctataactaaggttccacacctggaatttaccctggtatcatgaaattaaa

SEQ ID NO: 7654 - DNA, 600 bp, Chicken  19866894201803_5
aatcgacgcatggacagaagyggactcgaagtggactttgtgaagaagccagggacttaaatgattctagaaaatctaaatgaagtcagtaaaaatgagaatatagagctgagataaagcagacacagaactgtgtgcayagcacttggattttaccaaatttctmtattccccatgctatactactgaggygttttttagaacttttgttagatatgagcatcttccttacttcaggcagagtatgttccagaacaaataatccatcaactctgaatagtcataaggttggaaccacawaaaagatgtaagcaacagatcactggaaattagtaccacagaagtgrgaataaatatgaagaaaaaataactcatgcaacccagggcagctagacaggataggatgccactttccttataggggagaaatggaatttgtgcctataactaaggttccacacctggaatttaccctggtatcatgaaattaaaaacgcaatacttgtgtactaaaatcacatatacaacacaacatgctgaacaacgcacaacaccagagaccttgagacttactgaagcatcgctccagaggaattcaag

SEQ ID NO: 7655 - DNA, 600 bp, Chicken  19866894201803_6
gccagggacttaaatgattctagaaaatctaaatgaagtcagtaaaaatgagaatatagagctgagataaagcagacacagaactgtgtgcayagcacttggattttaccaaatttctmtattccccatgctatactactgaggygttttttagaacttttgttagatatgagcatcttccttacttcaggcagagtatgttccagaacaaataatccatcaactctgaatagtcataaggttggaaccacawaaaagatgtaagcaacagatcactggaaattagtaccacagaagtgrgaataaatatgaagaaaaaataactcatgcaacccagggcagctagacaggataggatgccactttccttataggggagaaatggaatttgtgcctataactaaggttccacacctggaatttaccctggtatcatgaaattaaaaacgcaatacttgtgtactaaaatcacatatacaacacaacatgctgaacaacgcacaacaccagagaccttgagacttactgaagcatcgctccagaggaattcaagaacatttagaggcactgagaattcaatgcaatgctgaaaacacaact

SEQ ID NO: 7656 - DNA, 600 bp, Chicken  19866894201804_1
ttccaacagaatttaccattgcaagtgcatttaacaattttaagcacctagttctttttaataatcacgtgatgatacagagaaaaattttatgttcgctatatgaataatatatagcaattggattcttattgccaaataatctgattaaggcagtgctttagttaaaaagaaataagaatatttcacaccacaaaacacttcgagtagagagacacttccttccatctaatgaaagtgttagttgaaagctgttaattttctccaaatattttccaggtaaattgctaactgcaagtycatactatacttcttttatcagaactgtgtcaaaattattatagattgtagttgcktagaaactacttcatgtctgtctgatttgttgtgattttattcattgtgataccttgtttctggtagtgcatgattatgttactttctaattgatggttacagaaaggatgaaagtttccttacaattagtagtgaataggcgttctttcatatctttggagttggaagataaaaggcggtttgtgtgattatttactagtggacagccaaaaagttagttgtgtataattgataaggcactag

SEQ ID NO: 7657 - DNA, 600 bp, Chicken  19866894201804_2
tttaataatcacgtgatgatacagagaaaaattttatgttcgctatatgaataatatatagcaattggattcttattgccaaataatctgattaaggcagtgctttagttaaaaagaaataagaatatttcacaccacaaaacacttcgagtagagagacacttccttccatctaatgaaagtgttagttgaaagctgttaattttctccaaatattttccaggtaaattgctaactgcaagtycatactatacttcttttatcagaactgtgtcaaaattattatagattgtagttgcktagaaactacttcatgtctgtctgatttgttgtgattttattcattgtgataccttgtttctggtagtgcatgattatgttactttctaattgatggttacagaaaggatgaaagtttccttacaattagtagtgaataggcgttctttcatatctttggagttggaagataaaaggcggtttgtgtgattatttactagtggacagccaaaaagttagttgtgtataattgataaggcactaggacaagcacaagcatttttcattaacaaaaattggaatgcaatttctcctaaaaat

SEQ ID NO: 7658 - DNA, 600 bp, Chicken  19866894201807_1
aacaaaaccccagctgttcaaactctagttgcatttttgtgctgctatgttacaggtaatgttcaaatggatcggaatgaggacaacttcagtatgtgccctgtatgtagtgggtcagttaatgttcctggttattctggttcctgttaaactgaagtatgtctgtctgtggtttgaggtcttgagtgtgatcaggctgtgacaattaactctccagtggggttctaagataaaccctgttagagaagctgttgggtggcatctactgagatggctgcactgggctgtagacttacaggkgtgtgtgtgtgaatgtgagagttgttttttttctttgttttcgtagacagtttcaaaaatcaagctccagtttacctgagaatttcttggttttttttttttgcaggctgccttttctgacttgaactggggcgtaatgtaaatactgctgtagcaaatatgctggagttactttttgtgtgattagtatgaattcaaggcttattaaactgactgttgatgtgttgtactgagtcttggaggacttaaagtaaaattgcttgattttactaagatttacaagcatctctttctgttgtt

SEQ ID NO: 7659 - DNA, 600 bp, Chicken  19866894201807_2; identical to SEQ ID NO: 7658

SEQ ID NO: 7660 - DNA, 599 bp, Chicken  19866894201809_1
  misc_feature (1)..(246): n is any nucleotide
nnnnnnnnnnnnnnnnnnnnnnnnnnnnnnnnnnnnnnnnnnnnnnnnnnnnnnnnnnnnnnnnnnnnnnnnnnnnnnnnnnnnnnnnnnnnnnnnnnnnnnnnnnnnnnnnnnnnnnnnnnnnnnnnnnnnnnnnnnnnnnnnnnnnnnnnnnnnnnnnnnnnnnnnnnnnnnnnnnnnnnnnnnnnnnnnnnnnnnnnnnnnnnnnnnnnnnnnnnnnnnnnnnnnnnnnnnnnnnnnnnnnnnacattgcttcaccctttttttgtaatgataactggtagttcttaattttttttkgtttgcatgtgtgtgtgtttgstaccatgcaacctctgtaatgaacagaagggtaaaattgttctcttcaataatctgaatgataaataattaggaggactkcatagtttccattttcatatataaacaatgaaaatcacaaacaaaagaggactcaacatgtttctccatcttattcatgtttcagtagactgaacttaaactaaaaaaaggccargataatgatgacacagcctacaagacaggagtaaaagtcagaggatgagaatgagttagaggaattgctaaaagctatgtga

SEQ ID NO: 7661 - DNA, 599 bp, Chicken  19866894201809_2
  misc_feature (1)..(224): n is any nucleotide
nnnnnnnnnnnnnnnnnnnnnnnnnnnnnnnnnnnnnnnnnnnnnnnnnnnnnnnnnnnnnnnnnnnnnnnnnnnnnnnnnnnnnnnnnnnnnnnnnnnnnnnnnnnnnnnnnnnnnnnnnnnnnnnnnnnnnnnnnnnnnnnnnnnnnnnnnnnnnnnnnnnnnnnnnnnnnnnnnnnnnnnnnnnnnnnnnnnnnnnnnnnnnnnnnnnnnnnnnnnnnnnnacattgcttcaccctttttttgtaatgataactggtagttcttaattttttttkgtttgcatgtgtgtgtgtttgstaccatgcaacctctgtaatgaacagaagggtaaaattgttctcttcaataatctgaatgataaataattaggaggactkcatagtttccattttcatatataaacaatgaaaatcacaaacaaaagaggactcaacatgtttctccatcttattcatgtttcagtagactgaacttaaactaaaaaaaggccargataatgatgacacagcctacaagacaggagtaaaagtcagaggatgagaatgagttagaggaattgctaaaagctatgtgaaaaaaaaaataggtcatattta

SEQ ID NO: 7662 - DNA, 599 bp, Chicken  19866894201809_3
  misc_feature (1)..(144): n is any nucleotide
nnnnnnnnnnnnnnnnnnnnnnnnnnnnnnnnnnnnnnnnnnnnnnnnnnnnnnnnnnnnnnnnnnnnnnnnnnnnnnnnnnnnnnnnnnnnnnnnnnnnnnnnnnnnnnnnnnnnnnnnnnnnnnnnnnnnnnnnnnnnnnnnacattgcttcaccctttttttgtaatgataactggtagttcttaattttttttkgtttgcatgtgtgtgtgtttgstaccatgcaacctctgtaatgaacagaagggtaaaattgttctcttcaataatctgaatgataaataattaggaggactkcatagtttccattttcatatataaacaatgaaaatcacaaacaaaagaggactcaacatgtttctccatcttattcatgtttcagtagactgaacttaaactaaaaaaaggccargataatgatgacacagcctacaagacaggagtaaaagtcagaggatgagaatgagttagaggaattgctaaaagctatgtgaaaaaaaaaataggtcatatttataatgtgtaaygttttcctttaaacagasgtctatgcttcaaatttcaggtgtgtgtggttattttgaaattaagagaat

SEQ ID NO: 7663 - DNA, 599 bp, Chicken  19866894201809_4
  misc_feature (1)..(29): n is any nucleotide
nnnnnnnnnnnnnnnnnnnnnnnnnnnnnacattgcttcaccctttttttgtaatgataactggtagttcttaattttttttkgtttgcatgtgtgtgtgtttgstaccatgcaacctctgtaatgaacagaagggtaaaattgttctcttcaataatctgaatgataaataattaggaggactkcatagtttccattttcatatataaacaatgaaaatcacaaacaaaagaggactcaacatgtttctccatcttattcatgtttcagtagactgaacttaaactaaaaaaaggccargataatgatgacacagcctacaagacaggagtaaaagtcagaggatgagaatgagttagaggaattgctaaaagctatgtgaaaaaaaaaataggtcatatttataatgtgtaaygttttcctttaaacagasgtctatgcttcaaatttcaggtgtgtgtggttattttgaaattaagagaatactgcaattattctagtgacacagcctgcattaccataacacagcatggaatttgagcaaatcaaaaagcaattacagtgctctcaacagagagcagctctgagactaaatgagg

SEQ ID NO: 7664 - DNA, 600 bp, Chicken  19866894201809_5
cctctgtaatgaacagaagggtaaaattgttctcttcaataatctgaatgataaataattaggaggactkcatagtttccattttcatatataaacaatgaaaatcacaaacaaaagaggactcaacatgtttctccatcttattcatgtttcagtagactgaacttaaactaaaaaaaggccargataatgatgacacagcctacaagacaggagtaaaagtcagaggatgagaatgagttagaggaattgctaaaagctatgtgaaaaaaaaaataggtcatatttataatgtgtaaygttttcctttaaacagasgtctatgcttcaaatttcaggtgtgtgtggttattttgaaattaagagaatactgcaattattctagtgacacagcctgcattaccataacacagcatggaatttgagcaaatcaaaaagcaattacagtgctctcaacagagagcagctctgagactaaatgaggatgtttgtgaaacaaatgcacattttaagcaggcttctgtgaaacaatatttgtgttttgcactgctaccaacctagtttaayttattgcagagacgtcagttttgacaaatgttt

SEQ ID NO: 7665 - DNA, 600 bp, Chicken  19866894201809_6
gggtaaaattgttctcttcaataatctgaatgataaataattaggaggactkcatagtttccattttcatatataaacaatgaaaatcacaaacaaaagaggactcaacatgtttctccatcttattcatgtttcagtagactgaacttaaactaaaaaaaggccargataatgatgacacagcctacaagacaggagtaaaagtcagaggatgagaatgagttagaggaattgctaaaagctatgtgaaaaaaaaaataggtcatatttataatgtgtaaygttttcctttaaacagasgtctatgcttcaaatttcaggtgtgtgtggttattttgaaattaagagaatactgcaattattctagtgacacagcctgcattaccataacacagcatggaatttgagcaaatcaaaaagcaattacagtgctctcaacagagagcagctctgagactaaatgaggatgtttgtgaaacaaatgcacattttaagcaggcttctgtgaaacaatatttgtgttttgcactgctaccaacctagtttaayttattgcagagacgtcagttttgacaaatgtttcttyttccattttgttaa

SEQ ID NO: 7666 - DNA, 597 bp, Chicken  19866894201809_7
aaaaaaaaataggtcatatttataatgtgtaaygttttcctttaaacagasgtctatgcttcaaatttcaggtgtgtgtggttattttgaaattaagagaatactgcaattattctagtgacacagcctgcattaccataacacagcatggaatttgagcaaatcaaaaagcaattacagtgctctcaacagagagcagctctgagactaaatgaggatgtttgtgaaacaaatgcacattttaagcaggcttctgtgaaacaatatttgtgttttgcactgctaccaacctagtttaayttattgcagagacgtcagttttgacaaatgtttcttyttccattttgttaagtatgtcaaaaatacaagtctttcttctgaatggaacctttcccctccgcaaatttaaatgaagcttctcagttggttgcatgcaggctgcaaaagcttcttctgcataatccaactgtcagaacacatgaaatccgtgtgaagcctgccagtccctcagcagatgtacacaggggggtaacttttgccgacacttgttatacagacattagatctcactgttggcagagactgtaggactgctat

SEQ ID NO: 7667 - DNA, 560 bp, Chicken  19866894201809_8
tcctttaaacagasgtctatgcttcaaatttcaggtgtgtgtggttattttgaaattaagagaatactgcaattattctagtgacacagcctgcattaccataacacagcatggaatttgagcaaatcaaaaagcaattacagtgctctcaacagagagcagctctgagactaaatgaggatgtttgtgaaacaaatgcacattttaagcaggcttctgtgaaacaatatttgtgttttgcactgctaccaacctagtttaayttattgcagagacgtcagttttgacaaatgtttcttyttccattttgttaagtatgtcaaaaatacaagtctttcttctgaatggaacctttcccctccgcaaatttaaatgaagcttctcagttggttgcatgcaggctgcaaaagcttcttctgcataatccaactgtcagaacacatgaaatccgtgtgaagcctgccagtccctcagcagatgtacacaggggggtaacttttgccgacacttgttatacagacattagatctcactgttggcagagactgtaggactgctat

SEQ ID NO: 7668 - DNA, 599 bp, Chicken  19866894201810_1
  misc_feature (1)..(15): n is any nucleotide
nnnnnnnnnnnnnnntatattgattacctatgtatcagtgctatttttatttggaataagactgcaatttcaaaatccatttcttactccttcctgacttcatgcaagaaagaatgaatggtaagacagtgaacactgtgcaggaagcttaatgccttgtttttcatgctcagaatactggcagaggctccccctaccctccattgagaaatatcagtgtctttcaacagtgttcttgggaaagaagcaaagttctgggttttttgctcaccctcctaactgtttgattttctttttctktttttctctccaggtggtttcatcaaggcactaacccatacactgggacttcagattggctgtactcaggtggctattttgatagaaatttctcagactgtccggacatatattgaaataacagaaccaatggctcatctcatctggacatctagttactagatttcattgtaagccagttagtctggttttgtgaataacaaaactcagctttttaaagtaaatcctaacaaaacatcagtcaacaatcaaggatttaatgatcactaatgttggattgccaaatatttaaacactgt

SEQ ID NO: 7669 - DNA, 600 bp, Chicken  19866894201810_2
aaatttctcagactgtccggacatatattgaaataacagaaccaatggctcatctcatctggacatctagttactagatttcattgtaagccagttagtctggttttgtgaataacaaaactcagctttttaaagtaaatcctaacaaaacatcagtcaacaatcaaggatttaatgatcactaatgttggattgccaaatatttaaacactgttgcattcttttcataaagctacatctgaaatcatcatattttcactaatttttaaagggacctttggatctccatttttttttttycccctagtttttatcaggaaggtatgctgtatctggtagagctcataacatccttgaaaactatgtaactataagaaaatagagatatcatctttacttagagtagtgaggaatctaagttttcggaacttggagcagggatgaraagttcataaggtacgaacatgataaaatctagtactgtggatatttcccatgaggagatgcatgtgaaactttcatacagtatgtagcactatgtggggattggagctcctggcccctctctctcaatatgattcaataattcaaaggcgttga

SEQ ID NO: 7670 - DNA, 600 bp, Chicken  19866894201810_3
caaaacatcagtcaacaatcaaggatttaatgatcactaatgttggattgccaaatatttaaacactgttgcattcttttcataaagctacatctgaaatcatcatattttcactaatttttaaagggacctttggatctccatttttttttttycccctagtttttatcaggaaggtatgctgtatctggtagagctcataacatccttgaaaactatgtaactataagaaaatagagatatcatctttacttagagtagtgaggaatctaagttttcggaacttggagcagggatgaraagttcataaggtacgaacatgataaaatctagtactgtggatatttcccatgaggagatgcatgtgaaactttcatacagtatgtagcactatgtggggattggagctcctggcccctctctctcaatatgattcaataattcaaaggcgttgagaaacaaacaacaactttagcttctcaaactgtagtcatctgttacgaagtcttcacaatttctggtcactgtgagcattaaactatatacctgtgataaaattagataaaacatatgttaagagcaaggtgcattaaacaacgt

SEQ ID NO: 7671 - DNA, 600 bp, Chicken  19866894201811_1
gggtcttgggttggaaggagcctcctcaaaccgtctcccagatcctgcttcactcagactgacttcagcaggaacttgaattcttacagcagactaaagagcaggataaatgacgatcacagtgctaagtgggccaaatccctattctctagtctaacagggtgacccctcgctttcctgtaatctatcacgacctctcccaagctaaatattcctttgcaaatcctggcttggacaccatcccaccctgtagtttaacatgttttactactattgaagagcatttcactcctctatctrgactgctccttccaggggtccccaattagcaagaaatagcattccttctcctgaattccttccctcctacgatagcttatgttggtacaagtgtgcagatttttatgtgttgtaaaccaatgcaacatgagatgcacactcaaaatatagagaaagaataaactatttaattcatttttgttcctaagtttggagagcaaaaataccgtcaattatctaacaatcttcacttgtcatagtctgcattttcataagatatttcactcacttcaaaattaaatttgtgaatggcaatttttt

SEQ ID NO: 7672 - DNA, 600 bp, Chicken  19866894201811_2
tatatgttctgccactgctaaagcagcagaattatctctattgatttacaaaaatacgatggagagaggaaaaaagaagggagcgaaaacagctttgaaaactaaaatatacaagaaattgccaactagtgtagaatatggcagggttcctcagattgcattacgtggatcaatatggttctttatttctttctcagtagcaaatgttgtgaactcgttcctgtttcaattgtgaattgcatttgtcaagcatgagttatcttccgaagagcagtgagtgatctctgggagcaatgtgcygtggcttgtgtggacatttcagcattgccagagatgtcaggcaaactgtctgagaggtctgaagctgctgttattcacttctctacaatgtatgttgatgacaccaatacactgctattagttttgtgggacacgggacagtttcaaaatattgactgattcattctccttaaaattgaacttttcagaggtagaaacgcagtgattcaccagatccatgtaaaggaaagaaagtctaacaactgtatttctgaaagagacagagcatttggtctatcaaaggctcccagaactctttca

SEQ ID NO: 7673 - DNA, 600 bp, Chicken  19866894201814_1
acaagagcacacactcggttgtttactggagcatgtggagcttacacaccctgggaggcagcacacggctctccacgtcatcccctgtggatggcatctgttagggatgggcagagccactcacactcagcagccaggccagggctggcagcctccctgcagcctggcagggggagcagctcgcctccagcactcagcctcgtggcagtgggcaccagttccttagaacaacctcagacaaaggctggacaagcactgctgctggctgccttcctcaggagaggaattctcaccccacargagtcctgtttctctattccttgcacattgctatttgrcaattagcaaaacgcagcaatgcttgcagaggcaccaygctgagtattcctacttatgttcaacagctcagagcagggcaggctgggaccagcaaccccttttacctgtaattgyacctactgcacatcagatgcaccgagacgatgagacccctggccagggttgggtatatcttctggtatccttccytgtgcacctaactctgtgttagctaatggatgcctcacagtaaggagacccagccatgaaacccggaggaga

SEQ ID NO: 7674 - DNA, 600 bp, Chicken  19866894201814_2
agcttacacaccctgggaggcagcacacggctctccacgtcatcccctgtggatggcatctgttagggatgggcagagccactcacactcagcagccaggccagggctggcagcctccctgcagcctggcagggggagcagctcgcctccagcactcagcctcgtggcagtgggcaccagttccttagaacaacctcagacaaaggctggacaagcactgctgctggctgccttcctcaggagaggaattctcaccccacargagtcctgtttctctattccttgcacattgctatttgrcaattagcaaaacgcagcaatgcttgcagaggcaccaygctgagtattcctacttatgttcaacagctcagagcagggcaggctgggaccagcaaccccttttacctgtaattgyacctactgcacatcagatgcaccgagacgatgagacccctggccagggttgggtatatcttctggtatccttccytgtgcacctaactctgtgttagctaatggatgcctcacagtaaggagacccagccatgaaacccggaggagaagagttaaccgagagtgaaacccggtgtgataagtgct

SEQ ID NO: 7675 - DNA, 600 bp, Chicken  19866894201814_3
gtcatcccctgtggatggcatctgttagggatgggcagagccactcacactcagcagccaggccagggctggcagcctccctgcagcctggcagggggagcagctcgcctccagcactcagcctcgtggcagtgggcaccagttccttagaacaacctcagacaaaggctggacaagcactgctgctggctgccttcctcaggagaggaattctcaccccacargagtcctgtttctctattccttgcacattgctatttgrcaattagcaaaacgcagcaatgcttgcagaggcaccaygctgagtattcctacttatgttcaacagctcagagcagggcaggctgggaccagcaaccccttttacctgtaattgyacctactgcacatcagatgcaccgagacgatgagacccctggccagggttgggtatatcttctggtatccttccytgtgcacctaactctgtgttagctaatggatgcctcacagtaaggagacccagccatgaaacccggaggagaagagttaaccgagagtgaaacccggtgtgataagtgctgagctgaggagccaatgccaggaaggagtcagaacaaa

SEQ ID NO: 7676 - DNA, 600 bp, Chicken  19866894201814_4
tccctgcagcctggcagggggagcagctcgcctccagcactcagcctcgtggcagtgggcaccagttccttagaacaacctcagacaaaggctggacaagcactgctgctggctgccttcctcaggagaggaattctcaccccacargagtcctgtttctctattccttgcacattgctatttgrcaattagcaaaacgcagcaatgcttgcagaggcaccaygctgagtattcctacttatgttcaacagctcagagcagggcaggctgggaccagcaaccccttttacctgtaattgyacctactgcacatcagatgcaccgagacgatgagacccctggccagggttgggtatatcttctggtatccttccytgtgcacctaactctgtgttagctaatggatgcctcacagtaaggagacccagccatgaaacccggaggagaagagttaaccgagagtgaaacccggtgtgataagtgctgagctgaggagccaatgccaggaaggagtcagaacaaaacaacacccgctcagctaatgctggcgataagcaaatccaaagccagacagatgcaaaagctgttgtgaagcataaa

SEQ ID NO: 7677 - DNA, 600 bp, Chicken  19866894201814_5
caacctcagacaaaggctggacaagcactgctgctggctgccttcctcaggagaggaattctcaccccacargagtcctgtttctctattccttgcacattgctatttgrcaattagcaaaacgcagcaatgcttgcagaggcaccaygctgagtattcctacttatgttcaacagctcagagcagggcaggctgggaccagcaaccccttttacctgtaattgyacctactgcacatcagatgcaccgagacgatgagacccctggccagggttgggtatatcttctggtatccttccytgtgcacctaactctgtgttagctaatggatgcctcacagtaaggagacccagccatgaaacccggaggagaagagttaaccgagagtgaaacccggtgtgataagtgctgagctgaggagccaatgccaggaaggagtcagaacaaaacaacacccgctcagctaatgctggcgataagcaaatccaaagccagacagatgcaaaagctgttgtgaagcataaaataccacttctgtaaagtcacaccttggaaccgtctgccattaggtgccatgtctaacaaagccaggaacctaag

SEQ ID NO: 7678 - DNA, 600 bp, Chicken  19866894201823_1
tgccccagcctcaccccacccagagccagggctgcagcagcagatccagggctgacccccgcggtgctgcagccattgggcaacatccaggtgtccccaggcagggtggggctgggataggcagccccgcacagccacaagctcctgcgagcagtcagctaataggtgctaattagaagcatattggaaaaataagcaggtgctcaggatgatgagggatgcgaaccagaagaaacagtacctgggtgctgatggctggggcaccatcacgctgccgtgccacctgtgctttacataacygggggataatgaggtcttggcatagcgggcacaaggccagagacagaaaacaaagaagataccaggcctacagcagagtgactcctgcacagggaaccccagccccaagttcagcctctcaaggctgaggtctggcattctctgtgccggctgcttcccgctagaagcagcgggggggggagcagcaagggctcccagcagcacacagcatgaggtgagggccatgccagcmgtgcaccaggggcagtgagcaacccggtgccagctgcccgcagatttcagcagctgctctttctgcag

SEQ ID NO: 7679 - DNA, 600 bp, Chicken  19866894201823_2
aaacagtacctgggtgctgatggctggggcaccatcacgctgccgtgccacctgtgctttacataacygggggataatgaggtcttggcatagcgggcacaaggccagagacagaaaacaaagaagataccaggcctacagcagagtgactcctgcacagggaaccccagccccaagttcagcctctcaaggctgaggtctggcattctctgtgccggctgcttcccgctagaagcagcgggggggggagcagcaagggctcccagcagcacacagcatgaggtgagggccatgccagcmgtgcaccaggggcagtgagcaacccggtgccagctgcccgcagatttcagcagctgctctttctgcagcatttcccttggctttctaaatcagttttggtgtagttctgcttttgctggggtacaggtggtgaagtgaaaccccrcagccaaagggcaggagacacgacactgcaggggggaggggggcatgctgctgctcaccaaacactcagggctgcgaaccccggcctacgataagcattgcagacatccaggagcagcccaaggccggggccgtgctgggtacaacgttgctttg

SEQ ID NO: 7680 - DNA, 572 bp, Chicken  19866894201823_3
gtgactcctgcacagggaaccccagccccaagttcagcctctcaaggctgaggtctggcattctctgtgccggctgcttcccgctagaagcagcgggggggggagcagcaagggctcccagcagcacacagcatgaggtgagggccatgccagcmgtgcaccaggggcagtgagcaacccggtgccagctgcccgcagatttcagcagctgctctttctgcagcatttcccttggctttctaaatcagttttggtgtagttctgcttttgctggggtacaggtggtgaagtgaaaccccrcagccaaagggcaggagacacgacactgcaggggggaggggggcatgctgctgctcaccaaacactcagggctgcgaaccccggcctacgataagcattgcagacatccaggagcagcccaaggccggggccgtgctgggtacaacgttgctttgtctggcgctgccccgaggcctcgtgctggtggccacgtgagagcggagcagctgggccaccacccagggccccgctccgctgcgtgacaccgcagtcagcccccccgccctgcgctg

SEQ ID NO: 7681 - DNA, 600 bp, Chicken  19866894201827_1
actacatactgtactgcccactgctggtttggtaaatgggagttggcaccgtaacagtggcaatggcaggtgctgctgtttcctcttcagacttttcctcttcgatccttggcactcctggggcgtctgaggacaagtcattcaaaatttttctggcaaagacagtgtgttgtagagattttaataaaaagcgagaaaacgtctttttgatgcataattattgggaaaactgggaagcacagtgagccagcactgcaaatatgagtgcagaatgaaaaacccagactaccttcaaattcytattggagaaagttgttcggagtgctatgcacagatgggtaaggcagctagcaaacagcagcacaagtgcttctcaacaattgcaacctttcccttttcttaaaaacgtgtttgtatctcatgtattttgacttgtttcctgctttcatccacaaagtatcygaagaaagcaatgtatgcaaaacctcctcattcacatcagaggaactgctccctttcagagaccatcaagtcctcagccagagagacaagtataaaggaagtctgcagaaagcctgtacagagccaccagcttttaat

SEQ ID NO: 7682 - DNA, 561 bp, Chicken  19866894201827_2
cagtgtgttgtagagattttaataaaaagcgagaaaacgtctttttgatgcataattattgggaaaactgggaagcacagtgagccagcactgcaaatatgagtgcagaatgaaaaacccagactaccttcaaattcytattggagaaagttgttcggagtgctatgcacagatgggtaaggcagctagcaaacagcagcacaagtgcttctcaacaattgcaacctttcccttttcttaaaaacgtgtttgtatctcatgtattttgacttgtttcctgctttcatccacaaagtatcygaagaaagcaatgtatgcaaaacctcctcattcacatcagaggaactgctccctttcagagaccatcaagtcctcagccagagagacaagtataaaggaagtctgcagaaagcctgtacagagccaccagcttttaatggaacagctgcctgggagacaatgctgagtgtttaagcagcacagttatgtttacagaggaggtaaaaactctgccttagaaagctgtaagattagcatgtgtaaagaaaaagcagtttgtta

SEQ ID NO: 7683 - DNA, 600 bp, Chicken  19866894201832_1
ccaaaggatccaatgaaagccttcatgccatggaatggcctggcagcagctaatgtttacattagctgtctcaagaaacatccacctaaatctctgcagaaatctgaacagtccaaaggaatgcgataatttttctactggactcaaagaaaccttaaaaatcagccattgctggagaaaggacacaaactgccacgctggaaaatggaaaacctctcggtatttctgcatcacttctggtttcttctctaggctggattcctgctgcttcctttcagtgcaaacactgaaccatgtttrcccaaaggtgagatcaggcaggttcccaacaagaaccagagctggctcacactcttcacagtaagtctttgtgaatgtggtggaaaggtttgcatttgcttgggtttgtgcgtgtaattcaggctggaaatcagatcagaaagcagggacgctggtgctgctgcttactgagaaagctttggaaggttccgagcacctttctgatttctctgcacaatttagctgcaaaagcaacattggaaataaaaagcaaattcatagcaaaacctgcaaattggttttaccagttccagtggccca

SEQ ID NO: 7684 - DNA, 600 bp, Chicken  19866894201832_2
gcatctttgtgtcctgcctcaggcttttttttttttttacagtctctgtggtttccttactgataaggtttcaggaaggatcttgttcgctgagcaagttcagagctgatgaaatgtccttctgcctcattaccctcctggtctcacatacttgtctaagcagtgctggcagcactgggaacatctccgtgctccagctcgtcgtctccttcttaacgcctcctggtacagctcttcaagagcagaaacagagtaggagctgggaatctgggagcaacgagggatgcctcacaagcaggrgcacaaatgcttggtttggcatatagagaagggaggcacgggcagaggagcaggtggctcctctcagctcaaagcgtttgtgagatggggccaggtgcccactgtgtgcaccayggcagcggaaggcacgtgccttttccaatggttggacttcaggcttctggtttcagtttaacagcttggctaaaggcacctccacaaaccccatgcaatgtttgtttttgtggttgcttctggcagaagaatctgaaattcacacctttgtcccttgatagtgctttcggtacacgtttcactgca

SEQ ID NO: 7685 - DNA, 600 bp, Chicken  19866894201832_3
tgtccttctgcctcattaccctcctggtctcacatacttgtctaagcagtgctggcagcactgggaacatctccgtgctccagctcgtcgtctccttcttaacgcctcctggtacagctcttcaagagcagaaacagagtaggagctgggaatctgggagcaacgagggatgcctcacaagcaggrgcacaaatgcttggtttggcatatagagaagggaggcacgggcagaggagcaggtggctcctctcagctcaaagcgtttgtgagatggggccaggtgcccactgtgtgcaccayggcagcggaaggcacgtgccttttccaatggttggacttcaggcttctggtttcagtttaacagcttggctaaaggcacctccacaaaccccatgcaatgtttgtttttgtggttgcttctggcagaagaatctgaaattcacacctttgtcccttgatagtgctttcggtacacgtttcactgcacatgcttgctactgcagcgaatgtggctgcctaagatgagaacatccccagtgtcttaccaagaggttaaaagccagtttggttttctggaaagcagtcgatgaactcagcctc

SEQ ID NO: 7686 - DNA, 600 bp, Chicken  19866894201839_1
catgctgtatgtctcatgctttcagctcatacatgtccattttgatggatttgaatacaaatgagcattattagcaccctaacaactgcccaaaagataggaaatgcctttagaaatgtcactacaggttctcaacaaaagtcagcacctttgttcacctctgcgtgaaaagataggaaaccctcccagctcaaattttagcagttgcattgataggatttggccctcagacataccgagggtcaaatcctggggaactgctttggggtaacgtggtcatcacattatttttaatatttkggacctgaatagtcacacaaaataagatgtgtttctttgatttaccatgttcccrtgtggatgcgtctgcttgctccaggaacacagrccccagggaaccactttggagaggattgtagggggacyatgtcttcctctgctcatcaaggatgtaaatgtgtctggatcttatatcagctacctgtgcacttccatttacacgttcacagcagagccacgcagcctggcttaatgtctctgcttgacgcgttacccaaggaggtaatcgtttccctagacctgcaaactcttagctgattt

SEQ ID NO: 7687 - DNA, 575 bp, Chicken  19866894201839_2
tacaaatgagcattattagcaccctaacaactgcccaaaagataggaaatgcctttagaaatgtcactacaggttctcaacaaaagtcagcacctttgttcacctctgcgtgaaaagataggaaaccctcccagctcaaattttagcagttgcattgataggatttggccctcagacataccgagggtcaaatcctggggaactgctttggggtaacgtggtcatcacattatttttaatatttkggacctgaatagtcacacaaaataagatgtgtttctttgatttaccatgttcccrtgtggatgcgtctgcttgctccaggaacacagrccccagggaaccactttggagaggattgtagggggacyatgtcttcctctgctcatcaaggatgtaaatgtgtctggatcttatatcagctacctgtgcacttccatttacacgttcacagcagagccacgcagcctggcttaatgtctctgcttgacgcgttacccaaggaggtaatcgtttccctagacctgcaaactcttagctgatttctgcatgcacctgaaagtgctgtttcccaa

SEQ ID NO: 7688 - DNA, 542 bp, Chicken  19866894201839_3
cccaaaagataggaaatgcctttagaaatgtcactacaggttctcaacaaaagtcagcacctttgttcacctctgcgtgaaaagataggaaaccctcccagctcaaattttagcagttgcattgataggatttggccctcagacataccgagggtcaaatcctggggaactgctttggggtaacgtggtcatcacattatttttaatatttkggacctgaatagtcacacaaaataagatgtgtttctttgatttaccatgttcccrtgtggatgcgtctgcttgctccaggaacacagrccccagggaaccactttggagaggattgtagggggacyatgtcttcctctgctcatcaaggatgtaaatgtgtctggatcttatatcagctacctgtgcacttccatttacacgttcacagcagagccacgcagcctggcttaatgtctctgcttgacgcgttacccaaggaggtaatcgtttccctagacctgcaaactcttagctgatttctgcatgcacctgaaagtgctgtttcccaa

SEQ ID NO: 7689 - DNA, 504 bp, Chicken  19866894201839_4
ggttctcaacaaaagtcagcacctttgttcacctctgcgtgaaaagataggaaaccctcccagctcaaattttagcagttgcattgataggatttggccctcagacataccgagggtcaaatcctggggaactgctttggggtaacgtggtcatcacattatttttaatatttkggacctgaatagtcacacaaaataagatgtgtttctttgatttaccatgttcccrtgtggatgcgtctgcttgctccaggaacacagrccccagggaaccactttggagaggattgtagggggacyatgtcttcctctgctcatcaaggatgtaaatgtgtctggatcttatatcagctacctgtgcacttccatttacacgttcacagcagagccacgcagcctggcttaatgtctctgcttgacgcgttacccaaggaggtaatcgtttccctagacctgcaaactcttagctgatttctgcatgcacctgaaagtgctgtttcccaa

SEQ ID NO: 7690 - DNA, 599 bp, Chicken  19866894201846_1
  misc_feature (1)..(103): n is any nucleotide
nnnnnnnnnnnnnnnnnnnnnnnnnnnnnnnnnnnnnnnnnnnnnnnnnnnnnnnnnnnnnnnnnnnnnnnnnnnnnnnnnnnnnnnnnnnnnnnnnnnnnnnatgagctttgctctgtcactgttatggacaacgtcctcttaagctttccccatccctttctagtcatggccccatgggacttgcaccacttttcgtcacatcactcttctcctctggagtcacccgctcactgttaaacctcctttgcaccaactcccactggccttcctcagagaaccagctgcacatcgacaatkacagttttttttcgggtttttgttgttgttgttgttgttgttttgtttatttttttcccaagaaacagaaggaaatgtgatgcaactgaatgaacagtaaaacacagtgatgaaccgaatgccttgtccaagctgcctctactgaggtttgtctttcacggggaatacttgtacaagaaatgagttagacagagataggaatggatagatgtaatcacagtaaaggagttgacaaaagagactgtcagactttggagagatggtgcaagttccagtaatctccctgaaggtcacagatc

SEQ ID NO: 7691 - DNA, 600 bp, Chicken  19866894201853_1
gaatgaatgttcctgcaggtgagcagcagctatattgcagttttcatggtgtttaaagtgcaggagtgttagttaatgggctgctatgtaattagtcttaggtgtaggtacttgaagtcttggtagaaacagtaattaaaagaaaagtagaaaagtatctggaatgtgtaattaagcaaatttgatataggcagtgcgggcatcacgtaggcaaactgcatacagagctccagcctgtagtcctgttgccccatgctttactcatctctcctgcatcccaccaggcctccaggacacccrcrtcacctccacatccagcayctagcactgaacagccctatctcttcatgagggccatcaccagaacataaactacaggcagaaagtgctggagcagacaacacaccgactgcagtaatcccagcatcctcaaggagcagccgatgccttaccactcccaccgtgtcagctcctcagtctgcacctgcaggtattctgctgaccaacattcagatggacaaaccatctgaacagggtcagcacggcccaagcagctcggggacatcccaagcccaaccacagcccagtgttgtccaaggg

SEQ ID NO: 7692 - DNA, 600 bp, Chicken  19866894201853_2
atgaatgttcctgcaggtgagcagcagctatattgcagttttcatggtgtttaaagtgcaggagtgttagttaatgggctgctatgtaattagtcttaggtgtaggtacttgaagtcttggtagaaacagtaattaaaagaaaagtagaaaagtatctggaatgtgtaattaagcaaatttgatataggcagtgcgggcatcacgtaggcaaactgcatacagagctccagcctgtagtcctgttgccccatgctttactcatctctcctgcatcccaccaggcctccaggacacccrcrtcacctccacatccagcayctagcactgaacagccctatctcttcatgagggccatcaccagaacataaactacaggcagaaagtgctggagcagacaacacaccgactgcagtaatcccagcatcctcaaggagcagccgatgccttaccactcccaccgtgtcagctcctcagtctgcacctgcaggtattctgctgaccaacattcagatggacaaaccatctgaacagggtcagcacggcccaagcagctcggggacatcccaagcccaaccacagcccagtgttgtccaagggga

SEQ ID NO: 7693 - DNA, 600 bp, Chicken  19866894201853_3
agcagcagctatattgcagttttcatggtgtttaaagtgcaggagtgttagttaatgggctgctatgtaattagtcttaggtgtaggtacttgaagtcttggtagaaacagtaattaaaagaaaagtagaaaagtatctggaatgtgtaattaagcaaatttgatataggcagtgcgggcatcacgtaggcaaactgcatacagagctccagcctgtagtcctgttgccccatgctttactcatctctcctgcatcccaccaggcctccaggacacccrcrtcacctccacatccagcayctagcactgaacagccctatctcttcatgagggccatcaccagaacataaactacaggcagaaagtgctggagcagacaacacaccgactgcagtaatcccagcatcctcaaggagcagccgatgccttaccactcccaccgtgtcagctcctcagtctgcacctgcaggtattctgctgaccaacattcagatggacaaaccatctgaacagggtcagcacggcccaagcagctcggggacatcccaagcccaaccacagcccagtgttgtccaaggggagctgccaccyctgagctga

SEQ ID NO: 7694 - DNA, 600 bp, Chicken  19866894201853_4
atccagcayctagcactgaacagccctatctcttcatgagggccatcaccagaacataaactacaggcagaaagtgctggagcagacaacacaccgactgcagtaatcccagcatcctcaaggagcagccgatgccttaccactcccaccgtgtcagctcctcagtctgcacctgcaggtattctgctgaccaacattcagatggacaaaccatctgaacagggtcagcacggcccaagcagctcggggacatcccaagcccaaccacagcccagtgttgtccaaggggagctgccaccyctgagctgacccaccacggggcgcctcctcttctgagctcattaacactaaygtgtttttctccttgcttttcatcacgttatcccaaggtttgtttaccctcaagactgaatttgcagctgggttttggtccttcatttctcaggcgcatcccacagaagygrgcaaaaarcaacactacctattttaagaaaaaatcctatcccaaaacgagcacattatgagcattacacattgagcattatgcaagaacaaggctctccctgttgctgggggtgactatgacaaraactccaatca

SEQ ID NO: 7695 - DNA, 600 bp, Chicken  19866894201853_5
aacataaactacaggcagaaagtgctggagcagacaacacaccgactgcagtaatcccagcatcctcaaggagcagccgatgccttaccactcccaccgtgtcagctcctcagtctgcacctgcaggtattctgctgaccaacattcagatggacaaaccatctgaacagggtcagcacggcccaagcagctcggggacatcccaagcccaaccacagcccagtgttgtccaaggggagctgccaccyctgagctgacccaccacggggcgcctcctcttctgagctcattaacactaaygtgtttttctccttgcttttcatcacgttatcccaaggtttgtttaccctcaagactgaatttgcagctgggttttggtccttcatttctcaggcgcatcccacagaagygrgcaaaaarcaacactacctattttaagaaaaaatcctatcccaaaacgagcacattatgagcattacacattgagcattatgcaagaacaaggctctccctgttgctgggggtgactatgacaaraactccaatcacatgcccacatgctgctcttccacaagcacactcttattcagagaatgagaa

SEQ ID NO: 7696 - DNA, 600 bp, Chicken  19866894201853_6
cagtctgcacctgcaggtattctgctgaccaacattcagatggacaaaccatctgaacagggtcagcacggcccaagcagctcggggacatcccaagcccaaccacagcccagtgttgtccaaggggagctgccaccyctgagctgacccaccacggggcgcctcctcttctgagctcattaacactaaygtgtttttctccttgcttttcatcacgttatcccaaggtttgtttaccctcaagactgaatttgcagctgggttttggtccttcatttctcaggcgcatcccacagaagygrgcaaaaarcaacactacctattttaagaaaaaatcctatcccaaaacgagcacattatgagcattacacattgagcattatgcaagaacaaggctctccctgttgctgggggtgactatgacaaraactccaatcacatgcccacatgctgctcttccacaagcacactcttattcagagaatgagaactcagggcacctttctccaccttcccttggtgcacttgtgccctagctggtgctgccactgcatgctcacactgtacacagaggttatttatatcctctgtgtttttccg

SEQ ID NO: 7697 - DNA, 600 bp, Chicken  19866894201853_7
gtctgcacctgcaggtattctgctgaccaacattcagatggacaaaccatctgaacagggtcagcacggcccaagcagctcggggacatcccaagcccaaccacagcccagtgttgtccaaggggagctgccaccyctgagctgacccaccacggggcgcctcctcttctgagctcattaacactaaygtgtttttctccttgcttttcatcacgttatcccaaggtttgtttaccctcaagactgaatttgcagctgggttttggtccttcatttctcaggcgcatcccacagaagygrgcaaaaarcaacactacctattttaagaaaaaatcctatcccaaaacgagcacattatgagcattacacattgagcattatgcaagaacaaggctctccctgttgctgggggtgactatgacaaraactccaatcacatgcccacatgctgctcttccacaagcacactcttattcagagaatgagaactcagggcacctttctccaccttcccttggtgcacttgtgccctagctggtgctgccactgcatgctcacactgtacacagaggttatttatatcctctgtgtttttccgag

SEQ ID NO: 7698 - DNA, 600 bp, Chicken  19866894201853_8
ctgcaggtattctgctgaccaacattcagatggacaaaccatctgaacagggtcagcacggcccaagcagctcggggacatcccaagcccaaccacagcccagtgttgtccaaggggagctgccaccyctgagctgacccaccacggggcgcctcctcttctgagctcattaacactaaygtgtttttctccttgcttttcatcacgttatcccaaggtttgtttaccctcaagactgaatttgcagctgggttttggtccttcatttctcaggcgcatcccacagaagygrgcaaaaarcaacactacctattttaagaaaaaatcctatcccaaaacgagcacattatgagcattacacattgagcattatgcaagaacaaggctctccctgttgctgggggtgactatgacaaraactccaatcacatgcccacatgctgctcttccacaagcacactcttattcagagaatgagaactcagggcacctttctccaccttcccttggtgcacttgtgccctagctggtgctgccactgcatgctcacactgtacacagaggttatttatatcctctgtgtttttccgagatagtctc

SEQ ID NO: 7699 - DNA, 519 bp, Chicken  19866894201853_9
agctgccaccyctgagctgacccaccacggggcgcctcctcttctgagctcattaacactaaygtgtttttctccttgcttttcatcacgttatcccaaggtttgtttaccctcaagactgaatttgcagctgggttttggtccttcatttctcaggcgcatcccacagaagygrgcaaaaarcaacactacctattttaagaaaaaatcctatcccaaaacgagcacattatgagcattacacattgagcattatgcaagaacaaggctctccctgttgctgggggtgactatgacaaraactccaatcacatgcccacatgctgctcttccacaagcacactcttattcagagaatgagaactcagggcacctttctccaccttcccttggtgcacttgtgccctagctggtgctgccactgcatgctcacactgtacacagaggttatttatatcctctgtgtttttccgagatagtctcattgtgatagattaaagctgaacttctaaaggcgca

SEQ ID NO: 7700 - DNA, 600 bp, Chicken  19866894201855_1
aacaagccctgtccttcagacgtgcaaatgtaaaaccgttcagaaatgaaagtaaatgtcatgtctctggtgtttgtgcactgaaatagtagccccagatttctcacctttatgttgtgaaaaacgtaagtcacgtttggcacagcaggctcagcagtttgaagatgaaggtaaatagaaatcctggggctttcattataattgaacaatcactgggaaatatgaaacctgtgtattgtttttaaagaagttgttgtacattatttaactttgattctttccaaagctacataataattyaaacctataggacctcaaccacagcccattgaagctgatggagaacttcttgaattcacagatcagctttaactataactgacagaatggagcaaaatagtatgtacaacatagaatcttttatattaaatccccataatcgaaattggaagggatctttgtttttcttgcttatatctgtaataccagtatgttcatggctaccatatcttattttattggttttataagaagcacggtatgttcttaataaaatcattactagtgatctagtaatgtagactgtgatcttgtaaaatg

SEQ ID NO: 7701 - DNA, 600 bp, Chicken  19866894201862_1
actgctgccgttctcctgaaataacagtttatcaaatgccgtaaataagagtttttcgaaagagttgataatacgatgtaatgacacttttatagctatttgtggctggcatgtactgctgcacacaaaactcaaatgctgggtggatatcaaaatagagatcaaagagacctgtaggagaaaatacagctttgagtctccagctccattgaaagctcttattaagttattagtaaattattaatagcagactctaggacagttttttttgttgttgttgtttttcctttttcttccttkggacatgctaagatagaaaaggataaacaatattttcctccatgctgaattcatcacattgcaatgcatttttttctgccttgtaaaaatcacctgctatgtcacagtgaaagccttataggaataggttccttattcgtactgtgagtactccactattatcagtccgcgcaccattaccataaccacaattctttgcctctttgcacctcaaaacctaagtgcacaccaatcaaaacattctgaaaaatattgtttccataaatacgtataaattcctgaaaaataatcatctctagt

SEQ ID NO: 7702 - DNA, 600 bp, Chicken  19866894201862_2
aatatttttcaagcaagaaagaaaagcgcaagtcagtgcgtggttttgttctggtattcctggtagattactgaagttcatcgtattttcattttccatctctgtacaataaaaagtttaatattaagtaagttctacaacatttttttttcccaccagaataccaaagtcatgctgacagaagcttgtggaacttgtcattagtgtgggtgaggactttctgtccacagaatgagaacccatcatcctttcctgactgctcagcttcagtaaccgttatggtgtcacctggtaaccttycatatcgctaccccaggagagaggttgccaaatatgggaagctttggctgctttgggaagagtaaaggaactgagcaaaaacagtacttctgcagaagtgcttgtaaaggaaacccttaattttatagcaagaagttagttcacataatatgaagtaatggaaactgtcatctcagtatatttactcccattgctccatttgctttcataatggaagacttttttgcaatatcagcatcaggtatctcttcagggtgacagcttctctccctgcatgctaataaactcatttcaagtcta

SEQ ID NO: 7703 - DNA, 599 bp, Chicken  19866894201865_1
  misc_feature (1)..(153): n is any nucleotide
nnnnnnnnnnnnnnnnnnnnnnnnnnnnnnnnnnnnnnnnnnnnnnnnnnnnnnnnnnnnnnnnnnnnnnnnnnnnnnnnnnnnnnnnnnnnnnnnnnnnnnnnnnnnnnnnnnnnnnnnnnnnnnnnnnnnnnnnnnnnnnnnnnnnnnnnncgtgtgaagcagtgggtgcaggtttctgtgctcctcacgaaggaggagcttgtattaaactgcattcttctttcttgtggaaacaataagaacgtgctgagtgaagcacagatgtgtagcaggaaaaacccagtgatattactgaayggagatcaagcggtttagatgcagaamtttctatggttttaagaagagcagagtratgggaaggaagaagggggaattctgtttcaatgcaagcaccaaatgttcctgccttatgagcaacccagcccctgcagcacaatctatggcttgagaaaccacagaagttgttctgctcactgcctcaaggtctagcttgagtaacctgcagcaaatggaaaataaaagcagttcaaaaaatcagtcggtgaggtttaacgcacagcaggaaaacagactgaggaatttttcacaaacccgat

SEQ ID NO: 7704 - DNA, 599 bp, Chicken  19866894201865_2
  misc_feature (1)..(126): n is any nucleotide
nnnnnnnnnnnnnnnnnnnnnnnnnnnnnnnnnnnnnnnnnnnnnnnnnnnnnnnnnnnnnnnnnnnnnnnnnnnnnnnnnnnnnnnnnnnnnnnnnnnnnnnnnnnnnnnnnnnnnnnnnnnnnncgtgtgaagcagtgggtgcaggtttctgtgctcctcacgaaggaggagcttgtattaaactgcattcttctttcttgtggaaacaataagaacgtgctgagtgaagcacagatgtgtagcaggaaaaacccagtgatattactgaayggagatcaagcggtttagatgcagaamtttctatggttttaagaagagcagagtratgggaaggaagaagggggaattctgtttcaatgcaagcaccaaatgttcctgccttatgagcaacccagcccctgcagcacaatctatggcttgagaaaccacagaagttgttctgctcactgcctcaaggtctagcttgagtaacctgcagcaaatggaaaataaaagcagttcaaaaaatcagtcggtgaggtttaacgcacagcaggaaaacagactgaggaatttttcacaaacccgatgcttaatctatgctgccaaactctacc

SEQ ID NO: 7705 - DNA, 599 bp, Chicken  19866894201865_3
  misc_feature (1)..(98): n is any nucleotide
nnnnnnnnnnnnnnnnnnnnnnnnnnnnnnnnnnnnnnnnnnnnnnnnnnnnnnnnnnnnnnnnnnnnnnnnnnnnnnnnnnnnnnnnnnnnnnnnnncgtgtgaagcagtgggtgcaggtttctgtgctcctcacgaaggaggagcttgtattaaactgcattcttctttcttgtggaaacaataagaacgtgctgagtgaagcacagatgtgtagcaggaaaaacccagtgatattactgaayggagatcaagcggtttagatgcagaamtttctatggttttaagaagagcagagtratgggaaggaagaagggggaattctgtttcaatgcaagcaccaaatgttcctgccttatgagcaacccagcccctgcagcacaatctatggcttgagaaaccacagaagttgttctgctcactgcctcaaggtctagcttgagtaacctgcagcaaatggaaaataaaagcagttcaaaaaatcagtcggtgaggtttaacgcacagcaggaaaacagactgaggaatttttcacaaacccgatgcttaatctatgctgccaaactctacctgggcttctctgggtgattaatgtgcta

SEQ ID NO: 7706 - DNA, 599 bp, Chicken  19866894201866_1
  misc_feature (1)..(183): n is any nucleotide
nnnnnnnnnnnnnnnnnnnnnnnnnnnnnnnnnnnnnnnnnnnnnnnnnnnnnnnnnnnnnnnnnnnnnnnnnnnnnnnnnnnnnnnnnnnnnnnnnnnnnnnnnnnnnnnnnnnnnnnnnnnnnnnnnnnnnnnnnnnnnnnnnnnnnnnnnnnnnnnnnnnnnnnnnnnnnnnnnnnnnnnggaacactgcatgactggagttgcaagaggagggaaggaacggtgagcagagccagtgcagcctcttctgccacagcctgtggtttctttgggaccttgaggacacattctgccccsgtgctcagtgctgttaccctacctgagtagggaaggtgaatctggacactcatttaggatttccccccactgtgtgtattgaaccagacaggtgctgagccttgagtgctccttgagagaaagtaggacactcagtgccaggggttgatgccaagggccgacccacagcttgccatgggcagggatctcaaagtgctgcacttgagtcaaggcaatcccaggtatgagtacagagtgagagaaaaactccttgagagcagcagtgtggagcaggacctgggggtcctgatgggtgaaaa

SEQ ID NO: 7707 - DNA, 600 bp, Chicken  19866894201866_2
catttaggatttccccccactgtgtgtattgaaccagacaggtgctgagccttgagtgctccttgagagaaagtaggacactcagtgccaggggttgatgccaagggccgacccacagcttgccatgggcagggatctcaaagtgctgcacttgagtcaaggcaatcccaggtatgagtacagagtgagagaaaaactccttgagagcagcagtgtggagcaggacctgggggtcctgatgggtgaaaagctggacaggagccagcagtacacgcttgcagcccagaaggccaacggtaycctgggctgcatcaacagagggatggcagcagggagagcgacaggattgtccacttctactctgccctcatgaggccccatctgaagtcctgtgtccaggcctggggtaccctgcacaagaagatgcagagatgttggagcaggtccagaggagagccatgaaaatcatcaaagggctggagggagctgggcttgtttagcttggagaaggcttcagagagacctcattttggccttccagtacttgaagggaacttgcaagcagaagggggactgactttctatatggtctgatagtga

SEQ ID NO: 7708 - DNA, 598 bp, Chicken  19866894201869_1
taattctgtaagaccagaataagagaaatcccaaaggtccaaagcatcttgcctatgaaggaatgttgagggagatgggcttgtttagcatgcagaagagaaggctctggagagatctcaatgctgtcttgcagtacttgaagggagcttataagcagaagggggactgactttttacacaatctgatagtgacaggacaagagggaatggctttaaagtaaaagaggggagatttacattagatattggaaagaaattctttaactcagagggtggtgaggcattggagtaagctgccyagagaatctgtacatgccctacccttagaagtgctcaaggctggactgaatggggtcctgggctgcctggtctgatggatgacaactagcccaagataggcggttggagctgggtgtgatctttaaggtcctctccaatctatgccattctttgattctatgactctgtggttgtatgaggatcagaccctactattacggtagatatggcacagaggaacatggtttggggttatggtggtgatgggttggattggagaaactggcctcttaggggtcttctccaagtttaataatt

SEQ ID NO: 7709 - DNA, 600 bp, Chicken  19866894201873_1
atcaggaaaaattcactaaaatatatgacactgtagaatgtattgactgcattcttagtaacagcagccatagtatcaggcaattttatgaatcctttcatctaccatacctgacagaatcaaaagaagtttgaaaatctggatttatatctctaacagtaaattcctacttgcaaaagtgcagtactacagcctggagaatttgttgccttttgatttaaagcagaggttttaaaggcatattgacatctcatgaaagctttgaaaattcagtttggagagatacactggaatcgtgcrtgtgtggtttatgrttttyttcttcagcaagttcatccatacactgtattgggggttttgaaaagctgttaatattaatgctgggaagaatcaggcagataccttaaatttaaattactgttttgaaaatgggcaaaagttttagcaaagagcattatgaaatctggtgataaatcgattatgaaaatgaatagtttggtggtcttaaaaaaatagtaatcttattttcacggaaaatagggcatctcctgtgatattagttggattatgtccattctgagagatagaagctatgttaaa

SEQ ID NO: 7710 - DNA, 600 bp, Chicken  19866894201873_2
actaaaatatatgacactgtagaatgtattgactgcattcttagtaacagcagccatagtatcaggcaattttatgaatcctttcatctaccatacctgacagaatcaaaagaagtttgaaaatctggatttatatctctaacagtaaattcctacttgcaaaagtgcagtactacagcctggagaatttgttgccttttgatttaaagcagaggttttaaaggcatattgacatctcatgaaagctttgaaaattcagtttggagagatacactggaatcgtgcrtgtgtggtttatgrttttyttcttcagcaagttcatccatacactgtattgggggttttgaaaagctgttaatattaatgctgggaagaatcaggcagataccttaaatttaaattactgttttgaaaatgggcaaaagttttagcaaagagcattatgaaatctggtgataaatcgattatgaaaatgaatagtttggtggtcttaaaaaaatagtaatcttattttcacggaaaatagggcatctcctgtgatattagttggattatgtccattctgagagatagaagctatgttaaaaaactacccctatg

SEQ ID NO: 7711 - DNA, 600 bp, Chicken  19866894201873_3
aatatatgacactgtagaatgtattgactgcattcttagtaacagcagccatagtatcaggcaattttatgaatcctttcatctaccatacctgacagaatcaaaagaagtttgaaaatctggatttatatctctaacagtaaattcctacttgcaaaagtgcagtactacagcctggagaatttgttgccttttgatttaaagcagaggttttaaaggcatattgacatctcatgaaagctttgaaaattcagtttggagagatacactggaatcgtgcrtgtgtggtttatgrttttyttcttcagcaagttcatccatacactgtattgggggttttgaaaagctgttaatattaatgctgggaagaatcaggcagataccttaaatttaaattactgttttgaaaatgggcaaaagttttagcaaagagcattatgaaatctggtgataaatcgattatgaaaatgaatagtttggtggtcttaaaaaaatagtaatcttattttcacggaaaatagggcatctcctgtgatattagttggattatgtccattctgagagatagaagctatgttaaaaaactacccctatgtggac

SEQ ID NO: 7712 - DNA, 600 bp, Chicken  19866894201875_1
tattattattttacaaaaactgcaggaggtctctggaagataattttttagaaggaaaaattcaaagcccctacaggcaacccatttaaaagccagtatactaaaaatcaacaaatgtgaaaaatgaaagcagcatcatttggctttgctgctgagtttctaaaactatcagaagaggcagtaaaaaccctgaggactttgaacatgttgaatttatttgtcacaacaaaaatcctattgttcttttctcatttacgtagtgcttcttgatatggcagttagctaaacagaaggtctgtsaagataccacccagggaaatatctaagtttaaactttatcattcaaaaacttggaacatatgattccacagttgtcaaaattcatcaaatgaagattcaatgagcctgtcagaaatgccattgccaggcttaygctctccctggacctatttaaaactatccattttcaagtttccagtagatcttggttttgtgcttcttcctatcactgtatccgacaaactgagctgtattcattagtaatgttccaagaaatgtttatgaggttcttgcaaatttatctcagctgtttccaaataa

SEQ ID NO: 7713 - DNA, 537 bp, Chicken  19866894201875_2
catcatttggctttgctgctgagtttctaaaactatcagaagaggcagtaaaaaccctgaggactttgaacatgttgaatttatttgtcacaacaaaaatcctattgttcttttctcatttacgtagtgcttcttgatatggcagttagctaaacagaaggtctgtsaagataccacccagggaaatatctaagtttaaactttatcattcaaaaacttggaacatatgattccacagttgtcaaaattcatcaaatgaagattcaatgagcctgtcagaaatgccattgccaggcttaygctctccctggacctatttaaaactatccattttcaagtttccagtagatcttggttttgtgcttcttcctatcactgtatccgacaaactgagctgtattcattagtaatgttccaagaaatgtttatgaggttcttgcaaatttatctcagctgtttccaaataaaaattgagaaaaacaaaaccagaaagtcatcttctggatggagaaaaataataataataataaataaaaa

SEQ ID NO: 7714 - DNA, 599 bp, Chicken  19866894201877_1
  misc_feature (1)..(84): n is any nucleotide
nnnnnnnnnnnnnnnnnnnnnnnnnnnnnnnnnnnnnnnnnnnnnnnnnnnnnnnnnnnnnnnnnnnnnnnnnnnnnnnnnnnnattgtgacgctccttttgaaagaaatctgcagcagcgtaggaaagctgccatctctgtgcctgtcctggcagtgcagcctaatgctgctgggtattgagcaagacgtggagcttcagtcctacagtgctgatttaaaagtgagagtgctcagtgagacctatttaactctgtgggattagaagttacgtattcacatgtcaccaacaaatgggacrtaagcatagaagcttaagagatctgttcttgtatgctttgtcagatatttaaaatgtacagctccttatgcgtatgttctttttcatttttactttctagccagtcaagctagagatttattatcaaagatgctcgtagtagatccagacaagagaatttccgtagatgaggccttacgtcatccctatattacggtctggtatgatccagctgaagcagaagctgtaagtttgcatttaaaataaattttaagayattagttcagtaattttaaagaataactttagtttggatccaa

SEQ ID NO: 7715 - DNA, 600 bp, Chicken  19866894201877_2
gggattagaagttacgtattcacatgtcaccaacaaatgggacrtaagcatagaagcttaagagatctgttcttgtatgctttgtcagatatttaaaatgtacagctccttatgcgtatgttctttttcatttttactttctagccagtcaagctagagatttattatcaaagatgctcgtagtagatccagacaagagaatttccgtagatgaggccttacgtcatccctatattacggtctggtatgatccagctgaagcagaagctgtaagtttgcatttaaaataaattttaagayattagttcagtaattttaaagaataactttagtttggatccaaatgcatgctttggactcgctttttggttagtgagagatgcatgtaagctcttaagttaatgtttgaggtggaaccacytgaagagctgtcagtgaagcggaatagatacagttttgaaagtggttgttggtagctccctttgtggagagcgttgcctgcagggtggtaatctgctgtattttgggtagtgggctgcatctgaggccctgacagaccttacagaagttcatctttagttgatgcttttaaacagcatt

SEQ ID NO: 7716 - DNA, 600 bp, Chicken  19866894201877_3
tctttttcatttttactttctagccagtcaagctagagatttattatcaaagatgctcgtagtagatccagacaagagaatttccgtagatgaggccttacgtcatccctatattacggtctggtatgatccagctgaagcagaagctgtaagtttgcatttaaaataaattttaagayattagttcagtaattttaaagaataactttagtttggatccaaatgcatgctttggactcgctttttggttagtgagagatgcatgtaagctcttaagttaatgtttgaggtggaaccacytgaagagctgtcagtgaagcggaatagatacagttttgaaagtggttgttggtagctccctttgtggagagcgttgcctgcagggtggtaatctgctgtattttgggtagtgggctgcatctgaggccctgacagaccttacagaagttcatctttagttgatgcttttaaacagcatttcagtgggaggtagaacctaaattctggagatgtaaaatgaatgtaaatcggagatgtagggaatagattgccagaggaaggtaacaattgcctaagaaaatgatcatatttagttttgcc

SEQ ID NO: 7717 - DNA, 599 bp, Chicken  19866894201882_1
  misc_feature (1)..(44): n is any nucleotide
nnnnnnnnnnnnnnnnnnnnnnnnnnnnnnnnnnnnnnnnnnnntaatggtggttccttagtgaattcatttggttctgctgcctgacattaatggttttcataatctaatgaatgatgtgtgtaatagaggtaaggccacagggaatgacattctgaaactaagggaagtactatatatgtattttataaacatacgcatttttaatatatatatgcttctgcacacacacacacactcatagagagaatacaaaattttctccatagggagaaactacaaaggttaagcaaacctccratattgacattttatactgtaaattctaaaatatctgtattcccaggactgcatgaaataccaatgaattcaataagcaggaagactcctcttcacttgtacaactcctccgtgctctcacttcagaaatggtgatactgtcctccagttcctctgaaggacagcagcacacccatccctgagtacttctggtggctgagaagaactaagaaatcccaagaaacacctgcaacacgtggaaggatgccatcttaactttatatttatctgaaatgggtttggatgagattgggaataac

SEQ ID NO: 7718 - DNA, 600 bp, Chicken  19866894201891_1
agtgtttgttttcatgttcagatcaatacagaaaatcttatttaactattactgaaacagtatattgcaaaataatgacatgcctttttcaaatctatcagacatttgatcttcaaagatagacatgggggtcaagttgtgcatttcagtcatttagtagtcaaggaaaagacgtgagagtagttatagagcaggaagacgttattctctggacgcttacaagttacaagaaatattacagcaaatgtttcatactgttataaaataatatttcctttctccaccactcggatcccaaartaagccttgtgcacagaattcttggtttgggcttttaataaagggtgcatcaggatccaaggtctgaaaaggaaattttaagtcagacagagctctggcatctgattttgaggttttttcagttgttcttcattctgaatgactaatagttttatgtggctgcagttctgytgtttatttttgcctcagtgctgttagaagagagtgaagaagaaaaggtaaagctcacatctgtgggaatgcaatgtgaaaaaatccattctgacccagatcaactaactaatgtcataagttgcatga

SEQ ID NO: 7719 - DNA, 443 bp, Chicken  19866894201891_2
acgtgagagtagttatagagcaggaagacgttattctctggacgcttacaagttacaagaaatattacagcaaatgtttcatactgttataaaataatatttcctttctccaccactcggatcccaaartaagccttgtgcacagaattcttggtttgggcttttaataaagggtgcatcaggatccaaggtctgaaaaggaaattttaagtcagacagagctctggcatctgattttgaggttttttcagttgttcttcattctgaatgactaatagttttatgtggctgcagttctgytgtttatttttgcctcagtgctgttagaagagagtgaagaagaaaaggtaaagctcacatctgtgggaatgcaatgtgaaaaaatccattctgacccagatcaactaactaatgtcataagttgcatgaagtacaattgtgga

SEQ ID NO: 7720 - DNA, 600 bp, Chicken  19866894201897_1
ccagctgctccaggcagcactctaaggcaagaaaaagaaaaattacaatgaaagattggtctggagtgctggtcgtcagcatagctaggtcctggagcaaccaaaactctgtgtgcctttctgcttaggttggtaggaagagcagaagctcctaaacaatttaaagacctggtgggtacattccctatgggttgcatggacagtcacggctagcagtttaggcccagccttgtacaaagctgtgctgtatcaggttggcatgcagcagtaagatgctttgtcaaagactcaggctccacrggagcacatcatagaccgagaatgacagtgcatcaccatctccatcagaaaggggaggctgtaatcacctaattacatgccactgtgacaatgccgatttcagctctcatttacatgccacatcccactcattgctcagaatcggtttcctacctgggatttctgcatcactgcagcttggatttccctctggcctgtttccctccagttggtttttgaggtcaaagctgactgagagtgtgtggagccggggaaagacactcaggatgcagtgaacaagctccatgcagggcatgtggg

SEQ ID NO: 7721 - DNA, 600 bp, Chicken  19866894201909_1
agttgagctctgtgccttgctctcttcacctgcaaaattcaattaaagtcttcatagcttacagattttcagagctttagaatctattattactattcctcacctttaaaaaacagaaccaaccccaaaaagtcaaaactgccccaaattattcagacacgagctagctccatatagtggtacaagaaaaaaattgggtcttccaagtagcgagactgttgctgagccattttgtcttggtattttgatcctgacaggggattggaactcaatgatcttcaaggtcccttccaacccaamccatcctaggatatgaaaagacagttgcaggccttcragcagcattcctggcatttacacaaggaacactacccagccacactcaactggagaggtgtgtccacactggtatgaggctcttgaacattgctctcaagttttgtttgtttttacacatccatatgtaactgactctgtgaattacagatctcactaaaacagcaaatactacagccattaaaaaggtgtagaacttaaagcatgagtcaggagatgcctacatccagaggtaaaacagatgcatttctackgcatttatga

SEQ ID NO: 7722 - DNA, 600 bp, Chicken  19866894201909_2
ttcaattaaagtcttcatagcttacagattttcagagctttagaatctattattactattcctcacctttaaaaaacagaaccaaccccaaaaagtcaaaactgccccaaattattcagacacgagctagctccatatagtggtacaagaaaaaaattgggtcttccaagtagcgagactgttgctgagccattttgtcttggtattttgatcctgacaggggattggaactcaatgatcttcaaggtcccttccaacccaamccatcctaggatatgaaaagacagttgcaggccttcragcagcattcctggcatttacacaaggaacactacccagccacactcaactggagaggtgtgtccacactggtatgaggctcttgaacattgctctcaagttttgtttgtttttacacatccatatgtaactgactctgtgaattacagatctcactaaaacagcaaatactacagccattaaaaaggtgtagaacttaaagcatgagtcaggagatgcctacatccagaggtaaaacagatgcatttctackgcatttatgacttattccagtagcacaaataatcatgtcgttacctt

SEQ ID NO: 7723 - DNA, 427 bp, Chicken  19866894201909_3
ccaacccaamccatcctaggatatgaaaagacagttgcaggccttcragcagcattcctggcatttacacaaggaacactacccagccacactcaactggagaggtgtgtccacactggtatgaggctcttgaacattgctctcaagttttgtttgtttttacacatccatatgtaactgactctgtgaattacagatctcactaaaacagcaaatactacagccattaaaaaggtgtagaacttaaagcatgagtcaggagatgcctacatccagaggtaaaacagatgcatttctackgcatttatgacttattccagtagcacaaataatcatgtcgttaccttggatttaatcaagagatgacattacttaatgcagcagtggagacacgtacagcatgtaagcaccatgccataggggaaag

SEQ ID NO: 7724 - DNA, 600 bp, Chicken  19866894201910_1
acacctcttatggtgctctgctacaggagctatgatttcaagagtgagaaaagtggctcataaacgctactgatagccgaaaattaggtgatgaagaacacttcagaatgtttaagtgtggtaggtatgattacagcaatcaaaacgctatcccattttgctacagtttattttgaacagcaaggttaaaaaaacattaaaaagctgcatgatcctaaaacgtgcagtacgcataaatgttagaaacagtgacagaagcatacataggcagttgacccaaaaggcgacgtagcttttatyttgttttgtactttcaaccaaaaatatttctactacttctccaggaggtttcacccctatgttatggtcagaagtaattctttggcagcttggtattacagactgacctgcttctcacaaaatacctatgccaaaaaagggctttgtccttaatcrtaacgctggggcattgcaaggatgtttgcataagtaattggtgagctgtagtgatttggtatacattactacrtataaccagcagaacagcaaagcaacattagcagtaagacatgaayttggtcttacaaccatgaatataac

SEQ ID NO: 7725 - DNA, 600 bp, Chicken  19866894201910_2
tttgctacagtttattttgaacagcaaggttaaaaaaacattaaaaagctgcatgatcctaaaacgtgcagtacgcataaatgttagaaacagtgacagaagcatacataggcagttgacccaaaaggcgacgtagcttttatyttgttttgtactttcaaccaaaaatatttctactacttctccaggaggtttcacccctatgttatggtcagaagtaattctttggcagcttggtattacagactgacctgcttctcacaaaatacctatgccaaaaaagggctttgtccttaatcrtaacgctggggcattgcaaggatgtttgcataagtaattggtgagctgtagtgatttggtatacattactacrtataaccagcagaacagcaaagcaacattagcagtaagacatgaayttggtcttacaaccatgaatataacctctgttgatccagaaaatgaacattaccttaacatttacatatactatacacatagtagcctttctcttttrccaagctatttttggccacttgggatattttctcctcttcacatagtgacttcctatgtagyttcagagatgtttattgctct

SEQ ID NO: 7726 - DNA, 600 bp, Chicken  19866894201910_3
cgcataaatgttagaaacagtgacagaagcatacataggcagttgacccaaaaggcgacgtagcttttatyttgttttgtactttcaaccaaaaatatttctactacttctccaggaggtttcacccctatgttatggtcagaagtaattctttggcagcttggtattacagactgacctgcttctcacaaaatacctatgccaaaaaagggctttgtccttaatcrtaacgctggggcattgcaaggatgtttgcataagtaattggtgagctgtagtgatttggtatacattactacrtataaccagcagaacagcaaagcaacattagcagtaagacatgaayttggtcttacaaccatgaatataacctctgttgatccagaaaatgaacattaccttaacatttacatatactatacacatagtagcctttctcttttrccaagctatttttggccacttgggatattttctcctcttcacatagtgacttcctatgtagyttcagagatgtttattgctcttgttccttgcctggcaattgctccacagcctggggccacagttcatatagagtactctagggtggagccagca

SEQ ID NO: 7727 - DNA, 600 bp, Chicken  19866894201910_4
cccaaaaggcgacgtagcttttatyttgttttgtactttcaaccaaaaatatttctactacttctccaggaggtttcacccctatgttatggtcagaagtaattctttggcagcttggtattacagactgacctgcttctcacaaaatacctatgccaaaaaagggctttgtccttaatcrtaacgctggggcattgcaaggatgtttgcataagtaattggtgagctgtagtgatttggtatacattactacrtataaccagcagaacagcaaagcaacattagcagtaagacatgaayttggtcttacaaccatgaatataacctctgttgatccagaaaatgaacattaccttaacatttacatatactatacacatagtagcctttctcttttrccaagctatttttggccacttgggatattttctcctcttcacatagtgacttcctatgtagyttcagagatgtttattgctcttgttccttgcctggcaattgctccacagcctggggccacagttcatatagagtactctagggtggagccagcactaaacaccctcaactcttggctctcctgtgaaaagcttctccttg

SEQ ID NO: 7728 - DNA, 547 bp, Chicken  19866894201910_5
gtaattctttggcagcttggtattacagactgacctgcttctcacaaaatacctatgccaaaaaagggctttgtccttaatcrtaacgctggggcattgcaaggatgtttgcataagtaattggtgagctgtagtgatttggtatacattactacrtataaccagcagaacagcaaagcaacattagcagtaagacatgaayttggtcttacaaccatgaatataacctctgttgatccagaaaatgaacattaccttaacatttacatatactatacacatagtagcctttctcttttrccaagctatttttggccacttgggatattttctcctcttcacatagtgacttcctatgtagyttcagagatgtttattgctcttgttccttgcctggcaattgctccacagcctggggccacagttcatatagagtactctagggtggagccagcactaaacaccctcaactcttggctctcctgtgaaaagcttctccttgcaggagataggaaatctccaaggatcatcacataaaccttcctat

SEQ ID NO: 7729 - DNA, 485 bp, Chicken  19866894201910_6
aaagggctttgtccttaatcrtaacgctggggcattgcaaggatgtttgcataagtaattggtgagctgtagtgatttggtatacattactacrtataaccagcagaacagcaaagcaacattagcagtaagacatgaayttggtcttacaaccatgaatataacctctgttgatccagaaaatgaacattaccttaacatttacatatactatacacatagtagcctttctcttttrccaagctatttttggccacttgggatattttctcctcttcacatagtgacttcctatgtagyttcagagatgtttattgctcttgttccttgcctggcaattgctccacagcctggggccacagttcatatagagtactctagggtggagccagcactaaacaccctcaactcttggctctcctgtgaaaagcttctccttgcaggagataggaaatctccaaggatcatcacataaaccttcctat

SEQ ID NO: 7730 - DNA, 600 bp, Chicken  19866894201911_1
aaaaaaattttttaccattccatcctttcaccccttttaagagtggaatagcaggtcaagggcactaatgaccaaagcaaacctattttcagcacaaatgatactccttatattcaaactgtttttgacttacctgaaatgttaacagctttcattaactgagcccacagtctaaatgtattttgcaaccatcaatcaacaaagtcacacagctgctcaaaaaagcacatagcaaaaaatgttcaagattacatatgggcaaattgaggtatggagatttcacatttcttgttttaagtyacagatagtggtagaaacaagttaagaagccagctatgccaaatatcacattttagtaatcggagaagactgtaaagacaagtgatgttacatgctaatgaacaagccctctacttccaaggaccaatgtgtgcaattcttcagttcagacagggcactacaatttctagatagatctattttaggaaactatttgagtttccagacttctcaaaaaagtgatgaatggtttaattttaagctactgaaaatgattttaatcacttgatttttatcctatctagatttatagatacttaa

SEQ ID NO: 7731 - DNA, 600 bp, Chicken  19866894201912_1
ctaaccgacatctctccttttttagtttaaagcaattccaccttgccctattactatctgcctgtgtgagaagtcagtctctgattataagctctcctcaactactggaaagccacaatgaggtctccctggagccttttttttttttctccaggcagaacaagcccagttccctcaacctttccccttcagagaagtgctccatcccactatcatctctgtgaccctcctctggacttgctccaaaagctccacatcattcttgtgccagcagtcccaggactcaatgcagtactccasatggggcctcatagggacagagtagagggggataatcacctccatcatcctgctggtcacccctctttggatacagcccagcatacgttgtgcaagtgcacactgctggctcacatcaagcttttcatccaccaggaccacaaagtcctttttccacagagttgcactccatgagctctcctaccagcctgtacacatatctgggattgccctgacataagtgcaacaccacgcaattggctttgttgaacctcattaggctcccatgggcccacttctcaagcctgtataggcctctct

SEQ ID NO: 7732 - DNA, 600 bp, Chicken  19866894201914_1
cacttacgtttttccagtatgtggacatatggcaatattaagagatgaaaatctgtcaatatttttgatatacaagcttgtctccgagaaaagaaagcagaaaaaacctgaaggttttgattaccacatagagacagtactggaaactaaaagagttgtcagtcctcacgaaacccaactcaattttcttcagccttggtctactgtgctcccctgtactttcaagctccaaatcaacatactcaggattttctaattatgacagcttcgtgttatacccccagataaaagtcaaaaaawwtttttttaacctttctttcatctctttatattaaaaaaaaaaaaaaggaagaaagcaagtgatttatttcctagcctgtgtgacttcaatacccaggcagaatggccaccgtatgtaaaacatctcttctctattgttgcaaaaaacgcagacagtaaaagaaagctcggagtataagtcacactgtgcagagaaaaggccgagcagatgattgcttttgaggaaaatgccgttgcagcaactgcataatacataacacatcctactctttagaaagagggagccgaagctggagaaag

SEQ ID NO: 7733 - DNA, 600 bp, Chicken  19866894201914_2
acttacgtttttccagtatgtggacatatggcaatattaagagatgaaaatctgtcaatatttttgatatacaagcttgtctccgagaaaagaaagcagaaaaaacctgaaggttttgattaccacatagagacagtactggaaactaaaagagttgtcagtcctcacgaaacccaactcaattttcttcagccttggtctactgtgctcccctgtactttcaagctccaaatcaacatactcaggattttctaattatgacagcttcgtgttatacccccagataaaagtcaaaaaawwtttttttaacctttctttcatctctttatattaaaaaaaaaaaaaaggaagaaagcaagtgatttatttcctagcctgtgtgacttcaatacccaggcagaatggccaccgtatgtaaaacatctcttctctattgttgcaaaaaacgcagacagtaaaagaaagctcggagtataagtcacactgtgcagagaaaaggccgagcagatgattgcttttgaggaaaatgccgttgcagcaactgcataatacataacacatcctactctttagaaagagggagccgaagctggagaaagc

SEQ ID NO: 7734 - DNA, 600 bp, Chicken  19866894201917_1
agtgcctatgaagaagtcataggctctttctgctggtgcttggtgggtaggaggattagcggtaacaggcataaactgaaactagggatcttcagactgggtgtaataagaaactttttgacaatggggacagtcaggcagtggaacaagttgccccaaatggctgtgctgtctccttccttggagatactcaagacctgacaggatatagcccaaattaacctgatctgacttcctggctgaccctatgtggaaaggaagcttagcctagagacctctcgaggtcttctcaatcctgasttastgtatgtaaaatacttggaagattaaaacctaataggctaatagggctgccatgtatttctaagtatttatatatttttccattttaaaatactttctaccttaagtggcatgtgacttagtttatgacagtgttatggaaaaattacagcaacgctgcaggatgctgggtaatggttggacccagatcctttaacagtgagaagctggcagtagactagcatatttgaaaccaagaatgtaattagggattccagatgctgaactgaagtgcccctaccatgtgatctttggaac

SEQ ID NO: 7735 - DNA, 600 bp, Chicken  19866894201917_2
cctatgaagaagtcataggctctttctgctggtgcttggtgggtaggaggattagcggtaacaggcataaactgaaactagggatcttcagactgggtgtaataagaaactttttgacaatggggacagtcaggcagtggaacaagttgccccaaatggctgtgctgtctccttccttggagatactcaagacctgacaggatatagcccaaattaacctgatctgacttcctggctgaccctatgtggaaaggaagcttagcctagagacctctcgaggtcttctcaatcctgasttastgtatgtaaaatacttggaagattaaaacctaataggctaatagggctgccatgtatttctaagtatttatatatttttccattttaaaatactttctaccttaagtggcatgtgacttagtttatgacagtgttatggaaaaattacagcaacgctgcaggatgctgggtaatggttggacccagatcctttaacagtgagaagctggcagtagactagcatatttgaaaccaagaatgtaattagggattccagatgctgaactgaagtgcccctaccatgtgatctttggaacagac

SEQ ID NO: 7736 - DNA, 599 bp, Chicken  19866894201921_1
  misc_feature (1)..(136): n is any nucleotide
nnnnnnnnnnnnnnnnnnnnnnnnnnnnnnnnnnnnnnnnnnnnnnnnnnnnnnnnnnnnnnnnnnnnnnnnnnnnnnnnnnnnnnnnnnnnnnnnnnnnnnnnnnnnnnnnnnnnnnnnnnnnnnnnnnnnnnnngttggatgtcagggggaagttctttactatgagagtggtgaggtgctgaaacaggctgcccagagaggctgtggatgccccatccctgcaggtgttcaaggccaggttggatggggccctgggcagcctggtctagtgttaaatggggaggttggtggccctgyctgtggcaggggggttggagattcatgacccttgaggacccttcccaggccattctgtgattctgtgaaggtgctggataagcacaaagaaatataatccagcttgtatatatggaatagacatcatcagccacaaattgatcaaaaagcacacagctgaattgcttgtttattttctcacttcagtgaaactcaaacagaaaatctacagttcagaactcatcagcttttctctgcatgacaaaaaataaatatacttccactccatgaaaataatttcatcagcagtcccaaatttt

SEQ ID NO: 7737 - DNA, 600 bp, Chicken  19866894201931_1
catctcaggcctacatcctcctctcctgatggagcaatttctcccaaatgagatcattcacagctccaagacaagtaatggcatgcatttgcaactgatgcagttagatagagactgcaaaataactcaacaactccatgtacagactgtcttctgccttcaaccctttactccacaattcacacaaacctgcctcagcaacggcagtctctgcatcagtgaaaaatcactgtgactacattttaaactggacaagctgcaaaactcatgacagtctggactgacaaagcacaacagagmcagkgactttacaccagagcttcaagaagaaaaaggacatcaccttgatgcatccacatgtttccaaagcttaatggyagacttccakgggcagcttaacacttactctgctggtaaagagtcttcaaacctcactagatgcaagagattctccacagatttgcagctgtgttgtgcttcatatagtctctacactgcccttcagcacaaaggtgaaccctgctcatttttagagagtaattcttatctgcaactttcaggtgtcaaaattaaagtttcccaaagtataacgttctccct

SEQ ID NO: 7738 - DNA, 600 bp, Chicken  19866894201931_2
tcaggcctacatcctcctctcctgatggagcaatttctcccaaatgagatcattcacagctccaagacaagtaatggcatgcatttgcaactgatgcagttagatagagactgcaaaataactcaacaactccatgtacagactgtcttctgccttcaaccctttactccacaattcacacaaacctgcctcagcaacggcagtctctgcatcagtgaaaaatcactgtgactacattttaaactggacaagctgcaaaactcatgacagtctggactgacaaagcacaacagagmcagkgactttacaccagagcttcaagaagaaaaaggacatcaccttgatgcatccacatgtttccaaagcttaatggyagacttccakgggcagcttaacacttactctgctggtaaagagtcttcaaacctcactagatgcaagagattctccacagatttgcagctgtgttgtgcttcatatagtctctacactgcccttcagcacaaaggtgaaccctgctcatttttagagagtaattcttatctgcaactttcaggtgtcaaaattaaagtttcccaaagtataacgttctccctttaa

SEQ ID NO: 7739 - DNA, 600 bp, Chicken  19866894201931_3
tggcatgcatttgcaactgatgcagttagatagagactgcaaaataactcaacaactccatgtacagactgtcttctgccttcaaccctttactccacaattcacacaaacctgcctcagcaacggcagtctctgcatcagtgaaaaatcactgtgactacattttaaactggacaagctgcaaaactcatgacagtctggactgacaaagcacaacagagmcagkgactttacaccagagcttcaagaagaaaaaggacatcaccttgatgcatccacatgtttccaaagcttaatggyagacttccakgggcagcttaacacttactctgctggtaaagagtcttcaaacctcactagatgcaagagattctccacagatttgcagctgtgttgtgcttcatatagtctctacactgcccttcagcacaaaggtgaaccctgctcatttttagagagtaattcttatctgcaactttcaggtgtcaaaattaaagtttcccaaagtataacgttctccctttaaaacttggattgaaagtactgcaatcacaatactgctggagttgtcacagtccatttcaaagctcaaaagcaaac

SEQ ID NO: 7740 - DNA, 600 bp, Chicken  19866894201931_4
ttgcaactgatgcagttagatagagactgcaaaataactcaacaactccatgtacagactgtcttctgccttcaaccctttactccacaattcacacaaacctgcctcagcaacggcagtctctgcatcagtgaaaaatcactgtgactacattttaaactggacaagctgcaaaactcatgacagtctggactgacaaagcacaacagagmcagkgactttacaccagagcttcaagaagaaaaaggacatcaccttgatgcatccacatgtttccaaagcttaatggyagacttccakgggcagcttaacacttactctgctggtaaagagtcttcaaacctcactagatgcaagagattctccacagatttgcagctgtgttgtgcttcatatagtctctacactgcccttcagcacaaaggtgaaccctgctcatttttagagagtaattcttatctgcaactttcaggtgtcaaaattaaagtttcccaaagtataacgttctccctttaaaacttggattgaaagtactgcaatcacaatactgctggagttgtcacagtccatttcaaagctcaaaagcaaacaaatagcaat

SEQ ID NO: 7741 - DNA, 600 bp, Chicken  19866894201931_5
aaacctcactagatgcaagagattctccacagatttgcagctgtgttgtgcttcatatagtctctacactgcccttcagcacaaaggtgaaccctgctcatttttagagagtaattcttatctgcaactttcaggtgtcaaaattaaagtttcccaaagtataacgttctccctttaaaacttggattgaaagtactgcaatcacaatactgctggagttgtcacagtccatttcaaagctcaaaagcaaacaaatagcaatagagaacaaaacctacttaatacagatacataaaaagrttttgtggtccaattaaaaaaaacaaaaaacatgagaatgaggtaaaaaactggggaccccacaaaacatgagcattggaaccaagtcatccacatgttctctgatccaaggtcagtcccaaggtgacaaacaactcttactcttttggcatcttgttcagtgtctgaaaacgttgttcctttgatcttcacactgactgttaattagggcaaagcagaaatcacactggaaagaatggtaagcktagaaatgcacagatgtcatcagactgacatcaccacagccacaccgtagcacaa

SEQ ID NO: 7742 - DNA, 600 bp, Chicken  19866894201931_6
agcaaacaaatagcaatagagaacaaaacctacttaatacagatacataaaaagrttttgtggtccaattaaaaaaaacaaaaaacatgagaatgaggtaaaaaactggggaccccacaaaacatgagcattggaaccaagtcatccacatgttctctgatccaaggtcagtcccaaggtgacaaacaactcttactcttttggcatcttgttcagtgtctgaaaacgttgttcctttgatcttcacactgactgttaattagggcaaagcagaaatcacactggaaagaatggtaagcktagaaatgcacagatgtcatcagactgacatcaccacagccacaccgtagcacaaggtgttctaacaaatcgactctattggtttgaatgtcagaagaggagcattcaggatgcttttacttacagctacaaactctcccatcacagaggataaaaggtcaagcagcatgtggtattatggactgctaaaaatttcacaagcagcccacttctccccataaccacaaccacgtgtgtacagaccacgggataaatgcacacaattcttcccaggcaggggaatccttcgtacacaaagcc

SEQ ID NO: 7743 - DNA, 600 bp, Chicken  19866894201934_1
gtaaacagccatttccctcctgtttatatgctcccttcaagtactagaaggccacaatgaggtctccccagagccttctcttctccaagctaaacaagcccacttccctcaacctttcttcacaggagaggtgctccagccctgtgatcatcttagtggctctcctctggaccctttcgaagagctctgcatctttctcatgctggggaccccacgcctggatgcagtactccagatggggcctcacaagagccacagagtgggaaaaatcacctccctctccctgctggccatcccccytttttttttttttttaatgcagcccaggatatagttggccttccaggctgcaagcacacactgctgactcatgtccagcttctcacccattaggacccccaagtccttttccacagtgctgctctcaagaaattctttccctagtccatatataaacacctgcaattgcccaarcccaactgtaataccttgcacttggccttgttgaacctcattaggttcacatgggcccacttctccagcctgtccaggtccctgtggatggcttcccttccctccaatgtatcaactgcaccactc

SEQ ID NO: 7744 - DNA, 600 bp, Chicken  19866894201934_2
taaacagccatttccctcctgtttatatgctcccttcaagtactagaaggccacaatgaggtctccccagagccttctcttctccaagctaaacaagcccacttccctcaacctttcttcacaggagaggtgctccagccctgtgatcatcttagtggctctcctctggaccctttcgaagagctctgcatctttctcatgctggggaccccacgcctggatgcagtactccagatggggcctcacaagagccacagagtgggaaaaatcacctccctctccctgctggccatcccccyyttttttttttttttaatgcagcccaggatatagttggccttccaggctgcaagcacacactgctgactcatgtccagcttctcacccattaggacccccaagtccttttccacagtgctgctctcaagaaattctttccctagtccatatataaacacctgcaattgcccaarcccaactgtaataccttgcacttggccttgttgaacctcattaggttcacatgggcccacttctccagcctgtccaggtccctgtggatggcttcccttccctccaatgtatcaactgcaccactca

SEQ ID NO: 7745 - DNA, 600 bp, Chicken  19866894201934_3
aaacagccatttccctcctgtttatatgctcccttcaagtactagaaggccacaatgaggtctccccagagccttctcttctccaagctaaacaagcccacttccctcaacctttcttcacaggagaggtgctccagccctgtgatcatcttagtggctctcctctggaccctttcgaagagctctgcatctttctcatgctggggaccccacgcctggatgcagtactccagatggggcctcacaagagccacagagtgggaaaaatcacctccctctccctgctggccatcccccytytttttttttttttaatgcagcccaggatatagttggccttccaggctgcaagcacacactgctgactcatgtccagcttctcacccattaggacccccaagtccttttccacagtgctgctctcaagaaattctttccctagtccatatataaacacctgcaattgcccaarcccaactgtaataccttgcacttggccttgttgaacctcattaggttcacatgggcccacttctccagcctgtccaggtccctgtggatggcttcccttccctccaatgtatcaactgcaccactcag

SEQ ID NO: 7746 - DNA, 600 bp, Chicken  19866894201934_4
aacagccatttccctcctgtttatatgctcccttcaagtactagaaggccacaatgaggtctccccagagccttctcttctccaagctaaacaagcccacttccctcaacctttcttcacaggagaggtgctccagccctgtgatcatcttagtggctctcctctggaccctttcgaagagctctgcatctttctcatgctggggaccccacgcctggatgcagtactccagatggggcctcacaagagccacagagtgggaaaaatcacctccctctccctgctggccatcccccyttyttttttttttttaatgcagcccaggatatagttggccttccaggctgcaagcacacactgctgactcatgtccagcttctcacccattaggacccccaagtccttttccacagtgctgctctcaagaaattctttccctagtccatatataaacacctgcaattgcccaarcccaactgtaataccttgcacttggccttgttgaacctcattaggttcacatgggcccacttctccagcctgtccaggtccctgtggatggcttcccttccctccaatgtatcaactgcaccactcagc

SEQ ID NO: 7747 - DNA, 435 bp, Chicken  19866894201934_5
tttcgaagagctctgcatctttctcatgctggggaccccacgcctggatgcagtactccagatggggcctcacaagagccacagagtgggaaaaatcacctccctctccctgctggccatcccccytttttttttttttttaatgcagcccaggatatagttggccttccaggctgcaagcacacactgctgactcatgtccagcttctcacccattaggacccccaagtccttttccacagtgctgctctcaagaaattctttccctagtccatatataaacacctgcaattgcccaarcccaactgtaataccttgcacttggccttgttgaacctcattaggttcacatgggcccacttctccagcctgtccaggtccctgtggatggcttcccttccctccaatgtatcaactgcaccactcagcttggtg

SEQ ID NO: 7748 - DNA, 600 bp, Chicken  19866894201937_1
ccatgcgaatctgcatcttcgctctctggggcagtgtcttttaaaaaaaaatatgaacccaaagatggacttcttaagtgagattttacctttcgtggttcctgaaggggaactgctttgaggttacattttagaaaatattgaaaccattggacagacactcaggcacagaactgggagttgaatttttaagcccttttctctctttcttataacactccctttaaaaaaaaaatctcatacacaattccatctaccaaccaagaggccacgcaaggctgaaaaagcaatcaaagcttyagtaagtgataaattgtcttttacactagtaattaggttggagacagcactgacttatttctgaaaagatcagtgaatggtagaagcctctacaaaagccttccacattaggaagcggaaagctgttccacctcatgttctctttaagaaatctgcccataacgtgccataattgcaagtgatgctggtcacttgatggtcaccggcagttgcttttcaaagcttctcaagtaaaggttcttttctgtagtggcattagcacagccgttggtttgggaggcagagctgatgggagagctc

SEQ ID NO: 7749 - DNA, 600 bp, Chicken  19866894201945_1
ctttctctctctttctctccccccacatatatgcatatcctcatttcttatgatacaccttttttcctcagtttctttccattggaaaaaatatctgatgaaaacaacacagtttctaaattcccacagtttcagtggaacactgctgtcaaatgtgttcatgttgaaatggctctaacaaattcaagtacatgaatccagaaagctgatgaataatcattgtacacagccgaaacaatctctttattatagactgctgtttaaatttctgggaaccaggcaatctcccagacactaccrcagtgatcattcctggacctagcaatgaaacattctaggcacacagacacaaactgcacagtttttatttgcagattttaattggagtaagtctgtgcagctcgcctaagagaggaactccctccacatcacagcagatgacagacagtctcatggccgcactcagaaacagctgaacaaatcaagctattaaactgaaaaaaataaataaagaaaacagtgaaaataaaatacattttgtctgattaaataaccctctccgtgagagtcttaacagcacttcttggcaatgttggatgt

SEQ ID NO: 7750 - DNA, 600 bp, Chicken  19866894201951_1
gtgcctcttgctgttgtcttggactttgcagatgaggaagaagagggagcagatgaggaaaacagtgacaaggactccagctgcagccagcgactccaggacaatcccccaggcctgatccatgtcacaaagtaggaaatagtcagcatggatgctgccgcagcctcgaggaggctgtgttgtcatcctgatgtcttcttgaataacttcacaaggaaatgtttcctcaaagctgtggaaaaataaaagtcacaggctgttggatcaaccacctgggtgctgcagcagtggggaaggagkggcaggatggacatcccttcccacctcactgggcaaggacaacacagtgctaaagacayggggctgtggcagcttagccatctccttgcttggcattggcactctatcaggagcaagccaaacccttcagcgggtgatgattcaccttcaaagtcccctgcaccatgcctggrgttgtgcaatgttgcrgcagcatgggcagcatggraaagtgaggccctttcatggggcacagaggctgaactgccttgtcacttttgtcccaggtgacacaagagcaagttagtcataatcacgttt

SEQ ID NO: 7751 - DNA, 600 bp, Chicken  19866894201951_2
aaacagtgacaaggactccagctgcagccagcgactccaggacaatcccccaggcctgatccatgtcacaaagtaggaaatagtcagcatggatgctgccgcagcctcgaggaggctgtgttgtcatcctgatgtcttcttgaataacttcacaaggaaatgtttcctcaaagctgtggaaaaataaaagtcacaggctgttggatcaaccacctgggtgctgcagcagtggggaaggagkggcaggatggacatcccttcccacctcactgggcaaggacaacacagtgctaaagacayggggctgtggcagcttagccatctccttgcttggcattggcactctatcaggagcaagccaaacccttcagcgggtgatgattcaccttcaaagtcccctgcaccatgcctggrgttgtgcaatgttgcrgcagcatgggcagcatggraaagtgaggccctttcatggggcacagaggctgaactgccttgtcacttttgtcccaggtgacacaagagcaagttagtcataatcacgtttacgcccctttgcmaggtttaaacaacatcagtacccgctaccagtgagctccagagatg

SEQ ID NO: 7752 - DNA, 600 bp, Chicken  19866894201951_3
gctgtgttgtcatcctgatgtcttcttgaataacttcacaaggaaatgtttcctcaaagctgtggaaaaataaaagtcacaggctgttggatcaaccacctgggtgctgcagcagtggggaaggagkggcaggatggacatcccttcccacctcactgggcaaggacaacacagtgctaaagacayggggctgtggcagcttagccatctccttgcttggcattggcactctatcaggagcaagccaaacccttcagcgggtgatgattcaccttcaaagtcccctgcaccatgcctggrgttgtgcaatgttgcrgcagcatgggcagcatggraaagtgaggccctttcatggggcacagaggctgaactgccttgtcacttttgtcccaggtgacacaagagcaagttagtcataatcacgtttacgcccctttgcmaggtttaaacaacatcagtacccgctaccagtgagctccagagatgagcactacagaacaggaaactctttattcattttgttttccttctgttactttctctgaaacacccgtggctttgatttacggcatgagcgaaaggccctgcagatagctcacc

SEQ ID NO: 7753 - DNA, 600 bp, Chicken  19866894201951_4
gatgtcttcttgaataacttcacaaggaaatgtttcctcaaagctgtggaaaaataaaagtcacaggctgttggatcaaccacctgggtgctgcagcagtggggaaggagkggcaggatggacatcccttcccacctcactgggcaaggacaacacagtgctaaagacayggggctgtggcagcttagccatctccttgcttggcattggcactctatcaggagcaagccaaacccttcagcgggtgatgattcaccttcaaagtcccctgcaccatgcctggrgttgtgcaatgttgcrgcagcatgggcagcatggraaagtgaggccctttcatggggcacagaggctgaactgccttgtcacttttgtcccaggtgacacaagagcaagttagtcataatcacgtttacgcccctttgcmaggtttaaacaacatcagtacccgctaccagtgagctccagagatgagcactacagaacaggaaactctttattcattttgttttccttctgttactttctctgaaacacccgtggctttgatttacggcatgagcgaaaggccctgcagatagctcacctggatacctccagcac

SEQ ID NO: 7754 - DNA, 600 bp, Chicken  19866894201951_5
tcacaaggaaatgtttcctcaaagctgtggaaaaataaaagtcacaggctgttggatcaaccacctgggtgctgcagcagtggggaaggagkggcaggatggacatcccttcccacctcactgggcaaggacaacacagtgctaaagacayggggctgtggcagcttagccatctccttgcttggcattggcactctatcaggagcaagccaaacccttcagcgggtgatgattcaccttcaaagtcccctgcaccatgcctggrgttgtgcaatgttgcrgcagcatgggcagcatggraaagtgaggccctttcatggggcacagaggctgaactgccttgtcacttttgtcccaggtgacacaagagcaagttagtcataatcacgtttacgcccctttgcmaggtttaaacaacatcagtacccgctaccagtgagctccagagatgagcactacagaacaggaaactctttattcattttgttttccttctgttactttctctgaaacacccgtggctttgatttacggcatgagcgaaaggccctgcagatagctcacctggatacctccagcacagttcctctcactccamat

SEQ ID NO: 7755 - DNA, 600 bp, Chicken  19866894201951_6
tcccttcccacctcactgggcaaggacaacacagtgctaaagacayggggctgtggcagcttagccatctccttgcttggcattggcactctatcaggagcaagccaaacccttcagcgggtgatgattcaccttcaaagtcccctgcaccatgcctggrgttgtgcaatgttgcrgcagcatgggcagcatggraaagtgaggccctttcatggggcacagaggctgaactgccttgtcacttttgtcccaggtgacacaagagcaagttagtcataatcacgtttacgcccctttgcmaggtttaaacaacatcagtacccgctaccagtgagctccagagatgagcactacagaacaggaaactctttattcattttgttttccttctgttactttctctgaaacacccgtggctttgatttacggcatgagcgaaaggccctgcagatagctcacctggatacctccagcacagttcctctcactccamattaaacagcaaacacagaaaaccaaccattagccacaaactcacagtccttcttcaggatagcacagcaataacaactatcccagacatctcattcccctccccag

SEQ ID NO: 7756 - DNA, 600 bp, Chicken  19866894201951_7
graaagtgaggccctttcatggggcacagaggctgaactgccttgtcacttttgtcccaggtgacacaagagcaagttagtcataatcacgtttacgcccctttgcmaggtttaaacaacatcagtacccgctaccagtgagctccagagatgagcactacagaacaggaaactctttattcattttgttttccttctgttactttctctgaaacacccgtggctttgatttacggcatgagcgaaaggccctgcagatagctcacctggatacctccagcacagttcctctcactccamattaaacagcaaacacagaaaaccaaccattagccacaaactcacagtccttcttcaggatagcacagcaataacaactatcccagacatctcattcccctccccagactattgccttgctggctagagaaccaacatgtcagagccaatgctggcaccgcaagaggagtacccaacaagttactgcttgaggagcccacgagccaaggatgcacaaggacttccatcacacctagcacgctcctgctgtctcgtcatgaagacttaagtgctgtctgagtaagcctgaggtaagcccgt

SEQ ID NO: 7757 - DNA, 600 bp, Chicken  19866894201952_1
gaggtattgacatatttaatatgctctcctgactcgtcacgttcagaggaattgtttacctctgctaatgagacacagcttcctgctgagggatgcggctgccgcttagcacggctttatggtggttgatgggaaaggaagaaaaatgcacctcagctgaagctatgggggctctgagtgtgtttcctgtgctgaggcaacatattgtgctgcagtatgcttctgctgcgaatgtggtcgtacaaatggcttaataggacagccctgaaaaggccatcccgatgctcctatcgaggcttyctctggaggctctcagtggctgagctgcacaggggaaggtggaggggccattcctggaggtaatcaaggactgtggaggacgttgtcagtgggcacggtgggattggagccggacttggtgatctgagaggtctttcccaaccctaaggatactatggctttgcagtcaaaccacaatgacaaaacctggcccatagctgtggggatggacggtggtgtggagtggggcaggtttcccaggagcagcatggggaagcagtggggtttgaatgcaatgtgctgtggtgcagtcaaggtgga

SEQ ID NO: 7758 - DNA, 459 bp, Chicken  19866894201952_2
atttggctgctccgccggtcctggtaagatcagttatagctctgttgaaacaattccaggtattattttagaatctggtttccttatccaagccatgtgtcctccaaagaatctgtccaaagtctcgagatatttacgtcttcaatctgaaagtcagaatgcattagctggggaaacttggtcttcgtgcgcttaaaataaagcagctcactcagagtctcacgctattaaatcagtcgtgaatgtcctcatggcaactggatgctgcaggtccccagccccggctgctcttttcttgcrtgtgcaccaaagagtgctgcaggagttctttgcctgagctcctttgcccaactggcaaagcgatgggggagaagtgggaaaagctgagggcccggttgtcacaaccaatggctcaatggcaaggatgcgcccccacgggacaaacattctggggggttg

SEQ ID NO: 7759 - DNA, 600 bp, Chicken  19866894201955_1
tagattctattaacagagaaaaacttcagatttaagtaagatgctcaggaaaaaggccatcacgtttgttactcccaaagctttgattttgttagaacatgttatttattgctggacattcaagagaattgtcaatgccacatacattttcctgttcatttggcacatgtttgtagataatgcccagagttgccaaagaggcatgacgtcctctgaacctagatggatgagagataaaatcaggcaccaatggtcctgagaagctttctgtctgttaatgggtcaatgattttcttgctycctgtgcaatcatcaggcaagtcaactcccactgctcttttgcagggctacagaaggcaaactcttcaatcttttttgtagggcatctcctcagatgtttctggagctctcatgtgtgtttcaaagggtgaatgtacaactgccccattcctctcctccacttacacacatcctctgaggcagagatcattttgggatataaaagacctgataaaaagtgggaatttctttttgagacacctttgtcatcgaacaaaagaaacctgcagtactgcgacagatatcattaaagacctaatt

SEQ ID NO: 7760 - DNA, 599 bp, Chicken  19866894201959_1
  misc_feature (1)..(276): n is any nucleotide
nnnnnnnnnnnnnnnnnnnnnnnnnnnnnnnnnnnnnnnnnnnnnnnnnnnnnnnnnnnnnnnnnnnnnnnnnnnnnnnnnnnnnnnnnnnnnnnnnnnnnnnnnnnnnnnnnnnnnnnnnnnnnnnnnnnnnnnnnnnnnnnnnnnnnnnnnnnnnnnnnnnnnnnnnnnnnnnnnnnnnnnnnnnnnnnnnnnnnnnnnnnnnnnnnnnnnnnnnnnnnnnnnnnnnnnnnnnnnnnnnnnnnnnnnnnnnnnnnnnnnnnnnnnnnnnnnnnncaagcaagtaggagtttgagctgrgtacatatatgcactccatgtcctgcaatgtcgatcagcacgttatttcaggcactctaaatctctagaacagtaatttagatgtgtttctgtttgtgaagatccttcaacagtaggaagtgatttttatccctttgttcagaatgatgtgcttcctttagccttgatgtcacagctgtgggtttatattcctggttctgttaccaagmactcaatattggtctctgcggtacggttctcaatggggctgtaatrccttcttctgaaactattccaaaatcttcaggcatctaaacaat

SEQ ID NO: 7761 - DNA, 599 bp, Chicken  19866894201959_2
  misc_feature (1)..(67): n is any nucleotide
nnnnnnnnnnnnnnnnnnnnnnnnnnnnnnnnnnnnnnnnnnnnnnnnnnnnnnnnnnnnnnnnnnncaagcaagtaggagtttgagctgrgtacatatatgcactccatgtcctgcaatgtcgatcagcacgttatttcaggcactctaaatctctagaacagtaatttagatgtgtttctgtttgtgaagatccttcaacagtaggaagtgatttttatccctttgttcagaatgatgtgcttcctttagccttgatgtcacagctgtgggtttatattcctggttctgttaccaagmactcaatattggtctctgcggtacggttctcaatggggctgtaatrccttcttctgaaactattccaaaatcttcaggcatctaaacaatgatttgtgaggaaaaacctgcyagtcttaatgataaaagagtaactcaaaaatccctttcctggtttcttaatagctttttgtttcaaaaaattaaactgtccatgtaaagcttacaaaagcagaactttgacacttattttacatctgaaagtggtctcattaagaaaaagctgtttattactgtagctttactgtaccttctttatc

SEQ ID NO: 7762 - DNA, 599 bp, Chicken  19866894201959_3
  misc_feature (1)..(21): n is any nucleotide
nnnnnnnnnnnnnnnnnnnnncaagcaagtaggagtttgagctgrgtacatatatgcactccatgtcctgcaatgtcgatcagcacgttatttcaggcactctaaatctctagaacagtaatttagatgtgtttctgtttgtgaagatccttcaacagtaggaagtgatttttatccctttgttcagaatgatgtgcttcctttagccttgatgtcacagctgtgggtttatattcctggttctgttaccaagmactcaatattggtctctgcggtacggttctcaatggggctgtaatrccttcttctgaaactattccaaaatcttcaggcatctaaacaatgatttgtgaggaaaaacctgcyagtcttaatgataaaagagtaactcaaaaatccctttcctggtttcttaatagctttttgtttcaaaaaattaaactgtccatgtaaagcttacaaaagcagaactttgacacttattttacatctgaaagtggtctcattaagaaaaagctgtttattactgtagctttactgtaccttctttatctgttatactcaccagttcttgtcctcatttaatctaaagtagcaca

SEQ ID NO: 7763 - DNA, 600 bp, Chicken  19866894201959_4
cctgcaatgtcgatcagcacgttatttcaggcactctaaatctctagaacagtaatttagatgtgtttctgtttgtgaagatccttcaacagtaggaagtgatttttatccctttgttcagaatgatgtgcttcctttagccttgatgtcacagctgtgggtttatattcctggttctgttaccaagmactcaatattggtctctgcggtacggttctcaatggggctgtaatrccttcttctgaaactattccaaaatcttcaggcatctaaacaatgatttgtgaggaaaaacctgcyagtcttaatgataaaagagtaactcaaaaatccctttcctggtttcttaatagctttttgtttcaaaaaattaaactgtccatgtaaagcttacaaaagcagaactttgacacttattttacatctgaaagtggtctcattaagaaaaagctgtttattactgtagctttactgtaccttctttatctgttatactcaccagttcttgtcctcatttaatctaaagtagcacaggaccaggttttgaggggtgattaaggcagcctgcatttatctgttaatgtctgatcctgggaagag

SEQ ID NO: 7764 - DNA, 599 bp, Chicken  19866894201977_1
  misc_feature (1)..(90): n is any nucleotide
nnnnnnnnnnnnnnnnnnnnnnnnnnnnnnnnnnnnnnnnnnnnnnnnnnnnnnnnnnnnnnnnnnnnnnnnnnnnnnnnnnnnnnnnnnactgcagcccagatgagctctgctctcggctcgccccactgtgcggcgttcctaagagaaacggcacagaaagatcggcgttggcccttccggccaacggttctacggttccgtagttgggaggcagccggtttaacttttaattaaggctgtgagcccccatcggctccaattggcacaaatgggctgatgccccgcggctcggaaggsgaacgacgggagacccgaccgccggcgcgtcccccgcatcgcagcgcggccgtgcttaccgcggggcacgtccacctggtgccccctgcccacgctctgccagtagttcagcagccgctcctgctcctcgtcgtccatgcgctcggccccctcctcctccaggctgctgccgtggctgtggtacgccgagtcggggctctcctccgtcatgccgtccaggtcctccagcgtgatggcggccgggccgctcggctccgcgccgctcatgcgacacccgcccgtctccatcgcgcccggct

SEQ ID NO: 7765 - DNA, 596 bp, Chicken  19866894201979_1
cgaatcctccatttgtgtccaaagaaggtgagttgcacacaccaggcagccactcctctgctgcgtttcccccaggctgtgggtgcatccggagcatcctcggggagcactaagagggatctgccgtggggaaacccagcccggaggatgccaggtggtggtaccaaagcactgcgctttatgtgtgcgatggctttgctttgtcccctctggaagatggtttctgagagcccaagtgccaaatcctggggctgaaagttggggcattgggggcaccctgagccccagcactgccagacytgagccatgaccaaggaggggtgtgcagtgctggaggggagctcgtgctggggctcatcacacctgagcaagggctgccagcacccaccgcaggcagggaagggaagcaggctgtttaatgaacagatcctgtgtttatggagaacttgccagccatgacaacccagatgtttcctgtctctctgcatctgcaaacagccatttgctggttgaaagtggttcccagcacgaagctgtgcatctgggcttcagttctgcagcccgaggcagtggtggacctccagcatgtgagacat

SEQ ID NO: 7766 - DNA, 600 bp, Chicken  19866894201980_1
cgcacccagcagtaagggtggagcagtcctgctgtgcccggcccacctggcggggtgcccgccgagcccctgtaacacagcgtgccttcagggctgtaattgctctagtgcttggtactgctcaggaatttgtggtttgacgttttttaagtctgttcaattacagttaggttaaaaatgtacctacttgtctgtaaagactggttgagtaatcagtcctttgcttcaactgtaagaatttcagaggctgaaggtcccagtgattccaccacttacacagcacgggatgaagatctttgstttctagtggaaggtgaagaatgcctatgaccaagattctgtgcccgttggagcaaagctgtgcttggcacctgagcatgggattggcatgatggagcatctaacttcacctgtgaatgttagaccaagaggcctggccaaagtctttgtgcatgagacctgctgcaggatttattagtcaggagtccaamcaactgttctgacttctgccttagcagaaatcctcacagagaaagaactgaaggaaaacgagcaggtttcatgtaaaatgayggtggtgatacctgctgcttttaaggg

SEQ ID NO: 7767 - DNA, 600 bp, Chicken  19866894201980_2
ctgtaaagactggttgagtaatcagtcctttgcttcaactgtaagaatttcagaggctgaaggtcccagtgattccaccacttacacagcacgggatgaagatctttgstttctagtggaaggtgaagaatgcctatgaccaagattctgtgcccgttggagcaaagctgtgcttggcacctgagcatgggattggcatgatggagcatctaacttcacctgtgaatgttagaccaagaggcctggccaaagtctttgtgcatgagacctgctgcaggatttattagtcaggagtccaamcaactgttctgacttctgccttagcagaaatcctcacagagaaagaactgaaggaaaacgagcaggtttcatgtaaaatgayggtggtgatacctgctgcttttaagggaatgcaaaagtatgctgtaagaataattcagttgaggtgtgtgactttatcattctttaggggagatagagcacaagccctttagaagttttgtgagtgctrtaggcttttgctgtcttctgatttctcatgtttagtcatggagagcagtaggcacgggagaaacctgaccaggatctccagtactgtgt

SEQ ID NO: 7768 - DNA, 600 bp, Chicken  19866894201980_3
tacacagcacgggatgaagatctttgstttctagtggaaggtgaagaatgcctatgaccaagattctgtgcccgttggagcaaagctgtgcttggcacctgagcatgggattggcatgatggagcatctaacttcacctgtgaatgttagaccaagaggcctggccaaagtctttgtgcatgagacctgctgcaggatttattagtcaggagtccaamcaactgttctgacttctgccttagcagaaatcctcacagagaaagaactgaaggaaaacgagcaggtttcatgtaaaatgayggtggtgatacctgctgcttttaagggaatgcaaaagtatgctgtaagaataattcagttgaggtgtgtgactttatcattctttaggggagatagagcacaagccctttagaagttttgtgagtgctrtaggcttttgctgtcttctgatttctcatgtttagtcatggagagcagtaggcacgggagaaacctgaccaggatctccagtactgtgttagactcagctgttgagtggacttcaggtaggaacttgtggtagccaccccgttatttgtgtgttgtggtggctgtgtacac

SEQ ID NO: 7769 - DNA, 600 bp, Chicken  19866894201980_4
aacttcacctgtgaatgttagaccaagaggcctggccaaagtctttgtgcatgagacctgctgcaggatttattagtcaggagtccaamcaactgttctgacttctgccttagcagaaatcctcacagagaaagaactgaaggaaaacgagcaggtttcatgtaaaatgayggtggtgatacctgctgcttttaagggaatgcaaaagtatgctgtaagaataattcagttgaggtgtgtgactttatcattctttaggggagatagagcacaagccctttagaagttttgtgagtgctrtaggcttttgctgtcttctgatttctcatgtttagtcatggagagcagtaggcacgggagaaacctgaccaggatctccagtactgtgttagactcagctgttgagtggacttcaggtaggaacttgtggtagccaccccgttatttgtgtgttgtggtggctgtgtacacacctgaaggcttgttcacagagtggggcaactggagtgtggtttatccaggtctactgcaagaaaggtcaccgggcttggttgcaagaggcaaatgagctgtggtgatgtgttaataaaaccttgctct

SEQ ID NO: 7770 - DNA, 600 bp, Chicken  19866894201982_1
caagatagcattggtagctgatggaacatgagctgacacatcccaactctaaggtaattccatctgagatgcaaaaatcacagacttcacccaggaagctgacagacaacaaaacttcagactacagcagaagtgccatcaagcacatctgactttaccatctaatgggagcactgcattctatgaaaatatatccacttaaaacatttgacatatccatatttaggtcatagcctctaaaaagcaattattatatctgaaattcttctgaaacataccacaaaagttggaagaagaagytcaagcaaagcttccggcttcaaatccaggggggaacagtgaatgaatggctgtgtagtgctgagctgatgacaggttacaccacaacagtcctttcagcatacagtatggggcataccctggccaattgtccacagtgttatggccctccatgtggtgtcacatagtgtggaataacccctagcctaattcaggcacctattctggcttcattcttccccatgcctcacaccatcacggcagcagctctgccccatcaggcagcccagtccaacctcaggcacactcccatcactcagc

SEQ ID NO: 7771 - DNA, 600 bp, Chicken  19866894201984_1
ttgatgtgtgattcattcaaatctggaggggagggaggaatacgtttgtgtaacaatacatatgtggaagaacaatgtgtatttgtgctacttgcagaaaccttcaagacatatgggcttcagaatactttaccaattaatagtttaacaatgaaatgaaggtcactacatcagtaatataaatgtcacagaacagatggccctaatgtctagctctccctcacagcagggaaaccagattatgtgaaagaaacatggagtttcttacattaacaagaagctgcatttcaagtttttgtrggatcaattcaatacatcctttgtaagggtatctgggaggtcctctccgcattaatactacagaaaattacacttattttcaggttctcaaaaatcagatctccctctttcagaaactagtgataaataaagctattgagaatcaatcaaaaaaattttgagcaacaaaagaagtagtgtaacagaaatatctaaaggtgtactgcaggaaatttttttttttaaataagtaatctagaaactagtcatcaagtctaccgtaaacctaacatttctaataaatgtgctgaaagtgatctg

SEQ ID NO: 7772 - DNA, 600 bp, Chicken  19866894201985_1
ttcagctttctcgtaggcacagctcccagccattagtttctcctctacgggtgtattaaaggaaatgctgtggaagaggtgtcaccctttggacctcgcaaggcacgcacggttccaggcaggcaccagcaaaatatgtttttctatttcttgcaagcagagatgaagttaatttgtttggaaaagccccgccgtaggaaatgtcattcaacaattctgttgaagctctcaaaagccaaactgaggagataggaaaatggagcacagcgagaggcagggtctgggagtcgagcagtgccygctactgtagggaggacctgaagggtaagagcttgaaggttcgggctgaattgcatccaccttagagagcactgccttacgtagtgtgtaagaaatgaacawcagygtgaagctttgctgccgcctcacttcyctctgtccgtccccatcctcctgcacagcctcagtgcccacgcagctgcccggcacctgcaccacagaggtgttggtaacacgaagcccagtgtgaaacacagggagcagccacgttgccccacggrgcgtgcacctttctgcagggctgcggcaaaagcaagtaac

SEQ ID NO: 7773 - DNA, 600 bp, Chicken  19866894201985_2
gcacgcacggttccaggcaggcaccagcaaaatatgtttttctatttcttgcaagcagagatgaagttaatttgtttggaaaagccccgccgtaggaaatgtcattcaacaattctgttgaagctctcaaaagccaaactgaggagataggaaaatggagcacagcgagaggcagggtctgggagtcgagcagtgccygctactgtagggaggacctgaagggtaagagcttgaaggttcgggctgaattgcatccaccttagagagcactgccttacgtagtgtgtaagaaatgaacawcagygtgaagctttgctgccgcctcacttcyctctgtccgtccccatcctcctgcacagcctcagtgcccacgcagctgcccggcacctgcaccacagaggtgttggtaacacgaagcccagtgtgaaacacagggagcagccacgttgccccacggrgcgtgcacctttctgcagggctgcggcaaaagcaagtaacgcacgcagacctttaacaagtaaaagcttttctctgctttaatttcatttttcaattgcttatttcacagctagatattgcagctgtgcgtggctcagcttc

SEQ ID NO: 7774 - DNA, 600 bp, Chicken  19866894201985_3
gcacggttccaggcaggcaccagcaaaatatgtttttctatttcttgcaagcagagatgaagttaatttgtttggaaaagccccgccgtaggaaatgtcattcaacaattctgttgaagctctcaaaagccaaactgaggagataggaaaatggagcacagcgagaggcagggtctgggagtcgagcagtgccygctactgtagggaggacctgaagggtaagagcttgaaggttcgggctgaattgcatccaccttagagagcactgccttacgtagtgtgtaagaaatgaacawcagygtgaagctttgctgccgcctcacttcyctctgtccgtccccatcctcctgcacagcctcagtgcccacgcagctgcccggcacctgcaccacagaggtgttggtaacacgaagcccagtgtgaaacacagggagcagccacgttgccccacggrgcgtgcacctttctgcagggctgcggcaaaagcaagtaacgcacgcagacctttaacaagtaaaagcttttctctgctttaatttcatttttcaattgcttatttcacagctagatattgcagctgtgcgtggctcagcttctgtt

SEQ ID NO: 7775 - DNA, 600 bp, Chicken  19866894201985_4
atatgtttttctatttcttgcaagcagagatgaagttaatttgtttggaaaagccccgccgtaggaaatgtcattcaacaattctgttgaagctctcaaaagccaaactgaggagataggaaaatggagcacagcgagaggcagggtctgggagtcgagcagtgccygctactgtagggaggacctgaagggtaagagcttgaaggttcgggctgaattgcatccaccttagagagcactgccttacgtagtgtgtaagaaatgaacawcagygtgaagctttgctgccgcctcacttcyctctgtccgtccccatcctcctgcacagcctcagtgcccacgcagctgcccggcacctgcaccacagaggtgttggtaacacgaagcccagtgtgaaacacagggagcagccacgttgccccacggrgcgtgcacctttctgcagggctgcggcaaaagcaagtaacgcacgcagacctttaacaagtaaaagcttttctctgctttaatttcatttttcaattgcttatttcacagctagatattgcagctgtgcgtggctcagcttctgtttgatcgttctaaatagcggctcagtgc

SEQ ID NO: 7776 - DNA, 600 bp, Chicken  19866894201985_5
agcacagcgagaggcagggtctgggagtcgagcagtgccygctactgtagggaggacctgaagggtaagagcttgaaggttcgggctgaattgcatccaccttagagagcactgccttacgtagtgtgtaagaaatgaacawcagygtgaagctttgctgccgcctcacttcyctctgtccgtccccatcctcctgcacagcctcagtgcccacgcagctgcccggcacctgcaccacagaggtgttggtaacacgaagcccagtgtgaaacacagggagcagccacgttgccccacggrgcgtgcacctttctgcagggctgcggcaaaagcaagtaacgcacgcagacctttaacaagtaaaagcttttctctgctttaatttcatttttcaattgcttatttcacagctagatattgcagctgtgcgtggctcagcttctgtttgatcgttctaaatagcggctcagtgcaagacccagatgcagccctgcttacaaacccccccgaggcgttttggtacgcagctgatgctgttacactcagggctcaccaaagatgcctacgtcttttttttcccctcccctttrgaaataggcg

SEQ ID NO: 7777 - DNA, 600 bp, Chicken  19866894201985_6
agcagccacgttgccccacggrgcgtgcacctttctgcagggctgcggcaaaagcaagtaacgcacgcagacctttaacaagtaaaagcttttctctgctttaatttcatttttcaattgcttatttcacagctagatattgcagctgtgcgtggctcagcttctgtttgatcgttctaaatagcggctcagtgcaagacccagatgcagccctgcttacaaacccccccgaggcgttttggtacgcagctgatgctgttacactcagggctcaccaaagatgcctacgtcttttttttrccctcccctttrgaaataggcgctgtgcggatcccagcgcgtggatttmgagccatagagcaatcgggcatcccgagttggaggggacccgtaaggacaacccagtccaactcgtgagggctggatccaccccgcccgtgtaaacgaacgccgaaaagaaaaacagagccatcgggatgagtcccacctactcagccaccgctgtgctaaagctaaagctttaatttcttccccgagttttatcatcgagggtgataaacggaggaacaaaggcagcccctacgcacgcccggctgcact

SEQ ID NO: 7778 - DNA, 600 bp, Chicken  19866894201985_7
gccccacggrgcgtgcacctttctgcagggctgcggcaaaagcaagtaacgcacgcagacctttaacaagtaaaagcttttctctgctttaatttcatttttcaattgcttatttcacagctagatattgcagctgtgcgtggctcagcttctgtttgatcgttctaaatagcggctcagtgcaagacccagatgcagccctgcttacaaacccccccgaggcgttttggtacgcagctgatgctgttacactcagggctcaccaaagatgcctacgtcttttttttcccctcccctttrgaaataggcgctgtgcggatcccagcgcgtggatttmgagccatagagcaatcgggcatcccgagttggaggggacccgtaaggacaacccagtccaactcgtgagggctggatccaccccgcccgtgtaaacgaacgccgaaaagaaaaacagagccatcgggatgagtcccacctactcagccaccgctgtgctaaagctaaagctttaatttcttccccgagttttatcatcgagggtgataaacggaggaacaaaggcagcccctacgcacgcccggctgcactcgcatccatcca

SEQ ID NO: 7779 - DNA, 600 bp, Chicken  19866894201985_8
aaaagcaagtaacgcacgcagacctttaacaagtaaaagcttttctctgctttaatttcatttttcaattgcttatttcacagctagatattgcagctgtgcgtggctcagcttctgtttgatcgttctaaatagcggctcagtgcaagacccagatgcagccctgcttacaaacccccccgaggcgttttggtacgcagctgatgctgttacactcagggctcaccaaagatgcctacgtcttttttttcccctcccctttrgaaataggcgctgtgcggatcccagcgcgtggatttmgagccatagagcaatcgggcatcccgagttggaggggacccgtaaggacaacccagtccaactcgtgagggctggatccaccccgcccgtgtaaacgaacgccgaaaagaaaaacagagccatcgggatgagtcccacctactcagccaccgctgtgctaaagctaaagctttaatttcttccccgagttttatcatcgagggtgataaacggaggaacaaaggcagcccctacgcacgcccggctgcactcgcatccatccaaccggggctgaaacggagcagttcgcacctccagatg

SEQ ID NO: 7780 - DNA, 600 bp, Chicken  19866894201989_1
tgctgggtgctggagagctctggtggtagctcagcttatggctcccgtgcccttcatacctttgcaaaccactcagcgtggcggtgctgtgaggctttggggtgtttgttggttgtttttttttttttgagcagttgagacagctagaagtgttggaactggaagccttgtaattatggttttgttaggatctaaacaataaaggtagcagtcctgcactgataaaagcaagtgggcaggcagtaattgccacacttagtggtgaccaaggaggtctttatagcgcagccccacaccagygcctttcagtttcagatgttacactttgccgttccctgacctaataactggttggagaaaatgaataatggctttccttaatgatagaactaattttaaacccatcttctgtctcctcactcgctgctttgtatccttcttagaaaattacatctttgtggctgaaaggcagaagcccttattaaatgtttatattcacttaaactcgtaagagtggtagggcggtggcacagagagaggtcagagagcctctcgttttggggagcgagaagagacgggcgcagtttctgtttctgcaga

SEQ ID NO: 7781 - DNA, 600 bp, Chicken  19866894201989_2
tgtatccttcttagaaaattacatctttgtggctgaaaggcagaagcccttattaaatgtttatattcacttaaactcgtaagagtggtagggcggtggcacagagagaggtcagagagcctctcgttttggggagcgagaagagacgggcgcagtttctgtttctgcagagacaggggaagggatggaggaagagagcctctgctgatgggagcaccgcagggcactgcactgccaccacctaccggccagctggcctcgaggctccgtgtgctcctgctctgcacgggggggtgctcrggggagagcagatckctgcccctgggaggcagagactgttggtgagccgtgctgggggccctgcgctgctggggagctctggaaccattcgtccagcaagcagtggtgccaacgggacaacctcctgctgctcaggttgcctttgttctccattgtgtcctatggcttgttggcagcgtgggctccgtttcggtagattattttaaaggatgcttttcccttggctcggggcctcctttttatatcttttttcctcatctataatcataacatctgcatggcaacagcagcaagcgtttc

SEQ ID NO: 7782 - DNA, 600 bp, Chicken  19866894201989_3
aaattacatctttgtggctgaaaggcagaagcccttattaaatgtttatattcacttaaactcgtaagagtggtagggcggtggcacagagagaggtcagagagcctctcgttttggggagcgagaagagacgggcgcagtttctgtttctgcagagacaggggaagggatggaggaagagagcctctgctgatgggagcaccgcagggcactgcactgccaccacctaccggccagctggcctcgaggctccgtgtgctcctgctctgcacgggggggtgctcrggggagagcagatckctgcccctgggaggcagagactgttggtgagccgtgctgggggccctgcgctgctggggagctctggaaccattcgtccagcaagcagtggtgccaacgggacaacctcctgctgctcaggttgcctttgttctccattgtgtcctatggcttgttggcagcgtgggctccgtttcggtagattattttaaaggatgcttttcccttggctcggggcctcctttttatatcttttttcctcatctataatcataacatctgcatggcaacagcagcaagcgtttcacgagcaaaagcagc

SEQ ID NO: 7783 - DNA, 600 bp, Chicken  19866894201989_4
tgttctccattgtgtcctatggcttgttggcagcgtgggctccgtttcggtagattattttaaaggatgcttttcccttggctcggggcctcctttttatatcttttttcctcatctataatcataacatctgcatggcaacagcagcaagcgtttcacgagcaaaagcagcactaaaaggagctatttttaaccctctgtgatgcactgagctccaggagcagcaggagatggctggcactgtgtgcacagcagttcccacagctggccgcgagtgtcccctgcccgctcctgcagggstcaaaggaagtaatccagcacatcctttgcacacagtkctgggcacactggctcccagctcctgtctggtagccgatccgtgtgttttatgttccttgtaaygagttccaggttcttttgcacaagctctgagctacagattgcacgcttaagaaatatgtagatgtggcactgacggacatggtttagtgggcagtactggtggtaggtggacggttggactagatggtcttttccaaccttaatgattctatgattcaagtcagcattcctgcgatagctttctgcctgaaatccctt

SEQ ID NO: 7784 - DNA, 600 bp, Chicken  19866894201989_5
gctccgtttcggtagattattttaaaggatgcttttcccttggctcggggcctcctttttatatcttttttcctcatctataatcataacatctgcatggcaacagcagcaagcgtttcacgagcaaaagcagcactaaaaggagctatttttaaccctctgtgatgcactgagctccaggagcagcaggagatggctggcactgtgtgcacagcagttcccacagctggccgcgagtgtcccctgcccgctcctgcagggstcaaaggaagtaatccagcacatcctttgcacacagtkctgggcacactggctcccagctcctgtctggtagccgatccgtgtgttttatgttccttgtaaygagttccaggttcttttgcacaagctctgagctacagattgcacgcttaagaaatatgtagatgtggcactgacggacatggtttagtgggcagtactggtggtaggtggacggttggactagatggtcttttccaaccttaatgattctatgattcaagtcagcattcctgcgatagctttctgcctgaaatccctttccttgccggccagattcatttctgcagccacagcagt

SEQ ID NO: 7785 - DNA, 600 bp, Chicken  19866894201989_6
cttttttcctcatctataatcataacatctgcatggcaacagcagcaagcgtttcacgagcaaaagcagcactaaaaggagctatttttaaccctctgtgatgcactgagctccaggagcagcaggagatggctggcactgtgtgcacagcagttcccacagctggccgcgagtgtcccctgcccgctcctgcagggstcaaaggaagtaatccagcacatcctttgcacacagtkctgggcacactggctcccagctcctgtctggtagccgatccgtgtgttttatgttccttgtaaygagttccaggttcttttgcacaagctctgagctacagattgcacgcttaagaaatatgtagatgtggcactgacggacatggtttagtgggcagtactggtggtaggtggacggttggactagatggtcttttccaaccttaatgattctatgattcaagtcagcattcctgcgatagctttctgcctgaaatccctttccttgccggccagattcatttctgcagccacagcagtaatttaccatctcttctgttgcagagcaaagtcgtcgagatgacttggaagcccttggccacat

SEQ ID NO: 7786 - DNA, 600 bp, Chicken  19866894201991_1
atttactgtttgtaaaaaaaaaaaaaaaaaaaaacaacttgattttgttttttgataaacaatatttgaaaaatgtatggtttatagtcacctgtaaaccactgatgattcactgaagaatcatggaaatgaaaagtttgtgtttctcttctaattcaaaagctcataggttagaaaatttgttctttacttggttaatggttttaacattctgtaaggaattacactaacagtacaggaagttgtatgatacagtaaatgttattacagtctaataggctttaagtaaaacagtgacayatacctctatgtaaacataataatctgtaacatatgttagctgtctaagtgctagaatttacacttaagccctccagcaggctttttggttttttatgatgtgtggtttgcttttctcaacaccaaatgaatcagaagatgaaccaggccttacaattcctgtttctctccattgattatgaaatgagtctagtcatctggttcattatataggtaatccacatttagttagatgagtcttctcatttcatgatcaaaacgtaatacattctattagtacacctagaatatctagattga

SEQ ID NO: 7787 - DNA, 600 bp, Chicken  19866894201994_1
tctttaaggtcttttccaacctgagcaattctatgattctgtgattaagacagacttagcaggtacattttgtttctcaggctatcacagctctcccactgtcattgcagaatctgaatgccagattggtacctctccaagtggtacaaaatgtaaatacctcttaagaaagaagaagacagtgcaaaaattctctctcaaaagtctttagagatacctttgctagttaccttgaaccaccaatttcacatcacaacacttcctattctagcacttagatggtaagacaaggcactgtgyrtcttgcaggactgggctgcctacaagcatcctacgcaaagaagattgcaacagagaaagaaagcagaatactgagcaattggagctacatcaagacaaataatcacatgctttatgaagggtttaagagttttgagaccttttaagtatgcatgcttctatttagtggtatttcattagtactagcagacagggaaaaatcagtctcacaaaaggcaagtgattgcagagaaggtagcagagaatcagattgtggaggatgcttcttgatataaaagatgaaggcagctgcaggttact

SEQ ID NO: 7788 - DNA, 600 bp, Chicken  19866894201994_2
ctttaaggtcttttccaacctgagcaattctatgattctgtgattaagacagacttagcaggtacattttgtttctcaggctatcacagctctcccactgtcattgcagaatctgaatgccagattggtacctctccaagtggtacaaaatgtaaatacctcttaagaaagaagaagacagtgcaaaaattctctctcaaaagtctttagagatacctttgctagttaccttgaaccaccaatttcacatcacaacacttcctattctagcacttagatggtaagacaaggcactgtgyrtcttgcaggactgggctgcctacaagcatcctacgcaaagaagattgcaacagagaaagaaagcagaatactgagcaattggagctacatcaagacaaataatcacatgctttatgaagggtttaagagttttgagaccttttaagtatgcatgcttctatttagtggtatttcattagtactagcagacagggaaaaatcagtctcacaaaaggcaagtgattgcagagaaggtagcagagaatcagattgtggaggatgcttcttgatataaaagatgaaggcagctgcaggttactg

SEQ ID NO: 7789 - DNA, 600 bp, Chicken  19866894202000_1
taatgttcttcaaaatgtaaatataagaatttttaaaatgttattcctgagcaccagtaagaagaaacagtcctggctttttttttttaattccacgtatttaaaaataattcaatgaaaaaaagtgcctttatcttctgagctacctgcaaaagttcttccaatgttcttatatcattttaattaaaagatgcaagtagcctcatatttcaagtttttgcccagtatcccatattccactcaaaatattatatgcaaatggtatgagcaagagtcccactctgaaccagctcatcattrttaaaatggaatatcacaggcactgatctccaaaattattaagggggtagaaggagaaaaccccaccacacagaagtcttgcacaaaatgcacgcgtgtacataaatacatgaatttgcttcaggaaaaagcagcaagttatatcaaggacaaatgcaaagtttattccacatgtgctacaattaatcaacatgttagggaagtatcaaaacttgtactattaacatatggcaacagttatctcgttacaatacattgcaataggttagttagcccaagtggaaaagtttttaagctgca

SEQ ID NO: 7790 - DNA, 462 bp, Chicken  19866894202000_2
agcaagttatatcaaggacaaatgcaaagtttattccacatgtgctacaattaatcaacatgttagggaagtatcaaaacttgtactattaacatatggcaacagttatctcgttacaatacattgcaataggttagttagcccaagtggaaaagtttttaagctgcagacagtgcgattgcattaaatcttaattcttctgggtcacgttccatgaatttcttgcaaacctctattgcatcctatgggaaaaagaataaataaatcaacaacagaacagccacactataaaatcatacrtattcaaaaaagcgactgaaacgcgaagataggcatcacatcaattatggtcaagatgtactyttccataaaagattactaactagtatcacaaacttacatatactgcatttctgatctgtgtcactgccattcgggattatttctagcataagagaacaa

SEQ ID NO: 7791 - DNA, 399 bp, Chicken  19866894202000_3
tagggaagtatcaaaacttgtactattaacatatggcaacagttatctcgttacaatacattgcaataggttagttagcccaagtggaaaagtttttaagctgcagacagtgcgattgcattaaatcttaattcttctgggtcacgttccatgaatttcttgcaaacctctattgcatcctatgggaaaaagaataaataaatcaacaacagaacagccacactataaaatcatacrtattcaaaaaagcgactgaaacgcgaagataggcatcacatcaattatggtcaagatgtactyttccataaaagattactaactagtatcacaaacttacatatactgcatttctgatctgtgtcactgccattcgggattatttctagcataagagaacaa

SEQ ID NO: 7792 - DNA, 599 bp, Chicken  19866894202003_1
  misc_feature (1)..(10): n is any nucleotide
nnnnnnnnnnctgtggcttgtctgcagaacaatctgaaaagaacagaaaagaactatcaccaaaagacaatgtggcaattaagcaggctcagtttctgcttttccaaagacatgcaggcagtttgacagaacaggatgatagtcccaggcaatcttgacatctgaagtattttaaaaatcgagttggtttataaagtggactttaccactagatggctctgttattacgggaacacttttagtcctcttgaaggctgcaagcaaaagatgggaagaaaatgtagggagaccctggtaaaygggttgatgctgcccctagacctgtacagcagcttcctgcacccaccaggttatctggggtttcactggggcctttgacctcgtttaggtaacagaacaacaaaaccaggaacctgtagctcttgaaagttgttatttctgaagtgtaaatagaatggctgctccaaaaacaatgccccctgttttattctgttggcccatgatagcagaggcggatgttggtggtatggcattagaggctgaagcttcccagcaatactccagtgcatgttgttgtgtgtgacgtacagccgcagagg

SEQ ID NO: 7793 - DNA, 600 bp, Chicken  19866894202003_2
aacaaaaccaggaacctgtagctcttgaaagttgttatttctgaagtgtaaatagaatggctgctccaaaaacaatgccccctgttttattctgttggcccatgatagcagaggcggatgttggtggtatggcattagaggctgaagcttcccagcaatactccagtgcatgttgttgtgtgtgacgtacagccgcagaggggcagtgtgaccgaatggcatctgacagggaagtgtgagtggagcaaagatgtgttattaagttctccatgcagaaaaaacaccacccactggcattcrttgatrttcgctgagcatttatggagaccaaacagtggatgtgagcacagtgaggcagtgggtggtgcttttcagcagtagcaacagtgggtcacctgtgctggtgcagatttttacgagcacatctgatagtgtcrttgtgccctttgtatcttctgtagtttccatggaaataaataggaggcattattttcagaacgacctatgtagttatcactaataatttcttatagacacttaataataatgagataacgtagtcatgtttgactggagtgtttgatcagacatcagctccag

SEQ ID NO: 7794 - DNA, 596 bp, Chicken  19866894202003_3
accaggaacctgtagctcttgaaagttgttatttctgaagtgtaaatagaatggctgctccaaaaacaatgccccctgttttattctgttggcccatgatagcagaggcggatgttggtggtatggcattagaggctgaagcttcccagcaatactccagtgcatgttgttgtgtgtgacgtacagccgcagaggggcagtgtgaccgaatggcatctgacagggaagtgtgagtggagcaaagatgtgttattaagttctccatgcagaaaaaacaccacccactggcattcrttgatrttcgctgagcatttatggagaccaaacagtggatgtgagcacagtgaggcagtgggtggtgcttttcagcagtagcaacagtgggtcacctgtgctggtgcagatttttacgagcacatctgatagtgtcrttgtgccctttgtatcttctgtagtttccatggaaataaataggaggcattattttcagaacgacctatgtagttatcactaataatttcttatagacacttaataataatgagataacgtagtcatgtttgactggagtgtttgatcagacatcagctccaggt

SEQ ID NO: 7795 - DNA, 465 bp, Chicken  19866894202003_4
gaggctgaagcttcccagcaatactccagtgcatgttgttgtgtgtgacgtacagccgcagaggggcagtgtgaccgaatggcatctgacagggaagtgtgagtggagcaaagatgtgttattaagttctccatgcagaaaaaacaccacccactggcattcrttgatrttcgctgagcatttatggagaccaaacagtggatgtgagcacagtgaggcagtgggtggtgcttttcagcagtagcaacagtgggtcacctgtgctggtgcagatttttacgagcacatctgatagtgtcrttgtgccctttgtatcttctgtagtttccatggaaataaataggaggcattattttcagaacgacctatgtagttatcactaataatttcttatagacacttaataataatgagataacgtagtcatgtttgactggagtgtttgatcagacatcagctccaggt

SEQ ID NO: 7796 - DNA, 600 bp, Chicken  19866894202007_1
gggctgtcctggagaaaacatctgagaaaagtcaggttgtgactgtaagcctctggcatgagggcttaggaagaggtgctctgaggcactgagttgatgctgcagctcacacagattctggcttgcatttcgtttccccagcatgctgtaatgcagaaaccctggcttgtttttgaacagttggtttatgtcactgcaaatgccaaccagcaatagcattccctgaacaggcccagcttccaaaacacatttgctgcagatttgcaaggagaagcagggctgttgggcctgaggtgacayagatgcaggcctggctcttcacagacctgttcttagtgcagggattgctcagagctgccacagtggcacagcgtgcagcctctgtctatcttgcaagtacctctaggattaggggtcacagcatgcagtgacgtgtttgtatcactttcatccaagcatctcaaagcactttgcaagcattaattaaacatcagaatcaaggagagatgaatagtattattcaggcagtctttcttctaactgtaatatttctcataaatatttaactagtttctaaattccatgcaagcctggatctca

SEQ ID NO: 7797 - DNA, 600 bp, Chicken  19866894202007_2
ctcagagctgccacagtggcacagcgtgcagcctctgtctatcttgcaagtacctctaggattaggggtcacagcatgcagtgacgtgtttgtatcactttcatccaagcatctcaaagcactttgcaagcattaattaaacatcagaatcaaggagagatgaatagtattattcaggcagtctttcttctaactgtaatatttctcataaatatttaactagtttctaaattccatgcaagcctggatctcaccttgctgggacagttgctgcactgcatccgcagggaaacatattcwgtatcacacagcaatgtggyggcagagatyctctccaagaatgtgtgaaaatggggaaaagggatttcagatatcagatgttgagaaggactgtttactgatgccagtggaaagtcaagaaacctccagagggtctccatacaagccaagttccctgcacattagtgggggctgagtgtgcctgtgagctctgatgggtaagggatacccagatgtactgcaaaatcagtgagtgctcagtgactggagcragggaagggaaagtgttgaacactgtgtgaaaactgtattggatgtcag

SEQ ID NO: 7798 - DNA, 600 bp, Chicken  19866894202007_3
acagcgtgcagcctctgtctatcttgcaagtacctctaggattaggggtcacagcatgcagtgacgtgtttgtatcactttcatccaagcatctcaaagcactttgcaagcattaattaaacatcagaatcaaggagagatgaatagtattattcaggcagtctttcttctaactgtaatatttctcataaatatttaactagtttctaaattccatgcaagcctggatctcaccttgctgggacagttgctgcactgcatccgcagggaaacatattcwgtatcacacagcaatgtggyggcagagatyctctccaagaatgtgtgaaaatggggaaaagggatttcagatatcagatgttgagaaggactgtttactgatgccagtggaaagtcaagaaacctccagagggtctccatacaagccaagttccctgcacattagtgggggctgagtgtgcctgtgagctctgatgggtaagggatacccagatgtactgcaaaatcagtgagtgctcagtgactggagcragggaagggaaagtgttgaacactgtgtgaaaactgtattggatgtcagtggcttcaaagacagggagc

SEQ ID NO: 7799 - DNA, 600 bp, Chicken  19866894202007_4
gcctctgtctatcttgcaagtacctctaggattaggggtcacagcatgcagtgacgtgtttgtatcactttcatccaagcatctcaaagcactttgcaagcattaattaaacatcagaatcaaggagagatgaatagtattattcaggcagtctttcttctaactgtaatatttctcataaatatttaactagtttctaaattccatgcaagcctggatctcaccttgctgggacagttgctgcactgcatccgcagggaaacatattcwgtatcacacagcaatgtggyggcagagatyctctccaagaatgtgtgaaaatggggaaaagggatttcagatatcagatgttgagaaggactgtttactgatgccagtggaaagtcaagaaacctccagagggtctccatacaagccaagttccctgcacattagtgggggctgagtgtgcctgtgagctctgatgggtaagggatacccagatgtactgcaaaatcagtgagtgctcagtgactggagcragggaagggaaagtgttgaacactgtgtgaaaactgtattggatgtcagtggcttcaaagacagggagctttctctttg

SEQ ID NO: 7800 - DNA, 600 bp, Chicken  19866894202007_5
caccttgctgggacagttgctgcactgcatccgcagggaaacatattcwgtatcacacagcaatgtggyggcagagatyctctccaagaatgtgtgaaaatggggaaaagggatttcagatatcagatgttgagaaggactgtttactgatgccagtggaaagtcaagaaacctccagagggtctccatacaagccaagttccctgcacattagtgggggctgagtgtgcctgtgagctctgatgggtaagggatacccagatgtactgcaaaatcagtgagtgctcagtgactggagcragggaagggaaagtgttgaacactgtgtgaaaactgtattggatgtcagtggcttcaaagacagggagctttctctttgcagtgggatattgtccacctgttgagctccttgagggacttttctgcatccagacacggagaactaagaacagcaagcagcctctggagaggaggcctgggtggtttgccccgatatagctgtacaagtcagaaagaagcaaggctcctggatggtgctggggagaaatctctgtcagcaggcacttggagtatctctgaggaggcttaagctgggaaaag

SEQ ID NO: 7801 - DNA, 600 bp, Chicken  19866894202011_1
agttgatcactgagttcaactccccctgctaaagcaggtttcctacaatatgtcacacaggcaaacatccagactgttcttgaatatctccgtagaaggagacaacctctctgggcaacctgttccagggttctgtcaccttcacaataaagaagttctttcacatatttgtgtggaacttcttgatgttccagttcttggccatttctctgtgtactatcgctacacaccagtgaaaagagtctggcctcattcagttacctcccataatttagatatttataagcgttattcaaatcmtctcagtctcctcttatctaggccgaacagacccaggttactcagcctttcctcatatgggatatgctccaggtgtttatcytctttgtggccctctactggactccttctaggagatccctgtyttgtttgaactgaggagcccaaaactggacaaagtattccagatgtggcctcatcagggcagagcaggcaggtagaatcacytccctcgtcctgctggctaagctctttttaatgcaccacaagataccaacctgctatccaccagatacccaggtccttctttgcagagttcat

SEQ ID NO: 7802 - DNA, 600 bp, Chicken  19866894202011_2
aatatctccgtagaaggagacaacctctctgggcaacctgttccagggttctgtcaccttcacaataaagaagttctttcacatatttgtgtggaacttcttgatgttccagttcttggccatttctctgtgtactatcgctacacaccagtgaaaagagtctggcctcattcagttacctcccataatttagatatttataagcgttattcaaatcmtctcagtctcctcttatctaggccgaacagacccaggttactcagcctttcctcatatgggatatgctccaggtgtttatcytctttgtggccctctactggactccttctaggagatccctgtyttgtttgaactgaggagcccaaaactggacaaagtattccagatgtggcctcatcagggcagagcaggcaggtagaatcacytccctcgtcctgctggctaagctctttttaatgcaccacaagataccaacctgctatccaccagatacccaggtccttctttgcagagttcatctccatcaagtcatcctttaacctgtacggatgcatgctgttatttctcccgtgtgcaggactgtacacttgcttttgttga

SEQ ID NO: 7803 - DNA, 600 bp, Chicken  19866894202011_3
cagggttctgtcaccttcacaataaagaagttctttcacatatttgtgtggaacttcttgatgttccagttcttggccatttctctgtgtactatcgctacacaccagtgaaaagagtctggcctcattcagttacctcccataatttagatatttataagcgttattcaaatcmtctcagtctcctcttatctaggccgaacagacccaggttactcagcctttcctcatatgggatatgctccaggtgtttatcytctttgtggccctctactggactccttctaggagatccctgtyttgtttgaactgaggagcccaaaactggacaaagtattccagatgtggcctcatcagggcagagcaggcaggtagaatcacytccctcgtcctgctggctaagctctttttaatgcaccacaagataccaacctgctatccaccagatacccaggtccttctttgcagagttcatctccatcaagtcatcctttaacctgtacggatgcatgctgttatttctcccgtgtgcaggactgtacacttgcttttgttgaaccccaacagattccttcctgcycaattctctagtctgatcag

SEQ ID NO: 7804 - DNA, 600 bp, Chicken  19866894202011_4
ctctgtgtactatcgctacacaccagtgaaaagagtctggcctcattcagttacctcccataatttagatatttataagcgttattcaaatcmtctcagtctcctcttatctaggccgaacagacccaggttactcagcctttcctcatatgggatatgctccaggtgtttatcytctttgtggccctctactggactccttctaggagatccctgtyttgtttgaactgaggagcccaaaactggacaaagtattccagatgtggcctcatcagggcagagcaggcaggtagaatcacytccctcgtcctgctggctaagctctttttaatgcaccacaagataccaacctgctatccaccagatacccaggtccttctttgcagagttcatctccatcaagtcatcctttaacctgtacggatgcatgctgttatttctcccgtgtgcaggactgtacacttgcttttgttgaaccccaacagattccttcctgcycaattctctagtctgatcagttcttgttgaatgacaacataaccttttcaagtgtcagttagtcctcccagctttgtatcattggcagacttgctgaaggtg

SEQ ID NO: 7805 - DNA, 600 bp, Chicken  19866894202011_5
ccttctaggagatccctgtyttgtttgaactgaggagcccaaaactggacaaagtattccagatgtggcctcatcagggcagagcaggcaggtagaatcacytccctcgtcctgctggctaagctctttttaatgcaccacaagataccaacctgctatccaccagatacccaggtccttctttgcagagttcatctccatcaagtcatcctttaacctgtacggatgcatgctgttatttctcccgtgtgcaggactgtacacttgcttttgttgaaccccaacagattccttcctgcycaattctctagtctgatcagttcttgttgaatgacaacataaccttttcaagtgtcagttagtcctcccagctttgtatcattggcagacttgctgaaggtggactctatatacaatcatctaggtcactgatgaagatgctgaacaaggccggacccagcactgacctctggggagcaccgctagttacaggcctctaactgtactccacatcactgatcacaactgtcctgaactctaccagtcagccagtcctccacccactttattccactcatctatcacacattttccaagctt

SEQ ID NO: 7806 - DNA, 599 bp, Chicken  19866894202012_1
  misc_feature (1)..(8): n is any nucleotide
nnnnnnnngtccgtccgtcctgaaacccgcggctgtttcacaacccgagtccccaaaaagtgacaacaacaaacagctcgtggcgatttccccccaattccaggcgaaatgggacgagcacgacaaccaaacccgcctggctgaacgcatcagcagcgtgaacagatggaaggagaccctggacaaatgcctcgcagacgtagatgaggaaatcgatgctttggccaaagtatgttgggaaggcagatggctgcaaataaaccgtgctttcagcgtgggatgttaaataattgaggctckcctcgtgcagtgggtaaacccatacggtgtcacaggtattccgggatgggtacctggtgaaatgacatcctggatgttcccagctgagctgtgcatcgcctgctcgtgttctggccttgcttttatctcccaaagctctgaagggtaatgagaaatacattaaaaccaccgtttgaaaacgtttgatttgaaattgagggtgtcggtggggtcgagctctgattctcccagttctaaacccgtgggctgctctgtttggagccctgggcctccagcagggtgtgagtgtgagccctgac

SEQ ID NO: 7807 - DNA, 599 bp, Chicken  19866894202013_1
  misc_feature (1)..(234): n is any nucleotide
nnnnnnnnnnnnnnnnnnnnnnnnnnnnnnnnnnnnnnnnnnnnnnnnnnnnnnnnnnnnnnnnnnnnnnnnnnnnnnnnnnnnnnnnnnnnnnnnnnnnnnnnnnnnnnnnnnnnnnnnnnnnnnnnnnnnnnnnnnnnnnnnnnnnnnnnnnnnnnnnnnnnnnnnnnnnnnnnnnnnnnnnnnnnnnnnnnnnnnnnnnnnnnnnnnnnnnnnnnnnnnnnnnnnnnnnnnccatcacatggcaccccagtactctcttctagtggcaccatgggtgtgccactggtccacaaagakaagctcaagagctgtggcataaccctcgcatgccaagtcagtcccctacccactccctgagctgggacccacctggaagtgtgggctggagacacacttggccaactgcctgaacaagggctccataactttcacaaattcagatggctcaatcacatccaggatctcttccagctcatttaaaaacatcacctccttgggactgtgtgttttcggccagaacttcagcaagcccacaatcacctgagtaggaagggtacagacatagcgttagagactgaaagttaacacagggtgtg

SEQ ID NO: 7808 - DNA, 600 bp, Chicken  19866894202013_2
aaccctcgcatgccaagtcagtcccctacccactccctgagctgggacccacctggaagtgtgggctggagacacacttggccaactgcctgaacaagggctccataactttcacaaattcagatggctcaatcacatccaggatctcttccagctcatttaaaaacatcacctccttgggactgtgtgttttcggccagaacttcagcaagcccacaatcacctgagtaggaagggtacagacatagcgttagagactgaaagttaacacagggtgtgaaacaagattgtaaaagtctrgtcacaacagcaaaggagaggaagtaacagaagtaatgagactttctcagagagtcagggtgagttaccagggaagaaggagaaacatgaactctgccaagttgcatacaagacagcwgcgctgcccaggatgctaacatttggtactaccagcacaaagcttagaactacttcttcccccagcacactttaacaaggaaggatcaaatcagagtgggcaggggatgccagatggtgcagagcaacaatgaaagatcaaccagtaaaatcagaaatgctatggagaaggtgatgaaggaa

SEQ ID NO: 7809 - DNA, 600 bp, Chicken  19866894202013_3
ttcagatggctcaatcacatccaggatctcttccagctcatttaaaaacatcacctccttgggactgtgtgttttcggccagaacttcagcaagcccacaatcacctgagtaggaagggtacagacatagcgttagagactgaaagttaacacagggtgtgaaacaagattgtaaaagtctrgtcacaacagcaaaggagaggaagtaacagaagtaatgagactttctcagagagtcagggtgagttaccagggaagaaggagaaacatgaactctgccaagttgcatacaagacagcwgcgctgcccaggatgctaacatttggtactaccagcacaaagcttagaactacttcttcccccagcacactttaacaaggaaggatcaaatcagagtgggcaggggatgccagatggtgcagagcaacaatgaaagatcaaccagtaaaatcagaaatgctatggagaaggtgatgaaggaatcattattcaatataccacagagcttgaacgctaaaaagtacccagtaagtaatgcaatggccacattcagggcaagcaaaaggaagtaccattaaacacaaaggtaactggattaca

SEQ ID NO: 7810 - DNA, 600 bp, Chicken  19866894202013_4
gcagatgcaacttctgtctgaggaaactattgcttacaagacagcggcaggaatatacgaggcaaatatagagctatatcccactttatttattaatatcacttccttgcctggccatctgcttctaggtactgtcaaaggcaggatccatgatcttgcagaccttcactcactttgagccaccagtatggcgtttacaggaatgctaactgtgcagtaactctacagccactagattcaaacaattcctggtaagagctactattttaactctgtacttcagcagtctgatcctgaagyaaacacttgagagaaatttcaccccagygcaaggacagcagtaggcaaagcaacagcaagatgaggaatatttgagccaccaactcaaggctcaagcaacagtttgatatcctcagcgattgtcgtcactcaggtctgctattgaggcaagagtcagctccagtgactcagacaatttctcctacagctaaggtggtgcaaggtacattgagtctgtgctcactattacttagcacatctgaaatcttgctcacctggcaatcattcaggctgctgtaatgtaagagctaccatgctcag

SEQ ID NO: 7811 - DNA, 587 bp, Chicken  19866894202013_5
attgcttacaagacagcggcaggaatatacgaggcaaatatagagctatatcccactttatttattaatatcacttccttgcctggccatctgcttctaggtactgtcaaaggcaggatccatgatcttgcagaccttcactcactttgagccaccagtatggcgtttacaggaatgctaactgtgcagtaactctacagccactagattcaaacaattcctggtaagagctactattttaactctgtacttcagcagtctgatcctgaagyaaacacttgagagaaatttcaccccagygcaaggacagcagtaggcaaagcaacagcaagatgaggaatatttgagccaccaactcaaggctcaagcaacagtttgatatcctcagcgattgtcgtcactcaggtctgctattgaggcaagagtcagctccagtgactcagacaatttctcctacagctaaggtggtgcaaggtacattgagtctgtgctcactattacttagcacatctgaaatcttgctcacctggcaatcattcaggctgctgtaatgtaagagctaccatgctcagccttacagacctagt

SEQ ID NO: 7812 - DNA, 600 bp, Chicken  19866894202015_1
agcagtgcacttacgagctgcagacctggaagcggtttggcaacattggcactaaactgtacctgatggaagccacataggctacctccagacttgacccaaaatctgcatgcagatgagcaccttgtggctggaaatgccacctcagatcagtgctagctcagaagtgcctgcagtctgtaagctaagcaggtctgcagactcatagtggcccaaacagtactgatgcatgaaagcaggttcttgaagctctaggacaattctagcactacagtttaagaaacttttgaaaacattatygagaatctagagttctttttctctccacatccaagcagttcaagtttcagctgtctcaaacaaaacatgcaaaactgaaaaataaacaattcgaccaaaccacatccttccaaagcacacctgaacctctacactatatcatgctgctaagaatgctacataggatcaagtgacactttattccactgttatagtatttttcttccaagttcctgggagtacctgccaaatgctattggatcaaattctgcagcagccaagattcatagcacagtggagaaataataggtgttatgtcca

SEQ ID NO: 7813 - DNA, 600 bp, Chicken  19866894202015_10
atattcatcaggcagaccttgtgggaatacatccctggcatggggagggaaaaagrcagaaatgtatcaggcatagcaataaagagcacaatttctaaaactcttcttgycccagcaatgcttcccaaaaatatcacatagctcccacaaaatctgctgtatttggcaggctgaaaagcaatgaacatgagcttgttccctccacgtggttctgtccttgaggagcccttctctattccaacacagaagctctcaacttaaataaagaacagtgaaaacttcacaatgggatccatcaastcaaagcagctgagttccacttgatgctttagctcacgtcacagtaaatcatattgttcttctctaggtacactggagatctgtgacatctgacagtgggcaggcacacctgaaatcctctataaatgtaccaagttatagcaacaaatactgtaatatttccccaaaacaggcacaacacctcatgtctgccccagaagattttccttagctggtggcctgggagaacagtaccttcttgaatcacacttcataattatattaggcagaaatttactcattgtgactccatcatccatg

SEQ ID NO: 7814 - DNA, 600 bp, Chicken  19866894202015_2
actgaaaaataaacaattcgaccaaaccacatccttccaaagcacacctgaacctctacactatatcatgctgctaagaatgctacataggatcaagtgacactttattccactgttatagtatttttcttccaagttcctgggagtacctgccaaatgctattggatcaaattctgcagcagccaagattcatagcacagtggagaaataataggtgttatgtccatttcttaagtagagagtccataatgtcttcagatgatatctagaatgtatgtacacaaacctgctatagcagmctgctctcctgttctgctgtatatctgtgtggctattttttcccaaagagrcaaacatccagcttttcattcaccagaaccctccacatcsttctccacagagctgttcttctcccagtctgtacacatacccagaagcagtttcaagagctatatttcccctccyctttccaactaacgcatatatctgcatgctaacaacaatcaaggtctgtgtaatacttcctccagggttcaaattaaaagtaaaggattttcagcaagaaaaactgaaaygtaaggagtgggaggttaaggcaa

SEQ ID NO: 7815 - DNA, 600 bp, Chicken  19866894202015_3
acctctacactatatcatgctgctaagaatgctacataggatcaagtgacactttattccactgttatagtatttttcttccaagttcctgggagtacctgccaaatgctattggatcaaattctgcagcagccaagattcatagcacagtggagaaataataggtgttatgtccatttcttaagtagagagtccataatgtcttcagatgatatctagaatgtatgtacacaaacctgctatagcagmctgctctcctgttctgctgtatatctgtgtggctattttttcccaaagagrcaaacatccagcttttcattcaccagaaccctccacatcsttctccacagagctgttcttctcccagtctgtacacatacccagaagcagtttcaagagctatatttcccctccyctttccaactaacgcatatatctgcatgctaacaacaatcaaggtctgtgtaatacttcctccagggttcaaattaaaagtaaaggattttcagcaagaaaaactgaaaygtaaggagtgggaggttaaggcaagaaggctgattcatgcagtcraaaggaaacaaggctgctctttctgacagc

SEQ ID NO: 7816 - DNA, 600 bp, Chicken  19866894202015_4
atcaagtgacactttattccactgttatagtatttttcttccaagttcctgggagtacctgccaaatgctattggatcaaattctgcagcagccaagattcatagcacagtggagaaataataggtgttatgtccatttcttaagtagagagtccataatgtcttcagatgatatctagaatgtatgtacacaaacctgctatagcagmctgctctcctgttctgctgtatatctgtgtggctattttttcccaaagagrcaaacatccagcttttcattcaccagaaccctccacatcsttctccacagagctgttcttctcccagtctgtacacatacccagaagcagtttcaagagctatatttcccctccyctttccaactaacgcatatatctgcatgctaacaacaatcaaggtctgtgtaatacttcctccagggttcaaattaaaagtaaaggattttcagcaagaaaaactgaaaygtaaggagtgggaggttaaggcaagaaggctgattcatgcagtcraaaggaaacaaggctgctctttctgacagcaaagggcctcatacctgtggtatgccatacttgtcaataa

SEQ ID NO: 7817 - DNA, 600 bp, Chicken  19866894202015_5
atcaaattctgcagcagccaagattcatagcacagtggagaaataataggtgttatgtccatttcttaagtagagagtccataatgtcttcagatgatatctagaatgtatgtacacaaacctgctatagcagmctgctctcctgttctgctgtatatctgtgtggctattttttcccaaagagrcaaacatccagcttttcattcaccagaaccctccacatcsttctccacagagctgttcttctcccagtctgtacacatacccagaagcagtttcaagagctatatttcccctccyctttccaactaacgcatatatctgcatgctaacaacaatcaaggtctgtgtaatacttcctccagggttcaaattaaaagtaaaggattttcagcaagaaaaactgaaaygtaaggagtgggaggttaaggcaagaaggctgattcatgcagtcraaaggaaacaaggctgctctttctgacagcaaagggcctcatacctgtggtatgccatacttgtcaataatctgccaaatataccaatcttcttttctggaagccttccggaatttgaaggtagttacaaaggcatattcatcag

SEQ ID NO: 7818 - DNA, 600 bp, Chicken  19866894202015_6
tgtacacaaacctgctatagcagmctgctctcctgttctgctgtatatctgtgtggctattttttcccaaagagrcaaacatccagcttttcattcaccagaaccctccacatcsttctccacagagctgttcttctcccagtctgtacacatacccagaagcagtttcaagagctatatttcccctccyctttccaactaacgcatatatctgcatgctaacaacaatcaaggtctgtgtaatacttcctccagggttcaaattaaaagtaaaggattttcagcaagaaaaactgaaaygtaaggagtgggaggttaaggcaagaaggctgattcatgcagtcraaaggaaacaaggctgctctttctgacagcaaagggcctcatacctgtggtatgccatacttgtcaataatctgccaaatataccaatcttcttttctggaagccttccggaatttgaaggtagttacaaaggcatattcatcaggcagaccttgtgggaatacatccctggcatggggagggaaaaagrcagaaatgtatcaggcatagcaataaagagcacaatttctaaaactcttcttgycccagcaatgc

SEQ ID NO: 7819 - DNA, 600 bp, Chicken  19866894202015_7
tatctgtgtggctattttttcccaaagagrcaaacatccagcttttcattcaccagaaccctccacatcsttctccacagagctgttcttctcccagtctgtacacatacccagaagcagtttcaagagctatatttcccctccyctttccaactaacgcatatatctgcatgctaacaacaatcaaggtctgtgtaatacttcctccagggttcaaattaaaagtaaaggattttcagcaagaaaaactgaaaygtaaggagtgggaggttaaggcaagaaggctgattcatgcagtcraaaggaaacaaggctgctctttctgacagcaaagggcctcatacctgtggtatgccatacttgtcaataatctgccaaatataccaatcttcttttctggaagccttccggaatttgaaggtagttacaaaggcatattcatcaggcagaccttgtgggaatacatccctggcatggggagggaaaaagrcagaaatgtatcaggcatagcaataaagagcacaatttctaaaactcttcttgycccagcaatgcttcccaaaaatatcacatagctcccacaaaatctgctgtatttgg

SEQ ID NO: 7820 - DNA, 600 bp, Chicken  19866894202015_8
ctgtgtaatacttcctccagggttcaaattaaaagtaaaggattttcagcaagaaaaactgaaaygtaaggagtgggaggttaaggcaagaaggctgattcatgcagtcraaaggaaacaaggctgctctttctgacagcaaagggcctcatacctgtggtatgccatacttgtcaataatctgccaaatataccaatcttcttttctggaagccttccggaatttgaaggtagttacaaaggcatattcatcaggcagaccttgtgggaatacatccctggcatggggagggaaaaagrcagaaatgtatcaggcatagcaataaagagcacaatttctaaaactcttcttgycccagcaatgcttcccaaaaatatcacatagctcccacaaaatctgctgtatttggcaggctgaaaagcaatgaacatgagcttgttccctccacgtggttctgtccttgaggagcccttctctattccaacacagaagctctcaacttaaataaagaacagtgaaaacttcacaatgggatccatcaastcaaagcagctgagttccacttgatgctttagctcacgtcacagtaaatcatattg

SEQ ID NO: 7821 - DNA, 600 bp, Chicken  19866894202015_9
aaaactgaaaygtaaggagtgggaggttaaggcaagaaggctgattcatgcagtcraaaggaaacaaggctgctctttctgacagcaaagggcctcatacctgtggtatgccatacttgtcaataatctgccaaatataccaatcttcttttctggaagccttccggaatttgaaggtagttacaaaggcatattcatcaggcagaccttgtgggaatacatccctggcatggggagggaaaaagrcagaaatgtatcaggcatagcaataaagagcacaatttctaaaactcttcttgycccagcaatgcttcccaaaaatatcacatagctcccacaaaatctgctgtatttggcaggctgaaaagcaatgaacatgagcttgttccctccacgtggttctgtccttgaggagcccttctctattccaacacagaagctctcaacttaaataaagaacagtgaaaacttcacaatgggatccatcaastcaaagcagctgagttccacttgatgctttagctcacgtcacagtaaatcatattgttcttctctaggtacactggagatctgtgacatctgacagtgggcaggcacacc

SEQ ID NO: 7822 - DNA, 599 bp, Chicken  19866894202021_1
  misc_feature (1)..(8): n is any nucleotide
nnnnnnnntctgaaacccattaacctcagtgatactttggcctggaccatcgtactgcaacaacaaggggcacaaagcctaaagccccaagatctggagtcctctggatcagtacccaaacccaagcagcacagagcaacccaacctctgcaacccttgtgacagccactaaaaccgcagtggctctgatctcaaaggagaagacacagtccctgaggttgcttctgcccgctgcagtgaaaacaaagacaaaattagttctccgccagagaagtggcaactgtcctgaggcaagcccasctctcaggcacttgcagggcaagcttaattgcagcaggggtcatggaactcagccttacccttgctggtgtatttttggagaaacaatacatgcaaacactggcagagcgcaatcccacttctctgcaaaggacacttaaatacgtccttttcttctggaaaaacaggggaaaacctacatgtcaacaggtccactgatcaagcgccatcctccagtagttttttcagacagttatgaacttgaaatgtattttgtctcctgctccagcagttcctaaacagtgcgagctaaatattta

SEQ ID NO: 7823 - DNA, 600 bp, Chicken  19866894202024_1
gatctccacggggcttgtgagaattttgccctctggcatttcccatttatttcagcacatacaaactataaagagctgttaaggaaatggcagataatccttgagataatcaagcctaaatttaacctttttatacatgtgatctggcattttcactgtatgaagaaaaaaatgagattccatgaatgaagattagaggtattaatatttaagtgcacagcatattgaagaaaacaatggactgtaatggatgcttttcatctgacctctttctctctccctttctatcaatcattattwgatacaagatgacagaaattcatgagagccagtgcaaatgaaaaatgcactagaacttaactgcatttcggaactactggtgtcaaggggacaagcaatgcctgtgtctgtcaggatgtaaattaagtcgctttgtatgattcactctcaagatccagaaaagactatggctgagaacatgacatgatatgtttggtaaactttacattcaattaagaatctgttatcctggtcaaattttgatcccctgttgcattgaatgctattatgctgccataaattatcgtcaattgattataa

SEQ ID NO: 7824 - DNA, 600 bp, Chicken  19866894202024_2
ccaaccatttcagttaccacctactatttctgggtcttctgtacaagttaaaggacagtttccttaacagcattaagacatttcaaagtctgtatgttattttttaatagtcatagtactgagcccctgcatttggaatacaaaacaaaggacttatgacccactcgtaaattgctactactggtagaaatacaatgtttgaaaggtgctgaaagaggtactttttaataagaacctttcaaaacatctatcaagatacattttacaacaagtaagatgaaatttagcagcaatagtgaygtaacttgttatccattttgcagtggattctgtagccttatttatgcacattgagtgttgtttttttcgtggcagatatatgacactggactatttctaatctgaagtgttctctaatagttaacttgcaagacgttctttgaataaaaagggtggagggaaataggagacacttgtatgcaaacctgaaattaaaggtaacttaattatctgtctccttaacaccagctggcagcttatttatttcttatttgytatgtttataatgcaattgtgctcagtgttttttatgatagtaga

SEQ ID NO: 7825 - DNA, 600 bp, Chicken  19866894202024_3
atacattttacaacaagtaagatgaaatttagcagcaatagtgaygtaacttgttatccattttgcagtggattctgtagccttatttatgcacattgagtgttgtttttttcgtggcagatatatgacactggactatttctaatctgaagtgttctctaatagttaacttgcaagacgttctttgaataaaaagggtggagggaaataggagacacttgtatgcaaacctgaaattaaaggtaacttaattatctgtctccttaacaccagctggcagcttatttatttcttatttgytatgtttataatgcaattgtgctcagtgttttttatgatagtagactaattttgttctctttctggaaaggcatgatattagtagaacygttaagagacattttctacctggtctgtatttctaagccatatgtgcacaaggcatcagatgaaaaatgcatgcatgcatcagctataaaaatgagtggtatctgtgcttcagcttggcctggtgagaagttctgtacaccacaaataacagctgaatcttgtctgcccttttctttgctggcaaaatctgacttcagatgagtcagaacc

SEQ ID NO: 7826 - DNA, 600 bp, Chicken  19866894202024_4
tgcacattgagtgttgtttttttcgtggcagatatatgacactggactatttctaatctgaagtgttctctaatagttaacttgcaagacgttctttgaataaaaagggtggagggaaataggagacacttgtatgcaaacctgaaattaaaggtaacttaattatctgtctccttaacaccagctggcagcttatttatttcttatttgytatgtttataatgcaattgtgctcagtgttttttatgatagtagactaattttgttctctttctggaaaggcatgatattagtagaacygttaagagacattttctacctggtctgtatttctaagccatatgtgcacaaggcatcagatgaaaaatgcatgcatgcatcagctataaaaatgagtggtatctgtgcttcagcttggcctggtgagaagttctgtacaccacaaataacagctgaatcttgtctgcccttttctttgctggcaaaatctgacttcagatgagtcagaacccaaacactaccaggtttcacaaacatccacagaggatgaacagacagaattacatatttctattaagaatatccagagagtatgttttg

SEQ ID NO: 7827 - DNA, 572 bp, Chicken  19866894202024_5
taagaatatccagagagtatgttttgcaggaagtaatttcattatctgctgaagtgctagggttcagcatttaaatacacaaaattcaataatgcattaatttaatccacctcattagcatccagaagcatttagtgaaaaatgacagaattgttgcagctgatttcagactaagtggtaggccctgagagttttaagtcgatgattaatgcataatatataaaaaatatcctgtaaaatatataataaaatatatatactgcatcatgtttaacatagatgatgcatcatataatgtakgataaatacataaaaagaggcaatattcaagattttatatccatggagaacaagtttcactaaaattacactgtaaaaagatttcatgtttcatctctgtatcttgaaacagggaaaactaatagggaatcactgttttacataataggatacatcttgctgcagctcaagtaaaactaacaggagaaaatcaagtgtacatcattcaccttacttcaataaatgaataagcaaattggatggcagagaaactgaatcaattgttgcaaaca

SEQ ID NO: 7828 - DNA, 600 bp, Chicken  19866894202033_1
cttatgaagcagcccaagatacagttggccttttgggccacaaatgtatactgttggctcacgttaagctttttgtccaccagtctctacacatatctggaattgccaccctggtgtattggaaaacctggaaggcatcaagcatacttctggcacagaaactcctgtgatctagcctaggctgaattctcattcactgaggcaatatttgtaattgacgtaattttttcttgcactgttcaccaagggatgtttaggtaaatgtgcagaatgctccccatttatgtgttctccacagaygtggaataaaaagatactttttggatctttctctgaactttacaatgcaactgctttaagattctctgtgttaactagctgtatcctttcttgaaaaaactctgtcagcagaaaaatttattattaaaaataaattatgttattctctatcttttttcctcagaaaaccctgttgtttttgtttgaatattacatacaaaagtagtgccattaaaaataaataaataaaatcctgctatgtcttatggggattgcagcttgattagctttgctctcagatgtctcttcaggccacattct

SEQ ID NO: 7829 - DNA, 600 bp, Chicken  19866894202035_1
gtccttattatcaaacctttacttggagatggaaaaatgtctgcacaacttgattcttcacagcaaactctgattgctaattattttctaaatttcctgctgatgttccctgagtgaatgcaggcttcatgaaagtttctaacactcgtcctgtcagtaggagaatagaaactgggccagctatgttcagaaaggatcctatatgctcatcacttgggcttccactgaatacacactgatgcttgtctgccaccagctcacagcttcccattcaccctcctttttcatggctgtttgaartacagatrctcagactcttcagaaaacaaaaaactccaaagaaaacaaaaactgatgtcacccattctttacagtctcaagaaaagaaaaactagcctgtaagaaaattgtgacaagtgctcacacagtgacttctacaggcctatcaccactgctcatgtgagtcaaactaaaagcagtaaattacccctgcttggtattatttaatcttttttatgcatatttcccagtgcaacactatctgaggaactgccagagctgtatttctaacacttctgtaaatgtattatatacctgtac

SEQ ID NO: 7830 - DNA, 600 bp, Chicken  19866894202035_2
tatcaaacctttacttggagatggaaaaatgtctgcacaacttgattcttcacagcaaactctgattgctaattattttctaaatttcctgctgatgttccctgagtgaatgcaggcttcatgaaagtttctaacactcgtcctgtcagtaggagaatagaaactgggccagctatgttcagaaaggatcctatatgctcatcacttgggcttccactgaatacacactgatgcttgtctgccaccagctcacagcttcccattcaccctcctttttcatggctgtttgaartacagatrctcagactcttcagaaaacaaaaaactccaaagaaaacaaaaactgatgtcacccattctttacagtctcaagaaaagaaaaactagcctgtaagaaaattgtgacaagtgctcacacagtgacttctacaggcctatcaccactgctcatgtgagtcaaactaaaagcagtaaattacccctgcttggtattatttaatcttttttatgcatatttcccagtgcaacactatctgaggaactgccagagctgtatttctaacacttctgtaaatgtattatatacctgtacaaggtatc

SEQ ID NO: 7831 - DNA, 600 bp, Chicken  19866894202047_1
tgcttcttatttgaagtatgttggcagtgaaggggttaccatatcacatttttcccaattgctctaaatgtggctgcctaagaattcaggaaatatttgctacagtgctatgccagcacctgattgtgaaagtctgattagattgaattactagatgtattgtctggtttgcataatagaacaaagaaaggacacacccttctactgattctatgtatgagtctgggacattgctatatttctacactaaatgtattttaacttccacttttatatctgcctcattggatgtaaacatargttaccatttaaaaacacattaccatgttttaaagatgactcttgtaacgctatttggttctatccaatgctagggttatctgcctgccagctagcacattttcaaatgtgaaattgaatttccaatatgtggtatttgttgacatgcatttatagtgtaaaacatcattctctcagcctaaataaccctatatcaacagaccaagaacacctaactaaacatggatttattttactgtagctctttagggagcttcagatccaagagatctgaattttgagaagtacgaggaggacaga

SEQ ID NO: 7832 - DNA, 600 bp, Chicken  19866894202048_1
gcaggatttctttgtccttctattgctaggaaagatggcacatttacaaagtgactgcaaaggtaaggagttagtgatcatcataccaattgttcatattttctgaaggctctagagaaacacacagcagtccattaaccaaccaaacaagcaaacaaacccaacaggcatctggacaggtagttaagttgctactactgaatttcttacattttcccaaacagtgaggggaagtttagtaaaataaaggttcctacatgctcaaaaattgtccaacatctcccaaacaagcagcttacraaaaaaaacaaagccctgaaaaatacacagcaaaaccctaakgtgaataatgaagcatgaccaaacattctttattttaaaaaatcttctatattctgtctttactttcgaagttttttaaaaaaacatttggaaaggttcatcacctgtgaaaaatcatagcttggtgaaaaatatcctaatttatcacttcaatatgatactgcagggatacgcaactactgaaacaagaaaaagcaattttaagaagtttatttacccattttctttctctgaatgtgatacagcaggactgactcc

SEQ ID NO: 7833 - DNA, 600 bp, Chicken  19866894202048_2
tttacaaagtgactgcaaaggtaaggagttagtgatcatcataccaattgttcatattttctgaaggctctagagaaacacacagcagtccattaaccaaccaaacaagcaaacaaacccaacaggcatctggacaggtagttaagttgctactactgaatttcttacattttcccaaacagtgaggggaagtttagtaaaataaaggttcctacatgctcaaaaattgtccaacatctcccaaacaagcagcttacaaaaaaaaacaaagccctgaaaaatacacagcaaaaccctaakgtgaataatgaagcatgaccaaacattctttattttaaaaaatcttctatattctgtctttactttcgaagttttttaaaaaaacatttggaaaggttcatcacctgtgaaaaatcatagcttggtgaaaaatatcctaatttatcacttcaatatgatactgcagggatacgcaactactgaaacaagaaaaagcaattttaagaagtttatttacccattttctttctctgaatgtgatacagcaggactgactcccctttctgcaaggcctgcagaaccaagtcagcaacctcaaac

SEQ ID NO: 7834 - DNA, 600 bp, Chicken  19866894202051_1
accttccccttcagaggctgcacgaaaagcttctcctcacagatgtagcaaagctacagaggtgactaatactaacctattagatgggttttttctctgatcagttgttttttttttaaatggatccattgttgaataatatttaattcattgtggcttaccattttgagaaaatatccttaagtttggcattagagcagaatttaataccataagcttttggaatggtggagaattgtattacaacagtttcagtaattcctgacaccctccctagacaaggtgtggtttacaactgayaataattgataggaaagaaattacttattaaaatsgatcattccagggacagcagtggtaagcaggttttagtgtcatctctgcacacaggcttccccttagtaaggaggcatctctcagagcagctgcatcagttctagcgcaataaacgtgcaaaatgcaataaaatgcaaattgcttccattgaggtgcaacccaggaatggattttgggaaagggagcagcaagagatagaagtagcaggtaggttggagtacatgcatctgcgtgcttgagcatgttctggttctaatgccagtt

SEQ ID NO: 7835 - DNA, 600 bp, Chicken  19866894202051_2
ctcacagatgtagcaaagctacagaggtgactaatactaacctattagatgggttttttctctgatcagttgttttttttttaaatggatccattgttgaataatatttaattcattgtggcttaccattttgagaaaatatccttaagtttggcattagagcagaatttaataccataagcttttggaatggtggagaattgtattacaacagtttcagtaattcctgacaccctccctagacaaggtgtggtttacaactgayaataattgataggaaagaaattacttattaaaatsgatcattccagggacagcagtggtaagcaggttttagtgtcatctctgcacacaggcttccccttagtaaggaggcatctctcagagcagctgcatcagttctagcgcaataaacgtgcaaaatgcaataaaatgcaaattgcttccattgaggtgcaacccaggaatggattttgggaaagggagcagcaagagatagaagtagcaggtaggttggagtacatgcatctgcgtgcttgagcatgttctggttctaatgccagttagggaggtttaaaagctgactcatttaggatctgc

SEQ ID NO: 7836 - DNA, 600 bp, Chicken  19866894202059_1
ttaatgagggcctcttggagttcagttttccatgctctattgtggaagggatttttttttttgctgtcagagatgaatttatgacagtctttgatgtatctggtatttgcagcagttgttgaatatgagttagctataaccacgcatttgaaactcattatcacaagggaggtaggagctggttagttaaacttacacagaggaaagacaggaaagtgtaaatatgaaataatttctaattgtttgcaacttgctgaagagcaagggaataaagatggagtctgacatggggcagagcarmctgtgctggtggccatttgctctgtgtgatgggttcagaccatagtttcgggtaccaaggcaaggcacttgcttttatgtatttaatgctatgttgtgaaataggtgagttagactgagaactctgaaaacattccttaacaggacctgaaggaggactgaatgttgctccccttgtctggcacagagacacaggggctctttttttgtctctacagttgcacgtcctacgtgtaaagctgtgaagctgcctaccttgaaggctgctgagggatggaacatttgctgggagctgtcatt

SEQ ID NO: 7837 - DNA, 600 bp, Chicken  19866894202059_2
taatgagggcctcttggagttcagttttccatgctctattgtggaagggatttttttttttgctgtcagagatgaatttatgacagtctttgatgtatctggtatttgcagcagttgttgaatatgagttagctataaccacgcatttgaaactcattatcacaagggaggtaggagctggttagttaaacttacacagaggaaagacaggaaagtgtaaatatgaaataatttctaattgtttgcaacttgctgaagagcaagggaataaagatggagtctgacatggggcagagcarmctgtgctggtggccatttgctctgtgtgatgggttcagaccatagtttcgggtaccaaggcaaggcacttgcttttatgtatttaatgctatgttgtgaaataggtgagttagactgagaactctgaaaacattccttaacaggacctgaaggaggactgaatgttgctccccttgtctggcacagagacacaggggctctttttttgtctctacagttgcacgtcctacgtgtaaagctgtgaagctgcctaccttgaaggctgctgagggatggaacatttgctgggagctgtcattg

SEQ ID NO: 7838 - DNA, 600 bp, Chicken  19866894202059_3
gaaaaactgtctacccaaaatgaagaaagtacattctttcagactgcagaatatggggtcttgttgtagcctgttcctaccatctgtagtcaaatgtttgccctctctccctgctgtcccatactgcttgctggttcttctgtaacagggcagctgcttattcatttatgataaggcaaaaccaggtgggagctgtgaatatccaaactcagcccatacaagaattaattttcatcatttttatcaaactgtaatgtctttgcatgggtgtaaatatgaagtcttaactattgcagtgtwgagccttygtgtgccttgttccgagaacagtattcttggaagtctgtctggatgaacttttattctgaggagagctgtttacacacagtcatgttgttagagaaggcagagaataaaggaaagttgagcacggtgccttagcttaaagctgctaaagatgtcagaaggcagacagggaccatctgttacagagcaggttctgctccccacaggcattgagaaaaagrtttcctttggctcattgcttttaggctccctggggtttctgtttaggactgcccttttgctcctcatctgaga

SEQ ID NO: 7839 - DNA, 600 bp, Chicken  19866894202059_4
gtctacccaaaatgaagaaagtacattctttcagactgcagaatatggggtcttgttgtagcctgttcctaccatctgtagtcaaatgtttgccctctctccctgctgtcccatactgcttgctggttcttctgtaacagggcagctgcttattcatttatgataaggcaaaaccaggtgggagctgtgaatatccaaactcagcccatacaagaattaattttcatcatttttatcaaactgtaatgtctttgcatgggtgtaaatatgaagtcttaactattgcagtgtwgagccttygtgtgccttgttccgagaacagtattcttggaagtctgtctggatgaacttttattctgaggagagctgtttacacacagtcatgttgttagagaaggcagagaataaaggaaagttgagcacggtgccttagcttaaagctgctaaagatgtcagaaggcagacagggaccatctgttacagagcaggttctgctccccacaggcattgagaaaaagrtttcctttggctcattgcttttaggctccctggggtttctgtttaggactgcccttttgctcctcatctgagagtgtcttt

SEQ ID NO: 7840 - DNA, 600 bp, Chicken  19866894202059_5
attttcatcatttttatcaaactgtaatgtctttgcatgggtgtaaatatgaagtcttaactattgcagtgtwgagccttygtgtgccttgttccgagaacagtattcttggaagtctgtctggatgaacttttattctgaggagagctgtttacacacagtcatgttgttagagaaggcagagaataaaggaaagttgagcacggtgccttagcttaaagctgctaaagatgtcagaaggcagacagggaccatctgttacagagcaggttctgctccccacaggcattgagaaaaagrtttcctttggctcattgcttttaggctccctggggtttctgtttaggactgcccttttgctcctcatctgagagtgtctttgagtacaagaagagcaatcatgttttaagtatatgttttttctttctaattggccactctctcttttaaaagtgcaggtaggtactacttcrttttcctggacccttttttttcagtcccttcttttatttgacaattccatggtatggctaacacagtaccacatgttagataatttattttctcttcagcatagaaagccattcgctttaactattt

SEQ ID NO: 7841 - DNA, 600 bp, Chicken  19866894202059_6
agaaggcagagaataaaggaaagttgagcacggtgccttagcttaaagctgctaaagatgtcagaaggcagacagggaccatctgttacagagcaggttctgctccccacaggcattgagaaaaagrtttcctttggctcattgcttttaggctccctggggtttctgtttaggactgcccttttgctcctcatctgagagtgtctttgagtacaagaagagcaatcatgttttaagtatatgttttttctttctaattggccactctctcttttaaaagtgcaggtaggtactacttcrttttcctggacccttttttttcagtcccttcttttatttgacaattccatggtatggctaacacagtaccacatgttagataatttattttctcttcagcatagaaagccattcgctttaactatttattcaacagcattttaattcaatttaatgataatcagtccatttctaggattaacagtttggaagctgaccaaacttctgcaaggttttctaaaagacctaccccataagctccagtagaagttcaaattttatgtaaaatataaattgtaaaatatgatgtattttacaatt

SEQ ID NO: 7842 - DNA, 600 bp, Chicken  19866894202061_1
tagtatcttaatttgtgaaacacacctggaggtcttttagacaggtatcagttggtcaaaacttcttctggaggaatcttttccttagaaagacctgcaaagtgctcagtaagtgcctcatgatgctaccacccccagccctatgatgtcaaacttcttcagtgagaagtatttctcctccctccatgtcctacagccagaccagccacgtggagccgaccccatcgcagctccacagctgggagccacacactccactaccaaacccacaccacacctctcaagttgattctttcccastgtgaaccacgtgccaggagaacrctgagcaacccaggaggccgcagcacaaggaggggctggctccgtgcacctcctagaggacccccagcagcagggcacaggcactgcgctctgcagagcagcagctgtgtcwggacaggacctcagctgctcctgagacactccactggtgcacctccatcctctcactttcctccagttttctccaaaagctcctaatggaccaccagcagcagcctgttctccacttgctctcctgcacagcagcccccacaaagccgggcagcaggctcagca

SEQ ID NO: 7843 - DNA, 600 bp, Chicken  19866894202061_2
cctggaggtcttttagacaggtatcagttggtcaaaacttcttctggaggaatcttttccttagaaagacctgcaaagtgctcagtaagtgcctcatgatgctaccacccccagccctatgatgtcaaacttcttcagtgagaagtatttctcctccctccatgtcctacagccagaccagccacgtggagccgaccccatcgcagctccacagctgggagccacacactccactaccaaacccacaccacacctctcaagttgattctttcccastgtgaaccacgtgccaggagaacrctgagcaacccaggaggccgcagcacaaggaggggctggctccgtgcacctcctagaggacccccagcagcagggcacaggcactgcgctctgcagagcagcagctgtgtcwggacaggacctcagctgctcctgagacactccactggtgcacctccatcctctcactttcctccagttttctccaaaagctcctaatggaccaccagcagcagcctgttctccacttgctctcctgcacagcagcccccacaaagccgggcagcaggctcagcaggacggcagcacagtaatggtact

SEQ ID NO: 7844 - DNA, 600 bp, Chicken  19866894202061_3
agccctatgatgtcaaacttcttcagtgagaagtatttctcctccctccatgtcctacagccagaccagccacgtggagccgaccccatcgcagctccacagctgggagccacacactccactaccaaacccacaccacacctctcaagttgattctttcccastgtgaaccacgtgccaggagaacrctgagcaacccaggaggccgcagcacaaggaggggctggctccgtgcacctcctagaggacccccagcagcagggcacaggcactgcgctctgcagagcagcagctgtgtcwggacaggacctcagctgctcctgagacactccactggtgcacctccatcctctcactttcctccagttttctccaaaagctcctaatggaccaccagcagcagcctgttctccacttgctctcctgcacagcagcccccacaaagccgggcagcaggctcagcaggacggcagcacagtaatggtacttcactgcagcagactgcttggcatttcacatgacaaagaaaatagaaatactccatttgtgcatttgagtaactgctcttctctgaacacatcaccataagcatacacttca

SEQ ID NO: 7845 - DNA, 600 bp, Chicken  19866894202061_4
cctcagctgctcctgagacactccactggtgcacctccatcctctcactttcctccagttttctccaaaagctcctaatggaccaccagcagcagcctgttctccacttgctctcctgcacagcagcccccacaaagccgggcagcaggctcagcaggacggcagcacagtaatggtacttcactgcagcagactgcttggcatttcacatgacaaagaaaatagaaatactccatttgtgcatttgagtaactgctcttctctgaacacatcaccataagcatacacttcaagcaccaygtaagaascagtcagctgccttcctactgaagtacctctccatcaacaaccrgaaagcttagaagtgctcactaggaaacaaaatgaccattttttggatgtcatggagggcttttctaaaaatatgctgacacaggaaatacctatgaagatatccaagagattacactgcttcctgttaatggagcaactgtacatttccagcgaggacaatgcagcaaccactaacctcacgttccagaaacgtaagctgtgttttgtgactgctgctttggcaaacatgggtttgcacataccaaa

SEQ ID NO: 7846 - DNA, 600 bp, Chicken  19866894202061_5
gctcctgagacactccactggtgcacctccatcctctcactttcctccagttttctccaaaagctcctaatggaccaccagcagcagcctgttctccacttgctctcctgcacagcagcccccacaaagccgggcagcaggctcagcaggacggcagcacagtaatggtacttcactgcagcagactgcttggcatttcacatgacaaagaaaatagaaatactccatttgtgcatttgagtaactgctcttctctgaacacatcaccataagcatacacttcaagcaccaygtaagaascagtcagctgccttcctactgaagtacctctccatcaacaaccrgaaagcttagaagtgctcactaggaaacaaaatgaccattttttggatgtcatggagggcttttctaaaaatatgctgacacaggaaatacctatgaagatatccaagagattacactgcttcctgttaatggagcaactgtacatttccagcgaggacaatgcagcaaccactaacctcacgttccagaaacgtaagctgtgttttgtgactgctgctttggcaaacatgggtttgcacataccaaagagcacat

SEQ ID NO: 7847 - DNA, 600 bp, Chicken  19866894202061_6
ctccagttttctccaaaagctcctaatggaccaccagcagcagcctgttctccacttgctctcctgcacagcagcccccacaaagccgggcagcaggctcagcaggacggcagcacagtaatggtacttcactgcagcagactgcttggcatttcacatgacaaagaaaatagaaatactccatttgtgcatttgagtaactgctcttctctgaacacatcaccataagcatacacttcaagcaccaygtaagaascagtcagctgccttcctactgaagtacctctccatcaacaaccrgaaagcttagaagtgctcactaggaaacaaaatgaccattttttggatgtcatggagggcttttctaaaaatatgctgacacaggaaatacctatgaagatatccaagagattacactgcttcctgttaatggagcaactgtacatttccagcgaggacaatgcagcaaccactaacctcacgttccagaaacgtaagctgtgttttgtgactgctgctttggcaaacatgggtttgcacataccaaagagcacatacaaatcagctgtagaagcaaacagctcaagctcctaattaatc

SEQ ID NO: 7848 - DNA, 600 bp, Chicken  19866894202063_1
agtgtaaatatactccttcaagcagagtatcacgtcactaaattataaaaacatgtaccacaccagtctatcatggtacaaagacctgtattttcaatttgattctgtccttgacctctgtactcagactgccacccaggggagcaactgtgatggtgacagtgtacatagctgtccctacaaagtacactgagctccttggctcagctcacaccatttgttgccatttgttcatgtgagcttggttccacaatgctgtggctgcactcggattcactgcatagagcactcattcattcmcctgcaaattctgcctctaagactttgttggatacccatgtttgtggattacactctataaataaataaccataggaagacagcaggaagttttcaactggtgcacagtctggttggaaatggatattctgttgcttactaccagttgtttgagtcagctttttcgtgaaaactgacttattcttgtgaccataaataaaattctggttctttaaatattaaaagcttcaatgtttcagagttgaaaaaatgttttaaatagtaatttgactcatacttctttttattacacagtcataa

SEQ ID NO: 7849 - DNA, 600 bp, Chicken  19866894202063_2
ataaataaataaccataggaagacagcaggaagttttcaactggtgcacagtctggttggaaatggatattctgttgcttactaccagttgtttgagtcagctttttcgtgaaaactgacttattcttgtgaccataaataaaattctggttctttaaatattaaaagcttcaatgtttcagagttgaaaaaatgttttaaatagtaatttgactcatacttctttttattacacagtcataaattaaactaaaatagctcctacaatgaaagctttttttctgccatttctgttgaaartctcagcttttctgtgcattttctgttgctattcctactggaaagtattacagaaattcacaggctattaacgtaaaaaaaacactttagctgcaaaatcactgtcagaagctaacccctttgttggcctcttggcaaaattcaaaggtagaaggtttctttcctcttcaattaaatacagttccagtaaatacacaccttattttaaaaatcttcccataatattcaaaatatgctgccagtttcaaacatcagaatgggaagtcatatatgaaatttatcaagcctggcagcacagca

SEQ ID NO: 7850 - DNA, 599 bp, Chicken  19866894202065_1
  misc_feature (1)..(31): n is any nucleotide
nnnnnnnnnnnnnnnnnnnnnnnnnnnnnnntctatggggcagaaaaggactcccacggaggtctgtctgtccctctcaatgtctgtagagagaaaaataaaaccagtgtggccaccccttctaacagcaccataaattcaagcccactctcctccttgctggataactgtcaatagactgcattcaatagatagtacagcagatagaagtctgaaagaagaacaaatgaggactaaatgagggttatgtggattttagttggaggggtttatcctcttgcaaggttgtgtgagcttggwgctagttttagaggagaatcacgatgcatcagagatgacacagagtgtggggtagaagtcaaactgtcactgactgctattcctaattgaaagaacaaacagyaagtgttgctttaattataaacatctcattatttacacctaatatttcagtagcaccttggctagaaaaaaaaatcttttgtttgtcttcactaggattcactatttcatttcctcttcccaccaaatatcattttgctgatactaaaaacagtcacttacgattatgataaagtagcggcacttctgaatagtca

SEQ ID NO: 7851 - DNA, 600 bp, Chicken  19866894202065_2
ccagtgtggccaccccttctaacagcaccataaattcaagcccactctcctccttgctggataactgtcaatagactgcattcaatagatagtacagcagatagaagtctgaaagaagaacaaatgaggactaaatgagggttatgtggattttagttggaggggtttatcctcttgcaaggttgtgtgagcttggwgctagttttagaggagaatcacgatgcatcagagatgacacagagtgtggggtagaagtcaaactgtcactgactgctattcctaattgaaagaacaaacagyaagtgttgctttaattataaacatctcattatttacacctaatatttcagtagcaccttggctagaaaaaaaaatcttttgtttgtcttcactaggattcactatttcatttcctcttcccaccaaatatcattttgctgatactaaaaacagtcacttacgattatgataaagtagcggcacttctgaatagtcaaatcaaagggaaaaaagaagakaaatgaatctgttgatgaaaagttgaatgattcagacaagagaattgattatttgagtcaactccttcagaatgtgaatgcc

SEQ ID NO: 7852 - DNA, 555 bp, Chicken  19866894202065_3
cgatgcatcagagatgacacagagtgtggggtagaagtcaaactgtcactgactgctattcctaattgaaagaacaaacagyaagtgttgctttaattataaacatctcattatttacacctaatatttcagtagcaccttggctagaaaaaaaaatcttttgtttgtcttcactaggattcactatttcatttcctcttcccaccaaatatcattttgctgatactaaaaacagtcacttacgattatgataaagtagcggcacttctgaatagtcaaatcaaagggaaaaaagaagakaaatgaatctgttgatgaaaagttgaatgattcagacaagagaattgattatttgagtcaactccttcagaatgtgaatgccattggttgttctccaatttcattttcttttatcaaaaccttgtggtttagaaagtgaaaaaaaaaaaaaaaatcaatactgtaacaaaatatcaacagagacctaattctgcatcattcctgtggaaatcttaggtcatcttgaacatgtatttgactatatattgactccat

SEQ ID NO: 7853 - DNA, 600 bp, Chicken  19866894202068_1
tttctgcagggatcagtactgtaaaaatgctattaagaattctcattagtgttttggaaacacgtgaaaaatctctgcttttaaaatgccaatataccacgatttggaggaacataaaacaaggacaataaagtgctgatcctgaatgatctgcattgctcaataaacagtccatttatggtgtatttgatcttgttgaaacatattcaaatcactcattttgaagtaagaaatatatgtcctctgttcttccaatgggaaactatgtcctggaaattagtagatggaatgagtttgcawctcagcagatgagcaaaagtggtagccaacagaacgatgttatagcagaatgagccacttagacccttgcgtgcataaaatttgggcaaggagaggtgtgattttactttgaaacgtggcatgactggtgccaggaaactgcttatcatatcagtggcactgtcacagtaaggatttcagaaactggagagagggcagagcaatgccaccagaaggttttcaggattcaaagagttcccagtgcttagacttcagctttcaattccaggtagcayatcaaaaagccaggactgacaatct

SEQ ID NO: 7854 - DNA, 600 bp, Chicken  19866894202068_2
attagtagatggaatgagtttgcawctcagcagatgagcaaaagtggtagccaacagaacgatgttatagcagaatgagccacttagacccttgcgtgcataaaatttgggcaaggagaggtgtgattttactttgaaacgtggcatgactggtgccaggaaactgcttatcatatcagtggcactgtcacagtaaggatttcagaaactggagagagggcagagcaatgccaccagaaggttttcaggattcaaagagttcccagtgcttagacttcagctttcaattccaggtagcayatcaaaaagccaggactgacaatctcaccttacagtctgcaagaagcttcttggcatgaagtactgggtgaccaagaatgctacagctctacagagagggagataatgaaaagcaaagtcttggaaatgcctggatctatgcattttttggattggaaatagagcatacttattttacaaagagggtttaatccttccagcagcctaccaaagtaaccaagggccccattttctgatgtttgcaaatcaagaccatttgactttctggaagatatattaaagttaaatgtaagttagtag

SEQ ID NO: 7855 - DNA, 600 bp, Chicken  19866894202072_1
gcaccagtgagtttatctagctctattttctgaaaatactattatcagtgcataggcatataagctgagagagcatcctgtcctcatgcagggtcatgtacagattctcccctaaatatatccctgatgaagttactcaggtgtcttaatttagacaacacaaaccctacacacaggattttccctcttctttacccgtcagcacacagctcacctggtacaattagaaagcaaactagtcaaagctggtgacaaaagcttcacagcaacacttgaatttaactgaacactcctaattasgtttttatcatcccaaggaaagaaggctaacccttaaatggcgatcaaactgcaaatatcacctaaaacttccaggtttgcatagattagctatacacactaagttaaaaggcatctccaaaacaagatctcaaaacagaagtatatgtaagcacttgtaaaagcaattatctagatgctccagaagatctaaacggtgtgccatgctggaattaatcctttgggagaccaatattaggaaggctacgtggggggagggaaaagagcagatcactcatgctttagaactactcatgtaac

SEQ ID NO: 7856 - DNA, 600 bp, Chicken  19866894202076_1
ggcagactcttagccatatgtgtttcttctcaagtgctgcactctttgtaaattaaagagggcgatcaatagggcaatagggaaggaggacaagtagcctgctggtacacactgcatggaatggtcagcttgtttccatgatctcagaatttgctggattgtgctatagcatgccagcagtagatcagagaaatgagatgaatagggttttccttaggaatgtatgcaagagttttgaaatagagtgagacactttcttgctttgcagtcttgtaccattccatcaccatgcattgcacrgaggcggaaaggtggtgatggtttaattggtgttttgattgaatattgttcttctgtgcaatggatatgctgctcaacctgaatatgctatgtgaagygtcttcattctgttgaggcagaactttgaggccttgatttcagtagttctctacatgtgcaccaagctgctagaaaatttgcctgtctctccttacgttttttctctgctatagggttgaaaagagtgtgtgygatagactacatagattccgtatgcctatacttggagatgatttggtgaaattaaactggaaaaaaaca

SEQ ID NO: 7857 - DNA, 597 bp, Chicken  19866894202076_2
ctgctggtacacactgcatggaatggtcagcttgtttccatgatctcagaatttgctggattgtgctatagcatgccagcagtagatcagagaaatgagatgaatagggttttccttaggaatgtatgcaagagttttgaaatagagtgagacactttcttgctttgcagtcttgtaccattccatcaccatgcattgcacrgaggcggaaaggtggtgatggtttaattggtgttttgattgaatattgttcttctgtgcaatggatatgctgctcaacctgaatatgctatgtgaagygtcttcattctgttgaggcagaactttgaggccttgatttcagtagttctctacatgtgcaccaagctgctagaaaatttgcctgtctctccttacgttttttctctgctatagggttgaaaagagtgtgtgygatagactacatagattccgtatgcctatacttggagatgatttggtgaaattaaactggaaaaaaacagctacggggcaatagatgcattctgcagtacttcagaatcaattgtgtgcgtgtgtacccttttattttctacctttataccaaacttcctcaat

SEQ ID NO: 7858 - DNA, 464 bp, Chicken  19866894202076_3
gttttgaaatagagtgagacactttcttgctttgcagtcttgtaccattccatcaccatgcattgcacrgaggcggaaaggtggtgatggtttaattggtgttttgattgaatattgttcttctgtgcaatggatatgctgctcaacctgaatatgctatgtgaagygtcttcattctgttgaggcagaactttgaggccttgatttcagtagttctctacatgtgcaccaagctgctagaaaatttgcctgtctctccttacgttttttctctgctatagggttgaaaagagtgtgtgygatagactacatagattccgtatgcctatacttggagatgatttggtgaaattaaactggaaaaaaacagctacggggcaatagatgcattctgcagtacttcagaatcaattgtgtgcgtgtgtacccttttattttctacctttataccaaacttcctcaat

SEQ ID NO: 7859 - DNA, 599 bp, Chicken  19866894202078_1
  misc_feature (1)..(59): n is any nucleotide
nnnnnnnnnnnnnnnnnnnnnnnnnnnnnnnnnnnnnnnnnnnnnnnnnnnnnnnnnnnctcaagcgtcagacttacatcctgcacacaccactgaactcagcacagaggtttccccactcacactggctctgggatcagtgcattctgcaagctctgcagcgcacaagcagctcacagcactggaaaggattcctttgcctttagcctcccacttctcgtataattgtgcagtaaatttccctgaacatacatattatgcaaactcttctctaatcttatgctaactccctcgcttacrgtaactttttacaagagattccagtccactaactactcttaaatatcaaatatatgggatgtagaaaagagtttacatattcagattatccaaatatttccttacctgaacaggatctgggaggatcaaatcatggcttttaggaaaatgtttgtgaagaaatgttttccccaaggagcagttactgctgttgttcaggctctgggattccaaagcaacagaactgacttgccccacaaaggagcttgcttcccagctaggaggtatgcgagatccttagctgccaaatgctggaggga

SEQ ID NO: 7860 - DNA, 600 bp, Chicken  19866894202080_1
tgaataaaacacagtgttccatctcatactactgtatttcctccagtgaatacagaagttttatattaagctatgaaacatattcaaaacttttataagatacatacatttgaaacaaaacaatgaaaacatatctactattaaatactgtgcgtgttttttaacacagtctgccctctttttaagtcaatgaaaccttaagttcagacaacagcctatgactgagtatcagcagaagatattaaaactcaacccactatgcgtaaaagccttgcaaaaaaatttcatcacagtaaccayctgcttttcacctatgttgctgctgacaggaatatcataacatgctgcataaaacctttttagctgccaagcaaaatgtctgtttcttgacaaatctggcttaatcctcttctatatctcatgtcacaaactcctttacacacagacctttcaaaaatattttttcataaaactacttgggctcagcaagttatccaatatataccactaaggttcttttgatagctgttaccaatgcataataaatgatatatacttttttttttcttttcagcataaaggatatttataaaataaaag

SEQ ID NO: 7861 - DNA, 600 bp, Chicken  19866894202081_1
tccagcagcactagcttctacataccatttacattgcacttttgcatattattctacagatgttatgtcactcatacataaagccaattgaaatatatatatataaaataaagctattgaaatatgtacgagcttttcttgtgcaaagactgatactgttagcaataaaaaaagtaaaagtgattgttatttttcctcatgtgagtatttgccaaatctgtacctgcagctagttgtttcgctcaaagaccacaaggtggtagtcttgccttaaaaataatatgctgacgagggttttckaaataaggggaacggctatctcctttgagacatcaagggtttttgtatcctgtttcttttaaatagcttcacgtgtacaattaaaattagagcacaggagatttaaatctcagctcagttttcatcacaaaaatacgatatattcaaagggagatgaagaaaatgctgttgttaattaatgcaattagtaattttaagaactccaaatagcacttgtgtttcagtggataaagctctttaattaaaggatattcatttttcttatgggcccgagtctgagagtttcttgtgataaaaata

SEQ ID NO: 7862 - DNA, 600 bp, Chicken  19866894202090_1
tggcttctttttggcccacgcctgggtaggccggaggtgcgtccttactgcagctgcagtaagctgaggtgaggcagggccacactggtgcggggcagccagcacgtgccgctgctgagggaagcctggggctcctttaggagtccctcctgtcatttctctgacttctgcagtatttcatgaagtcagacgccacttaagcctttgctgttatgtttcctggtcggtgctgtgcttgtgagagggatagcccacatgcctgggagctgttgttcaaagggctcctctgtccacagcacrgggaggcagtgctccagcctttcatgcccggaacagcttctctgcagtcagaaggtaaaaacattatacgtataatttaaggtttaagctgcaatctgcaggaactggcagcctccagagagggatctgtaatgcatactgcagagcagcatttcggcacagtccctcggtcacaaacaaccatcaataaggggcccatcagaagagtattataagcaaagtcatcccatttgagcatgctgacagacagttttgtttctctgcccccttccttctctcctccttaggctttggcttttc

SEQ ID NO: 7863 - DNA, 600 bp, Chicken  19866894202092_1
ggcatgggccagatcacggctctcgtcatgggatgagctagtgatcagcgtgcctccctcctcccactccatccgtctgcacagagcagcattagctcatcccgagccaatcggcctgcaccgtgtgccggatggctgatctcatcgttggcggcggtggcagtgactgaatctggcatggcgtgtgcctgcggtccctgcagggtggccgtcagtctgccatggccctgcaaggcacagggaaggcacctccaacagatctgccactggaccgaaagggtggtttaatcagaacaaacyggggatgagaaatcctgctgcaggtgtctctgaggaacttcaaggcctggcaggtagtatctctattgattgctgagatggtatcacagaccttatgttcccagagtgcctacacaaccagtgcctccagaatcacacatccctaacctgttgttaaggagctgatgttcttcacagggcttcatttggtcatgctgttgtccacctgaagtctttgtgaagctccctcccaccctggagacccttctccccaccatgccctgcaagtcatagtggtttatagacaagacatggatgccc

SEQ ID NO: 7864 - DNA, 600 bp, Chicken  19866894202092_2
cacacatccctaacctgttgttaaggagctgatgttcttcacagggcttcatttggtcatgctgttgtccacctgaagtctttgtgaagctccctcccaccctggagacccttctccccaccatgccctgcaagtcatagtggtttatagacaagacatggatgcccaagtcttttctcaaagccctgtagggaactttgtcatcctagctgagaaaccaagctgcagtttggggtttgtgcagaaggagcttggtggggatagcagtgaaggagaagggagaggagaacatgggaaacrattgggtctttagggggtagcggggaaagaggacagagaactaaaattatctggagggtaaagaagtgatgagaggttaagctacaagtccatgagtccaggtgtccatcaagggggaatgggctgttcaaggagatgcctctctctcctcactgaccctaaacaagcaacttagactgggtgtttaacttctacagtccggtgcattgggtcgtatgtcagggattgcacaggcactgggagaccaggatgggcagagcgggcactgcccattcacgtttcaccctgaggtctccatta

SEQ ID NO: 7865 - DNA, 600 bp, Chicken  19866894202092_3
ggtagcggggaaagaggacagagaactaaaattatctggagggtaaagaagtgatgagaggttaagctacaagtccatgagtccaggtgtccatcaagggggaatgggctgttcaaggagatgcctctctctcctcactgaccctaaacaagcaacttagactgggtgtttaacttctacagtccggtgcattgggtcgtatgtcagggattgcacaggcactgggagaccaggatgggcagagcgggcactgcccattcacgtttcaccctgaggtctccattactcaaccagaaaacrctttcaaaatagagttcaattttcatgcagtgaaatagcttttgtttgttttggtctggacatcaaaatatgggaccaccgaccctttgattttggaaacaccattcctctcctgctttgtctagcattggaaaaagtctgttctactccagcccgttgcctagaacctcttctcccacggcatatctgtctgtcttcattagaaacgttagaaacatctcagccccagacttccctgctcctgtttcaatccccactgtgtcccgcttctccttcagcctgctgctgagacctgatgcc

SEQ ID NO: 7866 - DNA, 600 bp, Chicken  19866894202092_4
aggagaaagttaaaaaaaaataataataattgaaaagtgagagaaatgcagattgcagaggcgttgccccagacctaagagcgtattgtagtgctgggggacaccatccagcccagtgggacaggccgtgaggtccaccagcccataggggtacagatgaaactttcaagctctaggggacacctctaagcctgcagcttctcccagatgtttggcatctcccagtgcctgcatcctctgaaggatgcggcaggactggttgacctcctttacataggaggggaaactgaggcacgcagrtgytcatctatgcttataaagccaaacagggattatgtggctgaggggaagcagagggttggagaaggagtgtgacactccaaattcacccagaaatggaatttctccattttctgcaatgacagggctctgtactgttgttgctggtttggggcttttgctctgaagcagctttgagcctccacccccaccacctccccctgttttgtgaagttttgcgtagagcaagaagaaggggcgaccttccataggataaatatgagaggcagtctgccagaaagataaatagaaaaagggctg

SEQ ID NO: 7867 - DNA, 600 bp, Chicken  19866894202092_5
agaaagttaaaaaaaaataataataattgaaaagtgagagaaatgcagattgcagaggcgttgccccagacctaagagcgtattgtagtgctgggggacaccatccagcccagtgggacaggccgtgaggtccaccagcccataggggtacagatgaaactttcaagctctaggggacacctctaagcctgcagcttctcccagatgtttggcatctcccagtgcctgcatcctctgaaggatgcggcaggactggttgacctcctttacataggaggggaaactgaggcacgcagrtgytcatctatgcttataaagccaaacagggattatgtggctgaggggaagcagagggttggagaaggagtgtgacactccaaattcacccagaaatggaatttctccattttctgcaatgacagggctctgtactgttgttgctggtttggggcttttgctctgaagcagctttgagcctccacccccaccacctccccctgttttgtgaagttttgcgtagagcaagaagaaggggcgaccttccataggataaatatgagaggcagtctgccagaaagataaatagaaaaagggctgggt

SEQ ID NO: 7868 - DNA, 600 bp, Chicken  19866894202093_1
atgacagttttcctcatgtcacctttttcttaagtagctgtatttggtggctgcttacaattacatgtaacgtactgtacagagcaaaaatagaaacaacagatctttttgagcattctagcttaatataatagtttctgtaaatgaaagcaatatatgcctatccttttaagacattatatcatttatgagatcagtgggttatttttgattctcagctcccaaaaggaacaagttcacaaattcatgaagagaaacttccttgtaattattatttacatgttagtactagtgaagctyatgtagaaacacggtcttgttcttggtttctttcattaccttatgtatcaccacatcaactatttgtatgtagttttttaaaactttgatctccacagagactgagtttaaaatgtgattatgccagtaagattggcagctgagatgcctgtctcttttacatataaattgaaaaaagcagttttaatactcaaggggagggtagtgtgaagcatgtctaaggcatgaagtcttatgacatctttgtcatatgtcctcattttagacagggcaattgtcttacatcagcttacagagttc

SEQ ID NO: 7869 - DNA, 600 bp, Chicken  19866894202096_1
cttccctgcgtacagggagcagaacctgggcaagtggttgattctttcaagatgacacagacctggaatccagcaaagtcatactcctgatttatatttcatttttggtttggattattcaaggatatttatccttcgctcttggaataattctgcttttggaataatttcagacaacaaatgcagcctacagtttgacatactgcgacccactctggctcccagaaccatttctcctaccaatttagttctcagtcgttggttgtgctctacctttttttaacccattttcctcccctyggattatgaattgccacctagttattttttttaagaaccttttacttctgatttactgtgcttccctaagcaaggaaattgctctcccattgccatagatctgtaagaagccactgatgcttttcgagagcacaaccacacacagaaggctcatataatttactttgtaatcgaatggtatattcctcagcatccagacttctagctgttgggatttcttttttaagatgatgtaccctgtagagactgatttattaaatacatgtgtggtgtgtttccccagcttttaataatgaactg

SEQ ID NO: 7870 - DNA, 599 bp, Chicken  19866894202097_1
  misc_feature (1)..(69): n is any nucleotide
nnnnnnnnnnnnnnnnnnnnnnnnnnnnnnnnnnnnnnnnnnnnnnnnnnnnnnnnnnnnnnnnnnnnntgtatcttcacagtgtctgctttctatttagagtagtaaagacagaaagaacacattttaaaatctcaattgtaacttattccagagctgcaacatagatattatatacatctctgcctattgtatatatagacccaagacatagacaatttttcccttacattccttcagcactgtcttgtaaatacatctcattttatgatattctcaagtactatactatgtctgtgytagaatttaagaaaggttactggatatatatgggcaaaagagatgagaaatctgtcttattgctatgactgtcactattaatyttcctgacactgtttgctttctgttaattatgcatgcgctatctaggatgttaggaaagtcagaccaggtttgctgaaatggtaagtaaacttgcaacaaactcaagtgaattttaacactgarttagtaagaggttgtcttgtataacagatgggacatctaaagttgtattgatttaggaaaggctcacttgaaaaaaaaaaaatcactgtgtt

SEQ ID NO: 7871 - DNA, 600 bp, Chicken  19866894202097_2
gtctgctttctatttagagtagtaaagacagaaagaacacattttaaaatctcaattgtaacttattccagagctgcaacatagatattatatacatctctgcctattgtatatatagacccaagacatagacaatttttcccttacattccttcagcactgtcttgtaaatacatctcattttatgatattctcaagtactatactatgtctgtgytagaatttaagaaaggttactggatatatatgggcaaaagagatgagaaatctgtcttattgctatgactgtcactattaatyttcctgacactgtttgctttctgttaattatgcatgcgctatctaggatgttaggaaagtcagaccaggtttgctgaaatggtaagtaaacttgcaacaaactcaagtgaattttaacactgarttagtaagaggttgtcttgtataacagatgggacatctaaagttgtattgatttaggaaaggctcacttgaaaaaaaaaaaatcactgtgttgttaactgatattaatcaccagatggtggtggcgtcttcagaaaatttttcattagatggtattgttaccatattccaaatctg

SEQ ID NO: 7872 - DNA, 600 bp, Chicken  19866894202097_3
gacatagacaatttttcccttacattccttcagcactgtcttgtaaatacatctcattttatgatattctcaagtactatactatgtctgtgytagaatttaagaaaggttactggatatatatgggcaaaagagatgagaaatctgtcttattgctatgactgtcactattaatyttcctgacactgtttgctttctgttaattatgcatgcgctatctaggatgttaggaaagtcagaccaggtttgctgaaatggtaagtaaacttgcaacaaactcaagtgaattttaacactgarttagtaagaggttgtcttgtataacagatgggacatctaaagttgtattgatttaggaaaggctcacttgaaaaaaaaaaaatcactgtgttgttaactgatattaatcaccagatggtggtggcgtcttcagaaaatttttcattagatggtattgttaccatattccaaatctggagagagtgcatcacacccaagagaaatacttgcggaaactttccagaaaactgatggttcctctgtaaggctaatttccatgaaagacaatgggtaaatctcagttttgttacacattttcaa

SEQ ID NO: 7873 - DNA, 600 bp, Chicken  19866894202097_4
aagtactatactatgtctgtgytagaatttaagaaaggttactggatatatatgggcaaaagagatgagaaatctgtcttattgctatgactgtcactattaatyttcctgacactgtttgctttctgttaattatgcatgcgctatctaggatgttaggaaagtcagaccaggtttgctgaaatggtaagtaaacttgcaacaaactcaagtgaattttaacactgarttagtaagaggttgtcttgtataacagatgggacatctaaagttgtattgatttaggaaaggctcacttgraaaaaaaaaaatcactgtgttgttaactgatattaatcaccagatggtggtggcgtcttcagaaaatttttcattagatggtattgttaccatattccaaatctggagagagtgcatcacacccaagagaaatacttgcggaaactttccagaaaactgatggttcctctgtaaggctaatttccatgaaagacaatgggtaaatctcagttttgttacacattttcaatgagtcatttttaatgtccaggacagaatgtcaagtattactaatgggagcagtaatattttcccaagtga

SEQ ID NO: 7874 - DNA, 599 bp, Chicken  19866894202098_1
  misc_feature (1)..(40): n is any nucleotide
nnnnnnnnnnnnnnnnnnnnnnnnnnnnnnnnnnnnnnnngcttcctgtcactgcatgagtttctgaactgtctcttgctgcaaaacgcccagcttttccagaagacaaaaccagacaaagcccacaagctcttggtgcgctgcagcaggactgacagaaattatgggttgtctcagagggaagggagggccacaagcacgagttacaggcaaggatgctgcagctctgcccccagctttgatgcacagcaggctccaggcagcggacacactgaacccagtgcacacctttcacaagcrtgtgtgaagcacagcatcatctgcttcaagcagacaaggaaaagtgacagcgcacaggaaatcacagtgtatttggggtccctttggggtaatctcagtagaagtgatgcagggaaaagctctcaacccaaaatgcacaccagtgctgaagtgcratacactgagcagaaagcagaatgcattgcaaaatgcactactatgtccccgaggaacagtgacacgagtgctgagtgcccactgtgccagcgtggaagacaagccagaggtgtggcacactgctaccttcttgcagcgcagtg

SEQ ID NO: 7875 - DNA, 600 bp, Chicken  19866894202098_2
cagaaattatgggttgtctcagagggaagggagggccacaagcacgagttacaggcaaggatgctgcagctctgcccccagctttgatgcacagcaggctccaggcagcggacacactgaacccagtgcacacctttcacaagcrtgtgtgaagcacagcatcatctgcttcaagcagacaaggaaaagtgacagcgcacaggaaatcacagtgtatttggggtccctttggggtaatctcagtagaagtgatgcagggaaaagctctcaacccaaaatgcacaccagtgctgaagtgcratacactgagcagaaagcagaatgcattgcaaaatgcactactatgtccccgaggaacagtgacacgagtgctgagtgcccactgtgccagcgtggaagacaagccagaggtgtggcacactgctaccttcttgcagcgcagtgctggccttggtcctcagctcagacgcagacgccctctgcacgggctccttctccagacccattttaatgatctcagcagtgagggggttgcaggaaggtggaatttccctcagaggaggcggctccttcgcgatctgtgcagcaaacaggaagtga

SEQ ID NO: 7876 - DNA, 599 bp, Chicken  19866894202100_1
  misc_feature (1)..(14): n is any nucleotide
nnnnnnnnnnnnnntggaaaagctgggcgttttgcagcaagagacagttcagaaactcatgcagtgacaggaagcctttgcctgtatatgacagcatttgtgtgttgttttgcagtgggaggtgtgacaagcccctggagaggcgaatacagagagcccaggcgtttggtgttgcaccaagagaacaacccgcagacatcccttgccccccgcagtgagcccagcttcggccactcctgacccagaaccggcagcgggaggctgctgtgccggccctgcgccaccgcctggccctggagmgagcgcagcagcgcgagggaacccgctggaatgcgagcagggagctgtccaggatctgggatcctcctcctctctcctccactcccctccccttaaagagctgcagccatacggagagagcaaccaccatttckgaacaagagctccagcagctggaaataggtatggagcacgccgtggcactcagctcggcctgtccgtcctggctcagttctcatcgcagcagcaatagctgctacatcccagaggagctgtgtcaggtgttctacatacactggtgtcagtgttagctctgtagt

SEQ ID NO: 7877 - DNA, 600 bp, Chicken  19866894202100_2
ctggagaggcgaatacagagagcccaggcgtttggtgttgcaccaagagaacaacccgcagacatcccttgccccccgcagtgagcccagcttcggccactcctgacccagaaccggcagcgggaggctgctgtgccggccctgcgccaccgcctggccctggagmgagcgcagcagcgcgagggaacccgctggaatgcgagcagggagctgtccaggatctgggatcctcctcctctctcctccactcccctccccttaaagagctgcagccatacggagagagcaaccaccatttckgaacaagagctccagcagctggaaataggtatggagcacgccgtggcactcagctcggcctgtccgtcctggctcagttctcatcgcagcagcaatagctgctacatcccagaggagctgtgtcaggtgttctacatacactggtgtcagtgttagctctgtagtgctgaagatactttgggtgttaattgtagtgtttgggattggagccggaaggaatgaaaggaatcactggaaatgttttctcttcctgtctgcttgcagagctgtttctgaacagcctttctcagccatactcac

SEQ ID NO: 7878 - DNA, 599 bp, Chicken  19866894202101_1
  misc_feature (1)..(10): n is any nucleotide
nnnnnnnnnnaaattattagtgagaaagatgaaaccaagtcttcaggtttaccagttgtaaaaccccaactcttatacacactataatttgccatgtgttctgtttggggtgtcagttctgtgttctgccatgtgtgaaaatattctgcttaatttcattccttcagcctaggttcacagcagttgaactggtcatcctggaattacagatagtgtagttcatatgcataagaagctttctacttaaatttcatttgcctcagtctattggaactatttcaatttgaaggacaaatgatytgaaatgctacttgtgctttcaaaatgcttggtcacaggaggcagcactgtcatgttggggattggggagagatgtgcctcayattgcagacttgattcatgcttctgtttgcmatcatgatgcaagtaattggaaagagaagggtgtttgtggtgcatgcagtaggctcttgcagtccrgaggcctgacttctttcagctttggctccagtagcatatctgggaattcgcttgagcttgggaaccttggctaatgagctcaggagccaaactggaacattatgtatttgaacttgcag

SEQ ID NO: 7879 - DNA, 600 bp, Chicken  19866894202101_2
ataatttgccatgtgttctgtttggggtgtcagttctgtgttctgccatgtgtgaaaatattctgcttaatttcattccttcagcctaggttcacagcagttgaactggtcatcctggaattacagatagtgtagttcatatgcataagaagctttctacttaaatttcatttgcctcagtctattggaactatttcaatttgaaggacaaatgatytgaaatgctacttgtgctttcaaaatgcttggtcacaggaggcagcactgtcatgttggggattggggagagatgtgcctcayattgcagacttgattcatgcttctgtttgcmatcatgatgcaagtaattggaaagagaagggtgtttgtggtgcatgcagtaggctcttgcagtccrgaggcctgacttctttcagctttggctccagtagcatatctgggaattcgcttgagcttgggaaccttggctaatgagctcaggagccaaactggaacattatgtatttgaacttgcaggcagtgaatgactggcactgagcagaagygatccatgttgtgaagctttagggtgccattagctttgaaaaaatacttatgtct

SEQ ID NO: 7880 - DNA, 600 bp, Chicken  19866894202101_3
agttctgtgttctgccatgtgtgaaaatattctgcttaatttcattccttcagcctaggttcacagcagttgaactggtcatcctggaattacagatagtgtagttcatatgcataagaagctttctacttaaatttcatttgcctcagtctattggaactatttcaatttgaaggacaaatgatytgaaatgctacttgtgctttcaaaatgcttggtcacaggaggcagcactgtcatgttggggattggggagagatgtgcctcayattgcagacttgattcatgcttctgtttgcmatcatgatgcaagtaattggaaagagaagggtgtttgtggtgcatgcagtaggctcttgcagtccrgaggcctgacttctttcagctttggctccagtagcatatctgggaattcgcttgagcttgggaaccttggctaatgagctcaggagccaaactggaacattatgtatttgaacttgcaggcagtgaatgactggcactgagcagaagygatccatgttgtgaagctttagggtgccattagctttgaaaaaatacttatgtctgttcctgaaatgctaactttttgaggcatag

SEQ ID NO: 7881 - DNA, 600 bp, Chicken  19866894202101_4
cagttgaactggtcatcctggaattacagatagtgtagttcatatgcataagaagctttctacttaaatttcatttgcctcagtctattggaactatttcaatttgaaggacaaatgatytgaaatgctacttgtgctttcaaaatgcttggtcacaggaggcagcactgtcatgttggggattggggagagatgtgcctcayattgcagacttgattcatgcttctgtttgcmatcatgatgcaagtaattggaaagagaagggtgtttgtggtgcatgcagtaggctcttgcagtccrgaggcctgacttctttcagctttggctccagtagcatatctgggaattcgcttgagcttgggaaccttggctaatgagctcaggagccaaactggaacattatgtatttgaacttgcaggcagtgaatgactggcactgagcagaagygatccatgttgtgaagctttagggtgccattagctttgaaaaaatacttatgtctgttcctgaaatgctaactttttgaggcataggggtctttttgaatattcttgaataaggcataaggtaatccctcttctaggcattatgcatgtgca

SEQ ID NO: 7882 - DNA, 600 bp, Chicken  19866894202101_5
ttggtcacaggaggcagcactgtcatgttggggattggggagagatgtgcctcayattgcagacttgattcatgcttctgtttgcmatcatgatgcaagtaattggaaagagaagggtgtttgtggtgcatgcagtaggctcttgcagtccrgaggcctgacttctttcagctttggctccagtagcatatctgggaattcgcttgagcttgggaaccttggctaatgagctcaggagccaaactggaacattatgtatttgaacttgcaggcagtgaatgactggcactgagcagaagygatccatgttgtgaagctttagggtgccattagctttgaaaaaatacttatgtctgttcctgaaatgctaactttttgaggcataggggtctttttgaatattcttgaataaggcataaggtaatccctcttctaggcattatgcatgtgcatcctgcagtgaaaaaatgtgtatccttgggcctggtgggacaaattcttcccttggttatgtgagagaaaatgcagaattaagtcatagctgctactgagtttctttggtgctcagtgatgcaaatgaggggtgaattcatcccgctg

SEQ ID NO: 7883 - DNA, 600 bp, Chicken  19866894202101_6
gccattagctttgaaaaaatacttatgtctgttcctgaaatgctaactttttgaggcataggggtctttttgaatattcttgaataaggcataaggtaatccctcttctaggcattatgcatgtgcatcctgcagtgaaaaaatgtgtatccttgggcctggtgggacaaattcttcccttggttatgtgagagaaaatgcagaattaagtcatagctgctactgagtttctttggtgctcagtgatgcaaatgaggggtgaattcatcccgctgcctgtatctgctgttttgcatagawcygctccctgtgctgraatgtattcgtatttgtaagaatgtgtctgtagtttacatttccrattttaatttttgagccatgtgcaagaggctccagggaacactgtgtactgtcagcagaagttatctttctgatgaatcaggcacattgtttgtactcctgcgtttgatagacgtgttgtaataaggtcctgaactgcttactgtgtctttatgtaccttccctctcagcagttgtaactattgtgctgcttgacctatattaatggtactacaaacaacaagtttaaccattaacttg

SEQ ID NO: 7884 - DNA, 600 bp, Chicken  19866894202101_7
cattagctttgaaaaaatacttatgtctgttcctgaaatgctaactttttgaggcataggggtctttttgaatattcttgaataaggcataaggtaatccctcttctaggcattatgcatgtgcatcctgcagtgaaaaaatgtgtatccttgggcctggtgggacaaattcttcccttggttatgtgagagaaaatgcagaattaagtcatagctgctactgagtttctttggtgctcagtgatgcaaatgaggggtgaattcatcccgctgcctgtatctgctgttttgcatagawcygctccctgtgctgraatgtattcgtatttgtaagaatgtgtctgtagtttacatttccrattttaatttttgagccatgtgcaagaggctccagggaacactgtgtactgtcagcagaagttatctttctgatgaatcaggcacattgtttgtactcctgcgtttgatagacgtgttgtaataaggtcctgaactgcttactgtgtctttatgtaccttccctctcagcagttgtaactattgtgctgcttgacctatattaatggtactacaaacaacaagtttaaccattaacttgag

SEQ ID NO: 7885 - DNA, 600 bp, Chicken  19866894202101_8
aaatacttatgtctgttcctgaaatgctaactttttgaggcataggggtctttttgaatattcttgaataaggcataaggtaatccctcttctaggcattatgcatgtgcatcctgcagtgaaaaaatgtgtatccttgggcctggtgggacaaattcttcccttggttatgtgagagaaaatgcagaattaagtcatagctgctactgagtttctttggtgctcagtgatgcaaatgaggggtgaattcatcccgctgcctgtatctgctgttttgcatagawcygctccctgtgctgraatgtattcgtatttgtaagaatgtgtctgtagtttacatttccrattttaatttttgagccatgtgcaagaggctccagggaacactgtgtactgtcagcagaagttatctttctgatgaatcaggcacattgtttgtactcctgcgtttgatagacgtgttgtaataaggtcctgaactgcttactgtgtctttatgtaccttccctctcagcagttgtaactattgtgctgcttgacctatattaatggtactacaaacaacaagtttaaccattaacttgagaaccctgtttgaat

SEQ ID NO: 7886 - DNA, 600 bp, Chicken  19866894202101_9
gggtctttttgaatattcttgaataaggcataaggtaatccctcttctaggcattatgcatgtgcatcctgcagtgaaaaaatgtgtatccttgggcctggtgggacaaattcttcccttggttatgtgagagaaaatgcagaattaagtcatagctgctactgagtttctttggtgctcagtgatgcaaatgaggggtgaattcatcccgctgcctgtatctgctgttttgcatagawcygctccctgtgctgraatgtattcgtatttgtaagaatgtgtctgtagtttacatttccrattttaatttttgagccatgtgcaagaggctccagggaacactgtgtactgtcagcagaagttatctttctgatgaatcaggcacattgtttgtactcctgcgtttgatagacgtgttgtaataaggtcctgaactgcttactgtgtctttatgtaccttccctctcagcagttgtaactattgtgctgcttgacctatattaatggtactacaaacaacaagtttaaccattaacttgagaaccctgtttgaatggattttgtcaagagatgagaactgaagatttaaggaagtaaaaa

SEQ ID NO: 7887 - DNA, 600 bp, Chicken  19866894202104_1
cttacaaaaccacccccaagtgttttaatgattcccttcagatgttagttgttagcatgtgagatcattgttttccagctgcccatagtaaacatgacctgaattttcacagtgatgcaagcacaaaaagcaatctttctccctccttagagctcaccctgaagatgtctcagggttcagttttagaaaggctcatgtaactgctggctttgtttaaagagcaacaaagagaaagcgctgttttcagaggaattactttctacttggtgaccactgggtaacaccgaaaggcagagcccytyctttgcrctggaacaccgcactgagagcacgtgtttccctttggccagagatgctctgcacagaaatctgcccactgcccatcagcacwgtgagcacagaccctgtgagaggggcctggggacagctgggctgggctggagagggaacggttccctctagtgcagtgctgctgcaggaggcatccaaagatgctctcaattaaagagccctgttttcagctgaagtttatgtacctcctatgggtccaagcaaactgtggggttcctggcagagatatacagagtttttccctcccca

SEQ ID NO: 7888 - DNA, 600 bp, Chicken  19866894202104_2
tacaaaaccacccccaagtgttttaatgattcccttcagatgttagttgttagcatgtgagatcattgttttccagctgcccatagtaaacatgacctgaattttcacagtgatgcaagcacaaaaagcaatctttctccctccttagagctcaccctgaagatgtctcagggttcagttttagaaaggctcatgtaactgctggctttgtttaaagagcaacaaagagaaagcgctgttttcagaggaattactttctacttggtgaccactgggtaacaccgaaaggcagagcccytyctttgcrctggaacaccgcactgagagcacgtgtttccctttggccagagatgctctgcacagaaatctgcccactgcccatcagcacwgtgagcacagaccctgtgagaggggcctggggacagctgggctgggctggagagggaacggttccctctagtgcagtgctgctgcaggaggcatccaaagatgctctcaattaaagagccctgttttcagctgaagtttatgtacctcctatgggtccaagcaaactgtggggttcctggcagagatatacagagtttttccctccccact

SEQ ID NO: 7889 - DNA, 600 bp, Chicken  19866894202104_3
ccacccccaagtgttttaatgattcccttcagatgttagttgttagcatgtgagatcattgttttccagctgcccatagtaaacatgacctgaattttcacagtgatgcaagcacaaaaagcaatctttctccctccttagagctcaccctgaagatgtctcagggttcagttttagaaaggctcatgtaactgctggctttgtttaaagagcaacaaagagaaagcgctgttttcagaggaattactttctacttggtgaccactgggtaacaccgaaaggcagagcccytyctttgcrctggaacaccgcactgagagcacgtgtttccctttggccagagatgctctgcacagaaatctgcccactgcccatcagcacwgtgagcacagaccctgtgagaggggcctggggacagctgggctgggctggagagggaacggttccctctagtgcagtgctgctgcaggaggcatccaaagatgctctcaattaaagagccctgttttcagctgaagtttatgtacctcctatgggtccaagcaaactgtggggttcctggcagagatatacagagtttttccctccccactgcactcg

SEQ ID NO: 7890 - DNA, 600 bp, Chicken  19866894202104_4
acatgacctgaattttcacagtgatgcaagcacaaaaagcaatctttctccctccttagagctcaccctgaagatgtctcagggttcagttttagaaaggctcatgtaactgctggctttgtttaaagagcaacaaagagaaagcgctgttttcagaggaattactttctacttggtgaccactgggtaacaccgaaaggcagagcccytyctttgcrctggaacaccgcactgagagcacgtgtttccctttggccagagatgctctgcacagaaatctgcccactgcccatcagcacwgtgagcacagaccctgtgagaggggcctggggacagctgggctgggctggagagggaacggttccctctagtgcagtgctgctgcaggaggcatccaaagatgctctcaattaaagagccctgttttcagctgaagtttatgtacctcctatgggtccaagcaaactgtggggttcctggcagagatatacagagtttttccctccccactgcactcgcacaggcttttatttgcaagatgtgcaagcccacggcctgagctagcataaagctcttttttttttttcctgcaaattgcag

SEQ ID NO: 7891 - DNA, 600 bp, Chicken  19866894202105_1
ccctatggctacacgctgcagttctggcatgtcctagcagcacggctggctttcattattgtatttgaggtcagtgaccattccagtggaaaagtctatatatcagaaacaccaaaacaaaaccaattttctcttgaagcttattcattgagctgttccatggtaccaaatgtcaagttcctcgtgttcgtttctgctatttgtattgtgctttatattctcctgtttcctaaacggtcacaggtatttagattttaacaaacaggggaatactgcaatttaaaagctataacagtggcrggaaaagaggggaaagaaaygctgtttttacttactttctgagttttggtattagcactctgtttaggctgaaagctgtatgcaaactagttagtgagtaagaggggaagggacatgataagaaaggatgacatctgaacaactgaaaaatgaagatagctcaagttgcagtatttacacatttagctttttttctgtattttaaataccattcatttccattagcatcacaaagctggtgatgctaagagacccaatatctttggcaaagttcataatattagtacatactgtcaatat

SEQ ID NO: 7892 - DNA, 600 bp, Chicken  19866894202105_2
gttctggcatgtcctagcagcacggctggctttcattattgtatttgaggtcagtgaccattccagtggaaaagtctatatatcagaaacaccaaaacaaaaccaattttctcttgaagcttattcattgagctgttccatggtaccaaatgtcaagttcctcgtgttcgtttctgctatttgtattgtgctttatattctcctgtttcctaaacggtcacaggtatttagattttaacaaacaggggaatactgcaatttaaaagctataacagtggcrggaaaagaggggaaagaaaygctgtttttacttactttctgagttttggtattagcactctgtttaggctgaaagctgtatgcaaactagttagtgagtaagaggggaagggacatgataagaaaggatgacatctgaacaactgaaaaatgaagatagctcaagttgcagtatttacacatttagctttttttctgtattttaaataccattcatttccattagcatcacaaagctggtgatgctaagagacccaatatctttggcaaagttcataatattagtacatactgtcaatatctcagaaatctttaaaacaa

SEQ ID NO: 7893 - DNA, 599 bp, Chicken  19866894202116_1
  misc_feature (1)..(13): n is any nucleotide
nnnnnnnnnnnnngaaaaagattattcttcaaaaatggtatcagtttcttgccctctacaggtaatctaattactacgttgtacagaggagaagattggcatactctaccaatgtcatcctgggtctggattagatgtaggtggtggttcttgtactggaccaagaccaaagcaggaccaggggtcatgttcacagccatcaccactgagctatataagctgctcccagaagcagttgtcagcaggaagctccaaggacagtttgatggcccaagatttcctctacctggtgtgctggcrtttctgcagtacagcactttgctcaactattggaaggctttcaggaactttcacaggaaaaaaaagaaaagaaaagaaaaacaaacaggaggccaatacgtgtagctgaactacagcaaaaattacagagaacagtgcagaggattcacatctggcatccaccaagctgtctttgcaaaggcctgcagaggtgatgtggctgcatctgcatggttgaaggcaagccatgtgctggaggccttaccaggtgctcacgtggcacttggatgcatgcggtggccaacacgtaacagagccct

SEQ ID NO: 7894 - DNA, 600 bp, Chicken  19866894202120_1
aggatccaacctgctgcagggctgtggctctccttgagctggccttgagctgcccaggagctgccattggcaccattttgaggatttctcataaaagacacagagcagggctcaccgaaggccacgttgacgtagtcatcatccgagagcgtgtccagcatctcacagaccgaggtcttcatcagcttgagggtgaggccgctcacactgccgctcctgccacagagaggggagtgggtgctcggcacggggcaggggggagtgggctgcccactgcccgcccgctctactcacacatcmacratgatgaccatgtcctttggggacgaagcaccctggatgtacctgcggggcacagagcggggtcagtgtgtggcaggwgccgtgctgggggtccttatccctgctgatgctgtggccccacgaggtgggcgtgcggagaggcacagccaactcgctgccacgtcagcctaacgagctctaaatgctaaactcctccatcatcgcggcccttttccgcgcgctgattgtgctgacacatgcatccatattaaaatgctatttacccccctggaagcttcaaaggccaggctgatgagg

SEQ ID NO: 7895 - DNA, 600 bp, Chicken  19866894202120_2
atccaacctgctgcagggctgtggctctccttgagctggccttgagctgcccaggagctgccattggcaccattttgaggatttctcataaaagacacagagcagggctcaccgaaggccacgttgacgtagtcatcatccgagagcgtgtccagcatctcacagaccgaggtcttcatcagcttgagggtgaggccgctcacactgccgctcctgccacagagaggggagtgggtgctcggcacggggcaggggggagtgggctgcccactgcccgcccgctctactcacacatcmacratgatgaccatgtcctttggggacgaagcaccctggatgtacctgcggggcacagagcggggtcagtgtgtggcaggwgccgtgctgggggtccttatccctgctgatgctgtggccccacgaggtgggcgtgcggagaggcacagccaactcgctgccacgtcagcctaacgagctctaaatgctaaactcctccatcatcgcggcccttttccgcgcgctgattgtgctgacacatgcatccatattaaaatgctatttacccccctggaagcttcaaaggccaggctgatgaggtta

SEQ ID NO: 7896 - DNA, 600 bp, Chicken  19866894202120_3
ggatttctcataaaagacacagagcagggctcaccgaaggccacgttgacgtagtcatcatccgagagcgtgtccagcatctcacagaccgaggtcttcatcagcttgagggtgaggccgctcacactgccgctcctgccacagagaggggagtgggtgctcggcacggggcaggggggagtgggctgcccactgcccgcccgctctactcacacatcmacratgatgaccatgtcctttggggacgaagcaccctggatgtacctgcggggcacagagcggggtcagtgtgtggcaggwgccgtgctgggggtccttatccctgctgatgctgtggccccacgaggtgggcgtgcggagaggcacagccaactcgctgccacgtcagcctaacgagctctaaatgctaaactcctccatcatcgcggcccttttccgcgcgctgattgtgctgacacatgcatccatattaaaatgctatttacccccctggaagcttcaaaggccaggctgatgaggttatttttagctccgaaataataacggcgtgtaaatcatcctcccacccccccaaaacaatcaggagcgctttctcgcccc

SEQ ID NO: 7897 - DNA, 600 bp, Chicken  19866894202123_1
taagaaggacaagcagtctttttggggggtgctgcttgaaggagctgaccactgcaaaaagtgataatgcttgtgcatggcaaggaaggcaccaatccctgctggcttatctgttggtccaggtgtgtcacactaatagagagaaaagaagaaaaagaagagaaaactgagaagctggttgtaaaaggtccccactaaactaaggactttggaagagaagaacactcaaagaaaagaaactttggagagaaactcccaatgaaaagaaacttttggcagaggaattccctaagaggccawaaacaaaacaaaacaaaacaaaacaaaacaaaacaaaaacctcttagggaaaacaaaaaacaaacaaacaaacaaaaaaaaacactggggcctgcttgctgccattgtgcaaagcttcctgtctttcccctgtagtgacgagacgagatgagtttttgggatcaacagatgtactatgaaccacactagacccacagtggtgaccatctctcttgctttccacagagacttcttgcttttatttcctatctcttttatatcacctatcttcccttctccatctccctaagcaaacagaat

SEQ ID NO: 7898 - DNA, 600 bp, Chicken  19866894202123_2; identical to SEQ ID NO: 7897

SEQ ID NO: 7899 - DNA, 600 bp, Chicken  19866894202123_3; identical to SEQ ID NO: 7897

SEQ ID NO: 7900 - DNA, 600 bp, Chicken  19866894202123_4; identical to SEQ ID NO: 7897

SEQ ID NO: 7901 - DNA, 600 bp, Chicken  19866894202123_5; identical to SEQ ID NO: 7897

SEQ ID NO: 7902 - DNA, 600 bp, Chicken  19866894202124_1
cccaaaagaatggcatggagctgtgtcaggggaaggtcaggtgagggtatggaaaggctcttcactagagggtgctgggcatggaacagactccccagggcggtggtcatggccccgagctgccagagtttaaagagcatctggatagcattccattttctgtgttcctctgtggagtcaggagttggactcagagatccttgtgattccctttcagtacattctatgagtctgaattaccttttgatacagaagtatctatcttacctgcaagaggaaaactataaggtaatgaaaatytttgaatgtggtttcactgtctactataatgtagttcattgatggtgcaggggttacttcgagttaatagaaactgcctcattgactataattgttttgctatcagtatattttgtgtataccttagtgcacagacacctatgctgggtttataattctgtaatgtgcataaccactcaagaccttatctaaaaatcctttgaaacrtcgttgttttcccacattcaagctgaactagttaatcatgattaaaatccagaagcattagtacgttggagtaaaggaagatggtgactggtg

SEQ ID NO: 7903 - DNA, 600 bp, Chicken  19866894202124_2
tccctttcagtacattctatgagtctgaattaccttttgatacagaagtatctatcttacctgcaagaggaaaactataaggtaatgaaaatytttgaatgtggtttcactgtctactataatgtagttcattgatggtgcaggggttacttcgagttaatagaaactgcctcattgactataattgttttgctatcagtatattttgtgtataccttagtgcacagacacctatgctgggtttataattctgtaatgtgcataaccactcaagaccttatctaaaaatcctttgaaacrtcgttgttttcccacattcaagctgaactagttaatcatgattaaaatccagaagcattagtacgttggagtaaaggaagatggtgactggtgtaaaccacaaggcaagtgaagactgcagtctatctcatgtggcagttactgttgatttttgcatttttctcttctgatgaatcacacatgcataacttgctgtcagtttcctttaattatcgtagatcatcctcatgatttgccacttgtaacctaatatattatgatagctgaagtaatacgttctggttataattggttgcccac

SEQ ID NO: 7904 - DNA, 599 bp, Chicken  19866894202128_1
  misc_feature (1)..(113): n is any nucleotide
nnnnnnnnnnnnnnnnnnnnnnnnnnnnnnnnnnnnnnnnnnnnnnnnnnnnnnnnnnnnnnnnnnnnnnnnnnnnnnnnnnnnnnnnnnnnnnnnnnnnnnnnnnnnnnnnnacgctcttctattggaaaggagagaggtcagtttcgcctcacacagcacagcccgtttactgtaaacatatccagcaaggtcctgaatctcctccagtacagaagcaagcgagaaacacgagtgtcgttcctgagacacgggaatatagtttcagtggggaagtaggacctctataccacgataccrtttcagaatggagtggtcgaggagtctcctctgacagtgagtggtcgccagactggagcagcagcagtgaaaccattaaaaactctttctttgagagtagcttgaatgtggacacccrggaaccagagaaggggtctgtcacagatataaataattccacaactccagattttataaaaagcttgaggaatttgtctagcgaagacttagaaaagagtatcttaagccacaagcatctggtgaacacgtgggtgtctgaagagcctgggcatgcaaagccaaaggatttgccatacaag

SEQ ID NO: 7905 - DNA, 600 bp, Chicken  19866894202128_2
cttctattggaaaggagagaggtcagtttcgcctcacacagcacagcccgtttactgtaaacatatccagcaaggtcctgaatctcctccagtacagaagcaagcgagaaacacgagtgtcgttcctgagacacgggaatatagtttcagtggggaagtaggacctctataccacgataccrtttcagaatggagtggtcgaggagtctcctctgacagtgagtggtcgccagactggagcagcagcagtgaaaccattaaaaactctttctttgagagtagcttgaatgtggacacccrggaaccagagaaggggtctgtcacagatataaataattccacaactccagattttataaaaagcttgaggaatttgtctagcgaagacttagaaaagagtatcttaagccacaagcatctggtgaacacgtgggtgtctgaagagcctgggcatgcaaagccaaaggatttgccatacaagctggaaactctagcaagtgaacacccacagcctgctagagtgttaacagttgatatttatcttagaaaaacagaggaactccttaatgaaccygtgactgttatatcggaagaaaattg

SEQ ID NO: 7906 - DNA, 600 bp, Chicken  19866894202128_3
gagagtagcttgaatgtggacacccrggaaccagagaaggggtctgtcacagatataaataattccacaactccagattttataaaaagcttgaggaatttgtctagcgaagacttagaaaagagtatcttaagccacaagcatctggtgaacacgtgggtgtctgaagagcctgggcatgcaaagccaaaggatttgccatacaagctggaaactctagcaagtgaacacccacagcctgctagagtgttaacagttgatatttatcttagaaaaacagaggaactccttaatgaaccygtgactgttatatcggaagaaaattgtggtgactcagacacgatggataagaaatcttctagtaaaagatctgggaaaaggagaaaatctcagtcatctagtgacattccaaatggagagagaaaccagactgaaaataccgcaagagaagattctgtttttgaggacgatgcatcttctgaggggtttccagagaaggtaataacctcagaaagaaaacttaagtctcctcaacagactcctgaacggaattccttttcttcaagtaataatccagacctaaaagctggatctgctcac

SEQ ID NO: 7907 - DNA, 600 bp, Chicken  19866894202130_1
gtggaatggactgacaatgggtttgaaacaaaagaaaaaataattacatattaaaaaatatatatatttgcaagtttatagtaccactgtagatcatatttagactggataatgagaaatctacagtttaaggtgtatcctgtagggggcctgcaggaaagccagggagggacttcttatgagggcaggtagcagcaggatgaggggaaatggttttaaactggaagagtttaagatttagactagatactaagaagaaattatttactgtgatggtggtgagacactggagcaggttgyccagagaggttgtgaatgccctctccctggaagcattcaaggccaggctggatggggctgtgagcaacctggwctagagggaggtgtcctrcctatagaaggggggttggaactagatgatcttaaatgccccttccaacccagaccattctgattctgtttaagagttcaataaatgagtgtaaggaggtatcagtgcttcgtagctgcccaaatgctccttctgtttcgcttaaccagcacccacaaggctctgaaactggaaaggcataatggggaggatttgtacgaatgtcccta

SEQ ID NO: 7908 - DNA, 600 bp, Chicken  19866894202130_2
gtttatagtaccactgtagatcatatttagactggataatgagaaatctacagtttaaggtgtatcctgtagggggcctgcaggaaagccagggagggacttcttatgagggcaggtagcagcaggatgaggggaaatggttttaaactggaagagtttaagatttagactagatactaagaagaaattatttactgtgatggtggtgagacactggagcaggttgyccagagaggttgtgaatgccctctccctggaagcattcaaggccaggctggatggggctgtgagcaacctggwctagagggaggtgtcctrcctatagaaggggggttggaactagatgatcttaaatgccccttccaacccagaccattctgattctgtttaagagttcaataaatgagtgtaaggaggtatcagtgcttcgtagctgcccaaatgctccttctgtttcgcttaaccagcacccacaaggctctgaaactggaaaggcataatggggaggatttgtacgaatgtccctatttcataccttttctgtaaatacacagtgtggttgccatcatagacaaggcctgaagggccattgtcttgtct

SEQ ID NO: 7909 - DNA, 595 bp, Chicken  19866894202130_3
gatcatatttagactggataatgagaaatctacagtttaaggtgtatcctgtagggggcctgcaggaaagccagggagggacttcttatgagggcaggtagcagcaggatgaggggaaatggttttaaactggaagagtttaagatttagactagatactaagaagaaattatttactgtgatggtggtgagacactggagcaggttgyccagagaggttgtgaatgccctctccctggaagcattcaaggccaggctggatggggctgtgagcaacctggwctagagggaggtgtcctrcctatagaaggggggttggaactagatgatcttaaatgccccttccaacccagaccattctgattctgtttaagagttcaataaatgagtgtaaggaggtatcagtgcttcgtagctgcccaaatgctccttctgtttcgcttaaccagcacccacaaggctctgaaactggaaaggcataatggggaggatttgtacgaatgtccctatttcataccttttctgtaaatacacagtgtggttgccatcatagacaaggcctgaagggccattgtcttgtcttaggtgaactgtt

SEQ ID NO: 7910 - DNA, 600 bp, Chicken  19866894202136_1
gtgtcatcaacaaacttgccaagggtacactcaaccccactgtcagtgtcactcatgaagatattaaagagtatgggccccagcaccaacccctgtgggacaccactcatcactgatctctgtccagacgttgaaccattgaccaccaccctctggactccatcctgcagccagaaattcatccattgaacagtccacccatcaaatccatatctttccaatttggagagcagaatattgtgagaaaccatgtcaaatgccttactgaagtccagatttcacagccaaattaactctgtrtactattttggacattgctttaaagatgaagagctttcatcaaactattccaagcttgtgcaccaatcagtagagtaaccatgatggcctggagcccatgacaagcctttgcttgcacctaatgctcactaaaagaaagggtgctgccagataaggtgaccagagccgatttcctccattcttgttttatgtaatacagccaagtttggcagaggttgataactgtttgtttcctggaaaaacattggtgtggattggtgtgagaagtaagagatgagcgctcacctggagcaaggtaga

SEQ ID NO: 7911 - DNA, 438 bp, Chicken  19866894202136_2
tgatggcctggagcccatgacaagcctttgcttgcacctaatgctcactaaaagaaagggtgctgccagataaggtgaccagagccgatttcctccattcttgttttatgtaatacagccaagtttggcagaggttgataactgtttgtttcctggaaaaacattggtgtggattggtgtgagaagtaagagatgagcgctcacctggagcaaggtagaaaggaagaccacatccaacatctttccactcaattttgtggaagctctcaggccacagccctacagacagacccaggatgkgaagagtctcggcttccaacatgcaccagtgcctaatagaccagaaaggaacaggagctggtggatcttctgtgaaagaggaatgtggtgaaaacagttcagggttggaccaagggaaaaaaaaaaaagtgtctccat

SEQ ID NO: 7912 - DNA, 599 bp, Chicken  19866894202141_1
  misc_feature (1)..(100): n is any nucleotide
nnnnnnnnnnnnnnnnnnnnnnnnnnnnnnnnnnnnnnnnnnnnnnnnnnnnnnnnnnnnnnnnnnnnnnnnnnnnnnnnnnnnnnnnnnnnnnnnnnnnttgaatgatttatattggtgcacttcactaaagtttggattttcgtctgtttgtattatgtattatatgtactcttatggaaactaatatttcatatttgcatgatccagaacttgaaaaggattctgctttggtacagaggactgcgtgggataactgtcattcactgttcacttgtgctcctgcttaacatacactgraaygagttgctgggagtagtgggtacttttctgagaagccttttggcaacttttcgtgcttttcacagyacaatcaccatgtgagatgtgcatggcagaaacttgcatgcctgcttacagcatataactctgttcaggaggtttttctctttcacctctcccacctcttccactcttccactcttttttttctttcrtctttgtttctttttttttcttccatactaagatgataaccaaaatgtctggaaaatggcacttcccacagtattattattatatgataagaataattactg

SEQ ID NO: 7913 - DNA, 599 bp, Chicken  19866894202141_2
  misc_feature (1)..(97): n is any nucleotide
nnnnnnnnnnnnnnnnnnnnnnnnnnnnnnnnnnnnnnnnnnnnnnnnnnnnnnnnnnnnnnnnnnnnnnnnnnnnnnnnnnnnnnnnnnnnnnnnnttgaatgatttatattggtgcacttcactaaagtttggattttcgtctgtttgtattatgtattatatgtactcttatggaaactaatatttcatatttgcatgatccagaacttgaaaaggattctgctttggtacagaggactgcgtgggataactgtcattcactgttcacttgtgctcctgcttaacatacactgraaygagttgctgggagtagtgggtacttttctgagaagccttttggcaacttttcgtgcttttcacagyacaatcaccatgtgagatgtgcatggcagaaacttgcatgcctgcttacagcatataactctgttcaggaggtttttctctttcacctctcccacctcttccactcttccactcttttttttctttcrtctttgtttctttttttttcttccatactaagatgataaccaaaatgtctggaaaatggcacttcccacagtattattattatatgataagaataattactgctt

SEQ ID NO: 7914 - DNA, 599 bp, Chicken  19866894202141_3
  misc_feature (1)..(31): n is any nucleotide
nnnnnnnnnnnnnnnnnnnnnnnnnnnnnnnttgaatgatttatattggtgcacttcactaaagtttggattttcgtctgtttgtattatgtattatatgtactcttatggaaactaatatttcatatttgcatgatccagaacttgaaaaggattctgctttggtacagaggactgcgtgggataactgtcattcactgttcacttgtgctcctgcttaacatacactgraaygagttgctgggagtagtgggtacttttctgagaagccttttggcaacttttcgtgcttttcacagyacaatcaccatgtgagatgtgcatggcagaaacttgcatgcctgcttacagcatataactctgttcaggaggtttttctctttcacctctcccacctcttccactcttccactcttttttttctttcrtctttgtttctttttttttcttccatactaagatgataaccaaaatgtctggaaaatggcacttcccacagtattattattatatgataagaataattactgctttaayggaagtaattctccagtagtctgaattttgygttgatccctgtaggtactgagtcatctctc

SEQ ID NO: 7915 - DNA, 600 bp, Chicken  19866894202141_4
ttgcatgatccagaacttgaaaaggattctgctttggtacagaggactgcgtgggataactgtcattcactgttcacttgtgctcctgcttaacatacactgraaygagttgctgggagtagtgggtacttttctgagaagccttttggcaacttttcgtgcttttcacagyacaatcaccatgtgagatgtgcatggcagaaacttgcatgcctgcttacagcatataactctgttcaggaggtttttctctttcacctctcccacctcttccactcttccactcttttttttctttcrtctttgtttctttttttttcttccatactaagatgataaccaaaatgtctggaaaatggcacttcccacagtattattattatatgataagaataattactgctttaayggaagtaattctccagtagtctgaattttgygttgatccctgtaggtactgagtcatctctcacccactggcaaggtcacagatgatcatatccgcagccttttctttggagactatctgaagccagacagtaatgcaaaagtgtacgatgaaatcacagacttgaaggaactgacagctgtgatggaatc

SEQ ID NO: 7916 - DNA, 600 bp, Chicken  19866894202141_5
ttgctgggagtagtgggtacttttctgagaagccttttggcaacttttcgtgcttttcacagyacaatcaccatgtgagatgtgcatggcagaaacttgcatgcctgcttacagcatataactctgttcaggaggtttttctctttcacctctcccacctcttccactcttccactcttttttttctttcrtctttgtttctttttttttcttccatactaagatgataaccaaaatgtctggaaaatggcacttcccacagtattattattatatgataagaataattactgctttaayggaagtaattctccagtagtctgaattttgygttgatccctgtaggtactgagtcatctctcacccactggcaaggtcacagatgatcatatccgcagccttttctttggagactatctgaagccagacagtaatgcaaaagtgtacgatgaaatcacagacttgaaggaactgacagctgtgatggaatcctacctggaggaatacaacaataccagcagagcaccaatgcccctagtcatgttcaagtttgctattgagcatatctcaaggatatgcagagtactgaaacaagataat

SEQ ID NO: 7917 - DNA, 600 bp, Chicken  19866894202141_6
gccttttggcaacttttcgtgcttttcacagyacaatcaccatgtgagatgtgcatggcagaaacttgcatgcctgcttacagcatataactctgttcaggaggtttttctctttcacctctcccacctcttccactcttccactcttttttttctttcrtctttgtttctttttttttcttccatactaagatgataaccaaaatgtctggaaaatggcacttcccacagtattattattatatgataagaataattactgctttaayggaagtaattctccagtagtctgaattttgygttgatccctgtaggtactgagtcatctctcacccactggcaaggtcacagatgatcatatccgcagccttttctttggagactatctgaagccagacagtaatgcaaaagtgtacgatgaaatcacagacttgaaggaactgacagctgtgatggaatcctacctggaggaatacaacaataccagcagagcaccaatgcccctagtcatgttcaagtttgctattgagcatatctcaaggatatgcagagtactgaaacaagataatggacatcttttgttggtgggcattggtggaa

SEQ ID NO: 7918 - DNA, 600 bp, Chicken  19866894202141_7
aaagtgtacgatgaaatcacagacttgaaggaactgacagctgtgatggaatcctacctggaggaatacaacaataccagcagagcaccaatgcccctagtcatgttcaagtttgctattgagcatatctcaaggatatgcagagtactgaaacaagataatggacatcttttgttggtgggcattggtggaagtggtcgacaaagtgctaccaagctagccacctacatgagtatgtttgaactctttcaaattgaaattacaaagtcctatggaatcaatgaatggaaagaagatatyaaacgagtcatgctaaaggctggtgttggtaacaagaacatttcctttttgttctgtgataatcaaataaaggatgaagcatttatagaagacatcaacatgcttttaaatactggtgatgtgcctaatatttttgctgctgatgagaaggctgaaattgttgagaaaatgcaaagtgcatcaaggatggggagtgagaaaattgaagctactccgcttgctatgtacaatttctttattgaaaggatgaagaaaaatttacatattgtcttaggtctgtatatattgcattatttccta

SEQ ID NO: 7919 - DNA, 600 bp, Chicken  19866894202142_1
tacaatatagaaagcactatttttgcagaccaaactgaaagcataacgtggtctttaccctcttacatggtacatacaaaatgctcttactgtggatatgcctggataactaatgttcttatgcagctagtaggcctgctagtaagactggtaagtgacgatcctgtatcagctagcttcaatttgcttccagttttgcattatttacttaaaatatactgttctctttaatatagttctgaaattgacattgctgagagagtttctactcattgttctggaaatatggtaggcattttraatgaatacagagaaaagattgggcaaaagtagtgaagttataggacctcaggaagtggagaaaaagtaaatgaagcttttgagatatatacaatttgctcagtgacttttacaggaagtctcaaacttactggaaatagtggtggcattttcaccaaaaccaacacctctaggttgttagaaatgtaattaatgttgtcaaactgatatgacaatgtgctgaacccaagatgtagaagttccaagaatgagggaagattagcttttaggcggactttcagtcttcccagggttaggcat

SEQ ID NO: 7920 - DNA, 600 bp, Chicken  19866894202145_1
ccccagcatcatctgcttttgcatcacagctgagttagacaaggaaattcatgcattatgagcgcagcagcctggggtgcaatctcccagctaagcactcctctgcaaatgttattatttttgaaaattgcactgagtttctggaatttagcagcgtttggatattgaatgcaattctggaaaataaagaaatccccaccagctccagaagagccatcttccagccctgcctgtattgaggtgtgcaatccaagcagctcacagcccctgcctgcagtgccacagggccataggatgatrgaagggatccttgggggtctgacccagctgcttagggctggatcctgttgggtctcagcaacctgcagtgacaggggaaaggcactcacagggtgagcctaaggaagtttcttcacctggcacctgcacctacctcttgagctgacttttccgagcatttcttcttctcccctcagacaatgagctttccgaaggtgcaccagccctgtttgcttcgggatcagttgggtgagtccacatgccatattttttcatctttctttttacttctgtgctcagtagagcaattaggagatgact

SEQ ID NO: 7921 - DNA, 600 bp, Chicken  19866894202151_1
tacctgaaactctaatcctaaagcttccagctcatttccctttaacgaggaaagggggacagtgaccctgatccgatgactctggccttatttactgtaatgtaaatcagaagtaggtctactaaaaccagtaagctaatctaaataagcaagtgtagataatagttgagccttgcttcttctcatgagggtagcccagaataagcacttagcaaagaaataatagttaaggaccaggctaccatagccagtgggtctgcactggtttgcctgaggtgctgatggggctcagtagctttktataggcttacaggtgtagccaaatttgacttacataactgcacagatgttttctacatagtatttgggaagaggtttttactgtcatctgtgccactgagtataagtttttgttgttatttgactcttcctgcatcagcttcttttcaaagctttctctctgtctgtgtttcttcttgtgtaatttgtgtgtgtgtgtgtttttgttgtgggtgttttttatgattaggttttggtttgttgctttgattttttttttcttttcttttcttttttttttttttgtatagttggagttca

SEQ ID NO: 7922 - DNA, 600 bp, Chicken  19866894202153_1
aacatttactctaagcagtgtgaggccttcagagctggatccttagatggtagctcctaattttattgttgtatgcactagcagtataaggttacaaagctgagaaatagcattctatttttaaactaattctgttggacagcttgttgggtttattcagcaactttccactttgcttacttttactacctaaaattaacaggcaaaggaactcatgttctagtaggagaatgagcttaacggtatagttatctatcaagcataccagaaagggactattttattttcctgttggttttrttaaagttttgtcattgaacttgcaatccaaatgttsttcactaaaacggagatctttaaaattgcaatgagtggrggaatgctgattgttaagtctcaggctattcttggagtgtgggttgtttggttgcacccctactcccgcacccctaacagttaaactcatttagttttgaaagccacttatcattcaagtttaactcacccagtcacccctccactgttcagaaaacagtcccttttttttactgtgtttctttaattaagtttagcccccacctttttttggctacgtagaaa

SEQ ID NO: 7923 - DNA, 600 bp, Chicken  19866894202153_2
gatccttagatggtagctcctaattttattgttgtatgcactagcagtataaggttacaaagctgagaaatagcattctatttttaaactaattctgttggacagcttgttgggtttattcagcaactttccactttgcttacttttactacctaaaattaacaggcaaaggaactcatgttctagtaggagaatgagcttaacggtatagttatctatcaagcataccagaaagggactattttattttcctgttggttttrttaaagttttgtcattgaacttgcaatccaaatgttsttcactaaaacggagatctttaaaattgcaatgagtggrggaatgctgattgttaagtctcaggctattcttggagtgtgggttgtttggttgcacccctactcccgcacccctaacagttaaactcatttagttttgaaagccacttatcattcaagtttaactcacccagtcacccctccactgttcagaaaacagtcccttttttttactgtgtttctttaattaagtttagcccccacctttttttggctacgtagaaattaaatactccaattaaggggagatatcctaaataca

SEQ ID NO: 7924 - DNA, 600 bp, Chicken  19866894202153_3
actagcagtataaggttacaaagctgagaaatagcattctatttttaaactaattctgttggacagcttgttgggtttattcagcaactttccactttgcttacttttactacctaaaattaacaggcaaaggaactcatgttctagtaggagaatgagcttaacggtatagttatctatcaagcataccagaaagggactattttattttcctgttggttttrttaaagttttgtcattgaacttgcaatccaaatgttsttcactaaaacggagatctttaaaattgcaatgagtggrggaatgctgattgttaagtctcaggctattcttggagtgtgggttgtttggttgcacccctactcccgcacccctaacagttaaactcatttagttttgaaagccacttatcattcaagtttaactcacccagtcacccctccactgttcagaaaacagtcccttttttttactgtgtttctttaattaagtttagcccccacctttttttggctacgtagaaattaaatactccaattaaggggagatatcctaaatacagaattgcagcatgacaacacaaaatgaaaaggttaaaca

SEQ ID NO: 7925 - DNA, 600 bp, Chicken  19866894202156_1
cctgacacaccagaaaaggagtttatgggctagtcagtttagtactatccctatgaagtccactggcacagggaatatagacaccacataaagaaaattggtttttaatgtatttcagtccacttattgcactctgatatcagaatctatttccctgaaccaacgtaggcaggacagaaaagaatatatataatacagatatatacatagtcttaggaaatatgctttattgaactggaaacattcaaggaaaggctggacggggctctaagcaacctaatgtagatgtaggtgtccctstttattgcaggggagttgtattagatgagctttaagggacccttccaactcaaacgattctgtaattgccttaaaaaacaacaacaaagcccacaaataaataaagtcaagtaaaaacagccacggaatttaactgctcygtattgacatccstaggaacagagtagtaggctgatgagaatatggcttttaatggatgcacacacttttaaaacaaagttgatgttactgaaataacaccttttacagaagtagctgcatacagaatgaccttgaaaagacatagcaattgctaccaca

SEQ ID NO: 7926 - DNA, 600 bp, Chicken  19866894202156_2
cagaatctatttccctgaaccaacgtaggcaggacagaaaagaatatatataatacagatatatacatagtcttaggaaatatgctttattgaactggaaacattcaaggaaaggctggacggggctctaagcaacctaatgtagatgtaggtgtccctstttattgcaggggagttgtattagatgagctttaagggacccttccaactcaaacgattctgtaattgccttaaaaaacaacaacaaagcccacaaataaataaagtcaagtaaaaacagccacggaatttaactgctcygtattgacatccstaggaacagagtagtaggctgatgagaatatggcttttaatggatgcacacacttttaaaacaaagttgatgttactgaaataacaccttttacagaagtagctgcatacagaatgaccttgaaaagacatagcaattgctaccacacgtggaaaatatattattgccaaagctaaggcttgattacctaagatagaccagccagactggaacattaggatctgggatgagtgctaagataagattttagagtcaataaaataaatgagtaaataaaaagctccatt

SEQ ID NO: 7927 - DNA, 600 bp, Chicken  19866894202156_3
cctgaaccaacgtaggcaggacagaaaagaatatatataatacagatatatacatagtcttaggaaatatgctttattgaactggaaacattcaaggaaaggctggacggggctctaagcaacctaatgtagatgtaggtgtccctstttattgcaggggagttgtattagatgagctttaagggacccttccaactcaaacgattctgtaattgccttaaaaaacaacaacaaagcccacaaataaataaagtcaagtaaaaacagccacggaatttaactgctcygtattgacatccstaggaacagagtagtaggctgatgagaatatggcttttaatggatgcacacacttttaaaacaaagttgatgttactgaaataacaccttttacagaagtagctgcatacagaatgaccttgaaaagacatagcaattgctaccacacgtggaaaatatattattgccaaagctaaggcttgattacctaagatagaccagccagactggaacattaggatctgggatgagtgctaagataagattttagagtcaataaaataaatgagtaaataaaaagctccatttgttggggcgaaa

SEQ ID NO: 7928 - DNA, 600 bp, Chicken  19866894202159_1
cttaacaagctgtcctttaatgtctgggtgcaagttaaggacctcccaaataacctcctctgtagccacatctatggttggagcaaacagaagagatcagttaactgcaagtgtataaatactggaaaagcaatgaaaagaattgcaaaggtagaaagatggttaatgaagatctttgcgatatgtaatgtacgggttgctgagacagctgctttactgatcgttttacaatggaagtaaacactgtgccactgagtcctagtataccatacagagaaaacagcaaacaagcagcttccstgttggcmagttaactattaacatgggctgtttcttcttcacaacaggatcatgtggttgtagcagcattcatttaattacaaaagtctttttcgttaatctcttcctctccaaaacaaccaaacacctscaatattaaatgtcctactgattcttgagctgttgttcccttgagctattcccatgtttgcctttctcacaggtctggcttaggactgtaggactgcagctttgtggaagtgaggcattaggtgtctgaaataaacacgctcataacatcgtgctattcagtacattgaa

SEQ ID NO: 7929 - DNA, 600 bp, Chicken  19866894202159_2
gctgtcctttaatgtctgggtgcaagttaaggacctcccaaataacctcctctgtagccacatctatggttggagcaaacagaagagatcagttaactgcaagtgtataaatactggaaaagcaatgaaaagaattgcaaaggtagaaagatggttaatgaagatctttgcgatatgtaatgtacgggttgctgagacagctgctttactgatcgttttacaatggaagtaaacactgtgccactgagtcctagtataccatacagagaaaacagcaaacaagcagcttccstgttggcmagttaactattaacatgggctgtttcttcttcacaacaggatcatgtggttgtagcagcattcatttaattacaaaagtctttttcgttaatctcttcctctccaaaacaaccaaacacctscaatattaaatgtcctactgattcttgagctgttgttcccttgagctattcccatgtttgcctttctcacaggtctggcttaggactgtaggactgcagctttgtggaagtgaggcattaggtgtctgaaataaacacgctcataacatcgtgctattcagtacattgaaaaccactg

SEQ ID NO: 7930 - DNA, 600 bp, Chicken  19866894202159_3
caatgaaaagaattgcaaaggtagaaagatggttaatgaagatctttgcgatatgtaatgtacgggttgctgagacagctgctttactgatcgttttacaatggaagtaaacactgtgccactgagtcctagtataccatacagagaaaacagcaaacaagcagcttccstgttggcmagttaactattaacatgggctgtttcttcttcacaacaggatcatgtggttgtagcagcattcatttaattacaaaagtctttttcgttaatctcttcctctccaaaacaaccaaacacctscaatattaaatgtcctactgattcttgagctgttgttcccttgagctattcccatgtttgcctttctcacaggtctggcttaggactgtaggactgcagctttgtggaagtgaggcattaggtgtctgaaataaacacgctcataacatcgtgctattcagtacattgaaaaccactgagctaattcatcactcagtgctttaaatgtttgctttctttttcgtaacagtttttcaaatcaacaaaagataccttcaggtcactaatgtgaaatttctgtccaatcagattaacaagaga

SEQ ID NO: 7931 - DNA, 600 bp, Chicken  19866894202162_1
cggggaagagggctgttagctcacacttaaaaatgatttgcaaacgctcgctaaagtgttacagccaaattcccctcctaattatatcccttcccacatgcagtcctccagcatgcttaggtttaaaaagcaaacaaaacccccgtgtgttgctgggtgcaaactacgtgcctctgaaggctcacagaagctctttgagcaacagcttggaaacaaaagtgcagaagggtagcgggggctgtggccgagcatgggccgggttgtgcacagagagtctcaggcctaagcctctcacctccytccctatgccagtcccataaggaagcatctccgaaactcagttccacctaagmataggtgctgccctccagcttgcctccgagcctcccagaggtggctttgtcccttggctgcataggtgactgtctccccacatctccccggtgggtgcgggtggtgggaggagagtgcccagcagcaggcaggtcgtgctgtgtgaaacacaaggagtgctgacgtgggagcaatgctaacctgcctttaccaccaaccaggctgtagatgcagatgatgctgctgtgcggtcgcaggagacagtgg

SEQ ID NO: 7932 - DNA, 600 bp, Chicken  19866894202162_2
aagtgttacagccaaattcccctcctaattatatcccttcccacatgcagtcctccagcatgcttaggtttaaaaagcaaacaaaacccccgtgtgttgctgggtgcaaactacgtgcctctgaaggctcacagaagctctttgagcaacagcttggaaacaaaagtgcagaagggtagcgggggctgtggccgagcatgggccgggttgtgcacagagagtctcaggcctaagcctctcacctccytccctatgccagtcccataaggaagcatctccgaaactcagttccacctaagmataggtgctgccctccagcttgcctccgagcctcccagaggtggctttgtcccttggctgcataggtgactgtctccccacatctccccggtgggtgcgggtggtgggaggagagtgcccagcagcaggcaggtcgtgctgtgtgaaacacaaggagtgctgacgtgggagcaatgctaacctgcctttaccaccaaccaggctgtagatgcagatgatgctgctgtgcggtcgcaggagacagtggctgcgtccccccctggattccgcccttgggtacacaatttttacattttttgg

SEQ ID NO: 7933 - DNA, 600 bp, Chicken  19866894202165_1
ctaggatgcactaaacaaacagtgcccaacagaggtgatcctccccctctgctctgccctagggaggccgcatctggaatactgtgcacagttctgggctctagagagatagtggggtctccttctctggagatatttaaagcccacctggatgctttcccctacaacccactgtagggaacctgctttagcagggggttggactggaagatctccagagctcccttccaacccctacaattctgtgatcttgggtcaatggacctctccacaatggacattattctaacagcattttcyagttmaaaatgtatwttagaagagattcaaaccttctacatgaacgtactcattttcagaaaatgacattgcaaaagaaatattgaactgaaacatttcagggagatcaaaatatttgaatggggaaagctcactttgtaagaatggatacggatgggaaaagagactttgccagaaaaccactcagccaactgggcctgggctggatccagacgtgtcaaagatagattcatgctaggctcttcttgagctcacagagctgcacagcagtgacaaagagggaggagttccaaggcacct

SEQ ID NO: 7934 - DNA, 600 bp, Chicken  19866894202165_2
atgcactaaacaaacagtgcccaacagaggtgatcctccccctctgctctgccctagggaggccgcatctggaatactgtgcacagttctgggctctagagagatagtggggtctccttctctggagatatttaaagcccacctggatgctttcccctacaacccactgtagggaacctgctttagcagggggttggactggaagatctccagagctcccttccaacccctacaattctgtgatcttgggtcaatggacctctccacaatggacattattctaacagcattttcyagttmaaaatgtatwttagaagagattcaaaccttctacatgaacgtactcattttcagaaaatgacattgcaaaagaaatattgaactgaaacatttcagggagatcaaaatatttgaatggggaaagctcactttgtaagaatggatacggatgggaaaagagactttgccagaaaaccactcagccaactgggcctgggctggatccagacgtgtcaaagatagattcatgctaggctcttcttgagctcacagagctgcacagcagtgacaaagagggaggagttccaaggcacctgtgct

SEQ ID NO: 7935 - DNA, 600 bp, Chicken  19866894202165_3
caaacagtgcccaacagaggtgatcctccccctctgctctgccctagggaggccgcatctggaatactgtgcacagttctgggctctagagagatagtggggtctccttctctggagatatttaaagcccacctggatgctttcccctacaacccactgtagggaacctgctttagcagggggttggactggaagatctccagagctcccttccaacccctacaattctgtgatcttgggtcaatggacctctccacaatggacattattctaacagcattttcyagttmaaaatgtatwttagaagagattcaaaccttctacatgaacgtactcattttcagaaaatgacattgcaaaagaaatattgaactgaaacatttcagggagatcaaaatatttgaatggggaaagctcactttgtaagaatggatacggatgggaaaagagactttgccagaaaaccactcagccaactgggcctgggctggatccagacgtgtcaaagatagattcatgctaggctcttcttgagctcacagagctgcacagcagtgacaaagagggaggagttccaaggcacctgtgctgaggataaac

SEQ ID NO: 7936 - DNA, 600 bp, Chicken  19866894202168_1
ccaagcacagtacatactttcccttctttcttcaaaggtagttcctcttgcaaaactctgtggagaacaatacaataatcagctcttaacatctaattatgcttttccctttacaaaagaaactcatattcttaaataacacttcctggcagcagagagctctgtggctcactttgaaagaaaggggaaaacaatgcaacccagcccaaatatcttcagatcattaatgtacagggaattgggtgcagaatcctttcttagcttcatcactagatgacaataatacttacccttgagctsttggctgtgttcttgtactgaatgccaacaataatctaatcagttaacaattctcattctgatgatcattttcctgtgaattgtttcaatggtagaaaaaaatataaataaatgagttgcttgtgctggaaagatgatggctgattgagggtccgctcttttggctccttataacagttcagattcttctgcctggtggatgaaatgtcaacctgcagggctgtaagctaaaagaaaaagtccctttacaatgaaatcttatccctgttttgcccagaggtgtttcatagcccaggcaaa

SEQ ID NO: 7937 - DNA, 600 bp, Chicken  19866894202169_1
tctaaaggagctcttgtgctaaaggagttattactttacccacatattttcctacctcttccttagattcctcttcctcaacttctgtggacacagagggtaccttaggtttgtaccatgatatctgtagccttcggtctttaaacttggatccctggttagcagcctagattgtattttaaatgaacatgtttttaaaaggaaaatcaaattaagaatttttcagatcaccaacaatgagctaaacccagggagcactaatcactgcagatctgtatctgaatatctcatacatcaccytcctcagccttcaagagcaacttcacttaagccagaatctactaaataacgcccacctaccatcaatctaaaaatattaacacagctctgaagtgactgcgacattgaaaccatatcaacagaaaatccattktaataaattaaacatgaagcatatccccttttagcaacactatatgcagaagcaacaaatatttgcactatctagctcaaatgagtgggatccaaacctgctaaagttaaaagacaaaaaggcaaacacaagcagttaaaaactcttattctggaactaaggaaaac

SEQ ID NO: 7938 - DNA, 600 bp, Chicken  19866894202169_2
tcggtctttaaacttggatccctggttagcagcctagattgtattttaaatgaacatgtttttaaaaggaaaatcaaattaagaatttttcagatcaccaacaatgagctaaacccagggagcactaatcactgcagatctgtatctgaatatctcatacatcaccytcctcagccttcaagagcaacttcacttaagccagaatctactaaataacgcccacctaccatcaatctaaaaatattaacacagctctgaagtgactgcgacattgaaaccatatcaacagaaaatccattktaataaattaaacatgaagcatatccccttttagcaacactatatgcagaagcaacaaatatttgcactatctagctcaaatgagtgggatccaaacctgctaaagttaaaagacaaaaaggcaaacacaagcagttaaaaactcttattctggaactaaggaaaaccaaatccatcatttcacttacattctcagcttcagagcgagatttaaaagtcagaacaacacttagtggggaatcttcttcttggagatcctcaatatccccaaatttctgtaggaagaaaaatcaatgagga

SEQ ID NO: 7939 - DNA, 600 bp, Chicken  19866894202174_1
ggctgtcgcactgagcagtgttttctggctgggacgcgggccgggctccggccctgaccagcacagtctgcccctgcagctcatggccatgtttaaggggaatttgctttcacctgtccttgaacccagggcacagccctcagccctgcgggctccagagcctggctgcctccccacggcgtgcccctctgctccccactgaggctcacattgctctgaagcggacatatctcactcgagtccacttttgttcagattttgtctcaaaaagccgtgatttgcctcaaagaagagatattyctccctctcacagctgggctttgcaaggcggtagtgaagccctgctgatttccacttattcccacccctggagggctatgggatggctgctttgtaaagtcagcagtcccaaacacaaaattaagcacagtattatgaatggtatttccactgcatcacgtatggagtgatcaacacagctgtggaatgtttcacagaatatcactgaaatacacttgcatggcccagctattacagttgccttctgttttgcaggcaggttaattagcagctcccgagcaaccagaataatgtcaccat

SEQ ID NO: 7940 - DNA, 600 bp, Chicken  19866894202178_1
ttaagtgttgaaaacgcaatataaaaatacttttaaatgctagtaataggcatacagtgtttcagggacagacctttgaaccaaggtcaaattttgtcacctgagcaacacctggttctccaccaacttctgtgcatctgagcaaagcacatatactcacagggatgttttgttgcatgtattttactgcctctgctttctttgatttcttcagcattcagagtttgcaggattactgctgccatacaaatcattctgcatgcttcaaaagggaggctggtattttatgaggtgctgaaygaaatttgctgaaactgatggaggatccaattctatggtcagtctttaaacaggcatgctaaaactagcggagaatcagcagtaagaagtactgctctcaaagcaacagccttaaagcaaactgagcaagaggcagtatttgctggggtatagttaagaattcagacacactggatttatttttggctcacccaaatatacacagaaagttttgcgaagtgattagggttcattaaacagaacacttgagaatgaacttaaatgatttacctaatggggataaacttgcttgtgtttgcc

SEQ ID NO: 7941 - DNA, 600 bp, Chicken  19866894202179_1
tggtgtttaacatctgagctgagacctgagtctgctcatgcaggaagcttacagaacatctgtgctcagatggagtttggttcatgcagagtccctcccttctcccccaggctcaggtcctaaatagtcttgaacttggcttctgctgcatcctggtccatagtggggtctggaaggacacaggaataagcagtgctgcctttatggtaaagctatctgtaaacaagagctgttactatgggattctcctggccaaacacttcaatgaaactgaaaaatgacagattgcagggtgaggcwgayatctttccagccctggtctttcacaggctgygtcagagctggacagtgctgctccctggtccttactcaccagaaaccaaacagatccttctggatcaaagtgaaccaccgatacaagagggcaaagagagccagaactgctgctgtcactggcaaacacccagcagtcagccttgtggtcaatggctgtgtgccatccacccccattgcagggtgcaatggggaagggaagggcactttggcaggtgttgttccaaatcctccttgctgctcatttgagcattcccaagctcatga

SEQ ID NO: 7942 - DNA, 600 bp, Chicken  19866894202179_2
tgtttaacatctgagctgagacctgagtctgctcatgcaggaagcttacagaacatctgtgctcagatggagtttggttcatgcagagtccctcccttctcccccaggctcaggtcctaaatagtcttgaacttggcttctgctgcatcctggtccatagtggggtctggaaggacacaggaataagcagtgctgcctttatggtaaagctatctgtaaacaagagctgttactatgggattctcctggccaaacacttcaatgaaactgaaaaatgacagattgcagggtgaggcwgayatctttccagccctggtctttcacaggctgygtcagagctggacagtgctgctccctggtccttactcaccagaaaccaaacagatccttctggatcaaagtgaaccaccgatacaagagggcaaagagagccagaactgctgctgtcactggcaaacacccagcagtcagccttgtggtcaatggctgtgtgccatccacccccattgcagggtgcaatggggaagggaagggcactttggcaggtgttgttccaaatcctccttgctgctcatttgagcattcccaagctcatgagaa

SEQ ID NO: 7943 - DNA, 600 bp, Chicken  19866894202179_3
ctcatgcaggaagcttacagaacatctgtgctcagatggagtttggttcatgcagagtccctcccttctcccccaggctcaggtcctaaatagtcttgaacttggcttctgctgcatcctggtccatagtggggtctggaaggacacaggaataagcagtgctgcctttatggtaaagctatctgtaaacaagagctgttactatgggattctcctggccaaacacttcaatgaaactgaaaaatgacagattgcagggtgaggcwgayatctttccagccctggtctttcacaggctgygtcagagctggacagtgctgctccctggtccttactcaccagaaaccaaacagatccttctggatcaaagtgaaccaccgatacaagagggcaaagagagccagaactgctgctgtcactggcaaacacccagcagtcagccttgtggtcaatggctgtgtgccatccacccccattgcagggtgcaatggggaagggaagggcactttggcaggtgttgttccaaatcctccttgctgctcatttgagcattcccaagctcatgagaaatgatgtgctatctgtgcagggtctgcacgc

SEQ ID NO: 7944 - DNA, 600 bp, Chicken  19866894202189_1
cctgggtgcaaggtctgtcctggaaccctgaaagccaagatagcaggagacaggtctgggttcatgatataggtgaccatgaataactcagggcaggtctgtgtatccagggatgaaacccctgtgctcacatgcagaagggttgggtatatcaggatatacaatttttatgtactgttcacctatctgaaagaattttctttgaaccattcattttggtaatagcatttgctgcttatggtcagaagtatgtgtttcttgatcactaacacaaatattttttatctctatttcttttcrtcctaccccattttaaaaggtgtacaccagctagtgactttcattattcctctcactagctgacagttgtaccacaggtgtacaattgtgaagaaaattctctgtgttttggaatattttagttattatgagggctagaagaggagaggcatgaatcaactgctgaatgtttgcttctttttaaagcacctcttttgagtttctcagaatcccagccaaaagaaaaaacactggtggtaagaggtaggagcacgaatagcacgaaagtaagaaaaatcagataattaagtgcatctgtat

SEQ ID NO: 7945 - DNA, 600 bp, Chicken  19866894202193_1
cgaggacacattgctgactcacattcaccagtacccccaggtccttttccacagggctgtactccatccttatgtcccccagctggtactgatagcacggcttgccatgacccaggagcagaccttgctcttgcatttattgaacctaacgagcttcaactaggcctgctgctcaaattcgtcagtgtctctctgttaggcagccagtgctgacctagaagttttcagccattaacttactgtggatggacattctcttccacatctatctgtattaatcgtttcaaagcaagtgagtaycaataagggggcctttatggaaaacaaggagcatgtaaatttttgaatggaggctgaagatgtggtgttgtaggactgataactgcttgtgtttctttctttaaatactatttgtgaagaaatgctttcctggtgaggcagtgctttacttaagactaaaaagtggatgtcaggaacattaagttaaaatggtaaatgttttctttttactgtaggttatattttatgtataggagtacaaatgcctgctaatgttttgtggtgcttcagaaatacttagcatttatcgttttagatttt

SEQ ID NO: 7946 - DNA, 600 bp, Chicken  19866894202194_1
gtcaccagcaatgtcattgagaattctttagcgggagtctttgtagctaaaattgcattaagaaaatgtattttaggtttactaagtttaaccaactaattccgtatgggcaaattgaatgactcatttcacaagtgctttgcatttatttctcagcaaaattaatcttgagaaaggaaagctgcttctgtagtagcataattgtacttaataccgtgcttttctctctgtcttgcctccttggatggttcatagtttttcatcccaaagaaaacaaatagtgtatcacaatgaaaagcyggtatcaatttaagcatccacttgacggactacaaagtcttcagcaaaacttcaggtggtttaaggacttcccccatgtgctgtgttacagcacagtgattcccccattagaatctcccggttagagagtatcatggtttctgcagtgccacagcactgtcagagctctctactactacataattactgtaatataaagctttgtgatgcagtggcacagctttacctgaattggaacagacatgtttttgaaaaggcctttagtctgttctacaagtctctctgttttgggaataatta

SEQ ID NO: 7947 - DNA, 600 bp, Chicken  19866894202196_1
tggatttcattaaaccagcaaacgggcattaggtggatatttacaccagctcaacttgcgataattcgcccaattggacaaatgtaggtttttatttgggggggaggggggactaaaaaaagtcccgagggattatggttcattcccatgggcttggatgggctcagagcagccgtgtggctccagcaggtgctggctgtcacctcccctcccactgtcacccacctgcagggcactgagagcagggggttctgctgccatgggatgctggcacccaggggaaggggatggaaaaggagraattgtgagctggaaatgttctgagggagaaatgaggtgtgtaggcgcggacatgggattgcaatgaggtgtgctgacagcttggatctgctgacaccaaaggagataaggagcagcagtgrggggtgaacctgtgctgccccacgaagggcagcgggggccgtggggagcagcacacggktgcagtccctgctggagctgttgaggtccttttgcctctttccttctcctattctaatcctcataaccgggtctgcgttcaaccggctttcattttcaacccattgcaaagtctgactc

SEQ ID NO: 7948 - DNA, 600 bp, Chicken  19866894202196_2
tcccgagggattatggttcattcccatgggcttggatgggctcagagcagccgtgtggctccagcaggtgctggctgtcacctcccctcccactgtcacccacctgcagggcactgagagcagggggttctgctgccatgggatgctggcacccaggggaaggggatggaaaaggagraattgtgagctggaaatgttctgagggagaaatgaggtgtgtaggcgcggacatgggattgcaatgaggtgtgctgacagcttggatctgctgacaccaaaggagataaggagcagcagtgrggggtgaacctgtgctgccccacgaagggcagcgggggccgtggggagcagcacacggktgcagtccctgctggagctgttgaggtccttttgcctctttccttctcctattctaatcctcataaccgggtctgcgttcaaccggctttcattttcaacccattgcaaagtctgactcagcaacaaatattatcagcttccatccaaacctgcagaagacttggaagaaaaccaacttttctcagaacagacctcaaacaagcgctctgttctgctgaatcaggccctgggtgtgccggg

SEQ ID NO: 7949 - DNA, 600 bp, Chicken  19866894202196_3
tccagcaggtgctggctgtcacctcccctcccactgtcacccacctgcagggcactgagagcagggggttctgctgccatgggatgctggcacccaggggaaggggatggaaaaggagraattgtgagctggaaatgttctgagggagaaatgaggtgtgtaggcgcggacatgggattgcaatgaggtgtgctgacagcttggatctgctgacaccaaaggagataaggagcagcagtgrggggtgaacctgtgctgccccacgaagggcagcgggggccgtggggagcagcacacggktgcagtccctgctggagctgttgaggtccttttgcctctttccttctcctattctaatcctcataaccgggtctgcgttcaaccggctttcattttcaacccattgcaaagtctgactcagcaacaaatattatcagcttccatccaaacctgcagaagacttggaagaaaaccaacttttctcagaacagacctcaaacaagcgctctgttctgctgaatcaggccctgggtgtgccgggacccccattgttttgcaacttcggatgacccacaagccatgaaacagatcaaaccgccc

SEQ ID NO: 7950 - DNA, 599 bp, Chicken  19866894202197_1
  misc_feature (1)..(135): n is any nucleotide
nnnnnnnnnnnnnnnnnnnnnnnnnnnnnnnnnnnnnnnnnnnnnnnnnnnnnnnnnnnnnnnnnnnnnnnnnnnnnnnnnnnnnnnnnnnnnnnnnnnnnnnnnnnnnnnnnnnnnnnnnnnnnnnnnnnnnnnatatatatatatatatatatgtatatagtttgccatatgcttcagaaagaataagtcgtactttccaaacacagtagttatgaccgtttccctctcctcttttcctttcccatcttctgtttctcagtggattcccttcaaacatccacatagacatcaataacytagttttgttaccttatgggcattattcaactgtccttgaatttcatgcagctgttgagaaggcttggccataaaatggtgcactttgggaaaacccagtacatcttttttatcgatatatttctctgcatgcacagaccctaggaagttttctaaagtttatttactgaaatacagaaattcaaaaggtggattgtctgtggcmctcaaaagcygaactccagaattcctggtatygtaagagatttgtcyctgcatgtgggacagtttgtggcagtgtagttaaatkcgtgtgtgct

SEQ ID NO: 7951 - DNA, 600 bp, Chicken  19866894202197_2
acagtagttatgaccgtttccctctcctcttttcctttcccatcttctgtttctcagtggattcccttcaaacatccacatagacatcaataacytagttttgttaccttatgggcattattcaactgtccttgaatttcatgcagctgttgagaaggcttggccataaaatggtgcactttgggaaaacccagtacatcttttttatcgatatatttctctgcatgcacagaccctaggaagttttctaaagtttatttactgaaatacagaaattcaaaaggtggattgtctgtggcmctcaaaagcygaactccagaattcctggtatygtaagagatttgtcyctgcatgtgggacagtttgtggcagtgtagttaaatkcgtgtgtgcttttgcaggctcagtgccttatagtgtgaattcctctgagtgcaggctcttaagctgcagctctacacagttttttcttttttctttttctttttttccagcagcagtgtgagctgaagcttcttttatatccagatctagcaaataaagaacccttttctttccagtaggtaattattcagccaaatcaggggttttttttgagtt

SEQ ID NO: 7952 - DNA, 600 bp, Chicken  19866894202197_3
tgaccgtttccctctcctcttttcctttcccatcttctgtttctcagtggattcccttcaaacatccacatagacatcaataacytagttttgttaccttatgggcattattcaactgtccttgaatttcatgcagctgttgagaaggcttggccataaaatggtgcactttgggaaaacccagtacatcttttttatcgatatatttctctgcatgcacagaccctaggaagttttctaaagtttatttactgaaatacagaaattcaaaaggtggattgtctgtggcmctcaaaagcygaactccagaattcctggtatygtaagagatttgtcyctgcatgtgggacagtttgtggcagtgtagttaaatkcgtgtgtgcttttgcaggctcagtgccttatagtgtgaattcctctgagtgcaggctcttaagctgcagctctacacagttttttcttttttctttttctttttttccagcagcagtgtgagctgaagcttcttttatatccagatctagcaaataaagaacccttttctttccagtaggtaattattcagccaaatcaggggttttttttgagttgattttatac

SEQ ID NO: 7953 - DNA, 600 bp, Chicken  19866894202197_4
tcctttcccatcttctgtttctcagtggattcccttcaaacatccacatagacatcaataacytagttttgttaccttatgggcattattcaactgtccttgaatttcatgcagctgttgagaaggcttggccataaaatggtgcactttgggaaaacccagtacatcttttttatcgatatatttctctgcatgcacagaccctaggaagttttctaaagtttatttactgaaatacagaaattcaaaaggtggattgtctgtggcmctcaaaagcygaactccagaattcctggtatygtaagagatttgtcyctgcatgtgggacagtttgtggcagtgtagttaaatkcgtgtgtgcttttgcaggctcagtgccttatagtgtgaattcctctgagtgcaggctcttaagctgcagctctacacagttttttcttttttctttttctttttttccagcagcagtgtgagctgaagcttcttttatatccagatctagcaaataaagaacccttttctttccagtaggtaattattcagccaaatcaggggttttttttgagttgattttatacccgtcctctcaaacagtcctat

SEQ ID NO: 7954 - DNA, 600 bp, Chicken  19866894202197_5
tgtttctcagtggattcccttcaaacatccacatagacatcaataacytagttttgttaccttatgggcattattcaactgtccttgaatttcatgcagctgttgagaaggcttggccataaaatggtgcactttgggaaaacccagtacatcttttttatcgatatatttctctgcatgcacagaccctaggaagttttctaaagtttatttactgaaatacagaaattcaaaaggtggattgtctgtggcmctcaaaagcygaactccagaattcctggtatygtaagagatttgtcyctgcatgtgggacagtttgtggcagtgtagttaaatkcgtgtgtgcttttgcaggctcagtgccttatagtgtgaattcctctgagtgcaggctcttaagctgcagctctacacagttttttcttttttctttttctttttttccagcagcagtgtgagctgaagcttcttttatatccagatctagcaaataaagaacccttttctttccagtaggtaattattcagccaaatcaggggttttttttgagttgattttatacccgtcctctcaaacagtcctatgtaccagagtgcagt

SEQ ID NO: 7955 - DNA, 600 bp, Chicken  19866894202197_6
catcaataacytagttttgttaccttatgggcattattcaactgtccttgaatttcatgcagctgttgagaaggcttggccataaaatggtgcactttgggaaaacccagtacatcttttttatcgatatatttctctgcatgcacagaccctaggaagttttctaaagtttatttactgaaatacagaaattcaaaaggtggattgtctgtggcmctcaaaagcygaactccagaattcctggtatygtaagagatttgtcyctgcatgtgggacagtttgtggcagtgtagttaaatkcgtgtgtgcttttgcaggctcagtgccttatagtgtgaattcctctgagtgcaggctcttaagctgcagctctacacagttttttcttttttctttttctttttttccagcagcagtgtgagctgaagcttcttttatatccagatctagcaaataaagaacccttttctttccagtaggtaattattcagccaaatcaggggttttttttgagttgattttatacccgtcctctcaaacagtcctatgtaccagagtgcagtatgtgagtgatagaagtttgagatggaaggaaaaatg

SEQ ID NO: 7956 - DNA, 599 bp, Chicken  19866894202204_1
  misc_feature (1)..(159): n is any nucleotide
nnnnnnnnnnnnnnnnnnnnnnnnnnnnnnnnnnnnnnnnnnnnnnnnnnnnnnnnnnnnnnnnnnnnnnnnnnnnnnnnnnnnnnnnnnnnnnnnnnnnnnnnnnnnnnnnnnnnnnnnnnnnnnnnnnnnnnnnnnnnnnnnnnnnnnnnnnnnnnntacatcactagatggagctcactatataagaaatgcttgagcagtaaatgcattattgaataagccgttttagaagatggtgtgggagaggtggcaaagtaatatgcgggggaaagatgtaatgtgaagagaatggagcaragcatatgttaaagaaagggggatggtaatgaatgggacagtacaatcatagaatcattaaggttggaaaagaccactaatatcacgaagtccaaccccagcctatctccaccatgcccactgrccatgtccctttgtgccacatctccacagttctggaacacctccagggacggtgaccccaccacctctccggccatgaagctcaaagctgtttctttgggctgaagattttagctgtgattcagtgatgcacatgtgaggacctgccttattccagatttgggcacctgtcccgg

SEQ ID NO: 7957 - DNA, 599 bp, Chicken  19866894202204_2
  misc_feature (1)..(35): n is any nucleotide
nnnnnnnnnnnnnnnnnnnnnnnnnnnnnnnnnnntacatcactagatggagctcactatataagaaatgcttgagcagtaaatgcattattgaataagccgttttagaagatggtgtgggagaggtggcaaagtaatatgcgggggaaagatgtaatgtgaagagaatggagcaragcatatgttaaagaaagggggatggtaatgaatgggacagtacaatcatagaatcattaaggttggaaaagaccactaatatcacgaagtccaaccccagcctatctccaccatgcccactgrccatgtccctttgtgccacatctccacagttctggaacacctccagggacggtgaccccaccacctctccggccatgaagctcaaagctgtttctttgggctgaagattttagctgtgattcagtgatgcacatgtgaggacctgccttattccagatttgggcacctgtcccgggtgcacgttgagaaggtgtgactgataaagacaattactgctggacaatggcatcttagcaagcacaggtatatgtgggcacattgtctctgtatgagatagattcctctgtgttcactctcca

SEQ ID NO: 7958 - DNA, 600 bp, Chicken  19866894202205_1
ggactgcatataagatgaatagtaattcaggcctatttttccaatgaaatcttgaacctctgccagctcatactgcttgggaatctggcctcttacttttattttgcacactaatttcacttaattggtagattttccatgcttattaattatagatgtataagcaggcctgtttgtttgtgctcatttatgtagagaaggaactgtttcaaagaaatgacattttaagaacgacctgacatcagtcccatataaaattattggtctatgtctaccatgtgaacagtggaggggatattsaagagcagttaggcagtayttgtagcctgggcgtcatggagaaatgagtccaggtctccaggaattgtacctatatcctatattccccttggtgcatctgcctctggctgatcagaaatgaatataactggaagtaagttataaggagaattttgagacacatatataagttccctccttgcaccaatgcctttgtgtggattgcgtattgcaaacacatattctgaggcagtcctggattcctttgagcttggcatgttctggttgagatgaactcatcatccaaatgttgacatgaaa

SEQ ID NO: 7959 - DNA, 600 bp, Chicken  19866894202205_2
tagtaattcaggcctatttttccaatgaaatcttgaacctctgccagctcatactgcttgggaatctggcctcttacttttattttgcacactaatttcacttaattggtagattttccatgcttattaattatagatgtataagcaggcctgtttgtttgtgctcatttatgtagagaaggaactgtttcaaagaaatgacattttaagaacgacctgacatcagtcccatataaaattattggtctatgtctaccatgtgaacagtggaggggatattsaagagcagttaggcagtayttgtagcctgggcgtcatggagaaatgagtccaggtctccaggaattgtacctatatcctatattccccttggtgcatctgcctctggctgatcagaaatgaatataactggaagtaagttataaggagaattttgagacacatatataagttccctccttgcaccaatgcctttgtgtggattgcgtattgcaaacacatattctgaggcagtcctggattcctttgagcttggcatgttctggttgagatgaactcatcatccaaatgttgacatgaaagctgactacaccatacacc

SEQ ID NO: 7960 - DNA, 600 bp, Chicken  19866894202211_1
tgacccttggcaaatttcacctttccttcaaatttgtccagttgtgaaatacatgacacacatccacagaacccaacaaccatcagttaaaatgtatttccagcaggtgcaagtaggcatgattttttctactgcataaacaagtgtgatcattagtaccaaatgcagtgttaggaagcatcgttacaagcaggtgggacctctaattatatcagtgtaatttgtcatgaaaatgcaacagaattataacagcagcagtaatgacccttccctcagccctatgctagtcttgttttacaytgcagttatcccactggagtagtatattgctgaatcaggctttcaaattattttctatctaattatcaccatttattattgttgacataaagcatgtatgtagatttttctaaatatgtccattattgttggttttctcagttaagtaaggtctgaattggaatggagagatgtctaaaatgtgcttgtgaaacagaaattaggaggtagcgctccttgctgagtctgtgcacagccaatactacaagtccaatcatggacactgttttcaagatataataaaacagaatgagctgttta

SEQ ID NO: 7961 - DNA, 600 bp, Chicken  19866894202211_2
caagtccaatcatggacactgttttcaagatataataaaacagaatgagctgtttaagctcaatcctcatctcttgtagtcactgatttcacagtactttactttttcctagccagaatcatataatactagttaatggagtagtcagaaacacagaaatacagagtataaaaactcctgacatgatgggatccatctcctcagtctaacgtaaaatttctatatattttcccactatcagaatgtacttgtatctttatggatcaatgagaacaatatttacttcctgtggttaaaggraaaattcacctcagtagttaagggctaaaagarcgagaacaggttcttctgccatttcattatttttaaatggatataaaccaccattagaaaaaaaaaagtaatcaaatgtttatgtttctcagrcttgtgcagaaatatatattatgtatcacatttcctatttccaaaaaggcatttgttgttatttgaaaatagggcctatataattgaaaccatttgttttcagacgcttcagtgcgatataagtaatgacaacaataaccataaagattttaagatgcttatttaaattttagc

SEQ ID NO: 7962 - DNA, 600 bp, Chicken  19866894202211_3
aataaaacagaatgagctgtttaagctcaatcctcatctcttgtagtcactgatttcacagtactttactttttcctagccagaatcatataatactagttaatggagtagtcagaaacacagaaatacagagtataaaaactcctgacatgatgggatccatctcctcagtctaacgtaaaatttctatatattttcccactatcagaatgtacttgtatctttatggatcaatgagaacaatatttacttcctgtggttaaaggraaaattcacctcagtagttaagggctaaaagarcgagaacaggttcttctgccatttcattatttttaaatggatataaaccaccattagaaaaaaaaaagtaatcaaatgtttatgtttctcagrcttgtgcagaaatatatattatgtatcacatttcctatttccaaaaaggcatttgttgttatttgaaaatagggcctatataattgaaaccatttgttttcagacgcttcagtgcgatataagtaatgacaacaataaccataaagattttaagatgcttatttaaattttagctggactgaaactctcaaaagcactttgggggat

SEQ ID NO: 7963 - DNA, 600 bp, Chicken  19866894202211_4
tactagttaatggagtagtcagaaacacagaaatacagagtataaaaactcctgacatgatgggatccatctcctcagtctaacgtaaaatttctatatattttcccactatcagaatgtacttgtatctttatggatcaatgagaacaatatttacttcctgtggttaaaggraaaattcacctcagtagttaagggctaaaagarcgagaacaggttcttctgccatttcattatttttaaatggatataaaccaccattagaaaaaaaaaagtaatcaaatgtttatgtttctcagrcttgtgcagaaatatatattatgtatcacatttcctatttccaaaaaggcatttgttgttatttgaaaatagggcctatataattgaaaccatttgttttcagacgcttcagtgcgatataagtaatgacaacaataaccataaagattttaagatgcttatttaaattttagctggactgaaactctcaaaagcactttgggggatgttccacattcttcccttattcagtctggaaacataattagtataaagaggcttatgaaaattgggaaaatagcagagagaaacaccaaaatt

SEQ ID NO: 7964 - DNA, 600 bp, Chicken  19866894202215_1
ttcagaccctcttctacatatgaaatacatttgcaaagcaagcaagaaaaacaaaagaatttttttcaggaaactgtgactttttttttttttttccctactaaatctcactggaggagatacaactacaaagtaagtaaacgtcatacaaaatgacctcatgtccagtctttcaacaaaaaaacatctttcagatatcactagtctaaacattaagcttaaactattaagcacactatagtaagttaagcctcttgagacaagtggtttgaactcgcacaagattattgtagaatttayggaaacattatcctgttatctatgggttacagttgcaaaataaacatttcactctcttatctaaaatagaataaatatttgttattctattcttgctgatatcagctatctttcttgtcctaagaacaagaacaacctgttttcatgacagttttccacctcgtgatacaccttacgatacagttttctcctttaggcagcaacccacttttgttgcagtttgtttgtttgtttgtttgtttgtttgtttgttttccctccatcaaaaatttaatcagaaacacattgcataaactcgct

SEQ ID NO: 7965 - DNA, 600 bp, Chicken  19866894202221_1
aacttaagagctactttaattgttacggcttcagaatgtatcagtatcatgacctgacatgaacttactgtctgtgtagaagcaacagaatgttccacagtgccctgtaagagcactttggcacaccagtaacctagttctatttttgtcattccctctttctgtgagatcctcaggtaaaaatgggtgaggaaaggttatcatgttgtgtaattgggagcgaggatgcaaaacaactttatttatacagaagcattttgcagcttttgaagtacggcttctgaatgttctagtgctttktaaacccttytttacttaatttcctctattttcctgttttttcagagcatgtacctttgtrcagatcagcaaatcttcaatagatgctttgaaaggcctggattttctttggatgggtttatattgtagccccrttgctgttccttgcaatctaaagaaagcctgcattcataaggcttactgcatctgtgaaggatgaagaacaagtggaatgatgaactccggtagccatgaatggttggattgtcccagacacttgttcagttggcagtatattgtgatgtatttgggctggcaaaa

SEQ ID NO: 7966 - DNA, 600 bp, Chicken  19866894202221_2
ctactttaattgttacggcttcagaatgtatcagtatcatgacctgacatgaacttactgtctgtgtagaagcaacagaatgttccacagtgccctgtaagagcactttggcacaccagtaacctagttctatttttgtcattccctctttctgtgagatcctcaggtaaaaatgggtgaggaaaggttatcatgttgtgtaattgggagcgaggatgcaaaacaactttatttatacagaagcattttgcagcttttgaagtacggcttctgaatgttctagtgctttktaaacccttytttacttaatttcctctattttcctgttttttcagagcatgtacctttgtrcagatcagcaaatcttcaatagatgctttgaaaggcctggattttctttggatgggtttatattgtagccccrttgctgttccttgcaatctaaagaaagcctgcattcataaggcttactgcatctgtgaaggatgaagaacaagtggaatgatgaactccggtagccatgaatggttggattgtcccagacacttgttcagttggcagtatattgtgatgtatttgggctggcaaaaacgttagctt

SEQ ID NO: 7967 - DNA, 600 bp, Chicken  19866894202221_3
aacttactgtctgtgtagaagcaacagaatgttccacagtgccctgtaagagcactttggcacaccagtaacctagttctatttttgtcattccctctttctgtgagatcctcaggtaaaaatgggtgaggaaaggttatcatgttgtgtaattgggagcgaggatgcaaaacaactttatttatacagaagcattttgcagcttttgaagtacggcttctgaatgttctagtgctttktaaacccttytttacttaatttcctctattttcctgttttttcagagcatgtacctttgtrcagatcagcaaatcttcaatagatgctttgaaaggcctggattttctttggatgggtttatattgtagccccrttgctgttccttgcaatctaaagaaagcctgcattcataaggcttactgcatctgtgaaggatgaagaacaagtggaatgatgaactccggtagccatgaatggttggattgtcccagacacttgttcagttggcagtatattgtgatgtatttgggctggcaaaaacgttagctttggggaacatactggttttattaaaagcatgaaagagtactcagagggaat

SEQ ID NO: 7968 - DNA, 600 bp, Chicken  19866894202221_4
tagttctatttttgtcattccctctttctgtgagatcctcaggtaaaaatgggtgaggaaaggttatcatgttgtgtaattgggagcgaggatgcaaaacaactttatttatacagaagcattttgcagcttttgaagtacggcttctgaatgttctagtgctttktaaacccttytttacttaatttcctctattttcctgttttttcagagcatgtacctttgtrcagatcagcaaatcttcaatagatgctttgaaaggcctggattttctttggatgggtttatattgtagccccrttgctgttccttgcaatctaaagaaagcctgcattcataaggcttactgcatctgtgaaggatgaagaacaagtggaatgatgaactccggtagccatgaatggttggattgtcccagacacttgttcagttggcagtatattgtgatgtatttgggctggcaaaaacgttagctttggggaacatactggttttattaaaagcatgaaagagtactcagagggaatatattcaaagacagcatttgacgtactagtgtatccttcactcaagtgtgatttgtttatttctcactaaaag

SEQ ID NO: 7969 - DNA, 600 bp, Chicken  19866894202222_1
ctcctgggcacacaaaagccagtgcagacacgtctgacagccatacatggaggacagtatgctcatgggtaaagcttggtgggcatgaagcacctgggataggcaagggttaataggtaaatcaggggggagtaggagaacaaagtcaacatgaggaatatatatgtatggaggagacagaggacaaatggggaacaaggcaatggtgactagagggatacctgggggaattattgacttagatgtggcttcgattatcagaagcagaagcctttgtagctgagttacttgtcaggcaaygactccagttccaaatgccccaccttgcctgccttctgttaacaaagcattggaaaaatattgcccaagtctttacacaaagccttttgttggctggtcagcttcaaaaaacattycttttctcccccatctgacaacattgccatgaaaaacaggaagagattgaatgcagtaatttaaacagtcaaactccatttcctgccaaaaggaaaagaaaatactggcaaaaggcagaagccgggcgatagttggggacagaccttctgattatctcagacagatattcgcactgtgtatccg

SEQ ID NO: 7970 - DNA, 600 bp, Chicken  19866894202222_2
gtaaatcaggggggagtaggagaacaaagtcaacatgaggaatatatatgtatggaggagacagaggacaaatggggaacaaggcaatggtgactagagggatacctgggggaattattgacttagatgtggcttcgattatcagaagcagaagcctttgtagctgagttacttgtcaggcaaygactccagttccaaatgccccaccttgcctgccttctgttaacaaagcattggaaaaatattgcccaagtctttacacaaagccttttgttggctggtcagcttcaaaaaacattycttttctcccccatctgacaacattgccatgaaaaacaggaagagattgaatgcagtaatttaaacagtcaaactccatttcctgccaaaaggaaaagaaaatactggcaaaaggcagaagccgggcgatagttggggacagaccttctgattatctcagacagatattcgcactgtgtatccggtaaaagctacgatggtggaagtgacaccttttcatttcagggaatgcagattgttaggctgcagagcagcaggtgatgctgtaaggcagatcaggctgggagcagggttgcaacc

SEQ ID NO: 7971 - DNA, 600 bp, Chicken  19866894202222_3
tgagtgtgttgctgggaagggcggttggaactagatgattttcaaggtctcctccaacctaagccattctatgactctatgaggatttactgcaagccaagtctccaccaaggatccccattcttttcacatctccccagcaggccctggcacatgcacagttctctaggggcagtctccaatatcctcctcttcttcatccatccttgcgtgccccacatggcagttcatctgcttgttccctaagactgaacttctgtgcatcccagtaatgcagtttccacagggcttcaaaatgtrcccactggcaatcttatttcataacaccgaaaaacaacaaatctaccaatgattaagaccagtactgaaatggcccattcccayctctatcctcctatcaagctgcctcttttwaaaaaaaaaaaatcagcatgttgatacagcatgatgcatatttaaaactgccttctttatcctatattttctgatcattttctgtttagaaaaacaaacaaccttttcactctagagcagcccttccttctgccaatactctgcacatctgtacagcctctctctctctgctccgcagaatcacag

SEQ ID NO: 7972 - DNA, 600 bp, Chicken  19866894202222_4
atttactgcaagccaagtctccaccaaggatccccattcttttcacatctccccagcaggccctggcacatgcacagttctctaggggcagtctccaatatcctcctcttcttcatccatccttgcgtgccccacatggcagttcatctgcttgttccctaagactgaacttctgtgcatcccagtaatgcagtttccacagggcttcaaaatgtrcccactggcaatcttatttcataacaccgaaaaacaacaaatctaccaatgattaagaccagtactgaaatggcccattcccayctctatcctcctatcaagctgcctcttttwaaaaaaaaaaaatcagcatgttgatacagcatgatgcatatttaaaactgccttctttatcctatattttctgatcattttctgtttagaaaaacaaacaaccttttcactctagagcagcccttccttctgccaatactctgcacatctgtacagcctctctctctctgctccgcagaatcacagaatcattaagactggaaagaccactagtccaaccatcaacccatgtctacgatcactctaaactcagtcccacatctaccctct

SEQ ID NO: 7973 - DNA, 600 bp, Chicken  19866894202222_5
tccccattcttttcacatctccccagcaggccctggcacatgcacagttctctaggggcagtctccaatatcctcctcttcttcatccatccttgcgtgccccacatggcagttcatctgcttgttccctaagactgaacttctgtgcatcccagtaatgcagtttccacagggcttcaaaatgtrcccactggcaatcttatttcataacaccgaaaaacaacaaatctaccaatgattaagaccagtactgaaatggcccattcccayctctatcctcctatcaagctgcctcttttwaaaaaaaaaaaatcagcatgttgatacagcatgatgcatatttaaaactgccttctttatcctatattttctgatcattttctgtttagaaaaacaaacaaccttttcactctagagcagcccttccttctgccaatactctgcacatctgtacagcctctctctctctgctccgcagaatcacagaatcattaagactggaaagaccactagtccaaccatcaacccatgtctacgatcactctaaactcagtcccacatctaccctcttcttgaacacctccggagtttgtgactcca

SEQ ID NO: 7974 - DNA, 600 bp, Chicken  19866894202222_6
ccccattcttttcacatctccccagcaggccctggcacatgcacagttctctaggggcagtctccaatatcctcctcttcttcatccatccttgcgtgccccacatggcagttcatctgcttgttccctaagactgaacttctgtgcatcccagtaatgcagtttccacagggcttcaaaatgtrcccactggcaatcttatttcataacaccgaaaaacaacaaatctaccaatgattaagaccagtactgaaatggcccattcccayctctatcctcctatcaagctgcctcttttwwaaaaaaaaaaatcagcatgttgatacagcatgatgcatatttaaaactgccttctttatcctatattttctgatcattttctgtttagaaaaacaaacaaccttttcactctagagcagcccttccttctgccaatactctgcacatctgtacagcctctctctctctgctccgcagaatcacagaatcattaagactggaaagaccactagtccaaccatcaacccatgtctacgatcactctaaactcagtcccacatctaccctcttcttgaacacctccggagtttgtgactccat

SEQ ID NO: 7975 - DNA, 600 bp, Chicken  19866894202222_7
ccagagatattacctgcaactattcatcacctgggtgaacatccccaatttgcaaatcaactgcccagacataaaaatccatctttttttttttttttttcttttttccctgatttatgctgaagattaagaggacagctataacgcaggagagaaatgtacatcaaggattgtccattcatctctggtctttcccaggccagacttgaccaaagtgcaaggacagtgcggtgagcccaactccagggtccaagagtaaatatcccaaggaagggctggagtatgtcttctaacagtgtkttctctgcaatgctcagtgggggtttcccacagcttctctttacccatctgctcactgagtaccayaccagctgtatctatacacatgcaggattttggctgctggatgcagggcagatctgaacttcaagtccaagcttgatcatgtgcaggttagacttctatcctgcactagcagagacacatttgatatccaaatttaaaaataataataattaaaaaaaaaacatatgaaaagttacactggtagctttataattggttttatgtctgctccaatccacttgcaaaaaggcagag

SEQ ID NO: 7976 - DNA, 600 bp, Chicken  19866894202222_8
agacataaaaatccatctttttttttttttttttcttttttccctgatttatgctgaagattaagaggacagctataacgcaggagagaaatgtacatcaaggattgtccattcatctctggtctttcccaggccagacttgaccaaagtgcaaggacagtgcggtgagcccaactccagggtccaagagtaaatatcccaaggaagggctggagtatgtcttctaacagtgtkttctctgcaatgctcagtgggggtttcccacagcttctctttacccatctgctcactgagtaccayaccagctgtatctatacacatgcaggattttggctgctggatgcagggcagatctgaacttcaagtccaagcttgatcatgtgcaggttagacttctatcctgcactagcagagacacatttgatatccaaatttaaaaataataataattaaaaaaaaaacatatgaaaagttacactggtagctttataattggttttatgtctgctccaatccacttgcaaaaaggcagagcagcagtgctggtggactgctggcaagcaggacatccatcagcaacagagatgaggccctcatgga

SEQ ID NO: 7977 - DNA, 600 bp, Chicken  19866894202237_1
acattttgtaggccatgcataggccttacttttgaaacagattccagacacgcaactagggttaccttcccgtgacagccagtacagatacaaaggcatctcttctctgcaacagagcagcattctgagcaagctttctagcagataatatccaatctcttatctgagctctcatcatctgataaaacagcatcagttacacacaagagcttagatatcgcatcataccagaaagcaaaagagtagacaagagaagagaaaaacaaaatggaattctcctgtaatgctgaaggtagagaytgaagctctccagcacgtatcaacgttctatttttctagactggtctcaagaccaagtgatgactattccattttgttagtcacagctgagatagacatcgaacattcccttacttaataggaagtaatattggcgctgtttctaaataagaaaaaacagtgctgttatattacatttttaagttgtatttttggaagcagctggaatacactgaaagaatgactgacatttgtttacaacacatttcaaactgcatgactgacaagacaaaaacaggtagaatacgtggcacgctttgt

SEQ ID NO: 7978 - DNA, 600 bp, Chicken  19866894202237_2
aggtggctgccttttcctcacagttgaacttaaattcatgaaagaaataatccacaaagataaggcagtaatttcaccaagagacattttaaattaagaaagcatacacacgacgaacttcagagactttacattccagcaagaggagggcagttttatcaaggtgctgaggcatttcatttcttttacagttgttacagaattacgtgtagcagaaaaacacctttgggacaggaaatagctacccgttaaacagcggaacatccttttctgtcttcttactcctcctcggaagccaawgccacatgactgcatgtcttcatttgtctaaagaccgagatatcggaaatcacatccagtgtggcaccattacaaggcactgcagttacccttaaggatgcaataaactaaactttcaatacttagccattaaaactggcaacgtgtcctcagacaaaaggagagaacagaattgatgttactttcaatccccttccaaaaaggagttctcctgccgtgaggaaaaacaatcaaaagaatttgcactccactgtttcgttctctgacaaaaactggctaatgcacctacagttaaaacac

SEQ ID NO: 7979 - DNA, 400 bp, Chicken  19866894202237_3
ccttaaggatgcaataaactaaactttcaatacttagccattaaaactggcaacgtgtcctcagacaaaaggagagaacagaattgatgttactttcaatccccttccaaaaaggagttctcctgccgtgaggaaaaacaatcaaaagaatttgcactccactgtttcgttctctgacaaaaactggctaatgcacctacagttaaaacacacttccttcttcctcctgctttaaccttcaaaaagaaactcaagtgcactaagcctgtcgaacacgcagttcccttgctctccttctcytgtcattatgcacacataatggtacacctaagagcctcacttaacactaaccgaaatagtttgtgtgttccaaaggagaagagaggaagagaaagcagtc

SEQ ID NO: 7980 - DNA, 600 bp, Chicken  19866894202240_1
tgtgaccataaaacacaggctagcacattccttgtcttgcaaagcagaagtgaggaataagctctaccactacagactggttcatatcgtcactaaaggatatattttagtgatgggactcagtaggtcaggttggtggttgaacataatggtcttgaaggtcttctcaaacctagatgactttaaaattctatgtattatttatattcctgtgaatcggtgaaggaattctcacctttagacaccagggaccacaagtctccactcctttctggatgtctggttcagctggtgatggaytggggaggtgtaccttgttgtctgtgtcatcaaatggcaattgcttgtcagcttcaggtctggcaacctacagcatggagtttgggttagactgatgatccaccaggttttgggccagacatcacatatcaaccctcaacatgtctcattggtgaagggcgaatggttggactggatgatcctgtgggtcttttccaaccttagcgattctatgattctatgattctaagtcaggattggacccagtattctaaatctgttacttcctttctttgaaactttgctgaggaaagaagattg

SEQ ID NO: 7981 - DNA, 600 bp, Chicken  19866894202241_1
tggacatgctccagggccttgatgtctttgttgttatgaggggcccaaagtttaacacagtattcttgatatatctcaccaagtacaagtgccttgcacaggtagacaatcaccccactgtgccattctgttgcattttgaagtgattaacaaatgtgtaaagcacagcttatttcataacatcacttttcttggatttttctttagaatctacacacatctacaaacatcaatcacaatacttttccaatgcaatggtatttaaaagaaacctttgtgatcatctctaccacaggatcycagcagaatgttaaagaaccccagaaaacaggagtgagaacatgtcacacagaaactacctataggttcttcttcccaaccttcatcaccattcccactcttttgcagcatttccttcccacccttttggtagcagaaggaacaacctgggcagctcacaagtggaggtagcaagacaaaggctttcctcagccctcagtgcattgtctcacagagacactgagtgaggtgacaggtctagtggggagccactgcgataaygtccacagctgttgtgccagggcaagacagcaggttagt

SEQ ID NO: 7982 - DNA, 600 bp, Chicken  19866894202241_2
ttaaaagaaacctttgtgatcatctctaccacaggatcycagcagaatgttaaagaaccccagaaaacaggagtgagaacatgtcacacagaaactacctataggttcttcttcccaaccttcatcaccattcccactcttttgcagcatttccttcccacccttttggtagcagaaggaacaacctgggcagctcacaagtggaggtagcaagacaaaggctttcctcagccctcagtgcattgtctcacagagacactgagtgaggtgacaggtctagtggggagccactgcgataaygtccacagctgttgtgccagggcaagacagcaggttagtcaaacacaactrtcacactcctatccagacttcctttatcccattaagtttccacaattgtcagtatagaattatcctcaggctctttaacttttgatgaaggtagatctaaaattaatagaaaatgagaagagtaatccatatcatccttccagtataagaatgtagccctcatctctagcttgagggcatagttggtatactgcaaactgcccacctacaatgaggctgtagatgcaggcacaagtaggcaagtgcaaa

SEQ ID NO: 7983 - DNA, 600 bp, Chicken  19866894202241_3
aaagaaccccagaaaacaggagtgagaacatgtcacacagaaactacctataggttcttcttcccaaccttcatcaccattcccactcttttgcagcatttccttcccacccttttggtagcagaaggaacaacctgggcagctcacaagtggaggtagcaagacaaaggctttcctcagccctcagtgcattgtctcacagagacactgagtgaggtgacaggtctagtggggagccactgcgataaygtccacagctgttgtgccagggcaagacagcaggttagtcaaacacaactrtcacactcctatccagacttcctttatcccattaagtttccacaattgtcagtatagaattatcctcaggctctttaacttttgatgaaggtagatctaaaattaatagaaaatgagaagagtaatccatatcatccttccagtataagaatgtagccctcatctctagcttgagggcatagttggtatactgcaaactgcccacctacaatgaggctgtagatgcaggcacaagtaggcaagtgcaaaaggaaattttccagttataaatatttggtagccctcttttcttttcctctc

SEQ ID NO: 7984 - DNA, 600 bp, Chicken  19866894202249_1
ctagtagtgtaactaactagatgcatgcagctgaaattgcaagaatgctgctgttgcactatgagccttttcaaaaaggttcagatggttgggtgtttctcttcaccgagagaaaatgtttttcttcattttctgttaagctttggtagcttaatgcagttttaatcatatgacagtactctgtgacctccggttacaaattcccaagctggataattgtctctggactaaggaactcaagactgaacaaagtgagagccttgggactttgtggtaaagtttttaagagcatagtaacgkacttctgtacaaaatttctttactgatctgaaaaattccagagcgggtttgagagtcattaacttaaggactttaaagttagcttgatgactgttcttgatttatttacttttttccttctgatggtcaactatttgaaggttttcatacagtcattcataagtctagcatagaaatgaaatgaaattgctgctattttccgtggtaatcttgtttggattagtaaaccaatgtttatagcctttctatttattaagattacaaattcagtaaagatgagtagtagagttatgaatatca

SEQ ID NO: 7985 - DNA, 599 bp, Chicken  19866894202256_1
  misc_feature (1)..(72): n is any nucleotide
nnnnnnnnnnnnnnnnnnnnnnnnnnnnnnnnnnnnnnnnnnnnnnnnnnnnnnnnnnnnnnnnnnnnnnnncgtgatttgcagctagtggcacactgagctccacagcacgcctggaaatgctcaggtgaaacaaagggggagagacagctgttctgtcttgataccactgaggtctggctgcatactgtcatcgatcccaactctcactcaacatatttgggcagttaaggcattttttttcttataagagagacatctctaggttaaatgctgcactgcaacccatgtggtacgtcyggtctacccactgcacaagcarctcttatggttgatggagagacccatcagcctccacatttttataaaagattgtttggttagctcatgaggcagtgttgctattgccaaagggttttgctccccaagcctgtgctgaatattgtattattttgccatgctcagaaactaaaattacaacaatttaattttgaatatggtggcattattaccatttgtatttgccatttcataagacttttcattttaactgctttgctttcctgtcaagaggaaaaaccttcaatctattggctttt

SEQ ID NO: 7986 - DNA, 599 bp, Chicken  19866894202256_2
  misc_feature (1)..(50): n is any nucleotide
nnnnnnnnnnnnnnnnnnnnnnnnnnnnnnnnnnnnnnnnnnnnnnnnnncgtgatttgcagctagtggcacactgagctccacagcacgcctggaaatgctcaggtgaaacaaagggggagagacagctgttctgtcttgataccactgaggtctggctgcatactgtcatcgatcccaactctcactcaacatatttgggcagttaaggcattttttttcttataagagagacatctctaggttaaatgctgcactgcaacccatgtggtacgtcyggtctacccactgcacaagcarctcttatggttgatggagagacccatcagcctccacatttttataaaagattgtttggttagctcatgaggcagtgttgctattgccaaagggttttgctccccaagcctgtgctgaatattgtattattttgccatgctcagaaactaaaattacaacaatttaattttgaatatggtggcattattaccatttgtatttgccatttcataagacttttcattttaactgctttgctttcctgtcaagaggaaaaaccttcaatctattggcttttaccagagagagaactgtgctgg

SEQ ID NO: 7987 - DNA, 600 bp, Chicken  19866894202262_1
atagctgcctggaggtgctgctttatcaaagtctggaggctgtgcattcaccttcctgactcaccagtgagcctgaacagaagcatttactggcttccacacaaacttcaggtttggttctttctcttcagaagtctgactacttataattcatgacaatgctgtaagatggtacaatagggcacgggatatatttaagcataaagacatctgctctgggtcagttgaggcagcaaattttattatttgtttttgggtaactacagtttctttcttacatgttattttacaaatcactaraagtgaggtgtgcgcacagttccttatgttgactgcagaaaaggtgtaatgaagatgacgtttgctgtagaatagcagctgagatattctacaaaagaaaagagtttcaacttttatacttactggaaaaaagcatatttttggcttctagtctaacaagtttagctttttcccaacagttaatcctcatttgtatttaagttgccactctctccagctatttatccttatcctcaggagctgacagggagcagacacgctgccaagaagccatcctccttggaagatagaagcaaggtc

SEQ ID NO: 7988 - DNA, 600 bp, Chicken  19866894202262_2
gagtttcaacttttatacttactggaaaaaagcatatttttggcttctagtctaacaagtttagctttttcccaacagttaatcctcatttgtatttaagttgccactctctccagctatttatccttatcctcaggagctgacagggagcagacacgctgccaagaagccatcctccttggaagatagaagcaaggtcctcctcccatccaggagctcaggcgcataagaatgaagcaggctctgttctccctttgcagacacacagtgctcctgcacaccactgacctggcaagaaawggtcctaaacgtgccccagaccccgagacacctggccggcttctttaaccttttcatggaggccttctaagctaagtaatttatttatagtaatatttatccctctcagacattttcctggggcggtctctttcatacttctcttcttctgattagtttccatagtgacacttatttgtagagtttagagttgctcctagcaggtttctgcaaatgccagccgcatgtgcgccatgttaataagacaaagccagccctagttctttccttttggtggtttgattttgctctgtgtttggg

SEQ ID NO: 7989 - DNA, 557 bp, Chicken  19866894202262_3
ctaaacgtgccccagaccccgagacacctggccggcttctttaaccttttcatggaggccttctaagctaagtaatttatttatagtaatatttatccctctcagacattttcctggggcggtctctttcatacttctcttcttctgattagtttccatagtgacacttatttgtagagtttagagttgctcctagcaggtttctgcaaatgccagccgcatgtgcgccatgttaataagacaaagccagccctagttctttccttttggtggtttgattttgctctgtgtttgggagckcccttggggaaaacaaaacaaaacaaaacaaaaagaagtggggcagaggctctttggatcccagaaggttatttttctgggtggtacttttgactgagctagttctgtctgaatgtcagtggcaggctctgaagtgctgtctgtctgcgtgaactattatataagcgagggaaaccttccattacagcaaggcctttagactgctgctttatttaaaatgcagaattacatcaaaaagcaattcagttgagtggtgc

SEQ ID NO: 7990 - DNA, 600 bp, Chicken  19866894202265_1
cagtgttatttaatgagcagtaactccaaaaagaatttgtgaaaaacgatgaagattttttcagaaaccttcatgaagtagtcacacttgatacagcataattctgatctgtgtatctatgcataaaatatacaaacttattcatatgtatgtttctgaggcaaactagggcaacactgtgaatgttttcctaatgctgttttagaagcacggagcagatgatactgatgttctggtctaggacgtgctcagataaggtttgctcagagtgtaattctaatgcaagcagctgtgctgaawtgaacaaagccccatgaaaagagatacagctacccaagcaaaatgcttttgtaggtccatggtgggtattgcaaatttcaagaggcagtcaaaggtataggctgttcactaagctgcatagcacagggacatgaaagtcttaaaactcaattatattttttggtggagggccaaggtgattttaaaaagtacatgcaggatgaaattaagtacaaaagactgtactgaaggaacctgcaaaatacaatggccctctgttattgcatagtttggttatgcaaaacagagcaacttcttgaa

SEQ ID NO: 7991 - DNA, 599 bp, Chicken  19866894202267_1
  misc_feature (1)..(205): n is any nucleotide
nnnnnnnnnnnnnnnnnnnnnnnnnnnnnnnnnnnnnnnnnnnnnnnnnnnnnnnnnnnnnnnnnnnnnnnnnnnnnnnnnnnnnnnnnnnnnnnnnnnnnnnnnnnnnnnnnnnnnnnnnnnnnnnnnnnnnnnnnnnnnnnnnnnnnnnnnnnnnnnnnnnnnnnnnnnnnnnnnnnnnnnnnnnnnnnnnnnnnnnnnnnnncagtctcaagagaagctggtcctgctcgcttgccatgttggtttctgcaagtccaagcagccgaaccatctccataagcagaagaaaagcccctygtgtctgcacctgtgtggagagaagtggagagctttgctggtgtgggtcctgagctcagactgactgcagcctgggctgctgaggtgccatgagaatgtctggaagtggcaaaatgcagtcccttcccaaaatcgtgtcttcagagacaaagaccagtgaccagcaaggcacgaygtgttrgaagcagcctagtatgaagaaaggggcatcgccatttcagtaggcctaacaggaaccttatcaaagcttctctcaggcatccaggccacaaatcaaatgatgaaggaagtgagactgc

SEQ ID NO: 7992 - DNA, 599 bp, Chicken  19866894202267_2
  misc_feature (1)..(30): n is any nucleotide
nnnnnnnnnnnnnnnnnnnnnnnnnnnnnncagtctcaagagaagctggtcctgctcgcttgccatgttggtttctgcaagtccaagcagccgaaccatctccataagcagaagaaaagcccctygtgtctgcacctgtgtggagagaagtggagagctttgctggtgtgggtcctgagctcagactgactgcagcctgggctgctgaggtgccatgagaatgtctggaagtggcaaaatgcagtcccttcccaaaatcgtgtcttcagagacaaagaccagtgaccagcaaggcacgaygtgttrgaagcagcctagtatgaagaaaggggcatcgccatttcagtaggcctaacaggaaccttatcaaagcttctctcaggcatccaggccacaaatcaaatgatgaaggaagtgagactgcatgtcgaatagtctctgaccaccagaactgcaaagcctttgacagattttttgctgagcaacatgctgccttggcaagctgcagtgtgtcaagcagtgggagatggagaattgcagctcctgtgtgtaatgatgtgctgtgggactacatgggatctggcctttctcttggaggt

SEQ ID NO: 7993 - DNA, 599 bp, Chicken  19866894202267_3
  misc_feature (1)..(24): n is any nucleotide
nnnnnnnnnnnnnnnnnnnnnnnncagtctcaagagaagctggtcctgctcgcttgccatgttggtttctgcaagtccaagcagccgaaccatctccataagcagaagaaaagcccctygtgtctgcacctgtgtggagagaagtggagagctttgctggtgtgggtcctgagctcagactgactgcagcctgggctgctgaggtgccatgagaatgtctggaagtggcaaaatgcagtcccttcccaaaatcgtgtcttcagagacaaagaccagtgaccagcaaggcacgaygtgttrgaagcagcctagtatgaagaaaggggcatcgccatttcagtaggcctaacaggaaccttatcaaagcttctctcaggcatccaggccacaaatcaaatgatgaaggaagtgagactgcatgtcgaatagtctctgaccaccagaactgcaaagcctttgacagattttttgctgagcaacatgctgccttggcaagctgcagtgtgtcaagcagtgggagatggagaattgcagctcctgtgtgtaatgatgtgctgtgggactacatgggatctggcctttctcttggaggtgaagct

SEQ ID NO: 7994 - DNA, 600 bp, Chicken  19866894202268_1
tggcaaatcttagcaattttgtcaaacctcgccctgactgacagaaaacaggaggtcctctcttgacgaactgccactatacaaccaaaaaaaccaagtaggttatcttactcgttttgaccatgaaaacaggactgtttgttccaaggcgtcgagcttgagctggcaaaaaccagcaggagagtaacattacagcactgtgctaccagtttgaaacgctggtaacacaacgctcttgtacgcatggaactgtactctgctatgttcccctgataatctcccacgcttgtaggtagaccrcatgcacagaagcacattctaagggtaacgctgggtcagagtcagagctgctgttctcagagattayttctctttgtttgaattggtgccacgcatcacccaaatgactctcttgatttttctttctttctttatcctgaagccgcgatgaagatgaaattcggcccgtgcaacagcaggatctccacagggcaattgagaagatgaggaaatcaaagaatgccacgcttcatgatgacctgatgcatgtcattatagattaaggctaaggagtgcgcttgctgtttctgatgtgatgtg

SEQ ID NO: 7995 - DNA, 600 bp, Chicken  19866894202268_2
gaactgccactatacaaccaaaaaaaccaagtaggttatcttactcgttttgaccatgaaaacaggactgtttgttccaaggcgtcgagcttgagctggcaaaaaccagcaggagagtaacattacagcactgtgctaccagtttgaaacgctggtaacacaacgctcttgtacgcatggaactgtactctgctatgttcccctgataatctcccacgcttgtaggtagaccrcatgcacagaagcacattctaagggtaacgctgggtcagagtcagagctgctgttctcagagattayttctctttgtttgaattggtgccacgcatcacccaaatgactctcttgatttttctttctttctttatcctgaagccgcgatgaagatgaaattcggcccgtgcaacagcaggatctccacagggcaattgagaagatgaggaaatcaaagaatgccacgcttcatgatgacctgatgcatgtcattatagattaaggctaaggagtgcgcttgctgtttctgatgtgatgtgatttgtattctgtaatcagtttgtgagagcaacgtaaggggctgggagtggggacactccttgagtg

SEQ ID NO: 7996 - DNA, 599 bp, Chicken  19866894202279_1
  misc_feature (1)..(142): n is any nucleotide
nnnnnnnnnnnnnnnnnnnnnnnnnnnnnnnnnnnnnnnnnnnnnnnnnnnnnnnnnnnnnnnnnnnnnnnnnnnnnnnnnnnnnnnnnnnnnnnnnnnnnnnnnnnnnnnnnnnnnnnnnnnnnnnnnnnnnnnnnnnnnncttgaccttaagaaatggtgatagagtagtttcaataccgatctaacttctggccatagaaaatgcaatctgcaagaaaaaatgactattttggcttagcgttgtttggtaatggtaggcctgggcagctttgtgcagtctgagaactaataaaacamcaattgtcataatacagctgattgtcacaatgatgtcttctaagatttaatttttgctttaaattactgtagttgctatagctagtccttgctgtgacaaatacgagaggtgctgactgaagcaaaaccacagctgttgttgaaaactcggaggctgatgagtgataaactaattttcgtaaggtgaaagttgcatttttcagccggaagtgagggtgctaactcttacaggctagagcttcttttatgagtgatgaaatatgtggtatgtgtggtgagaaatctgggtagaaatagaa

SEQ ID NO: 7997 - DNA, 599 bp, Chicken  19866894202280_1
  misc_feature (1)..(185): n is any nucleotide
nnnnnnnnnnnnnnnnnnnnnnnnnnnnnnnnnnnnnnnnnnnnnnnnnnnnnnnnnnnnnnnnnnnnnnnnnnnnnnnnnnnnnnnnnnnnnnnnnnnnnnnnnnnnnnnnnnnnnnnnnnnnnnnnnnnnnnnnnnnnnnnnnnnnnnnnnnnnnnnnnnnnnnnnnnnnnnnnnnnnnnnnnatgatggaaaagaaaacacaccccacaccaggctgtgcaatggagggcagccacgctcccgccatggtgctgagcacgggacgctccggtggtcacaaatggagaaagaggggawwgaagcaataccccaatgccagattaaaagcttgcagaatggcagctccacctgggttttgggctgctctccgttcacagccctargtctgcctgacttcaaagctttgtcagracgtgcctcaccragatgtcagatggtctgccggagcaagctcttggagaagcaagcacaactcgctgtcacacactcactamaaagccagaaaaccttgtcccttccaacagcagtttggtgaacatgcaagtatacgcagtacatgcaaacatgattacttaaaacatttgtgacactcttct

SEQ ID NO: 7998 - DNA, 599 bp, Chicken  19866894202280_2
  misc_feature (1)..(184): n is any nucleotide
nnnnnnnnnnnnnnnnnnnnnnnnnnnnnnnnnnnnnnnnnnnnnnnnnnnnnnnnnnnnnnnnnnnnnnnnnnnnnnnnnnnnnnnnnnnnnnnnnnnnnnnnnnnnnnnnnnnnnnnnnnnnnnnnnnnnnnnnnnnnnnnnnnnnnnnnnnnnnnnnnnnnnnnnnnnnnnnnnnnnnnnnatgatggaaaagaaaacacaccccacaccaggctgtgcaatggagggcagccacgctcccgccatggtgctgagcacgggacgctccggtggtcacaaatggagaaagaggggawwgaagcaataccccaatgccagattaaaagcttgcagaatggcagctccacctgggttttgggctgctctccgttcacagccctargtctgcctgacttcaaagctttgtcagracgtgcctcaccragatgtcagatggtctgccggagcaagctcttggagaagcaagcacaactcgctgtcacacactcactamaaagccagaaaaccttgtcccttccaacagcagtttggtgaacatgcaagtatacgcagtacatgcaaacatgattacttaaaacatttgtgacactcttcta

SEQ ID NO: 7999 - DNA, 599 bp, Chicken  19866894202280_3
  misc_feature (1)..(99): n is any nucleotide
nnnnnnnnnnnnnnnnnnnnnnnnnnnnnnnnnnnnnnnnnnnnnnnnnnnnnnnnnnnnnnnnnnnnnnnnnnnnnnnnnnnnnnnnnnnnnnnnnnnatgatggaaaagaaaacacaccccacaccaggctgtgcaatggagggcagccacgctcccgccatggtgctgagcacgggacgctccggtggtcacaaatggagaaagaggggawwgaagcaataccccaatgccagattaaaagcttgcagaatggcagctccacctgggttttgggctgctctccgttcacagccctargtctgcctgacttcaaagctttgtcagracgtgcctcaccragatgtcagatggtctgccggagcaagctcttggagaagcaagcacaactcgctgtcacacactcactamaaagccagaaaaccttgtcccttccaacagcagtttggtgaacatgcaagtatacgcagtacatgcaaacatgattacttaaaacatttgtgacactcttctagggtaacataataacacatgccaaatgcaagaagcatttgttcctcacgcagcaggtaggaaatacccttgaaggcttttcaacc

SEQ ID NO: 8000 - DNA, 599 bp, Chicken  19866894202280_4
  misc_feature (1)..(71): n is any nucleotide
nnnnnnnnnnnnnnnnnnnnnnnnnnnnnnnnnnnnnnnnnnnnnnnnnnnnnnnnnnnnnnnnnnnnnnnatgatggaaaagaaaacacaccccacaccaggctgtgcaatggagggcagccacgctcccgccatggtgctgagcacgggacgctccggtggtcacaaatggagaaagaggggawwgaagcaataccccaatgccagattaaaagcttgcagaatggcagctccacctgggttttgggctgctctccgttcacagccctargtctgcctgacttcaaagctttgtcagracgtgcctcaccragatgtcagatggtctgccggagcaagctcttggagaagcaagcacaactcgctgtcacacactcactamaaagccagaaaaccttgtcccttccaacagcagtttggtgaacatgcaagtatacgcagtacatgcaaacatgattacttaaaacatttgtgacactcttctagggtaacataataacacatgccaaatgcaagaagcatttgttcctcacgcagcaggtaggaaatacccttgaaggcttttcaaccctatatcccraagtatctaataaaaaga

SEQ ID NO: 8001 - DNA, 599 bp, Chicken  19866894202280_5
  misc_feature (1)..(58): n is any nucleotide
nnnnnnnnnnnnnnnnnnnnnnnnnnnnnnnnnnnnnnnnnnnnnnnnnnnnnnnnnnatgatggaaaagaaaacacaccccacaccaggctgtgcaatggagggcagccacgctcccgccatggtgctgagcacgggacgctccggtggtcacaaatggagaaagaggggawwgaagcaataccccaatgccagattaaaagcttgcagaatggcagctccacctgggttttgggctgctctccgttcacagccctargtctgcctgacttcaaagctttgtcagracgtgcctcaccragatgtcagatggtctgccggagcaagctcttggagaagcaagcacaactcgctgtcacacactcactamaaagccagaaaaccttgtcccttccaacagcagtttggtgaacatgcaagtatacgcagtacatgcaaacatgattacttaaaacatttgtgacactcttctagggtaacataataacacatgccaaatgcaagaagcatttgttcctcacgcagcaggtaggaaatacccttgaaggcttttcaaccctatatcccraagtatctaataaaaagaaaaatcactgttc

SEQ ID NO: 8002 - DNA, 600 bp, Chicken  19866894202280_6
aaaacacaccccacaccaggctgtgcaatggagggcagccacgctcccgccatggtgctgagcacgggacgctccggtggtcacaaatggagaaagaggggawwgaagcaataccccaatgccagattaaaagcttgcagaatggcagctccacctgggttttgggctgctctccgttcacagccctargtctgcctgacttcaaagctttgtcagracgtgcctcaccragatgtcagatggtctgccggagcaagctcttggagaagcaagcacaactcgctgtcacacactcactamaaagccagaaaaccttgtcccttccaacagcagtttggtgaacatgcaagtatacgcagtacatgcaaacatgattacttaaaacatttgtgacactcttctagggtaacataataacacatgccaaatgcaagaagcatttgttcctcacgcagcaggtaggaaatacccttgaaggcttttcaaccctatatcccraagtatctaataaaaagaaaaatcactgttcctcattttacaggtgagtacacagaggygtaatggccttatcaagatccaacacaaacctgaaggagagtt

SEQ ID NO: 8003 - DNA, 600 bp, Chicken  19866894202280_7
acttcaaagctttgtcagracgtgcctcaccragatgtcagatggtctgccggagcaagctcttggagaagcaagcacaactcgctgtcacacactcactamaaagccagaaaaccttgtcccttccaacagcagtttggtgaacatgcaagtatacgcagtacatgcaaacatgattacttaaaacatttgtgacactcttctagggtaacataataacacatgccaaatgcaagaagcatttgttcctcacgcagcaggtaggaaatacccttgaaggcttttcaaccctatatcccraagtatctaataaaaagaaaaatcactgttcctcattttacaggtgagtacacagaggygtaatggccttatcaagatccaacacaaacctgaaggagagttgggaatagaactccatttcccaagcctagccaaatgttttccaaagcacacagttctctcagatttcattaagaaagaaaaaatcctgcagaataccactagaactgtgtaaggctatcctaattccacaccttctcacatcctttagagccttcccatgggtgataacagccctagaccagccacaggaggtgaaac

SEQ ID NO: 8004 - DNA, 600 bp, Chicken  19866894202280_8
ctcttggagaagcaagcacaactcgctgtcacacactcactamaaagccagaaaaccttgtcccttccaacagcagtttggtgaacatgcaagtatacgcagtacatgcaaacatgattacttaaaacatttgtgacactcttctagggtaacataataacacatgccaaatgcaagaagcatttgttcctcacgcagcaggtaggaaatacccttgaaggcttttcaaccctatatcccraagtatctaataaaaagaaaaatcactgttcctcattttacaggtgagtacacagaggygtaatggccttatcaagatccaacacaaacctgaaggagagttgggaatagaactccatttcccaagcctagccaaatgttttccaaagcacacagttctctcagatttcattaagaaagaaaaaatcctgcagaataccactagaactgtgtaaggctatcctaattccacaccttctcacatcctttagagccttcccatgggtgataacagccctagaccagccacaggaggtgaaacacatatacttaatacagaaatttctttcagcttaagtaactgcattcctacttcacagg

SEQ ID NO: 8005 - DNA, 599 bp, Chicken  19866894202285_1
  misc_feature (1)..(131): n is any nucleotide
nnnnnnnnnnnnnnnnnnnnnnnnnnnnnnnnnnnnnnnnnnnnnnnnnnnnnnnnnnnnnnnnnnnnnnnnnnnnnnnnnnnnnnnnnnnnnnnnnnnnnnnnnnnnnnnnnnnnnnnnnnnnnnnnnnntgcacccactgccccttgtcctgccattgcacaccactacaaagagcctggccccgtccacttgactgccaccctttaggtactgctaagcactgatgagaccccccctccagccttctccaagctcagcagtcccaggtctctcagcctttcccctggctgctggcaytggatcctgaaaccttttcttttgcactgggaagcatcttattctgcactcaaaaggctgtgtctttactttgtcaatctttttaaaggtttttgaatcgaacgaggagtctggtcatcttatccttaccattgttgtttctggccatttctttatttcccaaggaagaacagtgctggtgagttgtttagtttcttgtgtataaagaacatttctcctttgttgttagagttaatactggcttatttttcccatctcagtttcatgttctctccctatgaaactgccaattttgctgt

SEQ ID NO: 8006 - DNA, 531 bp, Chicken  19866894202285_2
attctgcactcaaaaggctgtgtctttactttgtcaatctttttaaaggtttttgaatcgaacgaggagtctggtcatcttatccttaccattgttgtttctggccatttctttatttcccaaggaagaacagtgctggtgagttgtttagtttcttgtgtataaagaacatttctcctttgttgttagagttaatactggcttatttttcccatctcagtttcatgttctctccctatgaaactgccaattttgctgtattcatggaaggtgctgcatggtatttactcttttcatttrgactaatactacaagtattatttcatacagacaagcagcatttcttctgtgtttctgcaaatctagtttaagacaatagtgctgcagagtttgagagatgctagtacttctttttgtccaacgtgattcttcagcctaagaaaaacagaatatacccttaggaaatggataaaaatgtaacttcttggaatatttgccctatgatccaactagtttcttgccagtcatctg

SEQ ID NO: 8007 - DNA, 600 bp, Chicken  19866894202288_1
actgtgcatatgttatttgaaatctgggtgggaccacgcagtaagggaaccaatgaactatgttaatagactttgcctacgtttggaattgacttacagttttgtcattctggtggtatcactctgctgcatctctcctatttcaagcatgtatatttaatgaagcattaacagagaaacaagcaaacgtacagaccacaagatctaaagcctgtcctgttctccaaaagtaactactggaacagagagattgcagaatttcatctctcacattgactctgccaaaaaaaacaaaagtcyagggatatcttttaagataccatattttaaatgaggtatttgtatgtatcagaaacaaagcaattgctgccattcacatcaaagggctgatctaggaaagaatcaccacattgtgggtcacctctgctgtttctaaccgatgagaaggtaacataatgccatctggtctgagtctgcagtagcaatactccttttcttttgaaatatgttcagtggaagagaaatataccattattttacttttcccttttgtcttcatccaactgtttctctagtctgcattcacgattcagaagaaag

SEQ ID NO: 8008 - DNA, 600 bp, Chicken  19866894202292_1
ttagagttgttacctgagtaaaacgcagtatttcatcaataaagataagtacctattatgggtggttcattggaggaagttggaagcatattgttgagaatcacagctaacatggagctgccaagaatgatggaaatctggaaactgattttctcctcaagagagctgggtccaaacaacacagccatgtcaagcaggtacagggcgcatgttgggaggataaggttcagaatatacagagtgggtcgtctctccatggaaatctgttgaagaagatggacaaaatttgagtaagagatracgctgctgagtggatgctcactgcctaatgtggaaagctatcttctttcatacttttttttttttttttaaatattagcacaaaacaaaatgaatttactgcagtaccatataggtgatcacaggaaattctccatcatccatttcttccatgtattcactgatgctcaggttggtgaacttccattctccatcagttaggaagaagctctggctgtttaccagcatctcagctggtgtccgtttcactttcatggaaaggtctgttactgtttgggcaaggggagaggagagaagtgg

SEQ ID NO: 8009 - DNA, 600 bp, Chicken  19866894202299_1
tttgctaggccttgaagtagaaatgcacatttgagtgatgctattgtgatgcttacagagaatatacaggtcagtaatagtgctggtagcaacacgctgttgacacatgtagcatccaacaagcctgactgcagctgttgcttctactgagaagcactactgcatctcactttctctacgatcttttagatgtgctgcattgaaataggatcttcattacatgcatgtgattccctgttattactcggaacaacctagtaataatatcctagtgtttcctaactgtgttaaatgccaacycatggaaataatctgactttaaaactactatcatggttctgggratgctctctgtaggtgtataacattgtgctgggaaaaaaaaagtcctactgggtaaatatctactatttcctctgttggtgtagaaaacgtacattacccatgaataagtaacaagcaaatctcaaaagatttttgttgtcaccacttcagatggaattgaattttcaggaacttagcaagttatccacactataactcagatctctctaactttcatgttgaggtaaggacatgagaactgactcactccagaaa

SEQ ID NO: 8010 - DNA, 600 bp, Chicken  19866894202299_2
tgtgatgcttacagagaatatacaggtcagtaatagtgctggtagcaacacgctgttgacacatgtagcatccaacaagcctgactgcagctgttgcttctactgagaagcactactgcatctcactttctctacgatcttttagatgtgctgcattgaaataggatcttcattacatgcatgtgattccctgttattactcggaacaacctagtaataatatcctagtgtttcctaactgtgttaaatgccaacycatggaaataatctgactttaaaactactatcatggttctgggratgctctctgtaggtgtataacattgtgctgggaaaaaaaaagtcctactgggtaaatatctactatttcctctgttggtgtagaaaacgtacattacccatgaataagtaacaagcaaatctcaaaagatttttgttgtcaccacttcagatggaattgaattttcaggaacttagcaagttatccacactataactcagatctctctaactttcatgttgaggtaaggacatgagaactgactcactccagaaagattcagtagtatcagtgctttagctgtgaatgcagcactgtga

SEQ ID NO: 8011 - DNA, 599 bp, Chicken  19866894202300_1
  misc_feature (1)..(50): n is any nucleotide
nnnnnnnnnnnnnnnnnnnnnnnnnnnnnnnnnnnnnnnnnnnnnnnnnnataataatacctgagaggtcgtaagtatcgctggaggcttggattggattttattagctaatattcatgaagtgtgaattaaaaactaagcactgcatcaaaaaagatctgcagtgacacaagcaacagacaattccacaggataaaatgatctttcatgactaattttaaaattaaaaaagcttatgtttaaatccagccactttgtgctttttttgaacagcacttttcttttggctgggaaatggarggtggcttttgattgcataatgaggtttcttcagggaaagcacatgytctgcggtggctacagagccccttgtctgagctgcagctgcaaaaggagggctttagactttgtgttatgttaaatgttcrcagcaggaagagagccaggtacttgaactgacatgatggattcccctttcacctcctgcctctacctcattaaactgcagtgattaaagaattatcaaaatttaatacttcaaaatgactgcacagaagcagcttcttatgggaagccgtctttaaaaactgtctcctaca

SEQ ID NO: 8012 - DNA, 599 bp, Chicken  19866894202300_2
  misc_feature (1)..(3): n is any nucleotide
nnnataataatacctgagaggtcgtaagtatcgctggaggcttggattggattttattagctaatattcatgaagtgtgaattaaaaactaagcactgcatcaaaaaagatctgcagtgacacaagcaacagacaattccacaggataaaatgatctttcatgactaattttaaaattaaaaaagcttatgtttaaatccagccactttgtgctttttttgaacagcacttttcttttggctgggaaatggarggtggcttttgattgcataatgaggtttcttcagggaaagcacatgytctgcggtggctacagagccccttgtctgagctgcagctgcaaaaggagggctttagactttgtgttatgttaaatgttcrcagcaggaagagagccaggtacttgaactgacatgatggattcccctttcacctcctgcctctacctcattaaactgcagtgattaaagaattatcaaaatttaatacttcaaaatgactgcacagaagcagcttcttatgggaagccgtctttaaaaactgtctcctacatgcacagaatttctcctacaaacctcttccctgtgcatccctccctc

SEQ ID NO: 8013 - DNA, 600 bp, Chicken  19866894202300_3
ttaaaaactaagcactgcatcaaaaaagatctgcagtgacacaagcaacagacaattccacaggataaaatgatctttcatgactaattttaaaattaaaaaagcttatgtttaaatccagccactttgtgctttttttgaacagcacttttcttttggctgggaaatggarggtggcttttgattgcataatgaggtttcttcagggaaagcacatgytctgcggtggctacagagccccttgtctgagctgcagctgcaaaaggagggctttagactttgtgttatgttaaatgttcrcagcaggaagagagccaggtacttgaactgacatgatggattcccctttcacctcctgcctctacctcattaaactgcagtgattaaagaattatcaaaatttaatacttcaaaatgactgcacagaagcagcttcttatgggaagccgtctttaaaaactgtctcctacatgcacagaatttctcctacaaacctcttccctgtgcatccctccctcccctacacattcttccctttaatttatggggaagtggtgaaacctctggccaactagagccactcctgagaacaaatatggg

SEQ ID NO: 8014 - DNA, 600 bp, Chicken  19866894202312_1
aatttaatagaacagcaaatatcatttgaacgcaaaatattttgttttcaatgatgcacctttttcctcctttctagctgccaacgaattaccaatggtcaggtctctatcagcaaatatttcatgaagcactggatcaatatgctgcttatcttacatactgaagagcaaaagcctgggtgcttacaatcgaccaattcataaatatttatgtttcccagctaaaatgcagtttcaagaatgttaaaaattgtactgattaagaaaattccaaatgtctgaaatattcattctgctcaytggattccaagagcattkctgcaggacagtttgcatgtactcctttattcctctacagttgcttccatgagacagctttcttggtttgccaaaagaccaaatcttcacaaattaatatagaatagatgaaacaagcaattgcatacttggcttacaaggaagacaaggtaggcctctaatactaaattagaagcagagtccaccaatttaaaatagaatgctctttatattggtaaaattgataaacacaaacaatctttaggctattaatctctttggttgaaaagctgtatggtttta

SEQ ID NO: 8015 - DNA, 600 bp, Chicken  19866894202312_2
atatcatttgaacgcaaaatattttgttttcaatgatgcacctttttcctcctttctagctgccaacgaattaccaatggtcaggtctctatcagcaaatatttcatgaagcactggatcaatatgctgcttatcttacatactgaagagcaaaagcctgggtgcttacaatcgaccaattcataaatatttatgtttcccagctaaaatgcagtttcaagaatgttaaaaattgtactgattaagaaaattccaaatgtctgaaatattcattctgctcaytggattccaagagcattkctgcaggacagtttgcatgtactcctttattcctctacagttgcttccatgagacagctttcttggtttgccaaaagaccaaatcttcacaaattaatatagaatagatgaaacaagcaattgcatacttggcttacaaggaagacaaggtaggcctctaatactaaattagaagcagagtccaccaatttaaaatagaatgctctttatattggtaaaattgataaacacaaacaatctttaggctattaatctctttggttgaaaagctgtatggttttaaagcatttaaaatattgc

SEQ ID NO: 8016 - DNA, 600 bp, Chicken  19866894202318_1
gctcaggattcagacctcacctggagacagctgccaagctgacccagctccagagctcagcatcccagctttctcttttgcccactgccaaagattactgcagcagagggttcccttgcctcagcaaggctgaagcttgcagcctcagtaccaaaactaatgacagtaaagaccagtgaaagcaacacaaatgagggcactaatataaatgagcttaaaaagctgtgagataagcttgtggaattaagagtccacagaaaggtggttataatttatggatgaagaaatgcaaaccactgrgaagtaaggtatattagagaaagcactgctgaagatttaattatggaagaartacaagcatgtggcaactacctgtggacgctaccacaggtagcgcactgggctgaagggagcttttgctgcacctagaagagtgctccctccaggaacactgtcccttgagcatctcacctaaattcaacaggaatggtgaatcagagcatgtggtttgaagagatgcaagtagaacagtcccatcacacgagtttcaatgttcaaactgcctgcagaagattattatgagactggtttggtaagcag

SEQ ID NO: 8017 - DNA, 600 bp, Chicken  19866894202318_2
gagctcagcatcccagctttctcttttgcccactgccaaagattactgcagcagagggttcccttgcctcagcaaggctgaagcttgcagcctcagtaccaaaactaatgacagtaaagaccagtgaaagcaacacaaatgagggcactaatataaatgagcttaaaaagctgtgagataagcttgtggaattaagagtccacagaaaggtggttataatttatggatgaagaaatgcaaaccactgrgaagtaaggtatattagagaaagcactgctgaagatttaattatggaagaartacaagcatgtggcaactacctgtggacgctaccacaggtagcgcactgggctgaagggagcttttgctgcacctagaagagtgctccctccaggaacactgtcccttgagcatctcacctaaattcaacaggaatggtgaatcagagcatgtggtttgaagagatgcaagtagaacagtcccatcacacgagtttcaatgttcaaactgcctgcagaagattattatgagactggtttggtaagcagtcaagaccttttaaaaacagacctgcaatgcaatttgctacctaacccagac

SEQ ID NO: 8018 - DNA, 600 bp, Chicken  19866894202320_1
ggaagagatgaataaatttgacatctcctcttgccatataggcaaaatcatcgatgtgctgtacattcaaacaagaaaaagtattcacaagatgataaaaatagaagttaaatgtatttctgtagaaatctagaagattagtctgtaatttactcacatcagagaagtctcatttttcttttatggatttttcagatatcactgaattttacacctgcatcagttaataacaaaaacagtagaaacatgggaattagaatgaagtaaatatgctgcatgatgataaattacctctttctycctcactgagcctaaaaatatataaaaatccaagtgtgcaagaatttcattctccaccagatgtatattttatgctgattatgataaagatcattcttgtcaagaagtttccatcttctgggaacatgtaatgaaatacttccacaaacatcatgtttatagctctcagagtacaagtgaaagtcgtaattatattctgtgtgttttcctcacactcctaaggtgttatacatacagtcctgagcacataggtgatcttcaattatagacttctagtaggattagagatgtgcagtcaga

SEQ ID NO: 8019 - DNA, 599 bp, Chicken  19866894202321_1
  misc_feature (1)..(202): n is any nucleotide
nnnnnnnnnnnnnnnnnnnnnnnnnnnnnnnnnnnnnnnnnnnnnnnnnnnnnnnnnnnnnnnnnnnnnnnnnnnnnnnnnnnnnnnnnnnnnnnnnnnnnnnnnnnnnnnnnnnnnnnnnnnnnnnnnnnnnnnnnnnnnnnnnnnnnnnnnnnnnnnnnnnnnnnnnnnnnnnnnnnnnnnnnnnnnnnnnnnnnnnnnntgggaagggacatgaaggaggctagtagatcagggaacaagtatgtggatctgccactcacagggaataagaatgggcagctgggagacaattatgtwgaactgaagcaatgcagaattaggtcaaatgagaggagtactgagaagaatatacagatcccagagggagaggtgcaaaggggttggtcacagacagggtggcaggagatgggaggatgaacctcagtgctgaaatctctaatgacctgcttgttcatctgatttgcacactgctgcctttggcttcatttgcatgacttacataccaaaagatacgatttgctggcraaaggtatttaatctataaaaagaaatttaagaagcacactatcaggatgatgcttagggcatgaataatt

SEQ ID NO: 8020 - DNA, 600 bp, Chicken  19866894202321_2
agatcagggaacaagtatgtggatctgccactcacagggaataagaatgggcagctgggagacaattatgtwgaactgaagcaatgcagaattaggtcaaatgagaggagtactgagaagaatatacagatcccagagggagaggtgcaaaggggttggtcacagacagggtggcaggagatgggaggatgaacctcagtgctgaaatctctaatgacctgcttgttcatctgatttgcacactgctgcctttggcttcatttgcatgacttacataccaaaagatacgatttgctggcraaaggtatttaatctataaaaagaaatttaagaagcacactatcaggatgatgcttagggcatgaataattatatgttgtataggaatacagttccttagtatcataaataaaataagtttagcaacattatttcaatttgtaaagtttttactagaaagcatgtcagtataacaagtaacatttgaatgtcttaccatggtagtagtcagcacagtttttcttctgagcagagtgaatgcaaaccataaatagctagggcttcagatagtgtttttcccccatcattcttaagataaaa

SEQ ID NO: 8021 - DNA, 600 bp, Chicken  19866894202323_1
gagagaagccatggtggtaggtggatggttggactagatgatcttagaggtgtttgccaaccctcatgattctatgattcgttgcagcctttcccaaccaagctcccactgctctagagttcaaatcctttcatctcccagctccaaacaaactcatttctcagtggtattgcttgagtcaaagttttgccccatgaggtcagtcactgggcttccagacagcagactcgcaccaggggctcagctgctctgagcactggcgcgttaccttatggaggatggaaaacacgttagcatagrgtttgttttggccccacaatacaaggccagtggtgctcagcctccaccagaagactgttgttccaacaatggaaaacggaaggggrgaagagatggactcaaagcacacagcactccaaagccaaaacacacatcgcaggcatttctgctagtgggatacgtggggtaagccaagtcagtgctctgctactccgaaaaatccagcaagcagcagtcctcaacagagcaaaggcacgctgccctgccacagcagccagaggaggggaagctgaaggtttgtaacaggttgcttcatgtgag

SEQ ID NO: 8022 - DNA, 600 bp, Chicken  19866894202323_2
gcctttcccaaccaagctcccactgctctagagttcaaatcctttcatctcccagctccaaacaaactcatttctcagtggtattgcttgagtcaaagttttgccccatgaggtcagtcactgggcttccagacagcagactcgcaccaggggctcagctgctctgagcactggcgcgttaccttatggaggatggaaaacacgttagcatagrgtttgttttggccccacaatacaaggccagtggtgctcagcctccaccagaagactgttgttccaacaatggaaaacggaaggggrgaagagatggactcaaagcacacagcactccaaagccaaaacacacatcgcaggcatttctgctagtgggatacgtggggtaagccaagtcagtgctctgctactccgaaaaatccagcaagcagcagtcctcaacagagcaaaggcacgctgccctgccacagcagccagaggaggggaagctgaaggtttgtaacaggttgcttcatgtgagatggaatgctagctctttctctagtgcgctctcttcctataggaaattctctatgctaccccaagagaattaaagctgtttgtttt

SEQ ID NO: 8023 - DNA, 599 bp, Chicken  19866894202324_1
  misc_feature (1)..(97): n is any nucleotide
nnnnnnnnnnnnnnnnnnnnnnnnnnnnnnnnnnnnnnnnnnnnnnnnnnnnnnnnnnnnnnnnnnnnnnnnnnnnnnnnnnnnnnnnnnnnnnnnntcagaatgaaatccatcttgttctccctttgttttttagataagatcaaccctgttgaatgataaggtatgtcttctggtatcaaaagtcaatgtctgtatgtaaaccaaataattaaatattactagaaccagtccgagtgctgttatgaaagagtcagtgtcaatgctcgtaaattcttggttttcaacaaagagtgattrtgtacaaaccgtcaattgtaagtggttcctggaatgtcagaagtccaacaacatgctctgaaaccatctgggagagtgtccgacacctggagccaaaagccagctagcaatcattctcacaattcagcagcacagatgactacactctattagatattgtttaatctgccaaaatagccataaggaaggagtccagcacagcagtatgcttcattcattactgcataactttgagcctctgcataatgtgacaatcacatacagttttctcagtggcattatatttacacacagacagt

SEQ ID NO: 8024 - DNA, 600 bp, Chicken  19866894202339_1
acatcaactcagcattgctttaaggattttgacagagtgagggtgggagagggctgtgatgaactctagttatcgcaaagagctatctagaagaatggcactgaaaggcaacctaattgaaaggcaaggttttgtctgctcttcactctctaaaacctaatgcagatacagccaccagctccaccatgtgtatcatctgactttgggatacacaaagccttgccctcgtgggaaaaactgaaaataaaacattgagatgaggtctcagccaaggccagtccttgatggaggcctgccagytcaaaggggtcttaaaattccatcttaagacagacaaagcattcagtgcaagtccattcatcatcagggctggcttcttcacttaagttttaaatatctttaaattgttttccttagtggtcacgattgtaactgtactgtctttatgtttactgttttatataaatgtcctttccttttggatcagcatggtaataacatttgctacacatggcatcataactttcacacatattgttagaacagtagaattccacacttggagcaatttgcactaaatagcaattataaaataagtat

SEQ ID NO: 8025 - DNA, 600 bp, Chicken  19866894202340_1
aaatgaaatagcactgtgaagaattacatccacgataccaccagctccatgcagtatcaccctgttaatgttgcttgtctctccagcaatgtcacaatcactgtcagtctccatgtgcctcctccaaacctggtgggaaacatctatttcagctaacagaatccaccctaataaaggcagatgtctgtatctgatttagtcatactaggctacattatagtttttgcagtcttgatttctcttcctcttgtcctaaactgaacaatgtcaagagatgcaactatgatgcaaaaatgcccycttctctactgtctatgactgaacctgaattttccaacgtagatggagatgtcaactttaaatgtagatgaaakaaaggtcacagtatgagatttaccctcaaacatttcctagccagggaagaaaagcacttctaaggtgagagcagacctgtgcctaggcacttgtgttaagagatgaattgcacccctgactggatgggtcaatcttcaactgtagtgaggcttaaaataactgaataagatggagatgcctaagagaatcccattcatgatcacttctaaaactgttttcctcgct

SEQ ID NO: 8026 - DNA, 600 bp, Chicken  19866894202340_2
ttgtctctccagcaatgtcacaatcactgtcagtctccatgtgcctcctccaaacctggtgggaaacatctatttcagctaacagaatccaccctaataaaggcagatgtctgtatctgatttagtcatactaggctacattatagtttttgcagtcttgatttctcttcctcttgtcctaaactgaacaatgtcaagagatgcaactatgatgcaaaaatgcccycttctctactgtctatgactgaacctgaattttccaacgtagatggagatgtcaactttaaatgtagatgaaakaaaggtcacagtatgagatttaccctcaaacatttcctagccagggaagaaaagcacttctaaggtgagagcagacctgtgcctaggcacttgtgttaagagatgaattgcacccctgactggatgggtcaatcttcaactgtagtgaggcttaaaataactgaataagatggagatgcctaagagaatcccattcatgatcacttctaaaactgttttcctcgcttcagataawmtctctcstacttattacagcttcatcagataagccctccatgcaaacacctgtaaaccatgtca

SEQ ID NO: 8027 - DNA, 600 bp, Chicken  19866894202340_3
tgtctatgactgaacctgaattttccaacgtagatggagatgtcaactttaaatgtagatgaaakaaaggtcacagtatgagatttaccctcaaacatttcctagccagggaagaaaagcacttctaaggtgagagcagacctgtgcctaggcacttgtgttaagagatgaattgcacccctgactggatgggtcaatcttcaactgtagtgaggcttaaaataactgaataagatggagatgcctaagagaatcccattcatgatcacttctaaaactgttttcctcgcttcagataawmtctctcstacttattacagcttcatcagataagccctccatgcaaacacctgtaaaccatgtcagtgcaaactcaattatgtttcccattcaactttactttaaactgggctgggtatgtgctaggcagtagagtaggatcccttaatatcaggcagctgtgtggaagtaccttgcagctgacagaaggataggaaacagctgggagtgataccatagccacatgtttctgatagatccaaagaagtacagctctgcatataatcacaattgaaagcactgcaaggatcaccttaatta

SEQ ID NO: 8028 - DNA, 600 bp, Chicken  19866894202340_4
gtctatgactgaacctgaattttccaacgtagatggagatgtcaactttaaatgtagatgaaakaaaggtcacagtatgagatttaccctcaaacatttcctagccagggaagaaaagcacttctaaggtgagagcagacctgtgcctaggcacttgtgttaagagatgaattgcacccctgactggatgggtcaatcttcaactgtagtgaggcttaaaataactgaataagatggagatgcctaagagaatcccattcatgatcacttctaaaactgttttcctcgcttcagataawmtctctcstacttattacagcttcatcagataagccctccatgcaaacacctgtaaaccatgtcagtgcaaactcaattatgtttcccattcaactttactttaaactgggctgggtatgtgctaggcagtagagtaggatcccttaatatcaggcagctgtgtggaagtaccttgcagctgacagaaggataggaaacagctgggagtgataccatagccacatgtttctgatagatccaaagaagtacagctctgcatataatcacaattgaaagcactgcaaggatcaccttaattag

SEQ ID NO: 8029 - DNA, 600 bp, Chicken  19866894202340_5
actgaacctgaattttccaacgtagatggagatgtcaactttaaatgtagatgaaakaaaggtcacagtatgagatttaccctcaaacatttcctagccagggaagaaaagcacttctaaggtgagagcagacctgtgcctaggcacttgtgttaagagatgaattgcacccctgactggatgggtcaatcttcaactgtagtgaggcttaaaataactgaataagatggagatgcctaagagaatcccattcatgatcacttctaaaactgttttcctcgcttcagataawmtctctcstacttattacagcttcatcagataagccctccatgcaaacacctgtaaaccatgtcagtgcaaactcaattatgtttcccattcaactttactttaaactgggctgggtatgtgctaggcagtagagtaggatcccttaatatcaggcagctgtgtggaagtaccttgcagctgacagaaggataggaaacagctgggagtgataccatagccacatgtttctgatagatccaaagaagtacagctctgcatataatcacaattgaaagcactgcaaggatcaccttaattagattctta

SEQ ID NO: 8030 - DNA, 599 bp, Chicken  19866894202348_1
  misc_feature (1)..(112): n is any nucleotide
nnnnnnnnnnnnnnnnnnnnnnnnnnnnnnnnnnnnnnnnnnnnnnnnnnnnnnnnnnnnnnnnnnnnnnnnnnnnnnnnnnnnnnnnnnnnnnnnnnnnnnnnnnnnnnnntggtcctgcacgttttctgtgggaacagaaattctctacgtgggattggctttttgtattctgtgtgtattcgtataaccctcacatgacaaagcaaacgatcgctctcttaatctttgaaaattctgtttctaaccagagatgctgcatagtgttggtgacagtccttgcataggagagaaagggaygagagcaaacactggcaattccacagcctcagtattcacattcccttctggacactccttaggtaayaatgttttgctgtgagctaattaagggctaaattgggcctcttttaattcaggtttggatagcaagcaataagaaattgctttgcgaatgaattgtcacagagcttgacacctttgagaacacaaggtgaggacaacaccaagagccaccataagaaaaggtccctgtgggtttctcagtgtgtgggtggcctgtccccagtgtgacagggtcacaagagagtatttacttg

SEQ ID NO: 8031 - DNA, 599 bp, Chicken  19866894202348_2
  misc_feature (1)..(45): n is any nucleotide
nnnnnnnnnnnnnnnnnnnnnnnnnnnnnnnnnnnnnnnnnnnnntggtcctgcacgttttctgtgggaacagaaattctctacgtgggattggctttttgtattctgtgtgtattcgtataaccctcacatgacaaagcaaacgatcgctctcttaatctttgaaaattctgtttctaaccagagatgctgcatagtgttggtgacagtccttgcataggagagaaagggaygagagcaaacactggcaattccacagcctcagtattcacattcccttctggacactccttaggtaayaatgttttgctgtgagctaattaagggctaaattgggcctcttttaattcaggtttggatagcaagcaataagaaattgctttgcgaatgaattgtcacagagcttgacacctttgagaacacaaggtgaggacaacaccaagagccaccataagaaaaggtccctgtgggtttctcagtgtgtgggtggcctgtccccagtgtgacagggtcacaagagagtatttacttgccagcatcagcagctctgccaggtcccagaagagacgcatagaagacgacttctccttgcatcacct

SEQ ID NO: 8032 - DNA, 600 bp, Chicken  19866894202348_3
ttttaattcaggtttggatagcaagcaataagaaattgctttgcgaatgaattgtcacagagcttgacacctttgagaacacaaggtgaggacaacaccaagagccaccataagaaaaggtccctgtgggtttctcagtgtgtgggtggcctgtccccagtgtgacagggtcacaagagagtatttacttgccagcatcagcagctctgccaggtcccagaagagacgcatagaagacgacttctccttgcatcacctactcaccctccctgacacgccagcagggctgctcagcacagyccccctactgccacctccctgatgccagagtgagatctccctggggatcctgcagcagctggtgagtaccaacgtacagctgcagaggccatcaaaaagatgaaaatctttgcttcaaaaacaaatcagcatagccctacacgtacttaggaagattaaagcwgaatcaatattctaataaggaatgaggaaaatactcatgacttagtttttcactctgctgcatagataattttagctgtaattagaaaaacaacaacaaaaaaaagcctggttaccaaacaatttcctcagaaacac

SEQ ID NO: 8033 - DNA, 600 bp, Chicken  19866894202348_4
gacagggtcacaagagagtatttacttgccagcatcagcagctctgccaggtcccagaagagacgcatagaagacgacttctccttgcatcacctactcaccctccctgacacgccagcagggctgctcagcacagyccccctactgccacctccctgatgccagagtgagatctccctggggatcctgcagcagctggtgagtaccaacgtacagctgcagaggccatcaaaaagatgaaaatctttgcttcaaaaacaaatcagcatagccctacacgtacttaggaagattaaagcwgaatcaatattctaataaggaatgaggaaaatactcatgacttagtttttcactctgctgcatagataattttagctgtaattagaaaaacaacaacaaaaaaaagcctggttaccaaacaatttcctcagaaacacagtgcaataaacttgctcacagcttttgctttctgaatttgattttaaagctggcactaaagccaaatctaaagcttgatttrgatcctgggagcagatggagaacaaaaggcgtcaaatcatctgccagaaaacaaaacactgcatttccataagaacaaat

SEQ ID NO: 8034 - DNA, 600 bp, Chicken  19866894202348_5
caccctccctgacacgccagcagggctgctcagcacagyccccctactgccacctccctgatgccagagtgagatctccctggggatcctgcagcagctggtgagtaccaacgtacagctgcagaggccatcaaaaagatgaaaatctttgcttcaaaaacaaatcagcatagccctacacgtacttaggaagattaaagcwgaatcaatattctaataaggaatgaggaaaatactcatgacttagtttttcactctgctgcatagataattttagctgtaattagaaaaacaacaacwaaaaaaagcctggttaccaaacaatttcctcagaaacacagtgcaataaacttgctcacagcttttgctttctgaatttgattttaaagctggcactaaagccaaatctaaagcttgatttrgatcctgggagcagatggagaacaaaaggcgtcaaatcatctgccagaaaacaaaacactgcatttccataagaacaaatgtttacattcaaaaatgcatacatctacctcagctagaaagagaacaaaaggcaggaaaacgttcgttccttgtgagtaataaatcatacttggcgca

SEQ ID NO: 8035 - DNA, 487 bp, Chicken  19866894202348_6
agaggccatcaaaaagatgaaaatctttgcttcaaaaacaaatcagcatagccctacacgtacttaggaagattaaagcwgaatcaatattctaataaggaatgaggaaaatactcatgacttagtttttcactctgctgcatagataattttagctgtaattagaaaaacaacaacaaaaaaaagcctggttaccaaacaatttcctcagaaacacagtgcaataaacttgctcacagcttttgctttctgaatttgattttaaagctggcactaaagccaaatctaaagcttgatttrgatcctgggagcagatggagaacaaaaggcgtcaaatcatctgccagaaaacaaaacactgcatttccataagaacaaatgtttacattcaaaaatgcatacatctacctcagctagaaagagaacaaaaggcaggaaaacgttcgttccttgtgagtaataaatcatacttggcgcactcttggag

SEQ ID NO: 8036 - DNA, 600 bp, Chicken  19866894202350_1
ccaagaaaacaaactgataacacagatttgggaaatctcagcaacactcacagacaaaattggtaatctgcaactcaaagtgatacccaacagcacacaaaggcgtctgggggcaacaacacaacctgctgctccaggagtgggtgcacaggaactggaactaatgggatgagcaggaccttgacatactaattaatcatatcctgtaattataagctgtcagtgtgatttagccacggggaaggaaaaacaattctgaaagtccagtttgtgtactgccagcagagagaaaatcagtgyattgtccaaggcartgaggaacttactgtgtgtgcctctgctcccctgtgtccaagaatgactgcttcaaactggaacagatgtgctgaaggacttggaggtgatcaggaaaggacaaatccctgacaggtaagaaagaagccaaaaagtgcaggttaaagaacagaagctacaaagggtatcgtagtgcatccctaccaaagcactgggcttagtgctctaggaagcatttgatggacctgttatcctaaagaagagacttttagagtccaggcattttttatgagcaatttaaattac

SEQ ID NO: 8037 - DNA, 600 bp, Chicken  19866894202350_2
tgataacacagatttgggaaatctcagcaacactcacagacaaaattggtaatctgcaactcaaagtgatacccaacagcacacaaaggcgtctgggggcaacaacacaacctgctgctccaggagtgggtgcacaggaactggaactaatgggatgagcaggaccttgacatactaattaatcatatcctgtaattataagctgtcagtgtgatttagccacggggaaggaaaaacaattctgaaagtccagtttgtgtactgccagcagagagaaaatcagtgyattgtccaaggcartgaggaacttactgtgtgtgcctctgctcccctgtgtccaagaatgactgcttcaaactggaacagatgtgctgaaggacttggaggtgatcaggaaaggacaaatccctgacaggtaagaaagaagccaaaaagtgcaggttaaagaacagaagctacaaagggtatcgtagtgcatccctaccaaagcactgggcttagtgctctaggaagcatttgatggacctgttatcctaaagaagagacttttagagtccaggcattttttatgagcaatttaaattactcctttcattggct

SEQ ID NO: 8038 - DNA, 600 bp, Chicken  19866894202354_1
atagtaattgcaaaattggctgaattgcaagcaacgtgagaagtcaatggattgaactacaacgagaagaaacatctctttcaaaaagtgtcatcattgcaaagaagttcttccctcaaataagcaaagaatggtgtttacgtaaaacaaaaatgaagaactattacagtacatttgccactgtgaaagaaagaaaacttgtgttagaagcaaacctagcaatgcaaagtcttcataaagggaaaaccaggaacacacaaaagctacttgtgagaactgtacacctccttccaccagtarcactcccatttggcacagctcacccaaaaaggaaacatctgagcaatcactcatgagaaagacwtttagaagtcagcatctaattttttccactacaaaattagagagaaaagaaaaggaagtaaagaggttgggtgtctcagtgagcactctaaaatgygatcatgttacataaaacatattcttttcaaggagatagaagcatgtgcccattttcagaaattgcagagaatcactgtaattctatttcattatcagtgtaaggcgagacaccaaacccatgctagattcaacagctca

SEQ ID NO: 8039 - DNA, 600 bp, Chicken  19866894202354_2
agaagaaacatctctttcaaaaagtgtcatcattgcaaagaagttcttccctcaaataagcaaagaatggtgtttacgtaaaacaaaaatgaagaactattacagtacatttgccactgtgaaagaaagaaaacttgtgttagaagcaaacctagcaatgcaaagtcttcataaagggaaaaccaggaacacacaaaagctacttgtgagaactgtacacctccttccaccagtarcactcccatttggcacagctcacccaaaaaggaaacatctgagcaatcactcatgagaaagacwtttagaagtcagcatctaattttttccactacaaaattagagagaaaagaaaaggaagtaaagaggttgggtgtctcagtgagcactctaaaatgygatcatgttacataaaacatattcttttcaaggagatagaagcatgtgcccattttcagaaattgcagagaatcactgtaattctatttcattatcagtgtaaggcgagacaccaaacccatgctagattcaacagctcactttcaattattcacttgcaacttaaagccttaaactagctacttttactctatttccaagagt

SEQ ID NO: 8040 - DNA, 600 bp, Chicken  19866894202354_3
ctattacagtacatttgccactgtgaaagaaagaaaacttgtgttagaagcaaacctagcaatgcaaagtcttcataaagggaaaaccaggaacacacaaaagctacttgtgagaactgtacacctccttccaccagtarcactcccatttggcacagctcacccaaaaaggaaacatctgagcaatcactcatgagaaagacwtttagaagtcagcatctaattttttccactacaaaattagagagaaaagaaaaggaagtaaagaggttgggtgtctcagtgagcactctaaaatgygatcatgttacataaaacatattcttttcaaggagatagaagcatgtgcccattttcagaaattgcagagaatcactgtaattctatttcattatcagtgtaaggcgagacaccaaacccatgctagattcaacagctcactttcaattattcacttgcaacttaaagccttaaactagctacttttactctatttccaagagtaactcaggatttttctttagcatctcctcagtattaccgcccaagctccctaataagtacatttagtacttatggagtgagtaccaattactctcc

SEQ ID NO: 8041 - DNA, 600 bp, Chicken  19866894202359_1
cctgcactttggccacaataaccccaggcagcgctacaggcttggggcagagtggctggaagactgtgtagaggaaatggacctgggggtgttgattgacgttagactgaacatgagccagcagtgtgcccaggtggccaagaaggccaatggcatcgtggcttgtatcagaaatagtgtggccagcaggaacagggaagtaattatcctcctgtactcagcactggtgaggccgcaccttgagtactgtgtccaggtttgggcccctcactgtaagaaagacatcgaggccctggagcrtgtccagaggagggcaaccgagctggtgaggggtctggagcacaagccttatgaagagtggctgaaggagctgggattgttcagtctagagaagaggaggctcaggggagaccttattgctctctctaactacctgaagggaggttgtagtgagctgggggtcagcctcttctctcgtgtgactagtgataggactagagggaatggcttcaagctgtgccagggaagattcaggctggatgttaggaaatactacttctctgaaagggtggtcaggcactggaatgggctgcccagaga

SEQ ID NO: 8042 - DNA, 600 bp, Chicken  19866894202364_1
cacctgctccggtggtcactttccactgcgggcatcactatgatgaagagataccaagaactgcatgaaagtacttttatcctgctccttctgaatgaagcagttaacactagcagcatttctaaaggtgtttcactgcagcttatgcatttcagcaactgttcagtcagtgcttgaaccacaggtggtctgataggctctgaaacatggactcgtgttctttcacctctgtcctcaggaaactatgaatgagacatatatccccactttgctattctcttctctattcgtacaaacacrtgcagagatagagtagatcacagcctcgtgcttagagtcatgggtttgaaactccttatgctgaagaagaaattaagcttgtctcatgtaacttgggcaagtgtgcttactattttggagaggaagcagtgaactccccctgatgtctttaccagcccaggattgatgccactctgaaagactgactaaaagtgtgaaagcccctctgtgaaaatccagctctgaagtgcctggataaggatgttcagatccccttcagagttaatggattcaaatttttttaggtatggatttagatgt

SEQ ID NO: 8043 - DNA, 600 bp, Chicken  19866894202364_2
cagcctcgtgcttagagtcatgggtttgaaactccttatgctgaagaagaaattaagcttgtctcatgtaacttgggcaagtgtgcttactattttggagaggaagcagtgaactccccctgatgtctttaccagcccaggattgatgccactctgaaagactgactaaaagtgtgaaagcccctctgtgaaaatccagctctgaagtgcctggataaggatgttcagatccccttcagagttaatggattcaaatttttttaggtatggatttagatgtcaagcacttcctccctcttyaagcaaatctggcctaaagcaggaagttacatttcaaagccctgatggagcagctttagctgctactggggttaggagtaattaatggctacacagagctggtcaggtcctgagctaggcatcaaaattccttcaacatatttagattgtaatcgtagagttgctgatctagctggttttgttttcttaagacattttctttaaaggcagtggatctttaggggaacataggatcacaagttctgaatgaagcttaatgctcagctcatggaatcaattaggtgaaatcattaaatcggt

SEQ ID NO: 8044 - DNA, 547 bp, Chicken  19866894202364_3
tggggttaggagtaattaatggctacacagagctggtcaggtcctgagctaggcatcaaaattccttcaacatatttagattgtaatcgtagagttgctgatctagctggttttgttttcttaagacattttctttaaaggcagtggatctttaggggaacataggatcacaagttctgaatgaagcttaatgctcagctcatggaatcaattaggtgaaatcattaaatcggttatggcttgaaatatttccaccaggttcataggaaaaatctttatcaacagacatactgcaaaagsaatgaayaggcagcacaaacctttctgaaaggaaatgtagttcagaatctgaggagagaactgtgggtttttgcttctctgtgtatccagacgtagcttgtgacactccagtacttttcacttctgctcactgttatccctgtgcttttcccatgattcccttggcctggagtgctttttcattacacacaaaatctttacaacatcccattcaaatcttacctggcttaagaaaatcaaatataag

SEQ ID NO: 8045 - DNA, 540 bp, Chicken  19866894202364_4
aggagtaattaatggctacacagagctggtcaggtcctgagctaggcatcaaaattccttcaacatatttagattgtaatcgtagagttgctgatctagctggttttgttttcttaagacattttctttaaaggcagtggatctttaggggaacataggatcacaagttctgaatgaagcttaatgctcagctcatggaatcaattaggtgaaatcattaaatcggttatggcttgaaatatttccaccaggttcataggaaaaatctttatcaacagacatactgcaaaagsaatgaayaggcagcacaaacctttctgaaaggaaatgtagttcagaatctgaggagagaactgtgggtttttgcttctctgtgtatccagacgtagcttgtgacactccagtacttttcacttctgctcactgttatccctgtgcttttcccatgattcccttggcctggagtgctttttcattacacacaaaatctttacaacatcccattcaaatcttacctggcttaagaaaatcaaatataag

SEQ ID NO: 8046 - DNA, 600 bp, Chicken  19866894202380_1
cattttgcatggttctagttgttttgatggcctgatttcctgagtgttcagtgcatatacacattagcaaattgtcatagaatcataaaatggctcatgttggaaggaacctcaaagatcatctaattccagccttctgctgtgggaagggttgccaaacactaaatctgacactagggcaggtcatgcaaggccccatccaacctaggcttgaacgcctccagggatggtgcatccatgacttctctgggcaagctctcagtgaaaaattttcctctaacatctaatagaaatcccccrtttagtttaaaaccatttccctttgtcctacacatgtaaatagttggtcaccctcctgtttataagctcccctcaagcacaggaaggcctcaatagcttctccccagagccttctcttctccagattgaacaagcccagctcagcccgtcttcatggggagaggtgctctagacttagatatttaatctgtgatcaatcccaatctcaatatcttatcaaaagaaaaagttatgattaattaacctgagatgcactaatgctatttaagaataatttttgtctaaaatacttacagtaat

SEQ ID NO: 8047 - DNA, 600 bp, Chicken  19866894202383_1
tgtgccacaggctggctgcctcctgccagatcaggcttctcaggacccacccagcagagcctcgggcacctccagggatggggttaggcagcacaaggacatctgttcacattgctcctccgtgaacccaaagccatcacggagtaatgtcaccaggattactccccctgattaatggcagggaagcacgtcaaggagaaaacatctttttggttctgtgcaattatcccaagctcccatccaggcagtgcccaccatttcaataggaacagatcccagcacagggacaccccacacacyggtggaggcaaccacagaagttcagcaaaagctccaagaactgcctgcaagtgcagcartgcaaggagygcttggaggtggcacgtcctgcttgctgctgggaagtcaggaacagccccaaaagctgacctgtaggggtcgagcaccgggtctgcactgcaactcctagcaggagcaaggactggggtgggtgcatgtcccaccatgggacgctcacggctgcaaggccaccgcatgcaggtggcaggccccacacctcattaatatcaccgtgccctcatcccatccagcagagcccaa

SEQ ID NO: 8048 - DNA, 600 bp, Chicken  19866894202383_2
cctcgggcacctccagggatggggttaggcagcacaaggacatctgttcacattgctcctccgtgaacccaaagccatcacggagtaatgtcaccaggattactccccctgattaatggcagggaagcacgtcaaggagaaaacatctttttggttctgtgcaattatcccaagctcccatccaggcagtgcccaccatttcaataggaacagatcccagcacagggacaccccacacacyggtggaggcaaccacagaagttcagcaaaagctccaagaactgcctgcaagtgcagcartgcaaggagygcttggaggtggcacgtcctgcttgctgctgggaagtcaggaacagccccaaaagctgacctgtaggggtcgagcaccgggtctgcactgcaactcctagcaggagcaaggactggggtgggtgcatgtcccaccatgggacgctcacggctgcaaggccaccgcatgcaggtggcaggccccacacctcattaatatcaccgtgccctcatcccatccagcagagcccaaacgcacccagtgagcaggaggggagtggtgcagctccaacacgtgggtatcaattagga

SEQ ID NO: 8049 - DNA, 600 bp, Chicken  19866894202383_3
ctccagggatggggttaggcagcacaaggacatctgttcacattgctcctccgtgaacccaaagccatcacggagtaatgtcaccaggattactccccctgattaatggcagggaagcacgtcaaggagaaaacatctttttggttctgtgcaattatcccaagctcccatccaggcagtgcccaccatttcaataggaacagatcccagcacagggacaccccacacacyggtggaggcaaccacagaagttcagcaaaagctccaagaactgcctgcaagtgcagcartgcaaggagygcttggaggtggcacgtcctgcttgctgctgggaagtcaggaacagccccaaaagctgacctgtaggggtcgagcaccgggtctgcactgcaactcctagcaggagcaaggactggggtgggtgcatgtcccaccatgggacgctcacggctgcaaggccaccgcatgcaggtggcaggccccacacctcattaatatcaccgtgccctcatcccatccagcagagcccaaacgcacccagtgagcaggaggggagtggtgcagctccaacacgtgggtatcaattaggacatcttccag

SEQ ID NO: 8050 - DNA, 600 bp, Chicken  19866894202383_4
gctcgctaaatccccgccagacgaacgatgcatcatcaaataaaccccggtatcacgacattaacaatatttattttcaggctaagccgcagcctgggcttttgataccagtaattaaagcaaatggttcatctgttatcagctttgcatccccgcaggcagctccctacgttctgatctctgcgttcatcctttcccatcgcgttccccccggaggggaccaccccgacccccacgcgctgtgtcacatcccgggagcgatgtgctacggaccgagcccggagcagagctcgccccgtrcccgctcggagcggcagactgccgcttttaacctcgtccgcagcacttctgcccgtcctggaaccgggcatcgatgctcrgggacagcggggtccccccgccccgcagctccctcaaacccccagccccgagcagggcaatgcagaccccggctctcagccccttacctggcccgtcccggctcggctcggcgcagcgcggctccccggcagcactgcggagcagcgcggaggcggcgcggggaggggacacggccggggcggccccgcaacgctgcccgccccggggcagagccagcgg

SEQ ID NO: 8051 - DNA, 600 bp, Chicken  19866894202383_5
gctaagccgcagcctgggcttttgataccagtaattaaagcaaatggttcatctgttatcagctttgcatccccgcaggcagctccctacgttctgatctctgcgttcatcctttcccatcgcgttccccccggaggggaccaccccgacccccacgcgctgtgtcacatcccgggagcgatgtgctacggaccgagcccggagcagagctcgccccgtrcccgctcggagcggcagactgccgcttttaacctcgtccgcagcacttctgcccgtcctggaaccgggcatcgatgctcrgggacagcggggtccccccgccccgcagctccctcaaacccccagccccgagcagggcaatgcagaccccggctctcagccccttacctggcccgtcccggctcggctcggcgcagcgcggctccccggcagcactgcggagcagcgcggaggcggcgcggggaggggacacggccggggcggccccgcaacgctgcccgccccggggcagagccagcggcagccctctcccagccttcccttctcccaccccttccccacctcctgtccccatcccatccccacctaccacattattcc

SEQ ID NO: 8052 - DNA, 600 bp, Chicken  19866894202385_1
ggatgtaaggaagaacttttttgtgatgggatggtgagacactggaacaggctctccagaagtctggtggatgtcctttccctggagacattcaatgtcaggctggaccgggctctgagcacctgattgagctgcagatgttcctgttcattgcaggagagttgaactagatgacctttaaaggtcctttccaactcaaatattcaatgataagcatgctgtcaactattcagcctcactcatgggcttatggaggctttttttatctgcttttcgtaagttctatttggtagcaaatgyaatagtctttggtaaaacaatgtgagtttctggtgtactgcctcctgaacttttctaagtctagctgtttgaagatggaacaagaaaactcagaaggataggatattgtggctatatggtgctcctaccgggctggtaccactttcccacatgctcttgaattcttataagaagaccatgaattaacattgtatataatgatgatcaaatgttaagattgcagagttgtgtatattttctagttgtgattccttgggaagcattgtattttaccttatctttttatataaggtattgtgc

SEQ ID NO: 8053 - DNA, 600 bp, Chicken  19866894202389_1
agtcatgtaattaaatttctcactgaaaggaaaagaattatattactatctgaaacatgatgtacctgaagttaaaacttaggccaaaagctacattaagtcagacctctaaattaatttctgtttcatggcattagcatgaatttaggactgcaatatttctgaagacattgatttatttcttctttctttctcttccaggagagcggtcactgccctcaacacgagctaagatgtctggatgggcaaaactctgctggagcaccaccccgcagcccccacctgcacaactgaaagccmtcatcccccaaaacacatttctcaaatcattactttcttatcacactgtagcacgtaagcaggttttattcacacctttgattcatgcaggtgatttataaggagatatcctgaaaggtacttgccaagggaggacggtgagtactctacttcctgattgtggcccattctttaacagctcgttaaatattttcctcattcctttaatacacatttgaaggattaaacaacccaaaggagagaaattagtcagatgaaaaaaggctgtgcaggtttccatcagattaagtataaattttc

SEQ ID NO: 8054 - DNA, 600 bp, Chicken  19866894202393_1
aaaaccagaatcagtcatcccaggtgcttttggtgtaactccagccagtgcatcctattgccagcacagattccagtttacactgagttctggcagattgtaacgtaatcaaatcatgaaggctgccacaccaaaaaatcttctggctctgtaattcatctgctcaagcaaaacagggccatggtttatttttcaaaaggcttgtgactatctatttatgtcttttgtaggggtgaatgcaaagaaactgaaaagaaaactgagtcagctccaaataaaggttgtttgcttttttttttycccctttttaaaataaatattgccacaatttaacatgattttgctggcatgtagsaaagaatgtactattggtacttacgtgtgtgccaatgctaacaaccaagtgcttctccacttctgggctagcaagacagaaccagcagggccctgtgggctgtgctttacgggataggaaagagaaacaagtgttagcataaagcttgttggttagaatgatggatggaacaagacctgaaagagctgcattttccaggtcctgttcccagctgatgcagcgctgaagggcatggctctgggaat

SEQ ID NO: 8055 - DNA, 600 bp, Chicken  19866894202393_2
tattgccagcacagattccagtttacactgagttctggcagattgtaacgtaatcaaatcatgaaggctgccacaccaaaaaatcttctggctctgtaattcatctgctcaagcaaaacagggccatggtttatttttcaaaaggcttgtgactatctatttatgtcttttgtaggggtgaatgcaaagaaactgaaaagaaaactgagtcagctccaaataaaggttgtttgcttttttttttycccctttttaaaataaatattgccacaatttaacatgattttgctggcatgtagsaaagaatgtactattggtacttacgtgtgtgccaatgctaacaaccaagtgcttctccacttctgggctagcaagacagaaccagcagggccctgtgggctgtgctttacgggataggaaagagaaacaagtgttagcataaagcttgttggttagaatgatggatggaacaagacctgaaagagctgcattttccaggtcctgttcccagctgatgcagcgctgaagggcatggctctgggaatcaggatctggctggagaactgatgtcccatgagaagttccagtaagaggagcagg

SEQ ID NO: 8056 - DNA, 600 bp, Chicken  19866894202397_1
tgtctgtgacagcgacggggcccgagggaacggcacggagctgtgtcaggggagggcgggtggggctgagggaaaggctgtgccccagagggcggtgggcatggcacaggctgcccagggcagtgggcacggccccgatgccggagctcagggagcgctgggacaccgctctcacacactggggctgggggtgctgcgtggggccgggggttgggctcggtgatccctgtggggcccttccagcttgggatagtctgtgattctatgaaagctctttgtcagagctcagtacgtgctgtwgattgtcatgaccactgattcattcattcactgctggtggcctctgcctgaagctctccggttcttgttaagtcacacacctcgtctaatctgttgtacaagaatttgcaaaacaagttgggtccattccaactccggatattccacaattctatgaccactcaagatcttgcctcatgataatcaggaccagaaccacctaggctcgaaaagatcttcaagatcaccaagcccaagcacgacgcatgacctaccaggtcacacaagcatcatgctagcagtcactgctgtatcttcata

SEQ ID NO: 8057 - DNA, 600 bp, Chicken  19866894202397_2
caggagccccagccagcccagagaagagaagctcaagctgcagagatgagagagggatgtggggggaggaggaggaggaggccaggacaagggaaacatcacaaggaggggaagcacacacatgaagcttcccaggaaggctggccgccccatcaccatgcaggcgcagaacagcagctgctgctgttggccatggtgccaggctggcagcccagtgcccaagcctacacccctgctagtgagaccttccaggcctgtctgctggagcacgaagcacatttggcaccaaagctactcatktgagctgctgtacttcagtgcatgatgctaccaaatgcaccacagggaggaaaactgcccggaccagcactggccctcagatgtattctgtgaggatgccttgctgaatttgctttctggagcaggacgggcagaggggttccttacctgggagaccccaaggtagacggggctcaactcaggctgcacaagcatcccaggagcaaaagagcatgggggcagcagctgaggggctgaccaggaggaggtgcagacaagaacttgcactgatgccagcacaccaaccaccttggcatcccc

SEQ ID NO: 8058 - DNA, 600 bp, Chicken  19866894202404_1
accaaaaaaagccggagtgtcgttggtgtcagagcggtacagaaccgaaaccattctcgcccccgcggtcggcgtcccgcagtcgggccgcagtccggtgatcgcctctgggtgataacctcacaccgcgcgttatcccacaaaccgaggcgcgagtggtggaggaatcctgatctcttcgctggggctccattcgccccacagccttcagcgccggcgctccccgtcccgacgcggtgcgggaatgccgggaggaagggagagccgcgggcaggagatgctcagcgctgcggggctgcrctgcgggacggagcgggtggcggctgtgctgcgagggagcgcgctgctgtgatccgcaatggctttttwaaaattattatttgtttttgctattattgccgttattgttattgttattattatctgcggtgaggctgtcccgtgcccgcccgtcctggtgccgccgtcgggtgcgcaccgccggctccggtgtccgctggaatcccccccgcayccacggacgtttggggaactgtgakgtgccgcttcgctgcttcggagcccttccagcgttttccattaattaacaatcgttttgat

SEQ ID NO: 8059 - DNA, 600 bp, Chicken  19866894202404_2
cggcgtcccgcagtcgggccgcagtccggtgatcgcctctgggtgataacctcacaccgcgcgttatcccacaaaccgaggcgcgagtggtggaggaatcctgatctcttcgctggggctccattcgccccacagccttcagcgccggcgctccccgtcccgacgcggtgcgggaatgccgggaggaagggagagccgcgggcaggagatgctcagcgctgcggggctgcrctgcgggacggagcgggtggcggctgtgctgcgagggagcgcgctgctgtgatccgcaatggctttttwaaaattattatttgtttttgctattattgccgttattgttattgttattattatctgcggtgaggctgtcccgtgcccgcccgtcctggtgccgccgtcgggtgcgcaccgccggctccggtgtccgctggaatcccccccgcayccacggacgtttggggaactgtgakgtgccgcttcgctgcttcggagcccttccagcgttttccattaattaacaatcgttttgatttcattactattttgaaaggacggacgttttcaaagacggctttaaagcagcgaaccgaatctcgaaat

SEQ ID NO: 8060 - DNA, 482 bp, Chicken  19866894202404_3
cggcgctccccgtcccgacgcggtgcgggaatgccgggaggaagggagagccgcgggcaggagatgctcagcgctgcggggctgcrctgcgggacggagcgggtggcggctgtgctgcgagggagcgcgctgctgtgatccgcaatggctttttwaaaattattatttgtttttgctattattgccgttattgttattgttattattatctgcggtgaggctgtcccgtgcccgcccgtcctggtgccgccgtcgggtgcgcaccgccggctccggtgtccgctggaatcccccccgcayccacggacgtttggggaactgtgakgtgccgcttcgctgcttcggagcccttccagcgttttccattaattaacaatcgttttgatttcattactattttgaaaggacggacgttttcaaagacggctttaaagcagcgaaccgaatctcgaaattgcctttgggcaaacgcggggaacgag

SEQ ID NO: 8061 - DNA, 457 bp, Chicken  19866894202404_4
cgggaatgccgggaggaagggagagccgcgggcaggagatgctcagcgctgcggggctgcrctgcgggacggagcgggtggcggctgtgctgcgagggagcgcgctgctgtgatccgcaatggctttttwaaaattattatttgtttttgctattattgccgttattgttattgttattattatctgcggtgaggctgtcccgtgcccgcccgtcctggtgccgccgtcgggtgcgcaccgccggctccggtgtccgctggaatcccccccgcayccacggacgtttggggaactgtgakgtgccgcttcgctgcttcggagcccttccagcgttttccattaattaacaatcgttttgatttcattactattttgaaaggacggacgttttcaaagacggctttaaagcagcgaaccgaatctcgaaattgcctttgggcaaacgcggggaacgag

SEQ ID NO: 8062 - DNA, 600 bp, Chicken  19866894202423_1
ttaagaaagaaaggctgaggacattctgaaaattattgcttttgttcctttaaatcttataaaatatggagataagtaatgagaaaggaaggtgctcttttttgtttcagaagaaccacttatttgaacagcagtgattttatttttaggatagcttcagtcaaaacaccttaatacaaagaagcagctagagaaaactatctacacatcctcataattcaaagcaaaatagtatagaattagaggatgagaaatgaacctcttgcttgctacgctgttcttattttgtgtctcaatggraagagaatgacagatggaagtataaagtatgtttactcatatcaggcctttgatatgcaaatgcttgttctgaaagaatgagaaatacactgaccagcagacatcccctcagaagagaagcatcgcaacctgagggagaagagagataaacactccttggcagatgtattatgaatactgactagggcaagttctgccacaacactttcctgagggaagtattatgttttcaaatgcaacatcttgacaatatttaaatgccaagtgtgaaagaagagtgaagtatcttagggacactgc

SEQ ID NO: 8063 - DNA, 599 bp, Chicken  19866894202430_1
  misc_feature (1)..(56): n is any nucleotide
nnnnnnnnnnnnnnnnnnnnnnnnnnnnnnnnnnnnnnnnnnnnnnnnnnnnnnnnatgtggcattttctttgtctccctagtatggaagatacattctaatgacaagcaagagcttgagccaaagctgatcattaggtcactgggtattcaatcgtttacataatctgcagtctttattcaaggactgtcaggcagttgggaataaaaagaagcaatctgaaattcagccaatactggtacctaaatgaaaatgagccaaaaattgttataaaatactagagaacgggccttagaacayattcatccatgaattctcttgaaaaggacatgtggcaaagaaamtctacaggggtggatttagcaaacattttaacaggcaggtacctatattatctaagaaaaaatctgtaacacttgcagagttgagtgcctgaatcatacctctgtgcattcctacaattaaaatttctgaaaatgggcctcctgatacttccaatgcttggtgggttaaaaacagtacagtcctatttacatgaacacaactaaatagctctatgaaatttaaagatttgggcagtatacaaatctcaycttaag

SEQ ID NO: 8064 - DNA, 599 bp, Chicken  19866894202430_2
  misc_feature (1)..(12): n is any nucleotide
nnnnnnnnnnnnatgtggcattttctttgtctccctagtatggaagatacattctaatgacaagcaagagcttgagccaaagctgatcattaggtcactgggtattcaatcgtttacataatctgcagtctttattcaaggactgtcaggcagttgggaataaaaagaagcaatctgaaattcagccaatactggtacctaaatgaaaatgagccaaaaattgttataaaatactagagaacgggccttagaacayattcatccatgaattctcttgaaaaggacatgtggcaaagaaamtctacaggggtggatttagcaaacattttaacaggcaggtacctatattatctaagaaaaaatctgtaacacttgcagagttgagtgcctgaatcatacctctgtgcattcctacaattaaaatttctgaaaatgggcctcctgatacttccaatgcttggtgggttaaaaacagtacagtcctatttacatgaacacaactaaatagctctatgaaatttaaagatttgggcagtatacaaatctcaycttaagggattcaaacccccaaacacttctgtattccaggaaatttttcc

SEQ ID NO: 8065 - DNA, 600 bp, Chicken  19866894202430_3
agaacayattcatccatgaattctcttgaaaaggacatgtggcaaagaaamtctacaggggtggatttagcaaacattttaacaggcaggtacctatattatctaagaaaaaatctgtaacacttgcagagttgagtgcctgaatcatacctctgtgcattcctacaattaaaatttctgaaaatgggcctcctgatacttccaatgcttggtgggttaaaaacagtacagtcctatttacatgaacacaactaaatagctctatgaaatttaaagatttgggcagtatacaaatctcaycttaagggattcaaacccccaaacacttctgtattccaggaaatttttcctattacccagatacaggatgtcgcaggaaaagtccacccttcttatggaagttgtattattgtgcataaaggaattcaacattcacagtcagacagaacatggcagaatgtaacacagtattctgtgtgtgcaggagaacagttaactggattttgaatctttttctaacgggatgctttgcttagataatcaagacatccacaatttaaactaaaattgatcaaaagttcatttgttttttttttagaa

SEQ ID NO: 8066 - DNA, 599 bp, Chicken  19866894202432_1
  misc_feature (1)..(53): n is any nucleotide
nnnnnnnnnnnnnnnnnnnnnnnnnnnnnnnnnnnnnnnnnnnnnnnnnnnnntgcaatatgtcagggggaaaaaaaaaaaaagagcatactgaaaagaaagacaggtggaagttaaaaccagataaaactctgtatggccctttagctgcaaatgtaactaacagttgcagcaaactactgtggtgaaacattgggttattcaagtcctgaggggttgaataaagtcaacaggtgggtacaccttagtgaagggactatgagtttgatggcagggacatattatacagggattggatgrgtactaagagatggttaatttgtgtctgtgggccttcaaactgtgaatctgtgggggtaaacagtagcatgtgtgactgttttggcaatgacagaagcggcagacaggattcaggcacagaagggagtgtggtgcaggcagtgcacccctgtgcatcagttcccaaagctggggatggtgaaggaacatgaaacacatgcaatttcaaagtgaaattctctggtggggaaaagtacgtgatatgtgggggcagagcccctgggcagcttcgtgtgcctggggctgtgctccctaaacaa

SEQ ID NO: 8067 - DNA, 600 bp, Chicken  19866894202438_1
tcacataaatcaatggttttgcagagaagctgtcaaaaatttaatcaaacaatgtatgcagattgctccaaaagttatgtttcctatttatttccatggaatctacaacagatacaaagaccacactaagacaagtcgagagagaaaattctcagttacactataggtgaggatttcaccatagtctccaccattcgctgcgcatttttgccagtgataaacaagagcctacatgctatgcttttaaaagtctgcaccagtgaagcactgttgctgccaccagtcctgaaacacatcacytactgcctcactgtgctcacttcctctgattttcgtaaatgttcagcatgtgtcgatgaatttcaatgggtgccttttttttctgcatggtggagttctgacacacacctttgcttcataagcactttcacgtcagacactgttttgtcagactgcccctctgctgctgtctgtcacacagcaattaaatgtaaggggacattggtgggaaggttcaacctgtactgccataccaccaacatccacctctgatgtcataggccgacataataaaataggaggcattactttcagagcagc

SEQ ID NO: 8068 - DNA, 599 bp, Chicken  19866894202439_1
  misc_feature (1)..(108): n is any nucleotide
nnnnnnnnnnnnnnnnnnnnnnnnnnnnnnnnnnnnnnnnnnnnnnnnnnnnnnnnnnnnnnnnnnnnnnnnnnnnnnnnnnnnnnnnnnnnnnnnnnnnnnnnnnnnaatgaggaaatgaaatgcattctgtctcagagatccgggctggccatggtgattaatgatcatcattgcagcagcaatctaaacacagctctgcatgccacgcagtaattgcgttgtgctgtagtatcatgcactaagatgagttacaaaggtttctccaagcccacctgtgctttggtggctgtgctgcaygctgtatcagcggggacatggctgaaattcacacgcagggtccataatttattgatgtgccacaaacctgagcagttctccgtagggaaagaaggaagagtacttcaggaggagaaaaaaagaaagcaactgtaaaagcagctcctgcccagcgagagctggtgattaatttattagtccactgtaaggcttatttcggtgtgaagctgggctgcttttctgatcttgtagaaggtgtttggatgtacgagttcagctctggctgattgctggggakccagasaagaaaccagcagctt

SEQ ID NO: 8069 - DNA, 565 bp, Chicken  19866894202439_2
gtgctttggtggctgtgctgcaygctgtatcagcggggacatggctgaaattcacacgcagggtccataatttattgatgtgccacaaacctgagcagttctccgtagggaaagaaggaagagtacttcaggaggagaaaaaaagaaagcaactgtaaaagcagctcctgcccagcgagagctggtgattaatttattagtccactgtaaggcttatttcggtgtgaagctgggctgcttttctgatcttgtagaaggtgtttggatgtacgagttcagctctggctgattgctggggakccagasaagaaaccagcagcttgctgggtcatagagttagttcctatgttaaccatgaattttggcttttctgatgtcyggtggcggctgggacctgaatgctgcactggaacaggctgagatgatgaagctgtgctggttttccctgcctctggggctggggggcaggctgggcccagtaggtgggctgtggggctgggctgcatgcagagcccctcctgcagtgtggggggtctgtgccttccctgcagtgattcctgtgccg

SEQ ID NO: 8070 - DNA, 559 bp, Chicken  19866894202439_3
tggtggctgtgctgcaygctgtatcagcggggacatggctgaaattcacacgcagggtccataatttattgatgtgccacaaacctgagcagttctccgtagggaaagaaggaagagtacttcaggaggagaaaaaaagaaagcaactgtaaaagcagctcctgcccagcgagagctggtgattaatttattagtccactgtaaggcttatttcggtgtgaagctgggctgcttttctgatcttgtagaaggtgtttggatgtacgagttcagctctggctgattgctggggakccagasaagaaaccagcagcttgctgggtcatagagttagttcctatgttaaccatgaattttggcttttctgatgtcyggtggcggctgggacctgaatgctgcactggaacaggctgagatgatgaagctgtgctggttttccctgcctctggggctggggggcaggctgggcccagtaggtgggctgtggggctgggctgcatgcagagcccctcctgcagtgtggggggtctgtgccttccctgcagtgattcctgtgccg

SEQ ID NO: 8071 - DNA, 486 bp, Chicken  19866894202439_4
gtgccacaaacctgagcagttctccgtagggaaagaaggaagagtacttcaggaggagaaaaaaagaaagcaactgtaaaagcagctcctgcccagcgagagctggtgattaatttattagtccactgtaaggcttatttcggtgtgaagctgggctgcttttctgatcttgtagaaggtgtttggatgtacgagttcagctctggctgattgctggggakccagasaagaaaccagcagcttgctgggtcatagagttagttcctatgttaaccatgaattttggcttttctgatgtcyggtggcggctgggacctgaatgctgcactggaacaggctgagatgatgaagctgtgctggttttccctgcctctggggctggggggcaggctgggcccagtaggtgggctgtggggctgggctgcatgcagagcccctcctgcagtgtggggggtctgtgccttccctgcagtgattcctgtgccg

SEQ ID NO: 8072 - DNA, 600 bp, Chicken  19866894202443_1
gaggatccacttacagtgtttgcagacatgaattcaatcccaggctatgagtcctagcattcttataaagattcccatattagcactgctgatcagcatcgtgctgctcaaataagctgttcacgaagcctccatttgaaatactcaacaaaaagcaatgtattgctattagtcacatgtaacccagaattaagttaaatactcttaatttagaatgtttatcccttggctacccattaagcaagccatggaggcaggcctcctagcaagctgccctctttccctggcctgctttggatrcattacgaatgcccaccagtgagaagcagagttttccaaaactgttctgaacaagataattggatgctgaaggcaacagtaccttttctactgccttcagaaraagctcctgttggaaactcacttgacacagatgacttctgtttcccactactgacctgcatccagaagactccagttcctgctctggtccttagagtcgtgcactgttgtgatacggctattgcagcctttagtttggtacttttgtttggttggatgtcaggcatttcttacacctgtaacagtctttcctagtca

SEQ ID NO: 8073 - DNA, 600 bp, Chicken  19866894202443_2
ctgctcaaataagctgttcacgaagcctccatttgaaatactcaacaaaaagcaatgtattgctattagtcacatgtaacccagaattaagttaaatactcttaatttagaatgtttatcccttggctacccattaagcaagccatggaggcaggcctcctagcaagctgccctctttccctggcctgctttggatrcattacgaatgcccaccagtgagaagcagagttttccaaaactgttctgaacaagataattggatgctgaaggcaacagtaccttttctactgccttcagaaraagctcctgttggaaactcacttgacacagatgacttctgtttcccactactgacctgcatccagaagactccagttcctgctctggtccttagagtcgtgcactgttgtgatacggctattgcagcctttagtttggtacttttgtttggttggatgtcaggcatttcttacacctgtaacagtctttcctagtcattttattcaaagagatgttcattatgaagcaacgggattcccaccttcctacaccaggtgagattctgcccatccttgttgagtgagcagcattttcagaaga

SEQ ID NO: 8074 - DNA, 600 bp, Chicken  19866894202444_1
gtgtacaggaatgagagcacaaactgatttccaagagacacagactgatgattactgcactgtaaaggtttgtttaacatgtacatatggggagaaatggagcttgatgatttttagcatactgtttgaaattctatccctcaagggaaaggaaagggctgtgcaaacttccaaaatccccattaagtattattatcctctgaacaatattgaaaaagatgaaaattctaactacttactaacagcaagtagcagatgatattaaaaataatcattatattactcttgaacttgcatgtycatgaaattattttacttgtctactattggctctgtgagagagttgtacaagccaatagttattttgtctgtgctaaggctcctcttaaatatatatatacacacatatatataaatatatatataaatatatacatatatacataaatatataaatgtgtgtatatataatactatatatatatatatatatacacattttttttctccacataagaatgttcttattaagatatggtaattttcttttaagagcttgaaatattatttattgtaaccaatagcccaagctgaagtctg

SEQ ID NO: 8075 - DNA, 599 bp, Chicken  19866894202446_1
  misc_feature (1)..(3): n is any nucleotide
nnnagctctggctggttcctccttatctcgccttgagcttcacggcatccccagctctttcccaatctgcatagctttctgccttcatggctttctcatttttatggaaatgctttcgtttctctgaaatgctgcacacaaggctgtctaaccaacaaagctgtaaccctgtccaccctcagagcttggttacgactgcagtcattcccctgtgaggatctgctccacagaggagctgcaaatctcagcctgagcaagaccagggcaaagggaagcaatgttctgtagtactcacagagmtcagaaagtcactactctgaatgcttggcatgcatttcctttcagaggaatcttttaatatcagtaaaacgtattaatacaagaatgcacrttgccagaaaaagtatgtcttgcattatgaagacgtagcagctcaagtaaatggttaaaccattctaaagcagtaagaaatatgtgtattgttatggaaaacacattraagcgacaaactgccctaccaaattcaatccttatgtctttttagtgcatgtagcaagagcagatatgaaactctatagttttgagcttctagaaaacag

SEQ ID NO: 8076 - DNA, 600 bp, Chicken  19866894202446_2
tttctcatttttatggaaatgctttcgtttctctgaaatgctgcacacaaggctgtctaaccaacaaagctgtaaccctgtccaccctcagagcttggttacgactgcagtcattcccctgtgaggatctgctccacagaggagctgcaaatctcagcctgagcaagaccagggcaaagggaagcaatgttctgtagtactcacagagmtcagaaagtcactactctgaatgcttggcatgcatttcctttcagaggaatcttttaatatcagtaaaacgtattaatacaagaatgcacrttgccagaaaaagtatgtcttgcattatgaagacgtagcagctcaagtaaatggttaaaccattctaaagcagtaagaaatatgtgtattgttatggaaaacacattraagcgacaaactgccctaccaaattcaatccttatgtctttttagtgcatgtagcaagagcagatatgaaactctatagttttgagcttctagaaaacagtatcttagagggaggaactattgaatacagacaagataaggcactgcagacttgagggaaaagcctaatttgcgctgtctggtgcgatgcca

SEQ ID NO: 8077 - DNA, 496 bp, Chicken  19866894202446_3
agtcattcccctgtgaggatctgctccacagaggagctgcaaatctcagcctgagcaagaccagggcaaagggaagcaatgttctgtagtactcacagagmtcagaaagtcactactctgaatgcttggcatgcatttcctttcagaggaatcttttaatatcagtaaaacgtattaatacaagaatgcacrttgccagaaaaagtatgtcttgcattatgaagacgtagcagctcaagtaaatggttaaaccattctaaagcagtaagaaatatgtgtattgttatggaaaacacattraagcgacaaactgccctaccaaattcaatccttatgtctttttagtgcatgtagcaagagcagatatgaaactctatagttttgagcttctagaaaacagtatcttagagggaggaactattgaatacagacaagataaggcactgcagacttgagggaaaagcctaatttgcgctgtctggtgcgatgccacttc

SEQ ID NO: 8078 - DNA, 600 bp, Chicken  19866894202447_1
attttccagatacctttagagttatcatgctaaccaattgcttttaaatcccaagtagctcttcagtcccttcttactctcagcaaagcagaaatgttcaaaacaccaaacagtaaagcctcctgggcttcacatatatgaataaccaagcagcttctcaattaaaaaagagactaaaccaacttcaaaactgggaggcaataactcagttttagttaagcatcttctttgaaggaatactgtaaaaagccataacaagggacagtggatctcagcaacattttatactacggtatctaygttattttcggttttacctcgacatacatcctctgccaggcttccagaattgctgctgctttatcctcattccagttgatatgtgaaacatattcatatcccttgaagtgctcatacatttgcttaggagtcattaactgaaacatggtttgcaaagcctgggcactgtaacagagagaaataagaggaggaacaggcataaaataaatatttttagtaaattattctcatggcatgaaaccccaaatgagagcctaatagcatgtaggagctcttgattttatagagcacatattgata

SEQ ID NO: 8079 - DNA, 600 bp, Chicken  19866894202448_1
ttaggggtttcaaagcatagctagagttcagtgcttctgcctaggatctgtgtctgaacttgcaatgttgatttccaaatctcttcctttttgagcctctggatgcttctaggaagccatgccttctttttatttcctcccaagctaacacagtgaaagagcctctgtagtagtttgcctcaaggtaccctttctctccctggcttaggcgaagtatctcaatccagttgatattttgcaactcacatgttacacgatttctcttctgatgagcccttcctaggttcatcaaaagggctrtgttgtgcccaaagctgcctgcacttccagcagatctggaaagttgttgktttttattattgcagttagagcccatctagtagggtgccatcctcttgacagggaggccacactctctttggaccttgtgctttctttccctacctcgagctcatctacactacctactggcacyactcattctcattcagacaagagtcacattgttctttgcagggttacaggtcaattaggagagggtccagtgaggcgttagagcyggtatgaggaagaagataagaccgtaaagagtaattgagt

SEQ ID NO: 8080 - DNA, 600 bp, Chicken  19866894202448_2
tgtctgaacttgcaatgttgatttccaaatctcttcctttttgagcctctggatgcttctaggaagccatgccttctttttatttcctcccaagctaacacagtgaaagagcctctgtagtagtttgcctcaaggtaccctttctctccctggcttaggcgaagtatctcaatccagttgatattttgcaactcacatgttacacgatttctcttctgatgagcccttcctaggttcatcaaaagggctrtgttgtgcccaaagctgcctgcacttccagcagatctggaaagttgttgktttttattattgcagttagagcccatctagtagggtgccatcctcttgacagggaggccacactctctttggaccttgtgctttctttccctacctcgagctcatctacactacctactggcacyactcattctcattcagacaagagtcacattgttctttgcagggttacaggtcaattaggagagggtccagtgaggcgttagagcyggtatgaggaagaagataagaccgtaaagagtaattgagttctctcttccctctcttcctctctactctctttctcagggcagtaaaatg

SEQ ID NO: 8081 - DNA, 600 bp, Chicken  19866894202448_3
tgcctcaaggtaccctttctctccctggcttaggcgaagtatctcaatccagttgatattttgcaactcacatgttacacgatttctcttctgatgagcccttcctaggttcatcaaaagggctrtgttgtgcccaaagctgcctgcacttccagcagatctggaaagttgttgktttttattattgcagttagagcccatctagtagggtgccatcctcttgacagggaggccacactctctttggaccttgtgctttctttccctacctcgagctcatctacactacctactggcacyactcattctcattcagacaagagtcacattgttctttgcagggttacaggtcaattaggagagggtccagtgaggcgttagagcyggtatgaggaagaagataagaccgtaaagagtaattgagttctctcttccctctcttcctctctactctctttctcagggcagtaaaatgttggtttgactcatctgtgatatgtgaattcatcctaatgtgtcaaagagaactgattggctttctcctgtactagcttgctgcctaggcacacgaacgctagttgtaacatgaaggagggacag

SEQ ID NO: 8082 - DNA, 535 bp, Chicken  19866894202448_4
ctcttctgatgagcccttcctaggttcatcaaaagggctrtgttgtgcccaaagctgcctgcacttccagcagatctggaaagttgttgktttttattattgcagttagagcccatctagtagggtgccatcctcttgacagggaggccacactctctttggaccttgtgctttctttccctacctcgagctcatctacactacctactggcacyactcattctcattcagacaagagtcacattgttctttgcagggttacaggtcaattaggagagggtccagtgaggcgttagagcyggtatgaggaagaagataagaccgtaaagagtaattgagttctctcttccctctcttcctctctactctctttctcagggcagtaaaatgttggtttgactcatctgtgatatgtgaattcatcctaatgtgtcaaagagaactgattggctttctcctgtactagcttgctgcctaggcacacgaacgctagttgtaacatgaaggagggacagaagagtgcccccagatgtgg

SEQ ID NO: 8083 - DNA, 600 bp, Chicken  19866894202454_1
agccaaatagagctttcctagtgattaaccagcaagcgatgtgagctagtctgattaactttaaaagaatatatatatatatatatatggtctctgtaagatggagaagaacttggaaaaaaacccacaaacatctctgttgcacagagacacgtggacttcacttatagcgacagtgtatggttatgctccgcaatgtcttaaacgcagtttgcatttcagatatttcataacaaatgttacaaatttattcttcctgtttatgattagcttggaaattaatcatcttgcaagcatccmaaagtgttcatgcataagcatctgcccacactatgccctctttaagctattctttgttacaggcactggtgtcaygaggtcctttgtgtactgtctgaattactgattttctctgacatagtttcacacaataaatcaagaagaggttttaacagaagtgactctttcagagctcttccccttttaaaaatacatgacttgacagttacatggcatctaactaaactgagcagcaagtgtcaaaagttgaagatgctcacctacttggggcacgatacttgtccttagcctttggttact

SEQ ID NO: 8084 - DNA, 600 bp, Chicken  19866894202454_2
tatatatatatatggtctctgtaagatggagaagaacttggaaaaaaacccacaaacatctctgttgcacagagacacgtggacttcacttatagcgacagtgtatggttatgctccgcaatgtcttaaacgcagtttgcatttcagatatttcataacaaatgttacaaatttattcttcctgtttatgattagcttggaaattaatcatcttgcaagcatccmaaagtgttcatgcataagcatctgcccacactatgccctctttaagctattctttgttacaggcactggtgtcaygaggtcctttgtgtactgtctgaattactgattttctctgacatagtttcacacaataaatcaagaagaggttttaacagaagtgactctttcagagctcttccccttttaaaaatacatgacttgacagttacatggcatctaactaaactgagcagcaagtgtcaaaagttgaagatgctcacctacttggggcacgatacttgtccttagcctttggttactacatcagcctcttgattttcaactaaatgctaataaccaggtaacccttacattgcttaacttctctatcaaaaa

SEQ ID NO: 8085 - DNA, 600 bp, Chicken  19866894202454_3
catgctttagtagaaaataaagcttaagtctgacaaaaaaaattggttcttaatagcataatggatcataacagcagttctcaaagccaaaaataattagggcttaaagttttagacattctaaaattgagatttatgtaatgcactaatcaatctgattaggaaactgagatgtttcagccaaaagcttgagtcccatgccaagtaacatccgagttaagccacaaggatacgaccccgatgatggagccagtggtgggtctgctgggctccaggtgaagcaccacagtgttccctacrgcttcatcataccactgtgggtatgaaaacaaagatctcagggatcgtctccagtccttttgttccatctgtttcccttgtgtggctggcaccagtgcagagctggtctgctacaatcactctgggattagacagaacccttacactgccaattcctcataccagggcctggttcctcttcacakgcatgatacactctggcagctgagcactggtagtagcatcaaagcaaagggaactggaagcaaaccctctctctattccacagatattgagtaaattggagagaactgttgcaat

SEQ ID NO: 8086 - DNA, 600 bp, Chicken  19866894202454_4
agcttgagtcccatgccaagtaacatccgagttaagccacaaggatacgaccccgatgatggagccagtggtgggtctgctgggctccaggtgaagcaccacagtgttccctacrgcttcatcataccactgtgggtatgaaaacaaagatctcagggatcgtctccagtccttttgttccatctgtttcccttgtgtggctggcaccagtgcagagctggtctgctacaatcactctgggattagacagaacccttacactgccaattcctcataccagggcctggttcctcttcacakgcatgatacactctggcagctgagcactggtagtagcatcaaagcaaagggaactggaagcaaaccctctctctattccacagatattgagtaaattggagagaactgttgcaatactgtttgcacaatgttctgtctgtgggatgcaatgaagaatgttccttggaaggcctggggtccaaccatgcttcttgggagtaaaatctagcacacaaaaggtggcagtgctaactaaagtccattccatgtcttccatttctttttttcctatgctgaacacccctacctcactccacaata

SEQ ID NO: 8087 - DNA, 600 bp, Chicken  19866894202454_5
agaatgaaaaaaaatcaaagagaaagcagatgccttccaggccttgctctctcacactaccaggccagcacatctcctctcactgtcccagctctcctagcatcctctcagtattcttccccacaccctccctactctcctccttgagctgagggtaaatgggtcttaagcaaagattaaactaaaaattaaaggcaaagtacaaaccctgacacctgagcattaggctgggctttgggggtggattaaaaaattgatactgcaaagacatatttagcatttcattgaatggaaggagayagcttctgccacaaagattgcagtctaaacagacaagaaacaatctattgttcctgcagctcaccagtgtcaggctatgctccccaccccctcctattttcaatctgccatgctttaacagttcgtagcttttgcccagctgcaactacttcaaaaagtgggtggttctgtgcaagttagaggcaaaaacacaatgagattattccagaagggacatgctcatagtatactcagagatgaagaatgttattgggctctaaactgcaccctttcaaacacatagtgagttatttttattta

SEQ ID NO: 8088 - DNA, 600 bp, Chicken  19866894202458_1
ttctggctccatgattgttagcttgtatatgctgaatctgtatggcaagataaatgtatttaggggaattccacatacatgtgctttcgtttcgatgaatggctttaagctgctttagaaatagaaccgttagtgaaattttttgagtgccagtcatcttgcctttagtgagatttaaacttattttgtgctaatgaaacctagaaagaaaagaaagcagggttgtcagagtgggagtgctggagtgtgatggtttgaattctcagattcagatattttttgagaaactatcattacatstttgaagcattgtggctgggtttaccttcaagggtttttggcttgatctgggagagttcatttacgagaaagatagaaatgagtctgcgtactggttgaatgattgtgtgtttaggtgtaattacgccctctttgaattcactcagtggacttttgtaagtaaagcccagttatccaaagaccccatttctcacaagaatgaactgttccgccttgttaaaatgctagctgcaaacaaagtcagaagtcttagctgtaacattcattacttgtatattattatcaatgtttttcaagctt

SEQ ID NO: 8089 - DNA, 599 bp, Chicken  19866894202462_1
  misc_feature (1)..(80): n is any nucleotide
nnnnnnnnnnnnnnnnnnnnnnnnnnnnnnnnnnnnnnnnnnnnnnnnnnnnnnnnnnnnnnnnnnnnnnnnnnnnnnnnaatgtgtgtaagtggatttgaagtgggttatccgaagtataaatggaagcttttctgaatatgtaagaggtgacacttttgaactcttgtaagtgttgaagatgtgggaaatatattattggagtagtagttgaagccattagcctggtgtgtgcttggctgcagtagctgtgtgcaaaataggcatcaatctctagaactgcccatctaccaggggaaraaaagaagtttgttttggaggaggcaatctgtgaagtattctgtgttcaggtttgtaacactgcctggcaaagcgagtatgtaatcttccctctactgaaatactkctctgcaggttggaagctgttccattctgacctgatgactgaggtctcttattaacatacattgytcacaggcatgtatgttgaccccagtagaagaacgagcatatggggaaagaaaaactaagctatgaacgtggaactgccagtactcgtttctacatacagcagtgctcacaagaactggggagaaaaa

SEQ ID NO: 8090 - DNA, 600 bp, Chicken  19866894202462_2
gttatccgaagtataaatggaagcttttctgaatatgtaagaggtgacacttttgaactcttgtaagtgttgaagatgtgggaaatatattattggagtagtagttgaagccattagcctggtgtgtgcttggctgcagtagctgtgtgcaaaataggcatcaatctctagaactgcccatctaccaggggaaraaaagaagtttgttttggaggaggcaatctgtgaagtattctgtgttcaggtttgtaacactgcctggcaaagcgagtatgtaatcttccctctactgaaatactkctctgcaggttggaagctgttccattctgacctgatgactgaggtctcttattaacatacattgytcacaggcatgtatgttgaccccagtagaagaacgagcatatggggaaagaaaaactaagctatgaacgtggaactgccagtactcgtttctacatacagcagtgctcacaagaactggggagaaaaaacaaaccttgaagagtcttacaattagtcataaatatgaaacgttttgcacacatacrgattgctggagmtgtgtgttaccagatggcagtgaggtctgtgctttag

SEQ ID NO: 8091 - DNA, 600 bp, Chicken  19866894202462_3
agtgttgaagatgtgggaaatatattattggagtagtagttgaagccattagcctggtgtgtgcttggctgcagtagctgtgtgcaaaataggcatcaatctctagaactgcccatctaccaggggaaraaaagaagtttgttttggaggaggcaatctgtgaagtattctgtgttcaggtttgtaacactgcctggcaaagcgagtatgtaatcttccctctactgaaatactkctctgcaggttggaagctgttccattctgacctgatgactgaggtctcttattaacatacattgytcacaggcatgtatgttgaccccagtagaagaacgagcatatggggaaagaaaaactaagctatgaacgtggaactgccagtactcgtttctacatacagcagtgctcacaagaactggggagaaaaaacaaaccttgaagagtcttacaattagtcataaatatgaaacgttttgcacacatacrgattgctggagmtgtgtgttaccagatggcagtgaggtctgtgctttagcttcagkttgctgtgccattcgcaccggctcctgctttgtgttaccagcttttcacacagcatcc

SEQ ID NO: 8092 - DNA, 536 bp, Chicken  19866894202462_4
acactgcctggcaaagcgagtatgtaatcttccctctactgaaatactkctctgcaggttggaagctgttccattctgacctgatgactgaggtctcttattaacatacattgytcacaggcatgtatgttgaccccagtagaagaacgagcatatggggaaagaaaaactaagctatgaacgtggaactgccagtactcgtttctacatacagcagtgctcacaagaactggggagaaaaaacaaaccttgaagagtcttacaattagtcataaatatgaaacgttttgcacacatacrgattgctggagmtgtgtgttaccagatggcagtgaggtctgtgctttagcttcagkttgctgtgccattcgcaccggctcctgctttgtgttaccagcttttcacacagcatcctcccatccwgctgcaggtcagaaaccaactgcaagacctggaaggcgaagacacgaacccattcagattcattgcatgtagtttcccttttgctcttctgttttcctaacggcccaaatcag

SEQ ID NO: 8093 - DNA, 524 bp, Chicken  19866894202462_5
aaagcgagtatgtaatcttccctctactgaaatactkctctgcaggttggaagctgttccattctgacctgatgactgaggtctcttattaacatacattgytcacaggcatgtatgttgaccccagtagaagaacgagcatatggggaaagaaaaactaagctatgaacgtggaactgccagtactcgtttctacatacagcagtgctcacaagaactggggagaaaaaacaaaccttgaagagtcttacaattagtcataaatatgaaacgttttgcacacatacrgattgctggagmtgtgtgttaccagatggcagtgaggtctgtgctttagcttcagkttgctgtgccattcgcaccggctcctgctttgtgttaccagcttttcacacagcatcctcccatccwgctgcaggtcagaaaccaactgcaagacctggaaggcgaagacacgaacccattcagattcattgcatgtagtttcccttttgctcttctgttttcctaacggcccaaatcag

SEQ ID NO: 8094 - DNA, 480 bp, Chicken  19866894202462_6
ggttggaagctgttccattctgacctgatgactgaggtctcttattaacatacattgytcacaggcatgtatgttgaccccagtagaagaacgagcatatggggaaagaaaaactaagctatgaacgtggaactgccagtactcgtttctacatacagcagtgctcacaagaactggggagaaaaaacaaaccttgaagagtcttacaattagtcataaatatgaaacgttttgcacacatacrgattgctggagmtgtgtgttaccagatggcagtgaggtctgtgctttagcttcagkttgctgtgccattcgcaccggctcctgctttgtgttaccagcttttcacacagcatcctcccatccwgctgcaggtcagaaaccaactgcaagacctggaaggcgaagacacgaacccattcagattcattgcatgtagtttcccttttgctcttctgttttcctaacggcccaaatcag

SEQ ID NO: 8095 - DNA, 413 bp, Chicken  19866894202462_7
tgtatgttgaccccagtagaagaacgagcatatggggaaagaaaaactaagctatgaacgtggaactgccagtactcgtttctacatacagcagtgctcacaagaactggggagaaaaaacaaaccttgaagagtcttacaattagtcataaatatgaaacgttttgcacacatacrgattgctggagmtgtgtgttaccagatggcagtgaggtctgtgctttagcttcagkttgctgtgccattcgcaccggctcctgctttgtgttaccagcttttcacacagcatcctcccatccwgctgcaggtcagaaaccaactgcaagacctggaaggcgaagacacgaacccattcagattcattgcatgtagtttcccttttgctcttctgttttcctaacggcccaaatcag

SEQ ID NO: 8096 - DNA, 600 bp, Chicken  19866894202474_1
atggatattccacaactgtgtgtgccatctcacagctagggagctaggattttagcagggctggctgtgggagtggatagaggaggaattttcttgggagagagatgacctctttcccaaggaggtgatgccagtgatgaagtaacagtgctttgacactgcagcttccatatgttcatggaatcacagaacagtttggggcaaaagggacctcacagactgtcaggttccaaccccctgctgtgggcagtgttgccaaccatttaaatcgggcaccagatcaggctgcccagggcctcrtccaacccagyyctgaatrcctcmagaggtggagcacccacaccctctctsagcagcctgtgtcagcacctyggccacccttttcagtgaaacatgtccccctgacatctaattaaatttcctttaagatgtcatcttagacatatcttcattgactcagccattaatacaggactctggcacagccagaccctggcgtgcctgctgacacatggggtacctcaggtggcacaagccctcaggacaacgttcacttggtgctcaggcacctagaagtgagtctgtgtgtgcaaggtgcca

SEQ ID NO: 8097 - DNA, 600 bp, Chicken  19866894202474_2
acaactgtgtgtgccatctcacagctagggagctaggattttagcagggctggctgtgggagtggatagaggaggaattttcttgggagagagatgacctctttcccaaggaggtgatgccagtgatgaagtaacagtgctttgacactgcagcttccatatgttcatggaatcacagaacagtttggggcaaaagggacctcacagactgtcaggttccaaccccctgctgtgggcagtgttgccaaccatttaaatcgggcaccagatcaggctgcccagggcctcrtccaacccagyyctgaatrcctcmagaggtggagcacccacaccctctctsagcagcctgtgtcagcacctyggccacccttttcagtgaaacatgtccccctgacatctaattaaatttcctttaagatgtcatcttagacatatcttcattgactcagccattaatacaggactctggcacagccagaccctggcgtgcctgctgacacatggggtacctcaggtggcacaagccctcaggacaacgttcacttggtgctcaggcacctagaagtgagtctgtgtgtgcaaggtgccaaagctcttatt

SEQ ID NO: 8098 - DNA, 599 bp, Chicken  19866894202474_3
caactgtgtgtgccatctcacagctagggagctaggattttagcagggctggctgtgggagtggatagaggaggaattttcttgggagagagatgacctctttcccaaggaggtgatgccagtgatgaagtaacagtgctttgacactgcagcttccatatgttcatggaatcacagaacagtttggggcaaaagggacctcacagactgtcaggttccaaccccctgctgtgggcagtgttgccaaccatttaaatcgggcaccagatcaggctgcccagggcctcrtccaacccagyyctgaatrcctcmagaggtggagcacccacaccctctctsagcagcctgtgtcagcacctyggccacccttttcagtgaaacatgtccccctgacatctaattaaatttcctttaagatgtcatcttagacatatcttcattgactcagccattaatacaggactctggcacagccagaccctggcgtgcctgctgacacatggggtacctcaggtggcacaagccctcaggacaacgttcacttggtgctcaggcacctagaagtgagtctgtgtgtgcaaggtgccaaagctcttatt

SEQ ID NO: 8099 - DNA, 592 bp, Chicken  19866894202474_4
gtgtgccatctcacagctagggagctaggattttagcagggctggctgtgggagtggatagaggaggaattttcttgggagagagatgacctctttcccaaggaggtgatgccagtgatgaagtaacagtgctttgacactgcagcttccatatgttcatggaatcacagaacagtttggggcaaaagggacctcacagactgtcaggttccaaccccctgctgtgggcagtgttgccaaccatttaaatcgggcaccagatcaggctgcccagggcctcrtccaacccagyyctgaatrcctcmagaggtggagcacccacaccctctctsagcagcctgtgtcagcacctyggccacccttttcagtgaaacatgtccccctgacatctaattaaatttcctttaagatgtcatcttagacatatcttcattgactcagccattaatacaggactctggcacagccagaccctggcgtgcctgctgacacatggggtacctcaggtggcacaagccctcaggacaacgttcacttggtgctcaggcacctagaagtgagtctgtgtgtgcaaggtgccaaagctcttatt

SEQ ID NO: 8100 - DNA, 587 bp, Chicken  19866894202474_5
ccatctcacagctagggagctaggattttagcagggctggctgtgggagtggatagaggaggaattttcttgggagagagatgacctctttcccaaggaggtgatgccagtgatgaagtaacagtgctttgacactgcagcttccatatgttcatggaatcacagaacagtttggggcaaaagggacctcacagactgtcaggttccaaccccctgctgtgggcagtgttgccaaccatttaaatcgggcaccagatcaggctgcccagggcctcrtccaacccagyyctgaatrcctcmagaggtggagcacccacaccctctctsagcagcctgtgtcagcacctyggccacccttttcagtgaaacatgtccccctgacatctaattaaatttcctttaagatgtcatcttagacatatcttcattgactcagccattaatacaggactctggcacagccagaccctggcgtgcctgctgacacatggggtacctcaggtggcacaagccctcaggacaacgttcacttggtgctcaggcacctagaagtgagtctgtgtgtgcaaggtgccaaagctcttatt

SEQ ID NO: 8101 - DNA, 560 bp, Chicken  19866894202474_6
ttagcagggctggctgtgggagtggatagaggaggaattttcttgggagagagatgacctctttcccaaggaggtgatgccagtgatgaagtaacagtgctttgacactgcagcttccatatgttcatggaatcacagaacagtttggggcaaaagggacctcacagactgtcaggttccaaccccctgctgtgggcagtgttgccaaccatttaaatcgggcaccagatcaggctgcccagggcctcrtccaacccagyyctgaatrcctcmagaggtggagcacccacaccctctctsagcagcctgtgtcagcacctyggccacccttttcagtgaaacatgtccccctgacatctaattaaatttcctttaagatgtcatcttagacatatcttcattgactcagccattaatacaggactctggcacagccagaccctggcgtgcctgctgacacatggggtacctcaggtggcacaagccctcaggacaacgttcacttggtgctcaggcacctagaagtgagtctgtgtgtgcaaggtgccaaagctcttatt

SEQ ID NO: 8102 - DNA, 539 bp, Chicken  19866894202474_7
gtggatagaggaggaattttcttgggagagagatgacctctttcccaaggaggtgatgccagtgatgaagtaacagtgctttgacactgcagcttccatatgttcatggaatcacagaacagtttggggcaaaagggacctcacagactgtcaggttccaaccccctgctgtgggcagtgttgccaaccatttaaatcgggcaccagatcaggctgcccagggcctcrtccaacccagyyctgaatrcctcmagaggtggagcacccacaccctctctsagcagcctgtgtcagcacctyggccacccttttcagtgaaacatgtccccctgacatctaattaaatttcctttaagatgtcatcttagacatatcttcattgactcagccattaatacaggactctggcacagccagaccctggcgtgcctgctgacacatggggtacctcaggtggcacaagccctcaggacaacgttcacttggtgctcaggcacctagaagtgagtctgtgtgtgcaaggtgccaaagctcttatt

SEQ ID NO: 8103 - DNA, 599 bp, Chicken  19866894202486_1
  misc_feature (1)..(101): n is any nucleotide
nnnnnnnnnnnnnnnnnnnnnnnnnnnnnnnnnnnnnnnnnnnnnnnnnnnnnnnnnnnnnnnnnnnnnnnnnnnnnnnnnnnnnnnnnnnnnnnnnnnnnattaaaaatattcttcaaattgaacattatcaccgatttattttttttccagtttgttgctttttctgctttggtgcagaaaacttttctttttgttgacagtgaaggaccatttatagagaaggatacaagagaaatacttccaggtaaacaatcttctttttgtttttaagtaggttgtgtcttcaaagtttgtttyactgttcttcccaccctctcctctgtatttttaaggagatgaataggaaatgaaatgaaagatgttggtaccaaatattttctcctatcatgctctcctttaaagctgttattatgaatcttctgaagaagattcatttctttcaggtctataaatgttttctaaagttggcaagcatattttaaggaagtatacttcatgatgttttaaatactgttggccaaaaaacacagtgacatccatgactgaacccattaaattaatgtaaaatggacattgcttctgcatctcctatcagt

SEQ ID NO: 8104 - DNA, 433 bp, Chicken  19866894202486_2
aatcttctgaagaagattcatttctttcaggtctataaatgttttctaaagttggcaagcatattttaaggaagtatacttcatgatgttttaaatactgttggccaaaaaacacagtgacatccatgactgaacccattaaattaatgtaaaatggacattgcttctgcatctcctatcagttcttgtctatataaagcgccatgattcccagcagtgaggcaaacattcaaatcgataaagatatccccttaaatcatcagctggcagccagaaacttttcttggttacagacaaaawgcttttcaccatactgaaaattgaattaaatggcataacagactattttaaataaaggacactgtagtgagattgataaaagactggtaaaacaagaagtacctcttcaagtagcacagttttcagtctttcc

SEQ ID NO: 8105 - DNA, 568 bp, Chicken  19866894202487_1
ggaacacctcaaacaaagtaattggaaaacatcttagagaattaaaaaaaaattcacttgtccaaatacttcagtagtagctttatttccacgtcatatgaaaaaatgctatcacaaaatatttggaatactatcagagtttagtgttctaacacatccataactataactagatcttccatatatccacagtgttggaagtcaggtggactgaatgaccacccattgtgcagtacagacatacaacgtgaggtacactgactctcagggttaccgtaggcagcttgttgaggagtaaaygctctcctaactcctaattagttattatttgcaattcattcaaaaattaccttctttcaatggatgtaatmatcaaaattgtttcacaaattagcttagacaaacactaaagtgtgttaaatccagctatttgtaacaccatcctttttctcagcacatatcccatctagctctttgtttcatatacagaagacttctttttctctaaactccatctttgcaaactgtttaaagcaaaaaataaaagtcctcatttgcccatcctcat

SEQ ID NO: 8106 - DNA, 497 bp, Chicken  19866894202487_2
cagtagtagctttatttccacgtcatatgaaaaaatgctatcacaaaatatttggaatactatcagagtttagtgttctaacacatccataactataactagatcttccatatatccacagtgttggaagtcaggtggactgaatgaccacccattgtgcagtacagacatacaacgtgaggtacactgactctcagggttaccgtaggcagcttgttgaggagtaaaygctctcctaactcctaattagttattatttgcaattcattcaaaaattaccttctttcaatggatgtaatmatcaaaattgtttcacaaattagcttagacaaacactaaagtgtgttaaatccagctatttgtaacaccatcctttttctcagcacatatcccatctagctctttgtttcatatacagaagacttctttttctctaaactccatctttgcaaactgtttaaagcaaaaaataaaagtcctcatttgcccatcctcat

SEQ ID NO: 8107 - DNA, 600 bp, Chicken  19866894202503_1
ctgcacacaccactgaggtgcccgagcagctgtggcacagctcagtgtgtgcactgatgtgcacccagcacagccccgtgtctctgtaggtgcactgtgctccctctccagggccctcccacatcctcacctcccttcaggagaacatccaccctcgggtaccacagtgctgcaccatctgcacacccacccagtgtcaccaagacaacagaaaaactcctaaaatatccaaaaacgaccacgcttggctgttcctacggatgctttcctgtgccatccctgctccctgcatccctttgwcccactctgcaccatcacaccacgtctttgccccagctctgcctgccccaccgctgccagctccccgccactcgttaattagctctgtgctattattgtgtcgtcatggtgaatctacccactcctccgatccgagcwgggagaatgggggaagctgtaattagagtgaatctcattagaaactgcttcatctaatcaggctcccccacaccctccattacaattgaagttcactgccacaaaacagtccaagcaaaacaaagtgcacagtgtgaccccatgagaaagatggtgtcattt

SEQ ID NO: 8108 - DNA, 600 bp, Chicken  19866894202503_2
aggagaacatccaccctcgggtaccacagtgctgcaccatctgcacacccacccagtgtcaccaagacaacagaaaaactcctaaaatatccaaaaacgaccacgcttggctgttcctacggatgctttcctgtgccatccctgctccctgcatccctttgwcccactctgcaccatcacaccacgtctttgccccagctctgcctgccccaccgctgccagctccccgccactcgttaattagctctgtgctattattgtgtcgtcatggtgaatctacccactcctccgatccgagcwgggagaatgggggaagctgtaattagagtgaatctcattagaaactgcttcatctaatcaggctcccccacaccctccattacaattgaagttcactgccacaaaacagtccaagcaaaacaaagtgcacagtgtgaccccatgagaaagatggtgtcatttatacactgctgcttgctttgtttaagtttctgcttgcctggtgtaattagaacataccgagaattcagacctgctccaggttttgcaggctggtatctgcaggttgcctgaatgtaatcatatattcatggaatttta

SEQ ID NO: 8109 - DNA, 600 bp, Chicken  19866894202503_3
gtggctgcttctgctggcggtaacgcggtcacctgtgtgcactgaggatgcaatctggcagctctgctccggacacaggaagaaatgccaacaaactggttgccaaatgtagcacttggagagcctatctgcagctgcagagctcggcaggtccaacccttccagatctccatctccttcatctgctgccacagcatgagtggggcaggccaggtcccaggttccagcctgctcctcgctgcttggcagggctgggccaacacgatcccatgggctgcaccttcacaggtcccatattcrtgaaccttgaggtcttccagataagaatttcacctccagggggtcattccattcccagatacctccttggctcctcctggcaagccggagctgggatttagaaggcagagtcccccgacacatcacagcatttcatgtaagctcctggtttgcaaggygcagagaaaaggcaaagggtcctcttggcattccctgtcctgcagccccacgcagatctcatccgctcagcgcaaggaatgtcttcatggagagcagccccctctgtcctgcctatgagtgcttgcagtgtgacactaygct

SEQ ID NO: 8110 - DNA, 600 bp, Chicken  19866894202503_4
cttccagatctccatctccttcatctgctgccacagcatgagtggggcaggccaggtcccaggttccagcctgctcctcgctgcttggcagggctgggccaacacgatcccatgggctgcaccttcacaggtcccatattcrtgaaccttgaggtcttccagataagaatttcacctccagggggtcattccattcccagatacctccttggctcctcctggcaagccggagctgggatttagaaggcagagtcccccgacacatcacagcatttcatgtaagctcctggtttgcaaggygcagagaaaaggcaaagggtcctcttggcattccctgtcctgcagccccacgcagatctcatccgctcagcgcaaggaatgtcttcatggagagcagccccctctgtcctgcctatgagtgcttgcagtgtgacactaygctggtggcactggggcacytggggacaccccatgtggggatgtgtgcgtgatgcacacagacgtacactgcttgcatctttttttaactaagcccaagaaaacccattaaaccctgcaaatgtcaactctgcatttacactgctgggtaaaaagcaaatt

SEQ ID NO: 8111 - DNA, 585 bp, Chicken  19866894202503_5
tcrtgaaccttgaggtcttccagataagaatttcacctccagggggtcattccattcccagatacctccttggctcctcctggcaagccggagctgggatttagaaggcagagtcccccgacacatcacagcatttcatgtaagctcctggtttgcaaggygcagagaaaaggcaaagggtcctcttggcattccctgtcctgcagccccacgcagatctcatccgctcagcgcaaggaatgtcttcatggagagcagccccctctgtcctgcctatgagtgcttgcagtgtgacactaygctggtggcactggggcacytggggacaccccatgtggggatgtgtgcgtgatgcacacagacgtacactgcttgcatctttttttaactaagcccaagaaaacccattaaaccctgcaaatgtcaactctgcatttacactgctgggtaaaaagcaaatttgccatgggaatcccagaggaggctcacggctgtgcacgttccacagcaggaggcgagtgaggatccttcccctgctctgtaatttcagagccctgcctcactccaagggtttggagaggagag

SEQ ID NO: 8112 - DNA, 565 bp, Chicken  19866894202503_6
cagataagaatttcacctccagggggtcattccattcccagatacctccttggctcctcctggcaagccggagctgggatttagaaggcagagtcccccgacacatcacagcatttcatgtaagctcctggtttgcaaggygcagagaaaaggcaaagggtcctcttggcattccctgtcctgcagccccacgcagatctcatccgctcagcgcaaggaatgtcttcatggagagcagccccctctgtcctgcctatgagtgcttgcagtgtgacactaygctggtggcactggggcacytggggacaccccatgtggggatgtgtgcgtgatgcacacagacgtacactgcttgcatctttttttaactaagcccaagaaaacccattaaaccctgcaaatgtcaactctgcatttacactgctgggtaaaaagcaaatttgccatgggaatcccagaggaggctcacggctgtgcacgttccacagcaggaggcgagtgaggatccttcccctgctctgtaatttcagagccctgcctcactccaagggtttggagaggagag

SEQ ID NO: 8113 - DNA, 581 bp, Chicken  19866894202508_1
tgacattctttgattaatacgtaacctttgaaccaagtatcatgaaggcacaccaagtaaaaatataaaatacaaaatcaagaactggagaactgtggagaactggttgtctccggaaggagttaaatgcttggttttagagaagaaaaatgggtgtcaaatcactgacgggaagaaaaagggcactgaagtgctgttaaaccttagacaaagccagtaaacaagaagggaggcaagatctaaagaactgaggcaggaagagtgatacttagaaatggaaatataaaagtggctggtggmaagaatcctgtgtgggtatataagrgttagagataaaacagaaatggaagggttcagatgaagatattaaatgtcaaacygagactctcaggagtacagatcagaagggaccgctaatagaaggaaaaaattgagacacttgaaagcagaggaatatgtgttttattaccaattctctcagacatccaaggactgctgcaaaaatcacagctcacctggcctctatttcttcatctgtaaaatgaagctacaattcatcggattagtttagaatcatagaa

SEQ ID NO: 8114 - DNA, 556 bp, Chicken  19866894202508_2
ctttgaaccaagtatcatgaaggcacaccaagtaaaaatataaaatacaaaatcaagaactggagaactgtggagaactggttgtctccggaaggagttaaatgcttggttttagagaagaaaaatgggtgtcaaatcactgacgggaagaaaaagggcactgaagtgctgttaaaccttagacaaagccagtaaacaagaagggaggcaagatctaaagaactgaggcaggaagagtgatacttagaaatggaaatataaaagtggctggtggmaagaatcctgtgtgggtatataagrgttagagataaaacagaaatggaagggttcagatgaagatattaaatgtcaaacygagactctcaggagtacagatcagaagggaccgctaatagaaggaaaaaattgagacacttgaaagcagaggaatatgtgttttattaccaattctctcagacatccaaggactgctgcaaaaatcacagctcacctggcctctatttcttcatctgtaaaatgaagctacaattcatcggattagtttagaatcatagaa

SEQ ID NO: 8115 - DNA, 501 bp, Chicken  19866894202508_3
agaactggagaactgtggagaactggttgtctccggaaggagttaaatgcttggttttagagaagaaaaatgggtgtcaaatcactgacgggaagaaaaagggcactgaagtgctgttaaaccttagacaaagccagtaaacaagaagggaggcaagatctaaagaactgaggcaggaagagtgatacttagaaatggaaatataaaagtggctggtggmaagaatcctgtgtgggtatataagrgttagagataaaacagaaatggaagggttcagatgaagatattaaatgtcaaacygagactctcaggagtacagatcagaagggaccgctaatagaaggaaaaaattgagacacttgaaagcagaggaatatgtgttttattaccaattctctcagacatccaaggactgctgcaaaaatcacagctcacctggcctctatttcttcatctgtaaaatgaagctacaattcatcggattagtttagaatcatagaa

SEQ ID NO: 8116 - DNA, 600 bp, Chicken  19866894202512_1
tagtttatatagagctaatcccctccatatgtagttaacacctcaggatatgtgctttattttacaactaatgcttatgccaaacatcctagaccacaaaaagattttaatgaaggacagtactaatttgcctccagcatatcaccaatttgactaaagtttgaattgtcttgtgggagttctgcttgcttggataaaatctgaattagttttgcatgcataaaattataccttaaagaaaaaattctacgttatgtaatattgaacagcttaactactacatctaattatattaaagaytaaactggaagaaacaacacttcagatttgattataaacatgaaagcaaatgagaagcagcaagtttaacactgctttaagctgtgctgtaagtacccttgaaaaatccatgtccttgccatcctttccaatgccagrctacactttgtaggtcatactataaatcatacttggagtaagcctccctggagaaaactgaragaattgcctttagcagttatcactgcctttagcagcaatactgtcagttttcaaacagagtaaatgtctgattttccttccttccaagctcagggagga

SEQ ID NO: 8117 - DNA, 600 bp, Chicken  19866894202512_2
atatcaccaatttgactaaagtttgaattgtcttgtgggagttctgcttgcttggataaaatctgaattagttttgcatgcataaaattataccttaaagaaaaaattctacgttatgtaatattgaacagcttaactactacatctaattatattaaagaytaaactggaagaaacaacacttcagatttgattataaacatgaaagcaaatgagaagcagcaagtttaacactgctttaagctgtgctgtaagtacccttgaaaaatccatgtccttgccatcctttccaatgccagrctacactttgtaggtcatactataaatcatacttggagtaagcctccctggagaaaactgaragaattgcctttagcagttatcactgcctttagcagcaatactgtcagttttcaaacagagtaaatgtctgattttccttccttccaagctcagggaggaaacactgcctatgtttcatagaatcttagaatggcttgggttgggagtttcctgtagtctagtctgaaacgttgagttcttcccaaggagaaaaacctaattactaaattagactttacaaaaaatgaagtctaaatc

SEQ ID NO: 8118 - DNA, 600 bp, Chicken  19866894202512_3
ctgaattagttttgcatgcataaaattataccttaaagaaaaaattctacgttatgtaatattgaacagcttaactactacatctaattatattaaagaytaaactggaagaaacaacacttcagatttgattataaacatgaaagcaaatgagaagcagcaagtttaacactgctttaagctgtgctgtaagtacccttgaaaaatccatgtccttgccatcctttccaatgccagrctacactttgtaggtcatactataaatcatacttggagtaagcctccctggagaaaactgaragaattgcctttagcagttatcactgcctttagcagcaatactgtcagttttcaaacagagtaaatgtctgattttccttccttccaagctcagggaggaaacactgcctatgtttcatagaatcttagaatggcttgggttgggagtttcctgtagtctagtctgaaacgttgagttcttcccaaggagaaaaacctaattactaaattagactttacaaaaaatgaagtctaaatcttcaagattcagattttcagatgtgaagattaggtaaaactaccaagtggtttgaatatttt

SEQ ID NO: 8119 - DNA, 600 bp, Chicken  19866894202512_4
tgagttcttcccaaggagaaaaacctaattactaaattagactttacaaaaaatgaagtctaaatcttcaagattcagattttcagatgtgaagattaggtaaaactaccaagtggtttgaatattttagtgaactgagaatttttgtggtggaaatgcaagcatcttaagttctgcaagaaatgctcatacctgacagacttctgaagaggcataactatcgaaaaaaaagaaaaatcactattttttctatttccttttcaactaatattttctaattcaatttttaagatttttagrattttcttagaatttattctaccaaaaaagtggtaaagatgtgctaatgtatggtacccgactagtaacacgtgggactggagtttgagatggaaatctttatggtatgttgactttctgggagtgtccaacttagaggtgtagtaaaggttagaggtgtagtaaaaaaaacacccaggatcacaggagacatttatttataagcaaggtctgtgatcatgtattcattttgctatactcccattgcagcctttctgagtagcaagcagctcctggcttgtttgtttccctgaagctctt

SEQ ID NO: 8120 - DNA, 599 bp, Chicken  19866894202515_1
  misc_feature (1)..(143): n is any nucleotide
nnnnnnnnnnnnnnnnnnnnnnnnnnnnnnnnnnnnnnnnnnnnnnnnnnnnnnnnnnnnnnnnnnnnnnnnnnnnnnnnnnnnnnnnnnnnnnnnnnnnnnnnnnnnnnnnnnnnnnnnnnnnnnnnnnnnnnnnnnnnnnnggtgcgttctgattttaagagttgcttcttatctaatctccttcattggagtaagcaaggtgtgggaaactcaaactattacgaaaattggccactcgagtcaccgaacttttgaaccgtcattgtctgaaaagccaggtctgtactccagcctttyacaatctgtaggtgtgacaataactgtaaatatagctcttagaatttctacgtgtcttacagcatggctgcctctaaactcccagcatggcaaaatagtaaagggatgattttattgaaattatattctgtgggctgcagtgactgcagcatggctggaacgatgcagaaagtttggagtgattgttgccctacaaagtgactgcaagaaagcttctgcatggaactcctcactgttttcctatggcctcttgcaggctgtatatatagaggctgagggagtgctaaggggtgttagag

SEQ ID NO: 8121 - DNA, 600 bp, Chicken  19866894202515_2
atggctgcctctaaactcccagcatggcaaaatagtaaagggatgattttattgaaattatattctgtgggctgcagtgactgcagcatggctggaacgatgcagaaagtttggagtgattgttgccctacaaagtgactgcaagaaagcttctgcatggaactcctcactgttttcctatggcctcttgcaggctgtatatatagaggctgagggagtgctaaggggtgttagagtacaaacccaagtgaggatcttccttgcattaggagacagaggtgcagtagtaggaagggttakgaggaggacttgcagcgccgctgtttgtcctgtgtctgttttgtgcacagaacacaacagtaggacagggrctcagtgcctctgtgcagcacccgactcgtgcagtgctaacccacagtagcagtggtagaggctcttttaaaacagatgcgtgagatcctgcaaatcagtggaggtaagggctttggggaatgccattaaatcaaggccttgtacagattaggcataactaacaaattatatgtacttctaaaacagtcattgctcagtacactgtcttctccacccacaagatttact

SEQ ID NO: 8122 - DNA, 600 bp, Chicken  19866894202515_3
ctgcagtgactgcagcatggctggaacgatgcagaaagtttggagtgattgttgccctacaaagtgactgcaagaaagcttctgcatggaactcctcactgttttcctatggcctcttgcaggctgtatatatagaggctgagggagtgctaaggggtgttagagtacaaacccaagtgaggatcttccttgcattaggagacagaggtgcagtagtaggaagggttakgaggaggacttgcagcgccgctgtttgtcctgtgtctgttttgtgcacagaacacaacagtaggacagggrctcagtgcctctgtgcagcacccgactcgtgcagtgctaacccacagtagcagtggtagaggctcttttaaaacagatgcgtgagatcctgcaaatcagtggaggtaagggctttggggaatgccattaaatcaaggccttgtacagattaggcataactaacaaattatatgtacttctaaaacagtcattgctcagtacactgtcttctccacccacaagatttactataaaaagacctctccagattggtgtgtcaggcctccagatgtcaatgtgcttgatgaggcagagactgac

SEQ ID NO: 8123 - DNA, 600 bp, Chicken  19866894202515_4
taacccacagtagcagtggtagaggctcttttaaaacagatgcgtgagatcctgcaaatcagtggaggtaagggctttggggaatgccattaaatcaaggccttgtacagattaggcataactaacaaattatatgtacttctaaaacagtcattgctcagtacactgtcttctccacccacaagatttactataaaaagacctctccagattggtgtgtcaggcctccagatgtcaatgtgcttgatgaggcagagactgacagtgattcagacagtctctgacatttttttaaaatcrtttttttttttttttttgagggggctgttttttgttttagctgggcaaatggggccaaatccagagccagcctgtctcacaccaggaaagggggaggtggcacaactgctgtgacgatgtgccacctcggggaggtggagagctcccacgtgttggtgaagcagggctgaggagggatttctgctcgaaggctgagctcagctgtctgaatgcaggcgtctgatgccatttgaggtacccttcgaatatcccgtctggttgctgagtactagcttggaagaccagtcattttggcagcag

SEQ ID NO: 8124 - DNA, 599 bp, Chicken  19866894202523_1
  misc_feature (1)..(106): n is any nucleotide
nnnnnnnnnnnnnnnnnnnnnnnnnnnnnnnnnnnnnnnnnnnnnnnnnnnnnnnnnnnnnnnnnnnnnnnnnnnnnnnnnnnnnnnnnnnnnnnnnnnnnnnnnnctgctgtggttaagatataagaaaaaaaggattcatttcattctacattttgtgaactgtctttgcctgagggacgacagccctctgtgtcttagttccctattttaaagggcagctaatagctcttctccctctgaaaaggtgttgtggagacaaaacccactaacacttatgagttgcgtggctactgctgyaatgggagttgtattagcacrcatggacagaaggatctctttctttggataccctggtttatctaggatggatgtcctgttttattgagaaattgcccattgaagagacactcagatgagataaaagggaaaaattggtggtggattcagaaagatcaataatggcgtttgttttatgagtgaccctgaaaaaaacaataagcacttagttgctgaaattagctactgaattaaaaataggaaggaagctgttaatgcagctgtagagagaggaggaaaaaaatctggaatgacctcaa

SEQ ID NO: 8125 - DNA, 599 bp, Chicken  19866894202523_2
  misc_feature (1)..(85): n is any nucleotide
nnnnnnnnnnnnnnnnnnnnnnnnnnnnnnnnnnnnnnnnnnnnnnnnnnnnnnnnnnnnnnnnnnnnnnnnnnnnnnnnnnnnnctgctgtggttaagatataagaaaaaaaggattcatttcattctacattttgtgaactgtctttgcctgagggacgacagccctctgtgtcttagttccctattttaaagggcagctaatagctcttctccctctgaaaaggtgttgtggagacaaaacccactaacacttatgagttgcgtggctactgctgyaatgggagttgtattagcacrcatggacagaaggatctctttctttggataccctggtttatctaggatggatgtcctgttttattgagaaattgcccattgaagagacactcagatgagataaaagggaaaaattggtggtggattcagaaagatcaataatggcgtttgttttatgagtgaccctgaaaaaaacaataagcacttagttgctgaaattagctactgaattaaaaataggaaggaagctgttaatgcagctgtagagagaggaggaaaaaaatctggaatgacctcaataaaataagagcatgccctgg

SEQ ID NO: 8126 - DNA, 600 bp, Chicken  19866894202523_3
gtgtagcagtgcgtctgtgtacagcaggtagggagagcgttccatgctgggaggaggacacaagctttaaagtgacagtgccacagcaactgttctaaaggtgtatttactgtcttctgaatacaaatgtgctgttttctggcctcctgttcctgtcttcctcctgcccagtgcctttattttcctttgaattagcacctacttgagctccagctttgcgagttatctgataatcctcatatgtgaataacgctattaaaaagcatctgcctgcagtgattgcaaaatggcatttggggyattttaacatgttagagctgcaaataggtataaaattttcagtgtactgcttacagtaatgtgtagtaaatagaaattgatatctgtggtaggcccggcatcataaatgtggggatggttgcatggtaattttgagctgaatgagtcttcagtgttgttgagcagtcccacacacagcaagatgtggcaccttaaagtaagagctaaagtaacccgaggcaagggctgaaaggtaagattgttcctacagattttggtagactagaccctaaaaagataaggccaataattctacagtgt

SEQ ID NO: 8127 - DNA, 461 bp, Chicken  19866894202524_1
aatcatagaacccaagttagtacagcactatcatgtcaatttgtacaagagctgacgattaagtgatgtgtcattcagcagctagaactgttcctttgtacaagccaaggagtttctctaccagctctgaccgctaatgcaagcttaacctagcagagaataatgtgaaaatatagcagaagtaagtaccacacagaacagacacctttgtctttgggagaaatcatttctttcattggaagactcatttctcttgttatcctttagaaaaattgatgcagcagaaagctctgctacatscagccctggattattattttcttgcaagccatgatgctctaacggcatcttgctctgtctcttcaaaggaaacaatgtgaggggatgggttgcaatcccagaaaatattagacataaattgcacatctgatgtccttcagaaaggggtctcgggaggaaaa

SEQ ID NO: 8128 - DNA, 600 bp, Chicken  19866894202527_1
ttaagcacagtttttcgaacatatcgtctaacatactcaagagaattttttctatttagtgcccttgagaaaatccctacctttttttcatacagaatccagactatcagctcttaaatggtgaaaaatgtcatttttcacgtctgctgcctgctaaaatgcctggtgcaatattcatggctgtgtttcatttatgtaactatgctaattttcctctgtcatcttcctgttcatgctgaaatgcaaaaagcttaattcattaaggcttctaaggggccttaattgtgctagctggcacawaccatagaaatacagcaagtttatctcctgtaaaatgtgaaaaggtggggtttggatgaaagatgctcttcagaaaaatattcattggattttagttcatggacacattgcataattccttttctgctcataaagaataatgagaaaactcttggcactatcttactccaattagtttttccctttgccttgcctccccagggctaacacagctctatctgttcaaaagataaactgtggcattcagttcccaattcattcaggtggaccttacacagatatgccctttgaattattaca

SEQ ID NO: 8129 - DNA, 599 bp, Chicken  19866894202533_1
  misc_feature (1)..(87): n is any nucleotide
nnnnnnnnnnnnnnnnnnnnnnnnnnnnnnnnnnnnnnnnnnnnnnnnnnnnnnnnnnnnnnnnnnnnnnnnnnnnnnnnnnnnnnnattcaccaagtgtcagaacaacctgccacaacagcctaggctaatgacttccacagagacacgtatcactgcacccacaagaactgtattagagcaccagcacagtcgttatgcttggtcaaagactaggtaagatattctcaaaatcagagctgccctgtaaccatagcttgcctcttctgcacaactaatatttagccccaagagctgaaygctgttgtttcacacctctgccactgcaataggtggagcagtgctcactagcaatgttttactttaagcaccccagaagtttccccaggacttacctactgagcactaactgaatgcagaactatcttcacaggcagaactagtcatttttaatgcagggctttcctgtggtttctatttaacataccaaactgcactgcccttgtccagcaaattccacacaatacaaagtaaataagtgttaatctcctttattttttcttcctaatttagagggaacaatactcagactgaaagaa

SEQ ID NO: 8130 - DNA, 600 bp, Chicken  19866894202533_2
acaatacaaagtaaataagtgttaatctcctttattttttcttcctaatttagagggaacaatactcagactgaaagaacgtgtcagttttgaggacctgttctgtttcctttctcctgaagaaccaaaagcttaatcattgttcagagaagcatacagtgaaattgtcagcaactggttctgctcagttcttctgcaaactggacctgtgtttcatacaggtcacgcaggagacgcagaactgcagtcattatctcaggaattttgatttatgacagttttccagcagtatcaggcagscagggcagrgagagaaaacagttctccagggtatcatttaactacctcaccattaattgccttcacaagacaacacgcacttttctagtgataaggtacttttttttccagccacagtctggtcagcactaagttttgaggcaaaagtcaacgtcagccaaacagcaaggccctcttctaaagttcagggacatcacagctgcccaaggaatcaacaaactgtttcttaactttaggagaagcagctcgrcaaatttggatgaagttcttaatgaaggagatttaaccttttccactcaa

SEQ ID NO: 8131 - DNA, 600 bp, Chicken  19866894202533_3
agtaaataagtgttaatctcctttattttttcttcctaatttagagggaacaatactcagactgaaagaacgtgtcagttttgaggacctgttctgtttcctttctcctgaagaaccaaaagcttaatcattgttcagagaagcatacagtgaaattgtcagcaactggttctgctcagttcttctgcaaactggacctgtgtttcatacaggtcacgcaggagacgcagaactgcagtcattatctcaggaattttgatttatgacagttttccagcagtatcaggcagscagggcagrgagagaaaacagttctccagggtatcatttaactacctcaccattaattgccttcacaagacaacacgcacttttctagtgataaggtacttttttttccagccacagtctggtcagcactaagttttgaggcaaaagtcaacgtcagccaaacagcaaggccctcttctaaagttcagggacatcacagctgcccaaggaatcaacaaactgtttcttaactttaggagaagcagctcgrcaaatttggatgaagttcttaatgaaggagatttaaccttttccactcaagacatgtgc

SEQ ID NO: 8132 - DNA, 600 bp, Chicken  19866894202533_4
ttatctcaggaattttgatttatgacagttttccagcagtatcaggcagscagggcagrgagagaaaacagttctccagggtatcatttaactacctcaccattaattgccttcacaagacaacacgcacttttctagtgataaggtacttttttttccagccacagtctggtcagcactaagttttgaggcaaaagtcaacgtcagccaaacagcaaggccctcttctaaagttcagggacatcacagctgcccaaggaatcaacaaactgtttcttaactttaggagaagcagctcgrcaaatttggatgaagttcttaatgaaggagatttaaccttttccactcaagacatgtgccatgtaacatttcagccgaggcagcttaagctacctgatccacgccgctgaaaacaacttataaaaggaacagtcccaatggcactgctcagtcttgcttcaagcaactcatgtgttaccacatgaccgtggagaacacgtcagagtccaaagatctgctgttttaatcacacacattaagtaagtacgaccagcaaagctcacaagcggaatcgatactcctgccacctgtttcattatc

SEQ ID NO: 8133 - DNA, 599 bp, Chicken  19866894202535_1
  misc_feature (1)..(272): n is any nucleotide
nnnnnnnnnnnnnnnnnnnnnnnnnnnnnnnnnnnnnnnnnnnnnnnnnnnnnnnnnnnnnnnnnnnnnnnnnnnnnnnnnnnnnnnnnnnnnnnnnnnnnnnnnnnnnnnnnnnnnnnnnnnnnnnnnnnnnnnnnnnnnnnnnnnnnnnnnnnnnnnnnnnnnnnnnnnnnnnnnnnnnnnnnnnnnnnnnnnnnnnnnnnnnnnnnnnnnnnnnnnnnnnnnnnnnnnnnnnnnnnnnnnnnnnnnnnnnnnnnnnnnnnnnnnnnnnngtagatggtgaggctccctggggatgtygggttttgtcaagctagtccattctcagctcttgtctctcaggaayggtccttgtttactaggacagcatcttttctgccttgaaggcatgcttcacccttccaggtgaatctgtgtcttctgcagaggaaaaaaaagaagtgaggatgtgtttatacatttataaatatttgcaagcktaggtcaacagagagagagaagaggagcctgatgctgaagtcaaaagattagggaacttatggccccaggacccagtctgcactccaaggactgcctatgcagtttacattaaatgggca

SEQ ID NO: 8134 - DNA, 599 bp, Chicken  19866894202535_2
  misc_feature (1)..(226): n is any nucleotide
nnnnnnnnnnnnnnnnnnnnnnnnnnnnnnnnnnnnnnnnnnnnnnnnnnnnnnnnnnnnnnnnnnnnnnnnnnnnnnnnnnnnnnnnnnnnnnnnnnnnnnnnnnnnnnnnnnnnnnnnnnnnnnnnnnnnnnnnnnnnnnnnnnnnnnnnnnnnnnnnnnnnnnnnnnnnnnnnnnnnnnnnnnnnnnnnnnnnnnnnnnnnnnnnnnnnnnnnnnnnnnnnnngtagatggtgaggctccctggggatgtygggttttgtcaagctagtccattctcagctcttgtctctcaggaayggtccttgtttactaggacagcatcttttctgccttgaaggcatgcttcacccttccaggtgaatctgtgtcttctgcagaggaaaaaaaagaagtgaggatgtgtttatacatttataaatatttgcaagcktaggtcaacagagagagagaagaggagcctgatgctgaagtcaaaagattagggaacttatggccccaggacccagtctgcactccaaggactgcctatgcagtttacattaaatgggcattgcagaaattgaaatttcaagtgatatttcttataatggttagca

SEQ ID NO: 8135 - DNA, 599 bp, Chicken  19866894202535_3
  misc_feature (1)..(93): n is any nucleotide
nnnnnnnnnnnnnnnnnnnnnnnnnnnnnnnnnnnnnnnnnnnnnnnnnnnnnnnnnnnnnnnnnnnnnnnnnnnnnnnnnnnnnnnnnnnnngtagatggtgaggctccctggggatgtygggttttgtcaagctagtccattctcagctcttgtctctcaggaayggtccttgtttactaggacagcatcttttctgccttgaaggcatgcttcacccttccaggtgaatctgtgtcttctgcagaggaaaaaaaagaagtgaggatgtgtttatacatttataaatatttgcaagcktaggtcaacagagagagagaagaggagcctgatgctgaagtcaaaagattagggaacttatggccccaggacccagtctgcactccaaggactgcctatgcagtttacattaaatgggcattgcagaaattgaaatttcaagtgatatttcttataatggttagcagcatctgattttgctgattcatagagatttcactgatgtatttcaaaattactttgaggtagaaaaaatctacatggaataggagcaccatatttattaaataaatacttgtgggcagcttcacataatgggc

SEQ ID NO: 8136 - DNA, 600 bp, Chicken  19866894202535_4
cagaaattgaaatttcaagtgatatttcttataatggttagcagcatctgattttgctgattcatagagatttcactgatgtatttcaaaattactttgaggtagaaaaaatctacatggaataggagcaccatatttattaaataaatacttgtgggcagcttcacataatgggctcccagctctgcaaatattattcagaactgctctaaaattacaaagtgccatttttatcttagcactgagtttgagatatccaaaatatcccatccagacatcttgttctcatttgcttgtagkttttcaggatattgcctttaggactagaccctttcatgcatgatgcagacacgttctgaatcttaagctaaatgttttctttgtatttttggtcttttatttgattagatcacaaaatttggtgatagtgttaatcagtggcataaagaagaatgtattttttatatgttctagtgacctttcctttgaaaaatttttctagggatggtggaattctgttgctgaaccacattagcagagagaagcttttctcactaatggaagtgctagagtagcaaaaagctcatcagaaagctgttt

SEQ ID NO: 8137 - DNA, 600 bp, Chicken  19866894202546_1
tcacagctcactgttgttgctacaaacatcacagagatccagtgcaattgtgtccaaaagcagagttttatctgtaaggttgtatctgagctactaaacccgatttcacattgtgtccctgcagagaagtacacagacattgatcttagcattatagtcaattcattcaataaataaagagcatccaaagagcaggactgagaaaagggtttgggggcctgggggttgtgctgctatttgtcatgtctccacttagagatgggcaatatgcaatgtagtattttcacagtgaaccatttrtgaaactgatgtattatggactgggggaatcatacaaacgcataaatcatcaacatggtactgacatggtttacatctaacctgcaccaagttatttcctcaaacttgcagtttcgtgtgcctgaaggcattaaatgaacgcacaccctagggacarcttctatctgggcatgagctgcttggtccccrttaaatccctgttctttttctatctctgtatattactgaggggacgatcatttatgaactgccataagctagcacagtgctgcagaacagagatccttctttgcaaaacgt

SEQ ID NO: 8138 - DNA, 600 bp, Chicken  19866894202546_2
tcaattcattcaataaataaagagcatccaaagagcaggactgagaaaagggtttgggggcctgggggttgtgctgctatttgtcatgtctccacttagagatgggcaatatgcaatgtagtattttcacagtgaaccatttrtgaaactgatgtattatggactgggggaatcatacaaacgcataaatcatcaacatggtactgacatggtttacatctaacctgcaccaagttatttcctcaaacttgcagtttcgtgtgcctgaaggcattaaatgaacgcacaccctagggacarcttctatctgggcatgagctgcttggtccccrttaaatccctgttctttttctatctctgtatattactgaggggacgatcatttatgaactgccataagctagcacagtgctgcagaacagagatccttctttgcaaaacgtaaaatgtacaggcacaagccagcacgttaccctgcagaccaactgcagcacggtctagttgttgcaggatgctctgggcaggtgtcagtgctctgcaaccatccagccttgaaacccaagagatttgtgggtggcagcggctgcccagctgcacctg

SEQ ID NO: 8139 - DNA, 600 bp, Chicken  19866894202546_3
gagcaggactgagaaaagggtttgggggcctgggggttgtgctgctatttgtcatgtctccacttagagatgggcaatatgcaatgtagtattttcacagtgaaccatttrtgaaactgatgtattatggactgggggaatcatacaaacgcataaatcatcaacatggtactgacatggtttacatctaacctgcaccaagttatttcctcaaacttgcagtttcgtgtgcctgaaggcattaaatgaacgcacaccctagggacarcttctatctgggcatgagctgcttggtccccrttaaatccctgttctttttctatctctgtatattactgaggggacgatcatttatgaactgccataagctagcacagtgctgcagaacagagatccttctttgcaaaacgtaaaatgtacaggcacaagccagcacgttaccctgcagaccaactgcagcacggtctagttgttgcaggatgctctgggcaggtgtcagtgctctgcaaccatccagccttgaaacccaagagatttgtgggtggcagcggctgcccagctgcacctgatccacttgcactcactcctcagctgtttttc

SEQ ID NO: 8140 - DNA, 600 bp, Chicken  19866894202549_1
tgtgctcagtacaaaagtctttgtgcaattagggaatgaggactactaggggaacatgctgcacatcaggcctgaactaggaaaaaaaaagatctcaagccatgagttttgctaaggtacatttcagaattgtttttgttaaaggacaataagcacattgtctctttctcctccccctccacaggcactccaagcgattctcttctactttcttcaaaaacattacaaatccacagagtattaaaggaatcattgtaaggtggtggactcctaattctatttccaggctgattttcccakctatcacatgtggctggcatttttctccctgatgtggtctatatacctcttccaaagctcctagccaaatggccagctttctctggggagagaccacagctgcctggacctcactgcagagacgtgcactggagcatggctggcacagctgtgcagtttttttcacaggctgactagagaaaaagagccattctggttgcataaagaaagggaaaaatctatcattggacagtgtttaatatcaagaagaaactgggactgtctccacatttcatttacttccatgcattcagtgatgtg

SEQ ID NO: 8141 - DNA, 600 bp, Chicken  19866894202551_1
tctctcaggagctcagttaaacacgccgaggtaaccagcccagctgagagctgggcacagaacaaaccccctccagcaccagctgctagaggagggtcctggggttatttccagccaaacagcagtgagcgcacgggtggaacccagcacacagagtagccatccccctgggctcagcctgggctgtagatgggaacacaccgcacagctcaccgctgcctcatgccccggcaattgtgcgtggagaggatgggtcagagcgctgctgggatgcactgcatcagccgagcaccaccagcycryagaattacaactgcacatcggctcaagcacagcacacacttcggggggggacaaaaaaccccgccgtctcaggtgagtgtcacggcgcggttgcgctcagttattccagttgcrctctcctggaaaagccatcagcaagttccgatctgcttttctcatattattcgggaggtgggggatctattctccttcctcccaactcacggcggagcggkgtagggcagaaacccggcggaattcgggggacgaggagacgaaaccggggcagagggccgtgcgtccccacgcccccgtgcc

SEQ ID NO: 8142 - DNA, 600 bp, Chicken  19866894202551_2
tctcaggagctcagttaaacacgccgaggtaaccagcccagctgagagctgggcacagaacaaaccccctccagcaccagctgctagaggagggtcctggggttatttccagccaaacagcagtgagcgcacgggtggaacccagcacacagagtagccatccccctgggctcagcctgggctgtagatgggaacacaccgcacagctcaccgctgcctcatgccccggcaattgtgcgtggagaggatgggtcagagcgctgctgggatgcactgcatcagccgagcaccaccagcycryagaattacaactgcacatcggctcaagcacagcacacacttcggggggggacaaaaaaccccgccgtctcaggtgagtgtcacggcgcggttgcgctcagttattccagttgcrctctcctggaaaagccatcagcaagttccgatctgcttttctcatattattcgggaggtgggggatctattctccttcctcccaactcacggcggagcggkgtagggcagaaacccggcggaattcgggggacgaggagacgaaaccggggcagagggccgtgcgtccccacgcccccgtgcccc

SEQ ID NO: 8143 - DNA, 600 bp, Chicken  19866894202551_3
ctcaggagctcagttaaacacgccgaggtaaccagcccagctgagagctgggcacagaacaaaccccctccagcaccagctgctagaggagggtcctggggttatttccagccaaacagcagtgagcgcacgggtggaacccagcacacagagtagccatccccctgggctcagcctgggctgtagatgggaacacaccgcacagctcaccgctgcctcatgccccggcaattgtgcgtggagaggatgggtcagagcgctgctgggatgcactgcatcagccgagcaccaccagcycryagaattacaactgcacatcggctcaagcacagcacacacttcggggggggacaaaaaaccccgccgtctcaggtgagtgtcacggcgcggttgcgctcagttattccagttgcrctctcctggaaaagccatcagcaagttccgatctgcttttctcatattattcgggaggtgggggatctattctccttcctcccaactcacggcggagcggkgtagggcagaaacccggcggaattcgggggacgaggagacgaaaccggggcagagggccgtgcgtccccacgcccccgtgccccg

SEQ ID NO: 8144 - DNA, 600 bp, Chicken  19866894202551_4
agagctgggcacagaacaaaccccctccagcaccagctgctagaggagggtcctggggttatttccagccaaacagcagtgagcgcacgggtggaacccagcacacagagtagccatccccctgggctcagcctgggctgtagatgggaacacaccgcacagctcaccgctgcctcatgccccggcaattgtgcgtggagaggatgggtcagagcgctgctgggatgcactgcatcagccgagcaccaccagcycryagaattacaactgcacatcggctcaagcacagcacacacttcygggggggacaaaaaaccccgccgtctcaggtgagtgtcacggcgcggttgcgctcagttattccagttgcrctctcctggaaaagccatcagcaagttccgatctgcttttctcatattattcgggaggtgggggatctattctccttcctcccaactcacggcggagcggkgtagggcagaaacccggcggaattcgggggacgaggagacgaaaccggggcagagggccgtgcgtccccacgcccccgtgccccgccactcacctgatgaggttctgcaggccctgtttgctggagtt

SEQ ID NO: 8145 - DNA, 600 bp, Chicken  19866894202551_5
aacagcagtgagcgcacgggtggaacccagcacacagagtagccatccccctgggctcagcctgggctgtagatgggaacacaccgcacagctcaccgctgcctcatgccccggcaattgtgcgtggagaggatgggtcagagcgctgctgggatgcactgcatcagccgagcaccaccagcycryagaattacaactgcacatcggctcaagcacagcacacacttcggggggggacaaaaaaccccgccgtctcaggtgagtgtcacggcgcggttgcgctcagttattccagttgcrctctcctggaaaagccatcagcaagttccgatctgcttttctcatattattcgggaggtgggggatctattctccttcctcccaactcacggcggagcggkgtagggcagaaacccggcggaattcgggggacgaggagacgaaaccggggcagagggccgtgcgtccccacgcccccgtgccccgccactcacctgatgaggttctgcaggccctgtttgctggagttccgccgcagcaccgcgctgctcatggtgccgagcccggcggccggctgccggctcccgcagccgctccctg

SEQ ID NO: 8146 - DNA, 528 bp, Chicken  19866894202551_6
cctcatgccccggcaattgtgcgtggagaggatgggtcagagcgctgctgggatgcactgcatcagccgagcaccaccagcycryagaattacaactgcacatcggctcaagcacagcacacacttcggggggggacaaaaaaccccgccgtctcaggtgagtgtcacggcgcggttgcgctcagttattccagttgcrctctcctggaaaagccatcagcaagttccgatctgcttttctcatattattcgggaggtgggggatctattctccttcctcccaactcacggcggagcggkgtagggcagaaacccggcggaattcgggggacgaggagacgaaaccggggcagagggccgtgcgtccccacgcccccgtgccccgccactcacctgatgaggttctgcaggccctgtttgctggagttccgccgcagcaccgcgctgctcatggtgccgagcccggcggccggctgccggctcccgcagccgctccctgcccgcacagccgcccggcgccgcgcgtcc

SEQ ID NO: 8147 - DNA, 599 bp, Chicken  19866894202553_1
  misc_feature (1)..(14): n is any nucleotide
nnnnnnnnnnnnnnttttgggaaatgaggaaacttttttttttttttttttcctaagaagcaaaccagattactcgaagaactgagtcccaagcacattctctgtcaagaattcctcatgaagcaaagttggtgtatgctttctgatgggaaaagagagcaacaatgtggatgacggaagcaactttttattgagtgtgaacgatttcatgttgccaaagcaggatgagttgtaaccagaaccagaaccaagagcagggtcatcaaagtcaatgggatgccacggatcatcagcctccayacacagacccaccgtaaygagctgaactcaatgcacaggagcacacgccccawgcagtayttttctgcaagccagaatttaaccagatatttgagaaaagaactgtttcaaatggttacagaaaaatatatatattaggtttaggaaggaattaaattaaaaaaaaaaaagtcaagggaaaattccttccactccactcctaggctaccacaaatgtctaagcaagtcatccacggaccagaaattaatattcaccacattgcaaacacctgcttcattattttccaggataaaaaaaa

SEQ ID NO: 8148 - DNA, 600 bp, Chicken  19866894202553_2
gggaaatgaggaaacttttttttttttttttttcctaagaagcaaaccagattactcgaagaactgagtcccaagcacattctctgtcaagaattcctcatgaagcaaagttggtgtatgctttctgatgggaaaagagagcaacaatgtggatgacggaagcaactttttattgagtgtgaacgatttcatgttgccaaagcaggatgagttgtaaccagaaccagaaccaagagcagggtcatcaaagtcaatgggatgccacggatcatcagcctccayacacagacccaccgtaaygagctgaactcaatgcacaggagcacacgccccawgcagtayttttctgcaagccagaatttaaccagatatttgagaaaagaactgtttcaaatggttacagaaaaatatatatattaggtttaggaaggaattaaattaaaaaaaaaaaagtcaagggaaaattccttccactccactcctaggctaccacaaatgtctaagcaagtcatccacggaccagaaattaatattcaccacattgcaaacacctgcttcattattttccaggataaaaaaaaattatttttgttgcaaaca

SEQ ID NO: 8149 - DNA, 600 bp, Chicken  19866894202553_3
taagaagcaaaccagattactcgaagaactgagtcccaagcacattctctgtcaagaattcctcatgaagcaaagttggtgtatgctttctgatgggaaaagagagcaacaatgtggatgacggaagcaactttttattgagtgtgaacgatttcatgttgccaaagcaggatgagttgtaaccagaaccagaaccaagagcagggtcatcaaagtcaatgggatgccacggatcatcagcctccayacacagacccaccgtaaygagctgaactcaatgcacaggagcacacgccccawgcagtayttttctgcaagccagaatttaaccagatatttgagaaaagaactgtttcaaatggttacagaaaaatatatatattaggtttaggaaggaattaaattaaaaaaaaaaaagtcaagggaaaattccttccactccactcctaggctaccacaaatgtctaagcaagtcatccacggaccagaaattaatattcaccacattgcaaacacctgcttcattattttccaggataaaaaaaaattatttttgttgcaaacagtaaaagtaggcaaggttaaataaaccttttgagc

SEQ ID NO: 8150 - DNA, 600 bp, Chicken  19866894202553_4
caaaccagattactcgaagaactgagtcccaagcacattctctgtcaagaattcctcatgaagcaaagttggtgtatgctttctgatgggaaaagagagcaacaatgtggatgacggaagcaactttttattgagtgtgaacgatttcatgttgccaaagcaggatgagttgtaaccagaaccagaaccaagagcagggtcatcaaagtcaatgggatgccacggatcatcagcctccayacacagacccaccgtaaygagctgaactcaatgcacaggagcacacgccccawgcagtayttttctgcaagccagaatttaaccagatatttgagaaaagaactgtttcaaatggttacagaaaaatatatatattaggtttaggaaggaattaaattaaaaaaaaaaaagtcaagggaaaattccttccactccactcctaggctaccacaaatgtctaagcaagtcatccacggaccagaaattaatattcaccacattgcaaacacctgcttcattattttccaggataaaaaaaaattatttttgttgcaaacagtaaaagtaggcaaggttaaataaaccttttgagcacaaaga

SEQ ID NO: 8151 - DNA, 599 bp, Chicken  19866894202558_1
  misc_feature (1)..(28): n is any nucleotide
nnnnnnnnnnnnnnnnnnnnnnnnnnnnagacccatcaaactgggagaccatctaattagtagaacatgcaattggggaatcattcatctagtggaccactccagttggaggaccacctaaagtggggagtcatctaatttggagaccttctgtttgggggaccatctaattagactttcatggccttcaatagagtctgtccactgctgcgctgtgtctgcagcacatgtgcaagtggcaatgctcgtttttcttagtgcatcagatgccaacaactggaggaacccagctttcaaaasacccatcatctcctccctctcttttatgtycctttgtgctccagatccttggggtgaactgaggctttggacccaaagaaaggtgcaccatgcagggaaaagtgatatttgctgatatttctgcaaggtttctgcgcccacctgctctcctcgccctccagcagcttcctgtaggttgcaatctcgatgtccagggccagcttgacgttcatcagctcctggtactcgcgtagttgtcgggccaggtctgccttggctttctgcagggcatcctccagctcggccagtttggatttggc

SEQ ID NO: 8152 - DNA, 600 bp, Chicken  19866894202558_2
acccatcaaactgggagaccatctaattagtagaacatgcaattggggaatcattcatctagtggaccactccagttggaggaccacctaaagtggggagtcatctaatttggagaccttctgtttgggggaccatctaattagactttcatggccttcaatagagtctgtccactgctgcgctgtgtctgcagcacatgtgcaagtggcaatgctcgtttttcttagtgcatcagatgccaacaactggaggaacccagctttcaaaasacccatcatctcctccctctcttttatgtycctttgtgctccagatccttggggtgaactgaggctttggacccaaagaaaggtgcaccatgcagggaaaagtgatatttgctgatatttctgcaaggtttctgcgcccacctgctctcctcgccctccagcagcttcctgtaggttgcaatctcgatgtccagggccagcttgacgttcatcagctcctggtactcgcgtagttgtcgggccaggtctgccttggctttctgcagggcatcctccagctcggccagtttggatttggcatctttcagggccatctctccacgctcctct

SEQ ID NO: 8153 - DNA, 599 bp, Chicken  19866894202566_1
  misc_feature (1)..(91): n is any nucleotide
nnnnnnnnnnnnnnnnnnnnnnnnnnnnnnnnnnnnnnnnnnnnnnnnnnnnnnnnnnnnnnnnnnnnnnnnnnnnnnnnnnnnnnnnnnnttgttattatagctacagatactttctttaatgaatgtatgttctaatctctgaatgtatacttccgtgcattttaaaacggtgtgatactgttttctggagtggttatccaaaacttgcaacaaactgtgcttaaatttcacatatggtgttctcctgtggctcttttctttgtttatgcacattaggaactgttggcagcaaaaacrtgtactgggagtatrgggctattcactgctgttctgttgtgtgagaacctgtgtggatgtggcagagaagatgcaaataacttttttttatttcactgaatgcattatccttctgcrcttttacagatgaaaaagtacttcagttttcatttttcaagttttaagtgaagttttaagcagagtagatcttatgcataaacttgtagtagctgtgggtttggagctttccatatacattttttttcctccacgtaaaacttattaatgcttttttttttctttttggcatctaattcatc

SEQ ID NO: 8154 - DNA, 599 bp, Chicken  19866894202566_2
  misc_feature (1)..(76): n is any nucleotide
nnnnnnnnnnnnnnnnnnnnnnnnnnnnnnnnnnnnnnnnnnnnnnnnnnnnnnnnnnnnnnnnnnnnnnnnnnnnttgttattatagctacagatactttctttaatgaatgtatgttctaatctctgaatgtatacttccgtgcattttaaaacggtgtgatactgttttctggagtggttatccaaaacttgcaacaaactgtgcttaaatttcacatatggtgttctcctgtggctcttttctttgtttatgcacattaggaactgttggcagcaaaaacrtgtactgggagtatrgggctattcactgctgttctgttgtgtgagaacctgtgtggatgtggcagagaagatgcaaataacttttttttatttcactgaatgcattatccttctgcrcttttacagatgaaaaagtacttcagttttcatttttcaagttttaagtgaagttttaagcagagtagatcttatgcataaacttgtagtagctgtgggtttggagctttccatatacattttttttcctccacgtaaaacttattaatgcttttttttttctttttggcatctaattcatctgttcttaaaatagt

SEQ ID NO: 8155 - DNA, 600 bp, Chicken  19866894202566_3
tttaatgaatgtatgttctaatctctgaatgtatacttccgtgcattttaaaacggtgtgatactgttttctggagtggttatccaaaacttgcaacaaactgtgcttaaatttcacatatggtgttctcctgtggctcttttctttgtttatgcacattaggaactgttggcagcaaaaacrtgtactgggagtatrgggctattcactgctgttctgttgtgtgagaacctgtgtggatgtggcagagaagatgcaaataacttttttttatttcactgaatgcattatccttctgcrcttttacagatgaaaaagtacttcagttttcatttttcaagttttaagtgaagttttaagcagagtagatcttatgcataaacttgtagtagctgtgggtttggagctttccatatacattttttttcctccacgtaaaacttattaatgcttttttttttctttttggcatctaattcatctgttcttaaaatagtttttagtttcttattaagtgctcatactttcgactatgtgtgacaggatgtaattcagtattacagttgcgaacactgaatgctaacttaacaacaacaacaa

SEQ ID NO: 8156 - DNA, 600 bp, Chicken  19866894202566_4
cagatggtggacaagtagttgtgttttttgaatgaagtgagcagcatatgatgccagcaaaactgtattggcatgagacatctgaggtttaggtttttgtgttggggactgctggagggctttaggtgtgtgcagcatctcatgagggatgctgaaattcttgtcgcttgggtccaataacttaaaatatacccacttcctgggactggaactatggagacagaaatgtcgtataccaggaaacaaacaatgatagtcaggctatgagttaaccttagaaagggttgagcctgtctgcarggtgattgggtgaagaggagcattattaaacagtattcctgaatccctttggctttgagtgagttgttccatttgctctgaaaataccttgcctttacttacatgcttaattgctttgatttttagatgtaaagcatgtgttactagactacctcttcataaggaaattacttaaccgtgtggctggaggaacaaagggcctaaaccaaatcacattagaactggtataagaagatacaattcttatgaaggttattagaaaacttgtgatgtacagcaaagcacctagtacaagggaca

SEQ ID NO: 8157 - DNA, 600 bp, Chicken  19866894202575_1
agctaagggaatgtatgttttatagagttaccttgaatcatcaaatctttcatttaatttataacctctctgtgtaactgagcagcttcaaatactggtggaagagtatataaatgaagaaagagtaagcacttgataataatagggttgccttgagagattatgcagttacactccttagaggcattccaaagccatctgaacgtgattgtggacaactggctgaatgtcacactgcttgagccggtgaagttaatcaagatgagctccagaatttctttctagcctcaactattctgygagagtattccaaggcacactgtatgtttcaaattattctctttcttcttgctataagaatacccctgcctcagaggaatactttatctgtgaacattaaaatttcagtatctgttttgcatagcagactagtgtctaagcaaaattgttacctcaacagagacaccaggcatgttcttggctgatcaaatcaaatactcctagtagaggttatagcttaagaaaattctccacatgattttctttgaacacaactttccctcaaaacaaaaagagaagagagaattcatttccaagcag

SEQ ID NO: 8158 - DNA, 600 bp, Chicken  19866894202578_1
agttatagcaaagaaatattaattgaaagtgttttactggtttctgtaaagtgtttagcaatacatttctaagatttgaaagacatccagtcaaagcagacatttcagaaacatgcttttcttatttactctcagagaaaaataaaacaatagcaaagggcaaatactgtggtgtagcctccaaggtatcctcagtggttgacttgtgttgtttattttattattttattgtaaattaattgttttaattattctatgccaaaaataagtcagccatgtttaaggtaattttctattttrtgaacttacttttaatctgtcatccaggagtgagtatgacggagatctgcaatcacagcttttgaataaagctaatgaagaagacaaaaattgtagcagggctctttctgttgtgagtgctgttgtacgagcagccaaagacctgttgcacagggctcttgctgtagatggtaagatktttgataattgacttccaaaattgatttttcaaaacttctttctttgttagaaggatttgagagtagaaaatmagtgataaagcaattgtgatatttctcttctgtcttcaaagaatgattg

SEQ ID NO: 8159 - DNA, 600 bp, Chicken  19866894202578_2
ctccaaggtatcctcagtggttgacttgtgttgtttattttattattttattgtaaattaattgttttaattattctatgccaaaaataagtcagccatgtttaaggtaattttctattttrtgaacttacttttaatctgtcatccaggagtgagtatgacggagatctgcaatcacagcttttgaataaagctaatgaagaagacaaaaattgtagcagggctctttctgttgtgagtgctgttgtacgagcagccaaagacctgttgcacagggctcttgctgtagatggtaagatktttgataattgacttccaaaattgatttttcaaaacttctttctttgttagaaggatttgagagtagaaaatmagtgataaagcaattgtgatatttctcttctgtcttcaaagaatgattgtgatatttctcttctgtcttcaaagattatttttctaatctgtcacagctgtacatattgaactgggagtaactttctaaatcttcgagttgcacttgagctgtcataggcatatacktcatataaacttgttcatcagtttagcaaacattaaagccactaagattctgtattgcca

SEQ ID NO: 8160 - DNA, 600 bp, Chicken  19866894202578_3
ttctatgccaaaaataagtcagccatgtttaaggtaattttctattttrtgaacttacttttaatctgtcatccaggagtgagtatgacggagatctgcaatcacagcttttgaataaagctaatgaagaagacaaaaattgtagcagggctctttctgttgtgagtgctgttgtacgagcagccaaagacctgttgcacagggctcttgctgtagatggtaagatktttgataattgacttccaaaattgatttttcaaaacttctttctttgttagaaggatttgagagtagaaaatmagtgataaagcaattgtgatatttctcttctgtcttcaaagaatgattgtgatatttctcttctgtcttcaaagattatttttctaatctgtcacagctgtacatattgaactgggagtaactttctaaatcttcgagttgcacttgagctgtcataggcatatacktcatataaacttgttcatcagtttagcaaacattaaagccactaagattctgtattgccaaaatatatgctttaatgggtcacttccaaaatttattgcatgttttgcacaatgatggtagcaggaaaactga

SEQ ID NO: 8161 - DNA, 600 bp, Chicken  19866894202578_4
gctgttgtacgagcagccaaagacctgttgcacagggctcttgctgtagatggtaagatktttgataattgacttccaaaattgatttttcaaaacttctttctttgttagaaggatttgagagtagaaaatmagtgataaagcaattgtgatatttctcttctgtcttcaaagaatgattgtgatatttctcttctgtcttcaaagattatttttctaatctgtcacagctgtacatattgaactgggagtaactttctaaatcttcgagttgcacttgagctgtcataggcatatacktcatataaacttgttcatcagtttagcaaacattaaagccactaagattctgtattgccaaaatatatgctttaatgggtcacttccaaaatttattgcatgttttgcacaatgatggtagcaggaaaactgatgaatgtaatgcatttataagcacttaaacatctgtttttgagaaattcagatgttaatcttaaaattgaacgcttttaagctgtatcaaaggagtctgtaatattgagtactgttacagaaattgattttgagagctgggatgggtgtgttgtactagattttata

SEQ ID NO: 8162 - DNA, 600 bp, Chicken  19866894202584_1
gggaaggaagtagtttgtactggcaggcaagtacatcctctccgggtcggcattgctaacatgttttatccagcggcggtgatatattagagagtaacaataaccgtaaggaccaggctgcctctcagtggaagcgatgggtgcctgaagcatgtaattgcacttgaaaggctacatgctgatggctgcagcacaaggaattcagggaacctatgctgtgagtgtgtcagatccacttgcaaactgttgtgacaggctgactgacagttcgaactacagtgcttcaagaatacagaggtrtttgtgtagaaactgaagcactaatgaaggaaaggaacctgtaaggctctgtgaagacttcagggtgtaaagcaggtgagatggagctcggttgcagctccaccaaggcagctgccgcagtgcaggrtgtgggcttaccattactgcgatcccatcagagctgtgggaatattcagcttcagcttggtgacttcagtatgtgcgtacacagactggattagaatgactgaccaccatttttgctttcctcgtgtgttactgcagaatttcttctgtgatttgttccctgttcggacttca

SEQ ID NO: 8163 - DNA, 600 bp, Chicken  19866894202584_10
tgaaatatgtggaaaatcttgttttgcagaatccatggggtttgggcgcccacacattgctattgtctgagttgatgacgctgcacataactgtttttccccctcagtgctctgtgtgcagtgctgggctacagaaattgattcctgttcccttgatggttagtttatagaacaagccttcatttgctaggcttctttggtcctaattaagcaaatgcatccaaagtcgaagttgagatttaataaattaacttagtcttcatttcacttactgtgatacccttctgaaatatggaaatyacagtttttctttttgccctcgtttagtgccacatcccgcactgctggggttttttttgccttttgctgggtgtctcattgggtgtgagaggctttgtttcttacttggggtggatgcctcgcagcactttgtgagattaagagtgttttgttccaggaaccaaccctaccttccctttctgttcccatttctgcttccaaggagaacagcttttcacaccagacacatttgtgtttacagataaagaattttaaattagaataaaattgaaatctaggatgagacaaaattatttaatc

SEQ ID NO: 8164 - DNA, 600 bp, Chicken  19866894202584_2
gtggaagcgatgggtgcctgaagcatgtaattgcacttgaaaggctacatgctgatggctgcagcacaaggaattcagggaacctatgctgtgagtgtgtcagatccacttgcaaactgttgtgacaggctgactgacagttcgaactacagtgcttcaagaatacagaggtrtttgtgtagaaactgaagcactaatgaaggaaaggaacctgtaaggctctgtgaagacttcagggtgtaaagcaggtgagatggagctcggttgcagctccaccaaggcagctgccgcagtgcaggrtgtgggcttaccattactgcgatcccatcagagctgtgggaatattcagcttcagcttggtgacttcagtatgtgcgtacacagactggattagaatgactgaccaccatttttgctttcctcgtgtgttactgcagaatttcttctgtgatttgttccctgttcggacttcaggtgatagctctttctttcataacccatccacaacatcagtcctccaaactactgcttgtaggagagggaatgtgattgctgggggtaaaacaatgctttatttcctaccctgaaaaaataccacca

SEQ ID NO: 8165 - DNA, 600 bp, Chicken  19866894202584_3
tcctaccctgaaaaaataccaccaatactacacagggctcttgctgctattattttgcttgttggtttcttcagcctatctgtcctgtaacttaagtgtgaggagagggaagatggcacatgcgacatctgaaatattttaggttgacccagaaggagctctcagagttgggtcaagatgagcagaaattctggctctggttgtcacacatgcagccagccatgggtgtcaggctggtgctggctgattcttcaggacaagggctgtacagaaagcaaatacttccttgctggaaggtayaagtgggcacctagttcactagaaatggggttattcgtgtagccaaggttgcaatgtgttgtcttygcattatggawgttttgtcagtgattgcttgaagctttccctctctgctttgggtgctccatctggaagctctgggtacatgtggtccctgtccatttcttgggagaggtaagaaagaaagtgagagccatgctgaggagaagagggaaccagcatcyrttttcagaytgtgtctcagccgtagtgtctgatgtggtcctgcggctctgctgcctttgccctctygctgctcag

SEQ ID NO: 8166 - DNA, 600 bp, Chicken  19866894202584_4
ttcttcagcctatctgtcctgtaacttaagtgtgaggagagggaagatggcacatgcgacatctgaaatattttaggttgacccagaaggagctctcagagttgggtcaagatgagcagaaattctggctctggttgtcacacatgcagccagccatgggtgtcaggctggtgctggctgattcttcaggacaagggctgtacagaaagcaaatacttccttgctggaaggtayaagtgggcacctagttcactagaaatggggttattcgtgtagccaaggttgcaatgtgttgtcttygcattatggawgttttgtcagtgattgcttgaagctttccctctctgctttgggtgctccatctggaagctctgggtacatgtggtccctgtccatttcttgggagaggtaagaaagaaagtgagagccatgctgaggagaagagggaaccagcatcyrttttcagaytgtgtctcagccgtagtgtctgatgtggtcctgcggctctgctgcctttgccctctygctgctcagggggtctgcggggcagcagttgtccctgggccccttgggatttcaggtggctctgctcgccttgcc

SEQ ID NO: 8167 - DNA, 600 bp, Chicken  19866894202584_5
atctgtcctgtaacttaagtgtgaggagagggaagatggcacatgcgacatctgaaatattttaggttgacccagaaggagctctcagagttgggtcaagatgagcagaaattctggctctggttgtcacacatgcagccagccatgggtgtcaggctggtgctggctgattcttcaggacaagggctgtacagaaagcaaatacttccttgctggaaggtayaagtgggcacctagttcactagaaatggggttattcgtgtagccaaggttgcaatgtgttgtcttygcattatggawgttttgtcagtgattgcttgaagctttccctctctgctttgggtgctccatctggaagctctgggtacatgtggtccctgtccatttcttgggagaggtaagaaagaaagtgagagccatgctgaggagaagagggaaccagcatcyrttttcagaytgtgtctcagccgtagtgtctgatgtggtcctgcggctctgctgcctttgccctctygctgctcagggggtctgcggggcagcagttgtccctgggccccttgggatttcaggtggctctgctcgccttgccgtgaccctgcc

SEQ ID NO: 8168 - DNA, 600 bp, Chicken  19866894202584_6
ggtgtcaggctggtgctggctgattcttcaggacaagggctgtacagaaagcaaatacttccttgctggaaggtayaagtgggcacctagttcactagaaatggggttattcgtgtagccaaggttgcaatgtgttgtcttygcattatggawgttttgtcagtgattgcttgaagctttccctctctgctttgggtgctccatctggaagctctgggtacatgtggtccctgtccatttcttgggagaggtaagaaagaaagtgagagccatgctgaggagaagagggaaccagcatcyrttttcagaytgtgtctcagccgtagtgtctgatgtggtcctgcggctctgctgcctttgccctctygctgctcagggggtctgcggggcagcagttgtccctgggccccttgggatttcaggtggctctgctcgccttgccgtgaccctgcctttgtctgggctgccttctgctgagagctgctggacagcgggggaaggaaacccaccagaaaggtgtcagtgctgtgcagcagctgtgtggtgagctggaagagtgagcaaggtctgtgcgcatctgtcagagcccaagaggcaagg

SEQ ID NO: 8169 - DNA, 600 bp, Chicken  19866894202584_7
gtgtcaggctggtgctggctgattcttcaggacaagggctgtacagaaagcaaatacttccttgctggaaggtayaagtgggcacctagttcactagaaatggggttattcgtgtagccaaggttgcaatgtgttgtcttygcattatggawgttttgtcagtgattgcttgaagctttccctctctgctttgggtgctccatctggaagctctgggtacatgtggtccctgtccatttcttgggagaggtaagaaagaaagtgagagccatgctgaggagaagagggaaccagcatcyrttttcagaytgtgtctcagccgtagtgtctgatgtggtcctgcggctctgctgcctttgccctctygctgctcagggggtctgcggggcagcagttgtccctgggccccttgggatttcaggtggctctgctcgccttgccgtgaccctgcctttgtctgggctgccttctgctgagagctgctggacagcgggggaaggaaacccaccagaaaggtgtcagtgctgtgcagcagctgtgtggtgagctggaagagtgagcaaggtctgtgcgcatctgtcagagcccaagaggcaaggt

SEQ ID NO: 8170 - DNA, 600 bp, Chicken  19866894202584_8
tggtgctggctgattcttcaggacaagggctgtacagaaagcaaatacttccttgctggaaggtayaagtgggcacctagttcactagaaatggggttattcgtgtagccaaggttgcaatgtgttgtcttygcattatggawgttttgtcagtgattgcttgaagctttccctctctgctttgggtgctccatctggaagctctgggtacatgtggtccctgtccatttcttgggagaggtaagaaagaaagtgagagccatgctgaggagaagagggaaccagcatcyrttttcagaytgtgtctcagccgtagtgtctgatgtggtcctgcggctctgctgcctttgccctctygctgctcagggggtctgcggggcagcagttgtccctgggccccttgggatttcaggtggctctgctcgccttgccgtgaccctgcctttgtctgggctgccttctgctgagagctgctggacagcgggggaaggaaacccaccagaaaggtgtcagtgctgtgcagcagctgtgtggtgagctggaagagtgagcaaggtctgtgcgcatctgtcagagcccaagaggcaaggttaaattaac

SEQ ID NO: 8171 - DNA, 600 bp, Chicken  19866894202584_9
ggaaggtayaagtgggcacctagttcactagaaatggggttattcgtgtagccaaggttgcaatgtgttgtcttygcattatggawgttttgtcagtgattgcttgaagctttccctctctgctttgggtgctccatctggaagctctgggtacatgtggtccctgtccatttcttgggagaggtaagaaagaaagtgagagccatgctgaggagaagagggaaccagcatcyrttttcagaytgtgtctcagccgtagtgtctgatgtggtcctgcggctctgctgcctttgccctctygctgctcagggggtctgcggggcagcagttgtccctgggccccttgggatttcaggtggctctgctcgccttgccgtgaccctgcctttgtctgggctgccttctgctgagagctgctggacagcgggggaaggaaacccaccagaaaggtgtcagtgctgtgcagcagctgtgtggtgagctggaagagtgagcaaggtctgtgcgcatctgtcagagcccaagaggcaaggttaaattaacagatcaagttgagataagtgttctgtgtaaggtcttatctgtgctcagaagctggag

SEQ ID NO: 8172 - DNA, 600 bp, Chicken  19866894202593_1
caagtgggctcacaaacaagaacattatttagctccagcacagcctaggatatgcactgtatattaaacagaatcaccagttatgttttagggaacctgagccaaggtggatcagtttgtaagttgaaatgaagctgaatccagttaaaaaaataaaagaaaatgcacattatgtgcaggtttgtgtcactcaaaaaggttacataataaaagcactcaagtttgtgtgtgcaacaaggtataaagagatttttagttcaaaacttatctgacagtaaagccatcactatttttctttarcagaagattctttattacaaagcagtacaaaaccaaaacaaagagaactgaaagtttctcaccctggatttgcttgagcagtttttcattaagctgctttaactctccagtagtcatcgtattcactgtaacaataaaatcggttatcacttctacaaaagcaacatgaacacctctaaatagattgcctttttgtcttttttttttgtttttgcttaatttgcagcctaatgatcaatcattgcaagacagtaaatcagaggcagcactgttcattaataagatttagagaacttgaaa

SEQ ID NO: 8173 - DNA, 599 bp, Chicken  19866894202594_1
  misc_feature (1)..(68): n is any nucleotide
nnnnnnnnnnnnnnnnnnnnnnnnnnnnnnnnnnnnnnnnnnnnnnnnnnnnnnnnnnnnnnnnnnnnctgtgctaatatggagtcatttgtgaatttccgtcactgttggaatgtgtgagaggcaggagaatttgccttgaaatgttatcaattgtaccatttttgataccacgtaactgcagtccctttagataatctgaagagatgcaaatcacttttcacaaatctttagcaggaaaaccagagacatcatgaagtgttagccggtcaagacacaaggatctgcttcctttgcagytgttcacgggtgtrttataaggggagagacggacaaatgtccacataggcataagttgttcttcctcaggcttcacttttcttatggtttccttcaggtgtgtacaagagtgaaggaacatggttttgaagtatgaaaacttcattaaaaaggcttcactggtgataataaatgttaagtggcagcagcattttgaatgttataagttcatttctaatccttgcaatattcttttattatagtaactttagctctgtttaatgaaatccttcatgacgatgtcttgataaaagtccatg

SEQ ID NO: 8174 - DNA, 599 bp, Chicken  19866894202594_2
  misc_feature (1)..(54): n is any nucleotide
nnnnnnnnnnnnnnnnnnnnnnnnnnnnnnnnnnnnnnnnnnnnnnnnnnnnnnctgtgctaatatggagtcatttgtgaatttccgtcactgttggaatgtgtgagaggcaggagaatttgccttgaaatgttatcaattgtaccatttttgataccacgtaactgcagtccctttagataatctgaagagatgcaaatcacttttcacaaatctttagcaggaaaaccagagacatcatgaagtgttagccggtcaagacacaaggatctgcttcctttgcagytgttcacgggtgtrttataaggggagagacggacaaatgtccacataggcataagttgttcttcctcaggcttcacttttcttatggtttccttcaggtgtgtacaagagtgaaggaacatggttttgaagtatgaaaacttcattaaaaaggcttcactggtgataataaatgttaagtggcagcagcattttgaatgttataagttcatttctaatccttgcaatattcttttattatagtaactttagctctgtttaatgaaatccttcatgacgatgtcttgataaaagtccatgtcatagttagtatg

SEQ ID NO: 8175 - DNA, 600 bp, Chicken  19866894202596_1
acttttacgtctgaaatgagtattacagggttgggaaaaacactcacttgcaaagcctgaagatcagcatttagagaatgacccaccaatactgcatcatggggaagtatctttttcagtctggtttgtatgtctggcaatcttgttttcactggaagaagcattttccttgtgactcctgagtatcttcaaaacagaaatgagaagaggtagaagaaatgcattagcaacagcatttactggagaacatgacaagcacagcatgcaaaatatgaatccaacctaacttatgacagaatrctatttactgctttctctgcrggcatattccaacasaagaggatatgctgcagagatattaagctgctgtgctgccacatctgtttcaaatgtttgtcctctctcaagcatgacttattaagtgatgcagttctcagcatcagataacacaggtaacaaaatcctgcgaagctgttatggaagtaggwgcttcaagtaacctgagggaacagacagctcatctcctgcgtaaatccaagccaagatttggagaagtcatggtttgagtttggtctgctgctgttgtaacgagcccagtcc

SEQ ID NO: 8176 - DNA, 600 bp, Chicken  19866894202596_2
attacagggttgggaaaaacactcacttgcaaagcctgaagatcagcatttagagaatgacccaccaatactgcatcatggggaagtatctttttcagtctggtttgtatgtctggcaatcttgttttcactggaagaagcattttccttgtgactcctgagtatcttcaaaacagaaatgagaagaggtagaagaaatgcattagcaacagcatttactggagaacatgacaagcacagcatgcaaaatatgaatccaacctaacttatgacagaatrctatttactgctttctctgcrggcatattccaacasaagaggatatgctgcagagatattaagctgctgtgctgccacatctgtttcaaatgtttgtcctctctcaagcatgacttattaagtgatgcagttctcagcatcagataacacaggtaacaaaatcctgcgaagctgttatggaagtaggwgcttcaagtaacctgagggaacagacagctcatctcctgcgtaaatccaagccaagatttggagaagtcatggtttgagtttggtctgctgctgttgtaacgagcccagtcctagagctatgagcaatctgat

SEQ ID NO: 8177 - DNA, 600 bp, Chicken  19866894202596_3
aaaacactcacttgcaaagcctgaagatcagcatttagagaatgacccaccaatactgcatcatggggaagtatctttttcagtctggtttgtatgtctggcaatcttgttttcactggaagaagcattttccttgtgactcctgagtatcttcaaaacagaaatgagaagaggtagaagaaatgcattagcaacagcatttactggagaacatgacaagcacagcatgcaaaatatgaatccaacctaacttatgacagaatrctatttactgctttctctgcrggcatattccaacasaagaggatatgctgcagagatattaagctgctgtgctgccacatctgtttcaaatgtttgtcctctctcaagcatgacttattaagtgatgcagttctcagcatcagataacacaggtaacaaaatcctgcgaagctgttatggaagtaggwgcttcaagtaacctgagggaacagacagctcatctcctgcgtaaatccaagccaagatttggagaagtcatggtttgagtttggtctgctgctgttgtaacgagcccagtcctagagctatgagcaatctgatgacctatgctattct

SEQ ID NO: 8178 - DNA, 530 bp, Chicken  19866894202596_4
tcaaaacagaaatgagaagaggtagaagaaatgcattagcaacagcatttactggagaacatgacaagcacagcatgcaaaatatgaatccaacctaacttatgacagaatrctatttactgctttctctgcrggcatattccaacasaagaggatatgctgcagagatattaagctgctgtgctgccacatctgtttcaaatgtttgtcctctctcaagcatgacttattaagtgatgcagttctcagcatcagataacacaggtaacaaaatcctgcgaagctgttatggaagtaggwgcttcaagtaacctgagggaacagacagctcatctcctgcgtaaatccaagccaagatttggagaagtcatggtttgagtttggtctgctgctgttgtaacgagcccagtcctagagctatgagcaatctgatgacctatgctattctttttctacagatatgcaagcttagctacggagcagagagagttgatttacaatcctgtaccttactcaccctgtgtcctttt

SEQ ID NO: 8179 - DNA, 600 bp, Chicken  19866894202598_1
cagaagaggctgtttgttttggtctgtgttttctgtaaataaaagtgcagtttcttgtttaacgcaatttccttttcccttcttcttggataacagaggatgaaagctttggaagcagctgcactggctgtctgttgagataatgctaaggcaccagttgtgctgtgccccacatttccctccttgccctgtatcatcctgactattcttgctgctgcatcctcagataaaacacaccaaaagcaaagcgggcaccagctgtgtgtgatgtgagtgagtgcccttgtcttatcacaaccytaagctygtgttggggacgagcagcgttatcaccagttcaggtaaagctgctgaagtgctggtgtgtccgtctgttcttcctcacgttacgtctgcctcttgtccctgaggtgttcttttcatccggatagaaagaaaagaagcaaaagactcaccactttgttggtcaagaaataaactgcagtcaggttttttttcagggcggatgaaagcataggagggttgtgatcaaaaaggaagaacacatggttcaaatcatcagaaaagcctgttgtttttaaaaaaggtacaagggttgca

SEQ ID NO: 8180 - DNA, 600 bp, Chicken  19866894202598_2
ggctgtttgttttggtctgtgttttctgtaaataaaagtgcagtttcttgtttaacgcaatttccttttcccttcttcttggataacagaggatgaaagctttggaagcagctgcactggctgtctgttgagataatgctaaggcaccagttgtgctgtgccccacatttccctccttgccctgtatcatcctgactattcttgctgctgcatcctcagataaaacacaccaaaagcaaagcgggcaccagctgtgtgtgatgtgagtgagtgcccttgtcttatcacaaccytaagctygtgttggggacgagcagcgttatcaccagttcaggtaaagctgctgaagtgctggtgtgtccgtctgttcttcctcacgttacgtctgcctcttgtccctgaggtgttcttttcatccggatagaaagaaaagaagcaaaagactcaccactttgttggtcaagaaataaactgcagtcaggttttttttcagggcggatgaaagcataggagggttgtgatcaaaaaggaagaacacatggttcaaatcatcagaaaagcctgttgtttttaaaaaaggtacaagggttgcaccaacaa

SEQ ID NO: 8181 - DNA, 600 bp, Chicken  19866894202598_3
acactatttgtttgcgtgtgtgcagatgttgtaggtgcaactctaagtgccttctttgaaaatctggccccaaattcaggaagatgctggaacttcaatgagcaaacacgtttcaatccctgtgcgtgattctggtttccatttcaggcacggatcagaaaatttggacccaaaatcttacagttgctgacggagtggacagaaacattcccgtatgactttcaggaagagcggatgatcggccatctgaaagacatgattcacaggatagccccgtgtgatgaggtgagggtgtctgayrtggggcattgcgtgaaagtgctgacttcggtttcccactttggttcttccttttcctcctgatgttttccacttcctctggaaaatcagttctcctctaatggttaaaacctgtagtagcttccctgaaaacccatgtctctcttgtggtagtgacgtggggacacatcacagcgatcgatagaactcatctactgcacctttctttctaaaagagcactattcccatctcaatgatagaagatctgagacatagcatagactgaaagtgttgttagaattcatcagcattcatagaat

SEQ ID NO: 8182 - DNA, 600 bp, Chicken  19866894202598_4
cactatttgtttgcgtgtgtgcagatgttgtaggtgcaactctaagtgccttctttgaaaatctggccccaaattcaggaagatgctggaacttcaatgagcaaacacgtttcaatccctgtgcgtgattctggtttccatttcaggcacggatcagaaaatttggacccaaaatcttacagttgctgacggagtggacagaaacattcccgtatgactttcaggaagagcggatgatcggccatctgaaagacatgattcacaggatagccccgtgtgatgaggtgagggtgtctgayrtggggcattgcgtgaaagtgctgacttcggtttcccactttggttcttccttttcctcctgatgttttccacttcctctggaaaatcagttctcctctaatggttaaaacctgtagtagcttccctgaaaacccatgtctctcttgtggtagtgacgtggggacacatcacagcgatcgatagaactcatctactgcacctttctttctaaaagagcactattcccatctcaatgatagaagatctgagacatagcatagactgaaagtgttgttagaattcatcagcattcatagaatt

SEQ ID NO: 8183 - DNA, 600 bp, Chicken  19866894202602_1
tggttggaccacggaactgtcccagctcccagccctgcagcatccttcgtgggagctgggtggtgagaacaagcagagagcaaatgctgctgagcggaagaaaatgggagggggacaccaaacccaaaccccttcttttgcatattcaaattacgtcgtagtgttgctagggatgtgattcagcttgagaacatgttgtttgtattgatttatccccacagccctcaagacttcttgaaaacaataagtgttgacgctgccaaagctggagctcagtgttgatactacataatgaaaatygcacgcgttggctctgctccaccaatgtggtgcactgaagcaagcacctctgcagctgcaccctgcacagcaccttcaggtcaccctgcagccagcacggtgtgtggccatggcaagggtgcctggaaaccccaacccatgctcatgctaccccagccccactcagtgcaggatctggctgtggctaagccagacactgctgcgttttctctcccttatagcagttacattaactcttttctttatccttaacacagcctataacacaacagaacacttttataggtctaggaaaatgta

SEQ ID NO: 8184 - DNA, 600 bp, Chicken  19866894202602_2
cacatactctccccaccggggtgatttctgctggaaatggctccccagggacagaccctctgcccctcaggatggagaggggctgagctgctttctccagcacagaggataccctccatcaagctgcatggttttgctaaatccccatccatcagcagggcagatagcattttttccagctcaggggtatcagtttccttcattacggctgttagcaatgtgcctcttgacacagctcagccgctgtgccttgtcccaatgcttgagtgcccaggaatgatgccaggagccaacctgggygctgcagggacagagcatcacgagtcgctatgctgcacatggagaagtcggagggatccagggagcaatttgatcaggtgtccaacgasgcargtagaaaggtgacaggctgaggctgagccactcataatggagcccaaatcctgggaatgggcatcttgagcattggtaagagacagtggggtgrtgtgcctccaaaactgcatggaaatgcagcgtgaagcagccaggtggtggggaagagggcaggaaaggaaacgagacccagctggggacgtgtgcaccctccttccctttaat

SEQ ID NO: 8185 - DNA, 600 bp, Chicken  19866894202602_3
gctttctccagcacagaggataccctccatcaagctgcatggttttgctaaatccccatccatcagcagggcagatagcattttttccagctcaggggtatcagtttccttcattacggctgttagcaatgtgcctcttgacacagctcagccgctgtgccttgtcccaatgcttgagtgcccaggaatgatgccaggagccaacctgggygctgcagggacagagcatcacgagtcgctatgctgcacatggagaagtcggagggatccagggagcaatttgatcaggtgtccaacgasgcargtagaaaggtgacaggctgaggctgagccactcataatggagcccaaatcctgggaatgggcatcttgagcattggtaagagacagtggggtgrtgtgcctccaaaactgcatggaaatgcagcgtgaagcagccaggtggtggggaagagggcaggaaaggaaacgagacccagctggggacgtgtgcaccctccttccctttaataaaggactgcttgggccccagggaggctctgcaggagcccttcagctggtgggatgcactctgggctttggtacccgtgcagatctctg

SEQ ID NO: 8186 - DNA, 600 bp, Chicken  19866894202602_4
tctccagcacagaggataccctccatcaagctgcatggttttgctaaatccccatccatcagcagggcagatagcattttttccagctcaggggtatcagtttccttcattacggctgttagcaatgtgcctcttgacacagctcagccgctgtgccttgtcccaatgcttgagtgcccaggaatgatgccaggagccaacctgggygctgcagggacagagcatcacgagtcgctatgctgcacatggagaagtcggagggatccagggagcaatttgatcaggtgtccaacgasgcargtagaaaggtgacaggctgaggctgagccactcataatggagcccaaatcctgggaatgggcatcttgagcattggtaagagacagtggggtgrtgtgcctccaaaactgcatggaaatgcagcgtgaagcagccaggtggtggggaagagggcaggaaaggaaacgagacccagctggggacgtgtgcaccctccttccctttaataaaggactgcttgggccccagggaggctctgcaggagcccttcagctggtgggatgcactctgggctttggtacccgtgcagatctctgagcc

SEQ ID NO: 8187 - DNA, 600 bp, Chicken  19866894202602_5
tatcagtttccttcattacggctgttagcaatgtgcctcttgacacagctcagccgctgtgccttgtcccaatgcttgagtgcccaggaatgatgccaggagccaacctgggygctgcagggacagagcatcacgagtcgctatgctgcacatggagaagtcggagggatccagggagcaatttgatcaggtgtccaacgasgcargtagaaaggtgacaggctgaggctgagccactcataatggagcccaaatcctgggaatgggcatcttgagcattggtaagagacagtggggtgrtgtgcctccaaaactgcatggaaatgcagcgtgaagcagccaggtggtggggaagagggcaggaaaggaaacgagacccagctggggacgtgtgcaccctccttccctttaataaaggactgcttgggccccagggaggctctgcaggagcccttcagctggtgggatgcactctgggctttggtacccgtgcagatctctgagccacggttgggcacctcatccctctgatgagcagcagtgatggggagtgctctcagcttaaaagccaccttcaaaatttacaaagccagcactggg

SEQ ID NO: 8188 - DNA, 600 bp, Chicken  19866894202608_1
gcacgaacatctgctctgcacggaggtgcggttgtgcgctcggttggtgccagagcctcttaaagacacatctccctgcataagtaggtaggctggcaggggaagtgctgttagaagtgtttgggtcacattttggaaaaggaaggttgacttcaatggattaataggaaatgtccaagggttatttcatgcagcctgctggcaatgtgccttccatcacagtactgcagtatgatttggggtggaaggaggctttagagcggatcaggtccatctccatctctggggagagctgatagyagcttttcagtatctaaaggggggctataagaaagaagggatcaggcactttagcaaagcctgttgtgttaggacaaggggaaagtggtttcaaacaaaagaagggagataaagattggatataaggaagaagttctttacactaagggtgatgagacastgtgggaattgaatgttgtttctgcatcagaaacaagataagaattttgttaatttcatgacctctgctaccatttgggtcctttattacaattaataactcttttcaggrgtctttctactttatcagggttctctggt

SEQ ID NO: 8189 - DNA, 600 bp, Chicken  19866894202608_2
ttaataggaaatgtccaagggttatttcatgcagcctgctggcaatgtgccttccatcacagtactgcagtatgatttggggtggaaggaggctttagagcggatcaggtccatctccatctctggggagagctgatagyagcttttcagtatctaaaggggggctataagaaagaagggatcaggcactttagcaaagcctgttgtgttaggacaaggggaaagtggtttcaaacaaaagaagggagataaagattggatataaggaagaagttctttacactaagggtgatgagacastgtgggaattgaatgttgtttctgcatcagaaacaagataagaattttgttaatttcatgacctctgctaccatttgggtcctttattacaattaataactcttttcaggrgtctttctactttatcagggttctctggtagttttcattgctcatcctctagataaaccttccccaacaatgtatactcagtatataagtaaaataatatatgcatacatatataagctagtaacaacttgtgtatagccggcatgaaaaaatatatgtcacacacattgcaagaatatcctgcacaaa

SEQ ID NO: 8190 - DNA, 600 bp, Chicken  19866894202608_3
catctccatctctggggagagctgatagyagcttttcagtatctaaaggggggctataagaaagaagggatcaggcactttagcaaagcctgttgtgttaggacaaggggaaagtggtttcaaacaaaagaagggagataaagattggatataaggaagaagttctttacactaagggtgatgagacastgtgggaattgaatgttgtttctgcatcagaaacaagataagaattttgttaatttcatgacctctgctaccatttgggtcctttattacaattaataactcttttcaggrgtctttctactttatcagggttctctggtagttttcattgctcatcctctagataaaccttccccaacaatgtatactcagtatataagtaaaataatatatgcatacatatataagctagtaacaacttgtgtatagccggcatgaaaaaatatatgtcacacacattgcaagaatatcctgcacaaattaaaaggacaactcgtgacatgccttaagggggtgcctgaagaacgtattgaggaagatctggcaccccccccccccgtactctttgtctaaccaagagtctgaagaaaa

SEQ ID NO: 8191 - DNA, 600 bp, Chicken  19866894202611_1
cctgtgcaatctcaccaggaggtccccagcaggatgtggaaatctgtgagtttgtgtcttggagcccctccatagcctatctactgtgtgaacctttccttaatatacataacttactgtgtgaaccttttgtaacacatacaaattgtatgaacttctccctaataaggatgtttccaagttgggttatgcccatgaaatttgaatggtgtgtcactgagcctgctgtcccaccaacttcatagcaaatggtttacaaaagaaaaagccctttactctcattttccagcagggctatgrgatacataaaactcttacatttgcccagccaattcgtctatctttataactgtgcatcatcatttcatttcatgttaatgcaaaaaagcttccacattctcatacacaggaaaaaatatacttttcagtttgtactaatattctacattgccatttctggtttgtaggtgggtattagttcttgttaatggtgctagaataacagcagaaggaaaataaaaatctggatttatccaaagggaaagtatgcggctgccagctcccacagaacccacctggtgttgccagctaacaccttgg

SEQ ID NO: 8192 - DNA, 600 bp, Chicken  19866894202613_1
cagttaaacaattaccaatagtggaactaaattcagagtacaaagctttctactactgaaatgccaaagtgcagggacagctgagtttgcccgtgaacctaacagagaacaaaagcaaaaggaaatgattaactctgaggttcaacaggaacgtgcagtgatagtccactgcaggccagcagtacttcagttttggctaactctgcattttccttataaatatgcttgtggcttgaatatcttcctgtgaacgtgaatgcactttggctcacagatcaaagacacaaagcatgtactgtkcttacactgctgtcatagtcacactccagagaagtaggaacaaaatactgtgccacagtatttgtgcatgtggcaaatgtacctgtacattctcatctattttctcttctcttcacctcaggcagctccttttgtcataggaaattgtttggtgaaaatacactcctcgactgayaaagccatttctcttctctttaaactttgaggatcactcacatttgaagagttgtactgaccacttgttctgcgttcccatctaaagggtttttctctgtctctccaaatcctgtgcccwtcaga

SEQ ID NO: 8193 - DNA, 600 bp, Chicken  19866894202613_2
ccagcagtacttcagttttggctaactctgcattttccttataaatatgcttgtggcttgaatatcttcctgtgaacgtgaatgcactttggctcacagatcaaagacacaaagcatgtactgtkcttacactgctgtcatagtcacactccagagaagtaggaacaaaatactgtgccacagtatttgtgcatgtggcaaatgtacctgtacattctcatctattttctcttctcttcacctcaggcagctccttttgtcataggaaattgtttggtgaaaatacactcctcgactgayaaagccatttctcttctctttaaactttgaggatcactcacatttgaagagttgtactgaccacttgttctgcgttcccatctaaagggtttttctctgtctctccaaatcctgtgcccwtcagacaaagtgggcagaacttgttttcctagttcagataccagctgggagagacccataattaagttcaactattttttgtatgcactggcagggcatggtatgtactatgactctgcttaccatagctgatcrattgttgtacagtgagacattcaaggattcagcaatttcatataa

SEQ ID NO: 8194 - DNA, 600 bp, Chicken  19866894202613_3
ctgtkcttacactgctgtcatagtcacactccagagaagtaggaacaaaatactgtgccacagtatttgtgcatgtggcaaatgtacctgtacattctcatctattttctcttctcttcacctcaggcagctccttttgtcataggaaattgtttggtgaaaatacactcctcgactgayaaagccatttctcttctctttaaactttgaggatcactcacatttgaagagttgtactgaccacttgttctgcgttcccatctaaagggtttttctctgtctctccaaatcctgtgcccwtcagacaaagtgggcagaacttgttttcctagttcagataccagctgggagagacccataattaagttcaactattttttgtatgcactggcagggcatggtatgtactatgactctgcttaccatagctgatcrattgttgtacagtgagacattcaaggattcagcaatttcatataataaactgcaatttataaattaatttataagaatataagcagttaacccaaagtggtgctagcagagcgaagctgagttaaagagctagagcaacctcatgcagagaaaaagagcatcctg

SEQ ID NO: 8195 - DNA, 600 bp, Chicken  19866894202613_4
tttgtcataggaaattgtttggtgaaaatacactcctcgactgayaaagccatttctcttctctttaaactttgaggatcactcacatttgaagagttgtactgaccacttgttctgcgttcccatctaaagggtttttctctgtctctccaaatcctgtgcccwtcagacaaagtgggcagaacttgttttcctagttcagataccagctgggagagacccataattaagttcaactattttttgtatgcactggcagggcatggtatgtactatgactctgcttaccatagctgatcrattgttgtacagtgagacattcaaggattcagcaatttcatataataaactgcaatttataaattaatttataagaatataagcagttaacccaaagtggtgctagcagagcgaagctgagttaaagagctagagcaacctcatgcagagaaaaagagcatcctgatgaacagagatgctcctattctactaaagggagcatagggaaattatttgcactgcccctagaaggtgaaatgagctaatcttttttggtgccttcctagggactaatattaacagtgctctccagacgggtgc

SEQ ID NO: 8196 - DNA, 600 bp, Chicken  19866894202616_1
acggcttcatcttccttaaaacagctaaacattctacatcggaaatggaagaaaaacttggcccctatatccaactgttttttggcccaaagactttgtatcttttgcagcaagatagattttccaattcctgcatcgccaaagacataaatagtctctccatcttcatttattaccccaactgcatcatcaaaaagggcttgtaattgacacacttcacccaggctttcattggtaaaattgaccatctccataatactgttagagtagatttcttcaagcagcatctcttccctctgygcatatgacagaacgaatttggagtcccgtcccagttcatatctgagtttttggcaatacctgctaactaaaaaggcagtgaactattattaaaataactactattaaaaagcctgttgcatacgataacctacctctgtgggaactttgagggatatcaagttaaagcaattcttacacaaaatcagtttttggcagatgacttctatgcattcaggctgccataatgatggaaaattcagatgcttagcatgtgagtcaccatttcctgaaatccaacactgactccaagacactgca

SEQ ID NO: 8197 - DNA, 599 bp, Chicken  19866894202618_1
  misc_feature (1)..(37): n is any nucleotide
nnnnnnnnnnnnnnnnnnnnnnnnnnnnnnnnnnnnncccatagcagctggaagaggtaatactgaggggcttgtttttaaacagatctttaattacttaggggtgttctcaaagcccttaactacatttacacaaattgctaagtaatatgaaaatcttgatggtttctatttaagcatcataatataagtatttaggatggaaaatgattggagcctaaatctttgaaatgccggcatgaatcctccttcagcctctaagaaatgcattccaaagctgtgctttactgcctgagaaastaattaaaattaacccccttgctacattaggcctttcctaagacgctgcttcctaagacgtgcccgcagtaccccctgtgagggcacagagcagagaggcgccaygagacagctgctcaccagaaatgctcccggcctccttctgcaaagtgtctgtcrcctctccttctctcastcagttyaggcttctgtttctcaaacatgagtttcaggtacatccctgaagaagcagaaaatttcttttctaaaaattatcagtattctacaaacaataagtaactgcwcagggcgcgagtggc

SEQ ID NO: 8198 - DNA, 600 bp, Chicken  19866894202618_2
gttctcaaagcccttaactacatttacacaaattgctaagtaatatgaaaatcttgatggtttctatttaagcatcataatataagtatttaggatggaaaatgattggagcctaaatctttgaaatgccggcatgaatcctccttcagcctctaagaaatgcattccaaagctgtgctttactgcctgagaaastaattaaaattaacccccttgctacattaggcctttcctaagacgctgcttcctaagacgtgcccgcagtaccccctgtgagggcacagagcagagaggcgccaygagacagctgctcaccagaaatgctcccggcctccttctgcaaagtgtctgtcrcctctccttctctcastcagttyaggcttctgtttctcaaacatgagtttcaggtacatccctgaagaagcagaaaatttcttttctaaaaattatcagtattctacaaacaataagtaactgcwcagggcgcgagtggcggctaccggcagggggcgctgcagcgtctccaaagagagggcagcgcggctgcagcagctccagaaggttccagaaggttccaaagggctcagccaatcagaggcc

SEQ ID NO: 8199 - DNA, 600 bp, Chicken  19866894202618_3
tgatggtttctatttaagcatcataatataagtatttaggatggaaaatgattggagcctaaatctttgaaatgccggcatgaatcctccttcagcctctaagaaatgcattccaaagctgtgctttactgcctgagaaastaattaaaattaacccccttgctacattaggcctttcctaagacgctgcttcctaagacgtgcccgcagtaccccctgtgagggcacagagcagagaggcgccaygagacagctgctcaccagaaatgctcccggcctccttctgcaaagtgtctgtcrcctctccttctctcastcagttyaggcttctgtttctcaaacatgagtttcaggtacatccctgaagaagcagaaaatttcttttctaaaaattatcagtattctacaaacaataagtaactgcwcagggcgcgagtggcggctaccggcagggggcgctgcagcgtctccaaagagagggcagcgcggctgcagcagctccagaaggttccagaaggttccaaagggctcagccaatcagaggccgaggcacctgaggggaacggatctgaggctgcaggagaacgagcagttcacttc

SEQ ID NO: 8200 - DNA, 600 bp, Chicken  19866894202618_4
agcatcataatataagtatttaggatggaaaatgattggagcctaaatctttgaaatgccggcatgaatcctccttcagcctctaagaaatgcattccaaagctgtgctttactgcctgagaaastaattaaaattaacccccttgctacattaggcctttcctaagacgctgcttcctaagacgtgcccgcagtaccccctgtgagggcacagagcagagaggcgccaygagacagctgctcaccagaaatgctcccggcctccttctgcaaagtgtctgtcrcctctccttctctcastcagttyaggcttctgtttctcaaacatgagtttcaggtacatccctgaagaagcagaaaatttcttttctaaaaattatcagtattctacaaacaataagtaactgcwcagggcgcgagtggcggctaccggcagggggcgctgcagcgtctccaaagagagggcagcgcggctgcagcagctccagaaggttccagaaggttccaaagggctcagccaatcagaggccgaggcacctgaggggaacggatctgaggctgcaggagaacgagcagttcacttcttgctatttcccccag

SEQ ID NO: 8201 - DNA, 600 bp, Chicken  19866894202618_5
taatataagtatttaggatggaaaatgattggagcctaaatctttgaaatgccggcatgaatcctccttcagcctctaagaaatgcattccaaagctgtgctttactgcctgagaaastaattaaaattaacccccttgctacattaggcctttcctaagacgctgcttcctaagacgtgcccgcagtaccccctgtgagggcacagagcagagaggcgccaygagacagctgctcaccagaaatgctcccggcctccttctgcaaagtgtctgtcrcctctccttctctcastcagttyaggcttctgtttctcaaacatgagtttcaggtacatccctgaagaagcagaaaatttcttttctaaaaattatcagtattctacaaacaataagtaactgcwcagggcgcgagtggcggctaccggcagggggcgctgcagcgtctccaaagagagggcagcgcggctgcagcagctccagaaggttccagaaggttccaaagggctcagccaatcagaggccgaggcacctgaggggaacggatctgaggctgcaggagaacgagcagttcacttcttgctatttcccccagcactctg

SEQ ID NO: 8202 - DNA, 563 bp, Chicken  19866894202618_6
ttactgcctgagaaastaattaaaattaacccccttgctacattaggcctttcctaagacgctgcttcctaagacgtgcccgcagtaccccctgtgagggcacagagcagagaggcgccaygagacagctgctcaccagaaatgctcccggcctccttctgcaaagtgtctgtcrcctctccttctctcastcagttyaggcttctgtttctcaaacatgagtttcaggtacatccctgaagaagcagaaaatttcttttctaaaaattatcagtattctacaaacaataagtaactgcwcagggcgcgagtggcggctaccggcagggggcgctgcagcgtctccaaagagagggcagcgcggctgcagcagctccagaaggttccagaaggttccaaagggctcagccaatcagaggccgaggcacctgaggggaacggatctgaggctgcaggagaacgagcagttcacttcttgctatttcccccagcactctgcggatctgaaatccctatgattctgtgattcaggcctggacaaattcccaggaagtttgtgccgt

SEQ ID NO: 8203 - DNA, 600 bp, Chicken  19866894202619_1
gctctccctgcacagcaagaaatgggacctctgtcctcatcccgacacagccccagccaccggggcttgaggaatgcagcccccagctaaaaagatctgtgaggtcaggactgctggacttctggctggggagctactgcaggtaagagcctgaacagccatgtgaatacactagtggacgtgtgccaagactggcactcccaaagcagacagtggcagacactgctccttgctgcagctctcccctcctggtacttccgcagcagcagctgagggcttgctctactctgctccttctcwaaggctttggaggagctgcagtctgggcagaygttctggtttcaggagcaggtaaaccttggcgatgccagcccgagccacggcagaacctaccgcacaggtccgaggaggctttgtccagttcctcagcctctgcaatcatytctgccatggccaggatgtcagcctctagaggattggaggggatcttcaccttcagctcctcaattgtctctacaatcttatccgcgctctccagtgtggtgggtagaaacattggcacaggcacctgttgacagcagcacagcaggcagagatcag

SEQ ID NO: 8204 - DNA, 600 bp, Chicken  19866894202619_2
gtcctcatcccgacacagccccagccaccggggcttgaggaatgcagcccccagctaaaaagatctgtgaggtcaggactgctggacttctggctggggagctactgcaggtaagagcctgaacagccatgtgaatacactagtggacgtgtgccaagactggcactcccaaagcagacagtggcagacactgctccttgctgcagctctcccctcctggtacttccgcagcagcagctgagggcttgctctactctgctccttctcwaaggctttggaggagctgcagtctgggcagaygttctggtttcaggagcaggtaaaccttggcgatgccagcccgagccacggcagaacctaccgcacaggtccgaggaggctttgtccagttcctcagcctctgcaatcatytctgccatggccaggatgtcagcctctagaggattggaggggatcttcaccttcagctcctcaattgtctctacaatcttatccgcgctctccagtgtggtgggtagaaacattggcacaggcacctgttgacagcagcacagcaggcagagatcagacacgtgctgtgcccacacagcgttccggttc

SEQ ID NO: 8205 - DNA, 600 bp, Chicken  19866894202619_3
taagagcctgaacagccatgtgaatacactagtggacgtgtgccaagactggcactcccaaagcagacagtggcagacactgctccttgctgcagctctcccctcctggtacttccgcagcagcagctgagggcttgctctactctgctccttctcwaaggctttggaggagctgcagtctgggcagaygttctggtttcaggagcaggtaaaccttggcgatgccagcccgagccacggcagaacctaccgcacaggtccgaggaggctttgtccagttcctcagcctctgcaatcatytctgccatggccaggatgtcagcctctagaggattggaggggatcttcaccttcagctcctcaattgtctctacaatcttatccgcgctctccagtgtggtgggtagaaacattggcacaggcacctgttgacagcagcacagcaggcagagatcagacacgtgctgtgcccacacagcgttccggttcagccaactgctgtaaaagcagaggcagcagaagaggacagagaagcaggaagactacagcaaggcaggactgagacagagaacacaagcaggtgaagtgtgtcgcttaccg

SEQ ID NO: 8206 - DNA, 600 bp, Chicken  19866894202623_1
tggcataaggacagtttggtaattcattgttacaatggttctctttgagaggattttgaagagagagtaattataaatcagaaaaggaaatgagaaaaaaaatcaaaaaacttcttttctgtggttatatcagtaggacaagcatttcagtgtggctagtagctcctgtcattcagttctttcaaatttatatatgtatatataaaaaatataaaatgaatttcctagcaactgaagattcttgccacatgttcacagagcacagcaaaatggctattgtatctcaattttatttttatmttgttcagaggaaaaaagatttaaaaaataaaattgaaatacgatatttaattctaattagttctcttgttcttgaatgtgcttatattttcagatacttagcaaatggaatggaataggaaggatgctgtacatttcagtatctaaaatgcagttaatgaagaaggtaaaactgggaacactttttaatataaggccacttggaagttctgggtagcgcacgtgcagagacacagaggactccaaatacatgcacaaatgattaaaatatgcaacttctgaatccacacttacacagta

SEQ ID NO: 8207 - DNA, 600 bp, Chicken  19866894202623_2
tccttgaatgaagaggatgaaaaggaagattaatgtttctaagagtagatgagggtgtagccctgtaggtaattctgaaacatcctcctgagcaagatctcctttggcagccatacttgccttcctttatttgcagaaagcaaattgaagccccctcatataagcagtagcaccacagggaacacaaccaaaataataacagacagctgttacttcattgcctgaagacttcaaagaacatctattgttctttgaagttcttgttgaacttcagggccactctaaaactgctatatttckctacaaatgcaacacacatagcatgtaatacctagaacctctctcccttactatagaggacagaatcaaaacaaaaacataaatagcaattctttgtaggcttgactgctgcaactgttctgccccctctgagcctgaagacatggataggtgttgtttagtacagactctgtgaggaagtgactgctacatgtttagctttataccttttgcttgattacgcctagtatgtacaagaaatattcagcacatacctcatttgctcccagaaatggacttgttcagtaatttcaggataag

SEQ ID NO: 8208 - DNA, 600 bp, Chicken  19866894202628_1
tatgctacacttctttgtgtattcttaaggctttttagaaaatacatgtattatctagcagtactccatctaaaaataagttatgtcttccatacatcatttcagaatatcactttattcacaatctaatccacattccaatagacatgtttaaatctgtctgcttaagcaatacacacagattccaattaggataacactaacatcaagcactcaagaaactttaaaacagggaagtggggtgaaattttttggagtcagagtggcaaggctttgcaaggttacttaggaagctagctytaaaccaagttatccagtttggaggaccaggagaggaaggactaacacaagggaatataatggaagtgaaaaagaggaagagtgaatgcacagccctgtaaccttataactctcctgttaatgtactgactggaagaaggaggcacagaagtgttttgctctggttctcccctgtagaatataagggatacttccactacatttcctattcccctatttcctccattctcccatctcatgtgtatggtcctacgtttcacttcaaccatactaaagcctaggtacaggaagaacacacgt

SEQ ID NO: 8209 - DNA, 600 bp, Chicken  19866894202634_1
ttaatgtaagattatagtgcttcttggaaacatttgtgtcagcattcagtgtatagtcccttaatgccatgtacatgagattcctgttgttaagattcctgttcttaattatgaatacagttagtattcttactggtttcattcatggtgagatattaatttggcaaggtagtaaattccactgacttaatacttgtaattagttcccaaaggggaactgacactttggtaattcatcactgtcacagtgtgggttgcagtatcttagaggcttttcaccatggtctagatgtaacttaytatgcagctagcagtcttgcacctagagttctagcgggaatgtaggaatgactttgtctcattcatatgctctaaattctttctattgaatagtgcagawcattcacagtttgtgtaattgttgttactctgagaagctgctgaagcaacattaatatgcataatctaccytgagaactgagttaacatcctgttgcatttaatattccaccatgcttcagaagagaagcagccatgcaggcttctcacgtcagcaagcagccagaaccataaataaagcactcgaggctgtaatctgat

SEQ ID NO: 8210 - DNA, 600 bp, Chicken  19866894202634_2
gttcttaattatgaatacagttagtattcttactggtttcattcatggtgagatattaatttggcaaggtagtaaattccactgacttaatacttgtaattagttcccaaaggggaactgacactttggtaattcatcactgtcacagtgtgggttgcagtatcttagaggcttttcaccatggtctagatgtaacttaytatgcagctagcagtcttgcacctagagttctagcgggaatgtaggaatgactttgtctcattcatatgctctaaattctttctattgaatagtgcagawcattcacagtttgtgtaattgttgttactctgagaagctgctgaagcaacattaatatgcataatctaccytgagaactgagttaacatcctgttgcatttaatattccaccatgcttcagaagagaagcagccatgcaggcttctcacgtcagcaagcagccagaaccataaataaagcactcgaggctgtaatctgatcccatgacttgcactgttgctctgcctgccagcagcacaagtttccagggacttctggagcaaagcagctgctaccttgaaggctagaatgacagtgtag

SEQ ID NO: 8211 - DNA, 600 bp, Chicken  19866894202634_3
gtaaattccactgacttaatacttgtaattagttcccaaaggggaactgacactttggtaattcatcactgtcacagtgtgggttgcagtatcttagaggcttttcaccatggtctagatgtaacttaytatgcagctagcagtcttgcacctagagttctagcgggaatgtaggaatgactttgtctcattcatatgctctaaattctttctattgaatagtgcagawcattcacagtttgtgtaattgttgttactctgagaagctgctgaagcaacattaatatgcataatctaccytgagaactgagttaacatcctgttgcatttaatattccaccatgcttcagaagagaagcagccatgcaggcttctcacgtcagcaagcagccagaaccataaataaagcactcgaggctgtaatctgatcccatgacttgcactgttgctctgcctgccagcagcacaagtttccagggacttctggagcaaagcagctgctaccttgaaggctagaatgacagtgtagtcagaaggttctctttagcctgctaaaagaatagctgtctgggtatgtgactatcccacaaatccatctat

SEQ ID NO: 8212 - DNA, 545 bp, Chicken  19866894202647_1
actgtatgagaagcacaacaagctgagcagtgccacagtctctgaagtattttgtcaccatgcagtggttggtaagagacacggctgttccaggacaaagctgcctggtttcaagtactcagagtatcacatggagagcttgctttattccaggcatactgaaccatacgaccttcccatagccatttatccatttctatctgtgcccaagtgacagagatcttgccactgagaatgcaatgtccgaaccaaatttcaggctcatgctttcaagggggcacaccacatttctatagtaaytctacacagttcrtgtgctttgagcactctgaaaaaaaaaaaatagtctttccaaagaagtttctccccctgctcataaacactaacagttgcccccttgcccacaaaaacagaacaggcaagttatcctcagcttctgactgcctcagataaggcttgcctccaaaacatacttattattaaaaggtactacgctctctcaggatcacgtttctttctcttaggctgataataataactgatag

SEQ ID NO: 8213 - DNA, 532 bp, Chicken  19866894202647_2
cacaacaagctgagcagtgccacagtctctgaagtattttgtcaccatgcagtggttggtaagagacacggctgttccaggacaaagctgcctggtttcaagtactcagagtatcacatggagagcttgctttattccaggcatactgaaccatacgaccttcccatagccatttatccatttctatctgtgcccaagtgacagagatcttgccactgagaatgcaatgtccgaaccaaatttcaggctcatgctttcaagggggcacaccacatttctatagtaaytctacacagttcrtgtgctttgagcactctgaaaaaaaaaaaatagtctttccaaagaagtttctccccctgctcataaacactaacagttgcccccttgcccacaaaaacagaacaggcaagttatcctcagcttctgactgcctcagataaggcttgcctccaaaacatacttattattaaaaggtactacgctctctcaggatcacgtttctttctcttaggctgataataataactgatag

SEQ ID NO: 8214 - DNA, 513 bp, Chicken  19866894202647_3
ccacagtctctgaagtattttgtcaccatgcagtggttggtaagagacacggctgttccaggacaaagctgcctggtttcaagtactcagagtatcacatggagagcttgctttattccaggcatactgaaccatacgaccttcccatagccatttatccatttctatctgtgcccaagtgacagagatcttgccactgagaatgcaatgtccgaaccaaatttcaggctcatgctttcaagggggcacaccacatttctatagtaaytctacacagttcrtgtgctttgagcactctgraaaaaaaaaaatagtctttccaaagaagtttctccccctgctcataaacactaacagttgcccccttgcccacaaaaacagaacaggcaagttatcctcagcttctgactgcctcagataaggcttgcctccaaaacatacttattattaaaaggtactacgctctctcaggatcacgtttctttctcttaggctgataataataactgatag

SEQ ID NO: 8215 - DNA, 599 bp, Chicken  19866894202648_1
  misc_feature (1)..(203): n is any nucleotide
nnnnnnnnnnnnnnnnnnnnnnnnnnnnnnnnnnnnnnnnnnnnnnnnnnnnnnnnnnnnnnnnnnnnnnnnnnnnnnnnnnnnnnnnnnnnnnnnnnnnnnnnnnnnnnnnnnnnnnnnnnnnnnnnnnnnnnnnnnnnnnnnnnnnnnnnnnnnnnnnnnnnnnnnnnnnnnnnnnnnnnnnnnnnnnnnnnnnnnnnnnncttcctgggctgactgagatagttgagatgacacttattctcaaagtgacttttttcagtgtgatcctgctttcccattgatgactcccagagactygggtagaagcccatttmatttgttcttgaaaagttaattgtttcactttatcttcttggagtcaccccctgacatttcacagcaaatccctgtgttgtttgttggtgtttttgtttttgtttttgtttttttttttctgggagatcattgacagaaaatgtggaggttctgtttacaggaaacagaagcattggtttcttctgacggttccagttaagtttgccatggttagtcagtcactggatagatttacctgggcaattttctcccccctgctaggtaaccagttagtataaact

SEQ ID NO: 8216 - DNA, 599 bp, Chicken  19866894202648_2
  misc_feature (1)..(186): n is any nucleotide
nnnnnnnnnnnnnnnnnnnnnnnnnnnnnnnnnnnnnnnnnnnnnnnnnnnnnnnnnnnnnnnnnnnnnnnnnnnnnnnnnnnnnnnnnnnnnnnnnnnnnnnnnnnnnnnnnnnnnnnnnnnnnnnnnnnnnnnnnnnnnnnnnnnnnnnnnnnnnnnnnnnnnnnnnnnnnnnnnnnnnnnnnncttcctgggctgactgagatagttgagatgacacttattctcaaagtgacttttttcagtgtgatcctgctttcccattgatgactcccagagactygggtagaagcccatttmatttgttcttgaaaagttaattgtttcactttatcttcttggagtcaccccctgacatttcacagcaaatccctgtgttgtttgttggtgtttttgtttttgtttttgtttttttttttctgggagatcattgacagaaaatgtggaggttctgtttacaggaaacagaagcattggtttcttctgacggttccagttaagtttgccatggttagtcagtcactggatagatttacctgggcaattttctcccccctgctaggtaaccagttagtataaactgttttaatggaagttct

SEQ ID NO: 8217 - DNA, 600 bp, Chicken  19866894202657_1
gaggtgtccaaagccaggttggatagagtcctaggcaacaggatctagtgcctgatttattgtttggcaacctcatttgttttaagggggtttgaatctagatggtctttgaggttagctcccaaaccaagccattctatgattctatgaaaatatgcttgaacccaaagaaccacagggtttcctctgagtcgtcgatcattgcattagcagacatattgatgatcacctacaaagcacacaatgggatgacagtacagtgttgagttggagttcatccccatggctactctaagcacygatggaccatatcacagatggatcatgtcgtatcattaacaactgttttcgtgggtggagagtgataggacaagggggaatggcttaaattaagacaggagaggtttagattagatattaagaggaagtttttcacacagagggtagtgacacagtggaacaggttgcccaaggaggttatggatgccccatccctggaggcattcaaggccaggctggatgtggctctgggcagcccggtctgcccagagtgcacatagcagagggattgaaactgtatgatctttgaggtccttttca

SEQ ID NO: 8218 - DNA, 600 bp, Chicken  19866894202664_1
gaactcataggttgagataaaactatttactaaaatagagaaaatgaaaacaataatagttatgtctatatatacatatgtgtttatgaatgtatataagaagtgatgcacaagtaattgctcgccaccccaactgatgctcatctaaccccctaagcattggaaaacagagatgaactctcactcccttcagaactccttctgctggatgtcatgtgatgtggaatatcccttaaaccagtttaagtcagctgtactaattctgttccttcccagctcctgaggcactttgctgagaayggcctcagctctgtacaacactgcttagcagcaactgtaaaccttagtgtgttatcaacactgttttctcctagaaccacartgtaatagcatcataccaaatactctgaagaaaatactttcatcccagctgaaactgaggcaaagcttcgggcacgtgggttttgaaaactttgtgatgaaaaggctcctgagaagaggcaagagatcaagtcctaggggttgaacagaacacagaggttctgtagtttcttgttaaatttttaaaggcataggcattattttaaaagtaaaaattct

SEQ ID NO: 8219 - DNA, 600 bp, Chicken  19866894202664_2
tttatgaatgtatataagaagtgatgcacaagtaattgctcgccaccccaactgatgctcatctaaccccctaagcattggaaaacagagatgaactctcactcccttcagaactccttctgctggatgtcatgtgatgtggaatatcccttaaaccagtttaagtcagctgtactaattctgttccttcccagctcctgaggcactttgctgagaayggcctcagctctgtacaacactgcttagcagcaactgtaaaccttagtgtgttatcaacactgttttctcctagaaccacartgtaatagcatcataccaaatactctgaagaaaatactttcatcccagctgaaactgaggcaaagcttcgggcacgtgggttttgaaaactttgtgatgaaaaggctcctgagaagaggcaagagatcaagtcctaggggttgaacagaacacagaggttctgtagtttcttgttaaatttttaaaggcataggcattattttaaaagtaaaaattctatgttattaagatctttccagtacacacttgcagggactttgcagttgtaatttaacaccattactacaacgttaatacatt

SEQ ID NO: 8220 - DNA, 600 bp, Chicken  19866894202680_1
aatattccttctctcttcctcacttccccatccccgtgcaactgaaccacagcccataggaactcttacaatctggtctgactgctgccaatgaaaatgaataaataaacacgccacaaagaaccgaagtttgctagactgacagcccttatctcagggcacagcttggtgtgctgcagagagaaaacagaagctcacaggaggaaaaaaatgaagtgttctccctgttcaagcagccaccaacacatttatcagcggaaacatactctcagggagagagcttaacaattcgtgggttcrtgtaaatcaaagcagttcccctgtttctgcacagcagcaaggagcacactggcttcattactggatcccagcagcaaggccgaagcctacagtagcaggaggatatggaagtggaacgcttcgaacccgtttcacgtgctgcagcctatgctaaagggttacgggaggattaaagtccaagcagatgttttcaaagataatatttagtaaagtcagcagttcccttaaatatagtaagaaggggagaggagattcttcttggttaactgcttcaagccacagaggtcattttgttttcat

SEQ ID NO: 8221 - DNA, 600 bp, Chicken  19866894202681_1
cttgcttctccaagcgaatgctggcaactctttgattagtcctttaatgtaagttaaatgtcatcttatgaaatgtcagtatgaggtttgaaatcttggacagctggttgtgtactgcagtgtttttccagtgccgtatcagtgggcaggttctagattatgttcttctgaatgaataccttccagttctcccaaggatgctctgtggttccctcctccaagagcatggagctgttgagtcaagtaatgcttcagatttgttattctaattcaaaaatacagggttttttcattcttgtrttattgtcaagttccttttgagaggcagtagcagtcaaacagggtctctttttaaatggacgtcaccttcacttctactcagttcagccactcatgcttaccatgataaacctcatcagccctttttgcagtggaatcagagtgctgagaatagacttctgccaagtcatctttagatgcttcctgtgttttgaacagagttgttactaaaagtcatatcttgtgtatgttttaacctctatgtagatggcacttttaaattaagttttattaatgtttttaaaagagtaggtgcagtct

SEQ ID NO: 8222 - DNA, 600 bp, Chicken  19866894202685_1
ctccacccctccaggactcacaatccttcacctctgcctccctttcgtctgggcttggggtcctatagagaggtgtagagaggcagctccatccttcacacagcagccctgaagagcgggatccactcctctaaaggagagcaagagggagaaaagccagcgccagtgatcacctttctccacagcagaatgcttcagttgttcaggtccataaagtgctttgagctccagggcctgtgttggtgattgggaaggtaaacgactgtcccttcctcctggtctgagggtgcccagagcgtrgctgggtccagctccagaaaccagagcacgcccacaacgggcagagggaagggagcagcatatcagcaatgagcaccaaagaggatggtggcagggggttgagggaaataaatatagctcagtagcagggagacttattatttttcctttacattttacacaaggggggggggggggggagcaattaagggccactgatgctaaccagaaacctcctcacaagaacctccaagtaggggagtaccaggggctccagtctgcctctcctgcctaaactccatttcagacagtccaggcccc

SEQ ID NO: 8223 - DNA, 600 bp, Chicken  19866894202687_1
ttttgtagggaagagagggagtgcaggacgtgttcttgcgtcagcctgtttgttctgggacctcctggctccgaacccgagggctgtgctgggtctcagaccaggacagagcccatttggagggcaagcagccggagcagaggggagggcaaagggctcaccttggttttcagcgcccgcttctcaatctcagagatgcatttcttcacaatgaaggggatgccatccgcgctgccctgggacgccttcaggaagtcctgcccgaaaagctgcagcttcccctggagcttcttgtgcccrcattggatggccaaggtctccaagcacttcttgtggcacgccaggtagcactgggggacagggaagggctcggaggtggggggcagcggggctgggaggscacacgtggcagcgctgtgggcacagggtggtccccccccacctcttcctcctcccacatccccagcattacctcctcacattctgccccctggaagtacacgtagctgttgcactcccggcacttggagggggccctcagcttcctcagccggtgggtctgagctgccctggacaggcccacgttccggaagggccccg

SEQ ID NO: 8224 - DNA, 600 bp, Chicken  19866894202687_2
ccaggacagagcccatttggagggcaagcagccggagcagaggggagggcaaagggctcaccttggttttcagcgcccgcttctcaatctcagagatgcatttcttcacaatgaaggggatgccatccgcgctgccctgggacgccttcaggaagtcctgcccgaaaagctgcagcttcccctggagcttcttgtgcccrcattggatggccaaggtctccaagcacttcttgtggcacgccaggtagcactgggggacagggaagggctcggaggtggggggcagcggggctgggaggscacacgtggcagcgctgtgggcacagggtggtccccccccacctcttcctcctcccacatccccagcattacctcctcacattctgccccctggaagtacacgtagctgttgcactcccggcacttggagggggccctcagcttcctcagccggtgggtctgagctgccctggacaggcccacgttccggaagggccccgtgggagccgtcatctccgggggtgatcccattgatgcctacggacagagagcagagggacacatcagtctccttaggggtcgggcagagtgaggctcgag

SEQ ID NO: 8225 - DNA, 600 bp, Chicken  19866894202692_1
aatcagagacaccagaatctcactttgcttcttcatttctaacacttgctattatctaactgaaaaacaatacaaactacagttacaagtttggctcaaagttgcagttaattattacatttataaagtctttgtttctttacatttttcctttcttccccccttcccattcctccctccctccccagataaaacaaaagcacaccaaacaccactacttcagctatttattcaccttaccatctggtccgattaagtcatttcccccttcttacccctgccaagtgccagatattgctyctttcctgactgtagccacagcttctctttcccatctctttctaactgtcccaagatgccattgcctctctttcagtcctctacactttagaaacgagcaccatctcctgcattactttattttttataattattttatatttttttaataattataattttataattattttataattcctttttttttttcattccccaccatactttcagaaaccactgagaagggaaaatatgctcccttcttagagaaggcaatagctagtttaattaattgtaagttaaaactcttcaaatcta

SEQ ID NO: 8226 - DNA, 600 bp, Chicken  19866894202692_2
ccccagataaaacaaaagcacaccaaacaccactacttcagctatttattcaccttaccatctggtccgattaagtcatttcccccttcttacccctgccaagtgccagatattgctyctttcctgactgtagccacagcttctctttcccatctctttctaactgtcccaagatgccattgcctctctttcagtcctctacactttagaaacgagcaccatctcctgcattactttattttttataattattttatatttttttaataattataattttataattattttataattccyttttttttttcattccccaccatactttcagaaaccactgagaagggaaaatatgctcccttcttagagaaggcaatagctagtttaattaattgtaagttaaaactcttcaaatctaccactaaaaaaaacctactcattaggcactccttcccttaagttgattaatgctattagatcatcaattgctcaatgttggtaaattaataatgatgccaattttaaaacgtaagaaagggcttctgccagttgatcttagtcaactgtcaactgcaaaaaagattatacttgctttaaagg

SEQ ID NO: 8227 - DNA, 561 bp, Chicken  19866894202698_1
tcaggattttacattatgatttaataggatgtatttttatacttgaatctaacatatcatagattcccagaactttcagatttaaatcattggagatgaaggtgaactgagactaaaaactagtaacacagcatatatagaaaatgagtatgaaatgagcaaatagctcgaaactaccaaaaactggaaaattatgcaaaaagataattagttggaattaatatactttgtgaaagtgactgtgtaactgactcattcatggtgacacagcaatctgacagaaccagaaggaataatgartgcttgtacatttatcagtttttcctgaatagtttgtatatgatccatgtcgttttgcaggcagagttaaatgttgtaattatatttatttattgggttaaaaggatttcctcttctcgtaattgcaccaatttcactttttctggatttctttttgatagtcccacgtcacttgttttctgactgaatccttttttcagagatatttatcacctgctgaaacagatttgtttaatttttattatgtatctggcttatgag

SEQ ID NO: 8228 - DNA, 541 bp, Chicken  19866894202700_1
ttgttatgtcttcttgatagtgggtactggaagtgtgggcctggtactgaggacatccttccctcatagtggtggagactgcagaggctcttaccagccaaagaaaacttccaccttcattttgtttgttcttgtggttttggcttggagcttccagatactggcagagatctttagcatctcccagagcagtaagggagaaaatttaccaagatgccatcttgctggctttatggctttattttcttaagaataatgtagtcatggtcttcactgtgtgtggccacagccctgtgacaygctgccaggatgcagtgttgtgaggaaagctgatgtttccatccagacaatacttaacctacacggttgatgttcaaaaggagacagcgtgggctgtcacatttaagaagtaagagtaataaaaacaaagttaagacattcctttcctcatttgcatgatttttagtaagaggtccttgcttttgacttttcttttacctattttattaatggttccttcgagtgatgagtgatgccttat

SEQ ID NO: 8229 - DNA, 600 bp, Chicken  19866894202704_1
tgcaatgcaaaggatgcatttttctcgagttgttctgctagtggaaaagagctcaagtcttagaagcaaccaatgctacagaaaaatagccaggaactctgcaggcataattatttgcttgacctgcacaactcactgaggactgtcagcgctataggccagtcattaacatgagagcttaataataaccaccaagcaacgattttgcctctgtgtacagggcaggacagagcatgctgctgggggaggcggcgtggtgtagtgatggcctggtcccttgtagtgtattttgagggaaaytrtttgcagagaaggcaaagagraagagcgttaagtatcacttctacaagcggagacgtgaataatgagagagccaagggaggatgggstgcagtaaagacttctgtactaaacaatggtatgaggagctatcattttcatgtgggctgggtgttaggccacgttaaatatgcttcagtgacactgaaatcttgtgagcacatcctgcgtgacttggttataaatgctgcaaatatagctggttactcttgactctgttaagccagaagtgttgcgagaaccatgaggagttgttatccc

SEQ ID NO: 8230 - DNA, 600 bp, Chicken  19866894202704_2; identical to SEQ ID NO: 8229

SEQ ID NO: 8231 - DNA, 600 bp, Chicken  19866894202704_3
caatgcaaaggatgcatttttctcgagttgttctgctagtggaaaagagctcaagtcttagaagcaaccaatgctacagaaaaatagccaggaactctgcaggcataattatttgcttgacctgcacaactcactgaggactgtcagcgctataggccagtcattaacatgagagcttaataataaccaccaagcaacgattttgcctctgtgtacagggcaggacagagcatgctgctgggggaggcggcgtggtgtagtgatggcctggtcccttgtagtgtattttgagggaaactrtttgcagagaaggcaaagagraagagcgttaagtatcacttctacaagcggagacgtgaataatgagagagccaagggaggatgggstgcagtaaagacttctgtactaaacaatggtatgaggagctatcattttcatgtgggctgggtgttaggccacgttaaatatgcttcagtgacactgaaatcttgtgagcacatcctgcgtgacttggttataaatgctgcaaatatagctggttactcttgactctgttaagccagaagtgttgcgagaaccatgaggagttgttatcccta

SEQ ID NO: 8232 - DNA, 600 bp, Chicken  19866894202704_4
ctcgagttgttctgctagtggaaaagagctcaagtcttagaagcaaccaatgctacagaaaaatagccaggaactctgcaggcataattatttgcttgacctgcacaactcactgaggactgtcagcgctataggccagtcattaacatgagagcttaataataaccaccaagcaacgattttgcctctgtgtacagggcaggacagagcatgctgctgggggaggcggcgtggtgtagtgatggcctggtcccttgtagtgtattttgagggaaactrtttgcagagaaggcaaagagraagagcgttaagtatcacttctacaagcggagacgtgaataatgagagagccaagggaggatgggstgcagtaaagacttctgtactaaacaatggtatgaggagctatcattttcatgtgggctgggtgttaggccacgttaaatatgcttcagtgacactgaaatcttgtgagcacatcctgcgtgacttggttataaatgctgcaaatatagctggttactcttgactctgttaagccagaagtgttgcgagaaccatgaggagttgttatccctagcagtgacctccaggatctcc

SEQ ID NO: 8233 - DNA, 600 bp, Chicken  19866894202704_5
ccaggaactctgcaggcataattatttgcttgacctgcacaactcactgaggactgtcagcgctataggccagtcattaacatgagagcttaataataaccaccaagcaacgattttgcctctgtgtacagggcaggacagagcatgctgctgggggaggcggcgtggtgtagtgatggcctggtcccttgtagtgtattttgagggaaactrtttgcagagaaggcaaagagraagagcgttaagtatcacttctacaagcggagacgtgaataatgagagagccaagggaggatgggstgcagtaaagacttctgtactaaacaatggtatgaggagctatcattttcatgtgggctgggtgttaggccacgttaaatatgcttcagtgacactgaaatcttgtgagcacatcctgcgtgacttggttataaatgctgcaaatatagctggttactcttgactctgttaagccagaagtgttgcgagaaccatgaggagttgttatccctagcagtgacctccaggatctcctttcctatttgagggctttgttccatcttggctggtaaatgaagctctttgctaggtttttcagct

SEQ ID NO: 8234 - DNA, 453 bp, Chicken  19866894202704_6
tcagtgacactgaaatcttgtgagcacatcctgcgtgacttggttataaatgctgcaaatatagctggttactcttgactctgttaagccagaagtgttgcgagaaccatgaggagttgttatccctagcagtgacctccaggatctcctttcctatttgagggctttgttccatcttggctggtaaatgaagctctttgctaggtttttcagctcagtctcagtcaggtctgaatctgtgggctcaaacccaaaccctcctggattttcaaatgaggtctgccctgagattgcggtcgsaaaaggtgtttagtcatttggcttttaaaagttgtctctctcacagcaatccatccatggtgaagatgcagtcagctttataattacaggatttaaaggtgttggaaccatcacagtgatgttctaacagaaaattgggtcacaatactgaag

SEQ ID NO: 8235 - DNA, 600 bp, Chicken  19866894202708_1
cctacttactgttcaacctgaatctcagctacaacttttgtaaatgtttgcactatttctgttccagatagtatataaaattatttataaatgaaaatgttcagcaggtttacagcagctgttctattctggtcacccccttcagtataacagagctttcaatcagcccctgcctctcacggggcctttgaacagaaccagagcatgtgttcaatatgttcttgggacataagaagccaatcagggaggcttagtaatccaaccaaacctgcagtacacctgcagcacactggctttttyttttttttttttagcataggtgagaacaagcagtatgatgtttcagtttaaagtcacatttgttgaaaaatacagttactacaaaacaattccagtttgccataactcagacgtggaatataatcttcccagcaggagcatactgcaattgcaaacataatacctctgggacagaaaggctctttttactgctgtatgctaagtgttgtaactaatcaattatgtcagagggccttctctgcacctgacagattcccaatactccctctgcttcttcctctcttctcttggtgcttactt

SEQ ID NO: 8236 - DNA, 599 bp, Chicken  19866894202714_1
  misc_feature (1)..(111): n is any nucleotide
nnnnnnnnnnnnnnnnnnnnnnnnnnnnnnnnnnnnnnnnnnnnnnnnnnnnnnnnnnnnnnnnnnnnnnnnnnnnnnnnnnnnnnnnnnnnnnnnnnnnnnnnnnnnnnncacacgtgggagctcactgagcccattgtgcattgagccaatgtgggtagggcttctccacccatccagacatgcccagagtgtcattacagacacgaggattaaagctttctcctctatttagctgctgaaattcctcggagctgccagcactattgtgcaactctatctttagtctgatctccctgyggttttgtcaggctttggaagagcttcccctagaaacctcagagactgcagtgggaagacctgagaaacggtgagacttggaagacccctacaagagaaaggcagatggcacaaagacttaccatgtgatgtctgtagaggggaactgagtgctattcaatagcaaagtcattagaaagaaaggggatttgtgcctctacaaatcagtgcagcaattacagatgcaggtcggtgtcaccagctttctccaggcaggaaagcaaccaatgaaagaccaaaccactggtgcacacaatgta

SEQ ID NO: 8237 - DNA, 600 bp, Chicken  19866894202714_2
gagaaacggtgagacttggaagacccctacaagagaaaggcagatggcacaaagacttaccatgtgatgtctgtagaggggaactgagtgctattcaatagcaaagtcattagaaagaaaggggatttgtgcctctacaaatcagtgcagcaattacagatgcaggtcggtgtcaccagctttctccaggcaggaaagcaaccaatgaaagaccaaaccactggtgcacacaatgtaaacttgaggggatttcactcctgaaacaacacttctataaaatgtggcccaacatgaaagtgygttcttctttcctaagcaacaaactcatttactgatggctctgtcagcagtcactgcagtctcataacaaaagagcttttaattatctgcacatatgaaaacactgtcacagaaaagsagcccatttcttccaaagtaactcagcctggctgagttgctgcacgtgccatcccaaggatgctgggagctgcaggaaagccctcatgcatgcagccagctggacaattcccacagggtgtttcaggattaccaaggtataaactaattacccccattgccagtggccacgtgtactctgca

SEQ ID NO: 8238 - DNA, 600 bp, Chicken  19866894202714_3
aaggggatttgtgcctctacaaatcagtgcagcaattacagatgcaggtcggtgtcaccagctttctccaggcaggaaagcaaccaatgaaagaccaaaccactggtgcacacaatgtaaacttgaggggatttcactcctgaaacaacacttctataaaatgtggcccaacatgaaagtgygttcttctttcctaagcaacaaactcatttactgatggctctgtcagcagtcactgcagtctcataacaaaagagcttttaattatctgcacatatgaaaacactgtcacagaaaagsagcccatttcttccaaagtaactcagcctggctgagttgctgcacgtgccatcccaaggatgctgggagctgcaggaaagccctcatgcatgcagccagctggacaattcccacagggtgtttcaggattaccaaggtataaactaattacccccattgccagtggccacgtgtactctgcacctcctgtcagatggcattttcctgaagttcccacaaaaaaaatatgaggcttgagaagatgctcctgctctcttatcacggagtaagaacagaaacggctctgcagagattaggaag

SEQ ID NO: 8239 - DNA, 600 bp, Chicken  19866894202715_1
tcgtatattccatctcatcatcaagaaatgtattttattgcatataactttatatgaaaacctatacgtgctaaagaattacagctggcacgtgagctgtaaagagcagcagaatcagcactctcaaaatctaacttgtcttgaggcttcaaactgatttctttactccactagagggagtacattgaaggcaaccacactggaattggtagcagcgtgaagctgaatagttaaagtgagcagctactcctcaaaagcactatttcgtcttaagtctgtgtgcaagtactttctccaccytgccctacacttaggataatgaagcttttgtatctgaagtaattagtatgatgagctctccatgtgaacaggacagcagtgggagtcagcactgtgtttaaagacagaactggaaatgctaatgcatatatattcaaacattctagagcatctgtgctttaacacaaacttcctggtgttgctaagtagtttttttcacagctagagtgggatttagactacaactgtatgaccacatttaaaagttcatgttttctattagaagttcaggtttttaattcagcctctatcccaggattg

SEQ ID NO: 8240 - DNA, 482 bp, Chicken  19866894202727_1
ttttattttatgtccacttcaaaaccaacagaacaaatggaagcgaactagggaagtctgcttgcagaaggataattcctacaagtggaaacgttgggcttttaggaagtttttgggatgctttgaaattcttgagtagagaaaaaaaatggtgaaaatgtgttctaaaaatttcccttaagtaatcaggattcctaattgtaaggtcagaagtaactattttatgtttttttttctgtttgccaagcacagaaactaggtgttttatggagtgcaagaagagtaatgtcaatgtttttstcatgtgacaactctgtcccagataacgtgaattgcattccacatctgctgtgtgtctcagcagtggattactacagtctcgtatgttctttggagttgcattttgaagtttaagcactgagtaaataaatgtatggggccgaaaaacccatgtctttcactcttgattcctggtttgtaaa

SEQ ID NO: 8241 - DNA, 599 bp, Chicken  19866894202729_1
  misc_feature (1)..(85): n is any nucleotide
nnnnnnnnnnnnnnnnnnnnnnnnnnnnnnnnnnnnnnnnnnnnnnnnnnnnnnnnnnnnnnnnnnnnnnnnnnnnnnnnnnnnnaaaaataaataaaggagctaaaagggaaaagtcggagccagactgacgaggagctctgttccaaggcagtggccggggacagccgccagctggagctggatgttccctgcacccctgtgcctctgcatcttcactggagagtctgtccccatgcatctcccatccagaacaatgggggacgtggcctcgctccatccccaccaaggtctgagacrggaaaactacagcaaagttctgttggtggtggtgagctcagctcggtgcacagccagcggcagaggcagctcgggcagatggcaaggatgtccccagggccccatgcaggctcccatcagyggcgtggagatgggccagcccggcagcctgcgccaatgaggggcagctgccatgtggctcgcgcctctgcggagggaacctttcccactggcaccaacacggatccaggagggagcccctggcccgtgccagttctgcacttgacaaaatgctggcaggtacgytctgctttccgctt

SEQ ID NO: 8242 - DNA, 600 bp, Chicken  19866894202729_2
gccagactgacgaggagctctgttccaaggcagtggccggggacagccgccagctggagctggatgttccctgcacccctgtgcctctgcatcttcactggagagtctgtccccatgcatctcccatccagaacaatgggggacgtggcctcgctccatccccaccaaggtctgagacrggaaaactacagcaaagttctgttggtggtggtgagctcagctcggtgcacagccagcggcagaggcagctcgggcagatggcaaggatgtccccagggccccatgcaggctcccatcagyggcgtggagatgggccagcccggcagcctgcgccaatgaggggcagctgccatgtggctcgcgcctctgcggagggaacctttcccactggcaccaacacggatccaggagggagcccctggcccgtgccagttctgcacttgacaaaatgctggcaggtacgytctgctttccgcttacatcatgtcactggtgctcgcccgcactgtccctgggcaccagttggcatccagcacataccttacagaccggtaggtttgctcctgtctcctcacactgcggtccctctgctagccctgc

SEQ ID NO: 8243 - DNA, 536 bp, Chicken  19866894202729_3
ccaaggtctgagacrggaaaactacagcaaagttctgttggtggtggtgagctcagctcggtgcacagccagcggcagaggcagctcgggcagatggcaaggatgtccccagggccccatgcaggctcccatcagyggcgtggagatgggccagcccggcagcctgcgccaatgaggggcagctgccatgtggctcgcgcctctgcggagggaacctttcccactggcaccaacacggatccaggagggagcccctggcccgtgccagttctgcacttgacaaaatgctggcaggtacgytctgctttccgcttacatcatgtcactggtgctcgcccgcactgtccctgggcaccagttggcatccagcacataccttacagaccggtaggtttgctcctgtctcctcacactgcggtccctctgctagccctgctctcttaaaaatgtacgtttgtacgaattattgctcttgccagcatttcgtgtccagctgctcattccccctgcggtccactctgggttcgctcctcttc

SEQ ID NO: 8244 - DNA, 600 bp, Chicken  19866894202731_1
tgctatgaaaagggtgtaagagcactagacttttcaggtcagcaatgtgacgcagcaaattcttttgtgaatgaaaatataagaagccagagactagttacttaaaattatacctgatcagatttgcctgagtgacactgctactcttactacgagtctcaaggagctttgcccgtgaatcttagaaccccaattttacaacttattgtaaaggtatcacagatatcaccagcacatcccctcgagcactgacttgcaactgaggtggattgaagctgaatccccaccaatactttctgkggtgttctctgcttctttttactgtcactctgacctatccggttaatgatgttggataagtcttggagaaccgagaagctcacatcacaagctgacacttctgaaacgatcaaaattgttttcaacttaaatgctaatttaatgccctgagataaatgtcagttttcyctactgaggaagtcaaagtcatttctactgcataacagtcaggttttgaattgcagcaaggaaagaaacaaattacaaagcatgttccaatctctgcaagcattttatttcattggtcttgatctgcaagcc

SEQ ID NO: 8245 - DNA, 600 bp, Chicken  19866894202731_2
ttgcccgtgaatcttagaaccccaattttacaacttattgtaaaggtatcacagatatcaccagcacatcccctcgagcactgacttgcaactgaggtggattgaagctgaatccccaccaatactttctgkggtgttctctgcttctttttactgtcactctgacctatccggttaatgatgttggataagtcttggagaaccgagaagctcacatcacaagctgacacttctgaaacgatcaaaattgttttcaacttaaatgctaatttaatgccctgagataaatgtcagttttcyctactgaggaagtcaaagtcatttctactgcataacagtcaggttttgaattgcagcaaggaaagaaacaaattacaaagcatgttccaatctctgcaagcattttatttcattggtcttgatctgcaagccactcgagcgtgatacattggtgtcttgccactcctcactagaagcccttgtttttactgagtatgccaaaaatctgcgtctctataggcctttgccagttctaatacaatttttcatctttgtctccaaattgtagctgagtcagggccagctcacactgacagctgg

SEQ ID NO: 8246 - DNA, 600 bp, Chicken  19866894202736_1
tgatcagagttatcccagaaggtttgttttttcgttgagcaacaaatagttctatcccttgatttaaaaattaccatcaaccaacccctctatctatttattgctgctagcagtaattacaaaaacaatttgcacatcctgaattttggaagctgagttacttttgttcacctatttaaattacttctgtgtgcttgaatacaatcaagctgtgactagaaacgattcaaatgaaaaatgacacctgacaatataagcaggtgttgccttaaatagcaatccttcttctggcaaaaaccraaattactcttgcagctggagagtagaagtagtattttatagatatgattgctttgtattgttttttagacatactgaattttatttatatctatccacaaatcctttttctcttgttgatatttcatggagtcctttaattagaacatggattgaggaatgaagtctggacttgagctttgtctccagtcaaaggtattcaggagagaacagagtttccttcagaacagtttttaccgtatggaaagtttattgttgcaataatggtgattcccagttctcccaaaggagcactttcta

SEQ ID NO: 8247 - DNA, 600 bp, Chicken  19866894202738_1
aaggtaccttgctcccaggctgctggggggacgggcatcgctggatttcaaagacaggggagcgactgtgtggatttaaatgcagcagaagttccttccttagtgtatttcatttgggctgtttgatgaatttcatagatatttatgcaaacctgcgcactgctgcctcatgaagacgaggttttggaagccttcccaggctcagtctgatgagcctcattcctctctgtggccaaacctcgactccgagctgtcagctttcagcaccaggtcactccctgtgccctgcactgctgcgtygggcagatggggcacagagctgtgctgcaggcaggggaagtggtgcagaaatgcgactgctcggtgctgtcagcccattcctcacagcctggcacraggtgcccacttgccaggagctggatagctgcacttacgttggcttcagcataaaaggtggaaatgtcctaagttgtgggtctccaggtgctcctgggcgcagcagcagggaacgatggaggcaggagggcactgctgaacagggcatgcagggaacgctgctggggaggggaatgctgcacactgaccctggtgaggctgagg

SEQ ID NO: 8248 - DNA, 600 bp, Chicken  19866894202738_2
tccttagtgtatttcatttgggctgtttgatgaatttcatagatatttatgcaaacctgcgcactgctgcctcatgaagacgaggttttggaagccttcccaggctcagtctgatgagcctcattcctctctgtggccaaacctcgactccgagctgtcagctttcagcaccaggtcactccctgtgccctgcactgctgcgtygggcagatggggcacagagctgtgctgcaggcaggggaagtggtgcagaaatgcgactgctcggtgctgtcagcccattcctcacagcctggcacraggtgcccacttgccaggagctggatagctgcacttacgttggcttcagcataaaaggtggaaatgtcctaagttgtgggtctccaggtgctcctgggcgcagcagcagggaacgatggaggcaggagggcactgctgaacagggcatgcagggaacgctgctggggaggggaatgctgcacactgaccctggtgaggctgaggctcctgctgcatgctggtagaatgggctgctgataacgcacagctcctgagtgctgcaggctaacgcagtccttcattttctgccctgaatagatt

SEQ ID NO: 8249 - DNA, 599 bp, Chicken  19866894202739_1
  misc_feature (1)..(53): n is any nucleotide
nnnnnnnnnnnnnnnnnnnnnnnnnnnnnnnnnnnnnnnnnnnnnnnnnnnnnttttgtttagtatttttgtcagaagtctggttgaggggattgagcgaaaggctcagagaagagcacctggcaagctgccctgcagaaagggacctggggatgctggttaatgtctgactgatcatgagccagcagtgtgcccaggtgggcaaaaaggtcagtggttcctggcctgcatcagaaatgctatggccagcaggacgagggaagtggccttccctctgtacttagctctggtgaggcctcrccttagactactgtgttcagtttgggcctctcagtacaagaaaaacatggagttgcacgttcagaaagaagcaacaaagctagtgaaggaactagacaacaaggtgtgtgaggagtgactgagggaattggagcagttcagtctggagaagagaaggttaagggggagacctcattgctctctatggctgcctgaaaggaggytgtggcaargtgcgggtcagtctcttctctcaagtgacaagtgataggattgaggcaatggcctcaagctgtgccaggggaggtttaggttgaaca

SEQ ID NO: 8250 - DNA, 600 bp, Chicken  19866894202739_2
aaaaaggtcagtggttcctggcctgcatcagaaatgctatggccagcaggacgagggaagtggccttccctctgtacttagctctggtgaggcctcrccttagactactgtgttcagtttgggcctctcagtacaagaaaaacatggagttgcacgttcagaaagaagcaacaaagctagtgaaggaactagacaacaaggtgtgtgaggagtgactgagggaattggagcagttcagtctggagaagagaaggttaagggggagacctcattgctctctatggctgcctgaaaggaggytgtggcaargtgcgggtcagtctcttctctcaagtgacaagtgataggattgaggcaatggcctcaagctgtgccaggggaggtttaggttgaacatgggggaataacttatttacctaaaggatagtcaagcattggagcagtctgcccgaataaagtgctggaatccctgtctctggaggtgtttaacagatgtgaggacgtggcatgaagggacatagtttagtgatgggtctcagtaggttaggctgatggatgggcttggtgattttgaagatcttctccaagctatatggatcc

SEQ ID NO: 8251 - DNA, 600 bp, Chicken  19866894202739_3
agtggttcctggcctgcatcagaaatgctatggccagcaggacgagggaagtggccttccctctgtacttagctctggtgaggcctcrccttagactactgtgttcagtttgggcctctcagtacaagaaaaacatggagttgcacgttcagaaagaagcaacaaagctagtgaaggaactagacaacaaggtgtgtgaggagtgactgagggaattggagcagttcagtctggagaagagaaggttaagggggagacctcattgctctctatggctgcctgaaaggaggytgtggcaargtgcgggtcagtctcttctctcaagtgacaagtgataggattgaggcaatggcctcaagctgtgccaggggaggtttaggttgaacatgggggaataacttatttacctaaaggatagtcaagcattggagcagtctgcccgaataaagtgctggaatccctgtctctggaggtgtttaacagatgtgaggacgtggcatgaagggacatagtttagtgatgggtctcagtaggttaggctgatggatgggcttggtgattttgaagatcttctccaagctatatggatcctatgacgat

SEQ ID NO: 8252 - DNA, 600 bp, Chicken  19866894202742_1
tccagcctggccttgaatgcctccagggatggggcatccacagcctccttgggcaacctgttccagtgagcttcagatctgctcttgtgttgttgattggcttaatgaacctctttaatgattgtggggaaggcctcaatccgcagcacatccttgctgtccctctttgcttaccgttgctcggtggcttgcccggtggcagtgatgctggaagcctacagcacagtgtgctctcctttcccaaggggaaagcagccatctgcagcctcactgtgcaccacacactgccagggggaggckgmggctgaggctcagtgggactgtgacagcacgaaggcaggcagtcatgatgccgtgtgcattagtgacaaaggtttccattgcttaatcaaatgagttgattagagctgagattctgcgttttcctccaggtctcagcctgcaactcgttcaggttaacctgtgtgttccatctcctcaccccacgcgctttgctcaccgtgctgccatccactctcatttccaatttcacaccgacatgctcttgacgtacttataaacggactcttatgtcaatccactaaaaagcaaccaaatgca

SEQ ID NO: 8253 - DNA, 600 bp, Chicken  19866894202742_2
cagcctggccttgaatgcctccagggatggggcatccacagcctccttgggcaacctgttccagtgagcttcagatctgctcttgtgttgttgattggcttaatgaacctctttaatgattgtggggaaggcctcaatccgcagcacatccttgctgtccctctttgcttaccgttgctcggtggcttgcccggtggcagtgatgctggaagcctacagcacagtgtgctctcctttcccaaggggaaagcagccatctgcagcctcactgtgcaccacacactgccagggggaggckgmggctgaggctcagtgggactgtgacagcacgaaggcaggcagtcatgatgccgtgtgcattagtgacaaaggtttccattgcttaatcaaatgagttgattagagctgagattctgcgttttcctccaggtctcagcctgcaactcgttcaggttaacctgtgtgttccatctcctcaccccacgcgctttgctcaccgtgctgccatccactctcatttccaatttcacaccgacatgctcttgacgtacttataaacggactcttatgtcaatccactaaaaagcaaccaaatgcatt

SEQ ID NO: 8254 - DNA, 599 bp, Chicken  19866894202743_1
  misc_feature (1)..(182): n is any nucleotide
nnnnnnnnnnnnnnnnnnnnnnnnnnnnnnnnnnnnnnnnnnnnnnnnnnnnnnnnnnnnnnnnnnnnnnnnnnnnnnnnnnnnnnnnnnnnnnnnnnnnnnnnnnnnnnnnnnnnnnnnnnnnnnnnnnnnnnnnnnnnnnnnnnnnnnnnnnnnnnnnnnnnnnnnnnnnnnnnnnnnnnggagagggaaagcatccttttaactttacaagataagagtcacctctactttactctcattgggtctaggtaatgtatatagatgtccactgcctgctaagcactttatcacaataartatttaatagatgatggactatttgtagtatttttcagatatttgtctttatttaaatattcttatcccatctcttgaatgttgcaggaaaaatgaaagataaatgttcctacagaaagatataactattctataaaccaaatcacaaagaaagctgctgcaagatgtcaaataatattttttatatgattttcmttagttggtaatctagttgccactgctctaagatggacctgctctgagcaaatgtttggaccagatgactctagaggtcctttgcagcctccaggtgagaygtc

SEQ ID NO: 8255 - DNA, 600 bp, Chicken  19866894202743_2
atccttttaactttacaagataagagtcacctctactttactctcattgggtctaggtaatgtatatagatgtccactgcctgctaagcactttatcacaataartatttaatagatgatggactatttgtagtatttttcagatatttgtctttatttaaatattcttatcccatctcttgaatgttgcaggaaaaatgaaagataaatgttcctacagaaagatataactattctataaaccaaatcacaaagaaagctgctgcaagatgtcaaataatattttttatatgattttcmttagttggtaatctagttgccactgctctaagatggacctgctctgagcaaatgtttggaccagatgactctagaggtcctttgcagcctccaggtgagaygtcacctggactactgcatccagatgtggagtcttcagtacaggagagacacagacctgttggagtgcatccagagggccacaaacatgatccgtggaatggaacacctctcctggggctgttcagcctggagaagagtagactgtgaggtgacctgatagtggcctttcagtatctgaaggggagctacaggaaagga

SEQ ID NO: 8256 - DNA, 600 bp, Chicken  19866894202743_3
taartatttaatagatgatggactatttgtagtatttttcagatatttgtctttatttaaatattcttatcccatctcttgaatgttgcaggaaaaatgaaagataaatgttcctacagaaagatataactattctataaaccaaatcacaaagaaagctgctgcaagatgtcaaataatattttttatatgattttcmttagttggtaatctagttgccactgctctaagatggacctgctctgagcaaatgtttggaccagatgactctagaggtcctttgcagcctccaggtgagaygtcacctggactactgcatccagatgtggagtcttcagtacaggagagacacagacctgttggagtgcatccagagggccacaaacatgatccgtggaatggaacacctctcctggggctgttcagcctggagaagagtagactgtgaggtgacctgatagtggcctttcagtatctgaaggggagctacaggaaaggaggggacagactcttcctttagcagagtctgtggcaatagaacaaggggaaatgttttcaagcacaaaaagtatcaaggatttggattagatataaggagaa

SEQ ID NO: 8257 - DNA, 599 bp, Chicken  19866894202744_1
  misc_feature (1)..(156): n is any nucleotide
nnnnnnnnnnnnnnnnnnnnnnnnnnnnnnnnnnnnnnnnnnnnnnnnnnnnnnnnnnnnnnnnnnnnnnnnnnnnnnnnnnnnnnnnnnnnnnnnnnnnnnnnnnnnnnnnnnnnnnnnnnnnnnnnnnnnnnnnnnnnnnnnnnnnnnnnnnnntacatcccaccttgagaacttgccaaagatgggcatgctatcctatcagatttctgttatgttatattcataaaagctgcttttcataacattttaaagtcaaaggtacagtaactgtacaagaaagtagctcaaattctatastaaattccagtaatgctctctttcaattggacatctgtgtactacaatgctttattatattagacaatttgaatggtaacaattatatgcatacagtaaatgacaacatactgaaacaagctgttacatgaattacctttatatttttggagttaagctcttcattattcattgcttcacctttatttgattttatagttgcattgatccgtgtaaacctcattctaattagggaaaagtgttatgaaatcattactttttaatgaaaggaattataactacaacttactcttaaaata

SEQ ID NO: 8258 - DNA, 600 bp, Chicken  19866894202746_1
gtcatgtgctggacaacatgcagtcagtgaaggtcttcattgaggctaggacaggatcactcagttgggcttctgaagcactccaaagctttcttctggcattggcatatagtatacaaaaatattagcgatagtctgaaagagacttatttggcaattttgtagagtagaaccagtgttttctttaaagatgtagtgctagtgtatgccagagttgctcagtctagcacagagtagtgtggataaattctttcccctgtccatcctcaagaacacgatattcacttgttttcatcattmtaggaattaagttgtgcttcagaggcagcaatctggatttttacttttgtttgtatgtgttcactgcttgcttcagcactgttgtaggaaaaaagtcacttaatgtatttgctgttccgatgtcttaaggcagtaatggtattgattgccaacaggccagtcctctcttccttttgcttctggtttctgtcactgccggtttgaagctaacattccaaagtcttgaaccctgttcccattagactcccactttacatcagtggcaacttagggtgttgatacttgaattctgggcaattg

SEQ ID NO: 8259 - DNA, 600 bp, Chicken  19866894202747_1
aactatctttcacatctcactatccacaaatgtgtaccaggtgcagtgttgtaatcctgaaccagaattatacatcgctcagggtaagcaaagttattctgtttagaaaacgtagatgtgactcacagagacagtctaatatgacatgaaggcagctgtgaaattttagctcccagtttggatgtatgtttgagaaaagtatattgttttctggactgagtttttaatggaggtataggactaatgtattctattttgttagcggtttactagagggagtaaagcataatagagatattygcagataacaaattggaagtagcagcaaacacaagtaagaacgtacagataattcaaaagcaaatagaccctttctgctgagtgttacttttgccctgcataaattacttcagctcatttctacagtgtactagcaagcaggaacaaatttgggagagaaaaaaaaaacaacaacacaagaataaacaatggaattgcacagatgcattattctacattagcatgaaaaaaagtactaagtgaatatattttttcatttatgtataactgaataagattgaaatgcacaggcatgtatga

SEQ ID NO: 8260 - DNA, 600 bp, Chicken  19866894202757_1
tttcccacatcccacgtgccctggagcaacccaggctcctttcccagctgttctcaaattcctgtcactgttccaattgtctctccgctccttcgtattgctgtccctacaaattaatacagacaatactgccactcacatacatcattttgaatcaatttatgactagggcagccttccatctcctatttcccttgtatccacacagataacacaggtgtgatcccagttcttgccctcacagaatgaccccagtgcttggatctcacatagagtaggtctccttaacattgcctcctyccacattggcatggcrttacttttgaaatgagctatacttgctgtggataagtggtgggacatcagggtgccaatttccagggcagataggcaacgtgagcctggagcacttcatgctaccttgaagctgaaggccaggtttgcttggactttcctctcagtgtgtgactgtgtgcacggggaatgcaacagcgatgtcgctgggaagacaagctgcacttgctatggaggctacactggccccagatgtgaccaaggtaaatgcaccgcaagctgaagaagggctgttagaggtaactg

SEQ ID NO: 8261 - DNA, 600 bp, Chicken  19866894202757_2
tgccctggagcaacccaggctcctttcccagctgttctcaaattcctgtcactgttccaattgtctctccgctccttcgtattgctgtccctacaaattaatacagacaatactgccactcacatacatcattttgaatcaatttatgactagggcagccttccatctcctatttcccttgtatccacacagataacacaggtgtgatcccagttcttgccctcacagaatgaccccagtgcttggatctcacatagagtaggtctccttaacattgcctcctyccacattggcatggcrttacttttgaaatgagctatacttgctgtggataagtggtgggacatcagggtgccaatttccagggcagataggcaacgtgagcctggagcacttcatgctaccttgaagctgaaggccaggtttgcttggactttcctctcagtgtgtgactgtgtgcacggggaatgcaacagcgatgtcgctgggaagacaagctgcacttgctatggaggctacactggccccagatgtgaccaaggtaaatgcaccgcaagctgaagaagggctgttagaggtaactgtgagacgggcctggat

SEQ ID NO: 8262 - DNA, 600 bp, Chicken  19866894202759_1
aggtcagactgatgaatttgcacatcataatggaaaaagtgtcacagtaccaatatttatgcatattctaggctacgcttgtatgtgttacaattatatgcctccagaaataccatgcatagacttgctgtccatggataaaactggaaagttgaggatgaaaatagattttatgaatatttcactgcctcatctgagactaagagctaagattaaaagtggggcttttgaaagtttcctaaatcccacacatgctgattttccattctttttatgccctttagtgtactgaaaatgtaygaagattccattacttctggaagctatatcagcacttgggtatttccctgctttattacagctgtgcatactttaatccatcctctgtgcggctccgcattctcttcccgaattaatcagccttaagactattcaggtgtcttcagccacacatgtatgatagcaggattctgcaacaagtggtgaatttctctagacattatgtcaaagaatgatcacaagtgtatgaatgccctgtcattctgagagttggggctaatataatgatattttcttggggaagagaaagtgagcataagc

SEQ ID NO: 8263 - DNA, 600 bp, Chicken  19866894202760_1
caatgatttttcaaacccactaaaagatcgagttcagcaacaaatcattgtatttcactttactaatcaagagagtgaatttttgcaaagtaacaggggatacaaggtctaggagggaacatgacatggaatcttctccttcaatctttgtacagaatgaatttcttgaaaagatgagacatctggtcaatgtccaaacacgttgtgagactccttacttgacaccaccacaggctgctgctctgccaagggaaacaaagaggaagccttctctgcagggtcttctgtgggatcaaaacmtctactgacattccatcaaataacccgcacactcccaaatacccctgcagagtgtcagttcaaagcctaagcagaaagatatttcactgttaaaaccttgtacatgtatttacttctgatacattagctctgtgtagagcacagccatttatcaactcagtagaagtggcagmcttctaactcaagtcattttagtgcagatgttatgaaatttttttagtatatttaaccactatcatttttattttgtaaagatcaaccgttagtaagtattttttaaaataycaccttttgagcatg

SEQ ID NO: 8264 - DNA, 600 bp, Chicken  19866894202760_2
atgagacatctggtcaatgtccaaacacgttgtgagactccttacttgacaccaccacaggctgctgctctgccaagggaaacaaagaggaagccttctctgcagggtcttctgtgggatcaaaacmtctactgacattccatcaaataacccgcacactcccaaatacccctgcagagtgtcagttcaaagcctaagcagaaagatatttcactgttaaaaccttgtacatgtatttacttctgatacattagctctgtgtagagcacagccatttatcaactcagtagaagtggcagmcttctaactcaagtcattttagtgcagatgttatgaaatttttttagtatatttaaccactatcatttttattttgtaaagatcaaccgttagtaagtattttttaaaataycaccttttgagcatgtaactttgcttagagatcagccctccactgctgtaatcatgctgcaccacagcaaactgatagaaaaaascccctagtacctcttctgtggtgacmctaagttctgatagcacattcccatctggtttcttaacggtgttgcacctctgaatgctaacaccacctgttccagc

SEQ ID NO: 8265 - DNA, 600 bp, Chicken  19866894202760_3
tgtgggatcaaaacmtctactgacattccatcaaataacccgcacactcccaaatacccctgcagagtgtcagttcaaagcctaagcagaaagatatttcactgttaaaaccttgtacatgtatttacttctgatacattagctctgtgtagagcacagccatttatcaactcagtagaagtggcagmcttctaactcaagtcattttagtgcagatgttatgaaatttttttagtatatttaaccactatcatttttattttgtaaagatcaaccgttagtaagtattttttaaaataycaccttttgagcatgtaactttgcttagagatcagccctccactgctgtaatcatgctgcaccacagcaaactgatagaaaaaascccctagtacctcttctgtggtgacmctaagttctgatagcacattcccatctggtttcttaacggtgttgcacctctgaatgctaacaccacctgttccagcaaagctcccgcaggtggcagtagccactacttacaatgaaacagacaaaccaagtgtgagcagctgaaactgcctgtcccttttggtcagcatgccaagcaagtgctacaaa

SEQ ID NO: 8266 - DNA, 600 bp, Chicken  19866894202760_4
gcagaaagatatttcactgttaaaaccttgtacatgtatttacttctgatacattagctctgtgtagagcacagccatttatcaactcagtagaagtggcagmcttctaactcaagtcattttagtgcagatgttatgaaatttttttagtatatttaaccactatcatttttattttgtaaagatcaaccgttagtaagtattttttaaaataycaccttttgagcatgtaactttgcttagagatcagccctccactgctgtaatcatgctgcaccacagcaaactgatagaaaaaascccctagtacctcttctgtggtgacmctaagttctgatagcacattcccatctggtttcttaacggtgttgcacctctgaatgctaacaccacctgttccagcaaagctcccgcaggtggcagtagccactacttacaatgaaacagacaaaccaagtgtgagcagctgaaactgcctgtcccttttggtcagcatgccaagcaagtgctacaaatctctacagctttctggtgttttatatgtcctgcttagcgttcaagtcttgatctgagtttagatagcctgctagctgagccatt

SEQ ID NO: 8267 - DNA, 600 bp, Chicken  19866894202760_5
cttgtacatgtatttacttctgatacattagctctgtgtagagcacagccatttatcaactcagtagaagtggcagmcttctaactcaagtcattttagtgcagatgttatgaaatttttttagtatatttaaccactatcatttttattttgtaaagatcaaccgttagtaagtattttttaaaataycaccttttgagcatgtaactttgcttagagatcagccctccactgctgtaatcatgctgcaccacagcaaactgatagaaaaaascccctagtacctcttctgtggtgacmctaagttctgatagcacattcccatctggtttcttaacggtgttgcacctctgaatgctaacaccacctgttccagcaaagctcccgcaggtggcagtagccactacttacaatgaaacagacaaaccaagtgtgagcagctgaaactgcctgtcccttttggtcagcatgccaagcaagtgctacaaatctctacagctttctggtgttttatatgtcctgcttagcgttcaagtcttgatctgagtttagatagcctgctagctgagccattctatcaccttttgcttatttctaaaa

SEQ ID NO: 8268 - DNA, 599 bp, Chicken  19866894202765_1
  misc_feature (1)..(117): n is any nucleotide
nnnnnnnnnnnnnnnnnnnnnnnnnnnnnnnnnnnnnnnnnnnnnnnnnnnnnnnnnnnnnnnnnnnnnnnnnnnnnnnnnnnnnnnnnnnnnnnnnnnnnnnnnnnnnnnnnnnnncccagtactgtcacctgccattttgctaagactttgtcccatcatccaggtcattaatgaagactttgggaggtgctgactcccacgtacactactagtgactggcctccagctggacctcatgtaactgatcacagccctttgagcctggcagttcagttagctttcagtccactctactgyccatttatctggtctgtatttcatcaccrtgtctatgaggatgttacgagagactgcaatgaaagtcttgctcaagccaacataaacatctactggcctcctttctttccccatgccactcgcatcatctcatcataggggaggcacratctccactttgtaaatcgattccgactactcccaaacatctcaatatgttttgaaatcttttctaggaggayttacaacattacyttctcatgaacagacacgaggccaccttccttgtagcatcttgaatcctcatttttgtccttctt

SEQ ID NO: 8269 - DNA, 599 bp, Chicken  19866894202765_2
  misc_feature (1)..(88): n is any nucleotide
nnnnnnnnnnnnnnnnnnnnnnnnnnnnnnnnnnnnnnnnnnnnnnnnnnnnnnnnnnnnnnnnnnnnnnnnnnnnnnnnnnnnnnnncccagtactgtcacctgccattttgctaagactttgtcccatcatccaggtcattaatgaagactttgggaggtgctgactcccacgtacactactagtgactggcctccagctggacctcatgtaactgatcacagccctttgagcctggcagttcagttagctttcagtccactctactgyccatttatctggtctgtatttcatcaccrtgtctatgaggatgttacgagagactgcaatgaaagtcttgctcaagccaacataaacatctactggcctcctttctttccccatgccactcgcatcatctcatcataggggaggcacratctccactttgtaaatcgattccgactactcccaaacatctcaatatgttttgaaatcttttctaggaggayttacaacattacyttctcatgaacagacacgaggccaccttccttgtagcatcttgaatcctcatttttgtccttcttgaaaataggattgacatttgcttttttcc

SEQ ID NO: 8270 - DNA, 600 bp, Chicken  19866894202765_3
ctttgtcccatcatccaggtcattaatgaagactttgggaggtgctgactcccacgtacactactagtgactggcctccagctggacctcatgtaactgatcacagccctttgagcctggcagttcagttagctttcagtccactctactgyccatttatctggtctgtatttcatcaccrtgtctatgaggatgttacgagagactgcaatgaaagtcttgctcaagccaacataaacatctactggcctcctttctttccccatgccactcgcatcatctcatcataggggaggcacratctccactttgtaaatcgattccgactactcccaaacatctcaatatgttttgaaatcttttctaggaggayttacaacattacyttctcatgaacagacacgaggccaccttccttgtagcatcttgaatcctcatttttgtccttcttgaaaataggattgacatttgcttttttcctagttctcaggaacctgccctgactgtggtcatctttcagagattagcaggagtggcctcacagtgacaccagccaggtgcctgagtgcgtgtgagcgtactgggtgcatcacatcaggt

SEQ ID NO: 8271 - DNA, 600 bp, Chicken  19866894202765_4
gcctccagctggacctcatgtaactgatcacagccctttgagcctggcagttcagttagctttcagtccactctactgyccatttatctggtctgtatttcatcaccrtgtctatgaggatgttacgagagactgcaatgaaagtcttgctcaagccaacataaacatctactggcctcctttctttccccatgccactcgcatcatctcatcataggggaggcacratctccactttgtaaatcgattccgactactcccaaacatctcaatatgttttgaaatcttttctaggaggayttacaacattacyttctcatgaacagacacgaggccaccttccttgtagcatcttgaatcctcatttttgtccttcttgaaaataggattgacatttgcttttttcctagttctcaggaacctgccctgactgtggtcatctttcagagattagcaggagtggcctcacagtgacaccagccaggtgcctgagtgcgtgtgagcgtactgggtgcatcacatcaggtggcatgtgtttctagtttcttgtagcacagctgctctgatcctttccactggagatattatgtctgaatctaa

SEQ ID NO: 8272 - DNA, 600 bp, Chicken  19866894202765_5
cctcatgtaactgatcacagccctttgagcctggcagttcagttagctttcagtccactctactgyccatttatctggtctgtatttcatcaccrtgtctatgaggatgttacgagagactgcaatgaaagtcttgctcaagccaacataaacatctactggcctcctttctttccccatgccactcgcatcatctcatcataggggaggcacratctccactttgtaaatcgattccgactactcccaaacatctcaatatgttttgaaatcttttctaggaggayttacaacattacyttctcatgaacagacacgaggccaccttccttgtagcatcttgaatcctcatttttgtccttcttgaaaataggattgacatttgcttttttcctagttctcaggaacctgccctgactgtggtcatctttcagagattagcaggagtggcctcacagtgacaccagccaggtgcctgagtgcgtgtgagcgtactgggtgcatcacatcaggtggcatgtgtttctagtttcttgtagcacagctgctctgatcctttccactggagatattatgtctgaatctaaagattattatact

SEQ ID NO: 8273 - DNA, 599 bp, Chicken  19866894202778_1
  misc_feature (1)..(196): n is any nucleotide
nnnnnnnnnnnnnnnnnnnnnnnnnnnnnnnnnnnnnnnnnnnnnnnnnnnnnnnnnnnnnnnnnnnnnnnnnnnnnnnnnnnnnnnnnnnnnnnnnnnnnnnnnnnnnnnnnnnnnnnnnnnnnnnnnnnnnnnnnnnnnnnnnnnnnnnnnnnnnnnnnnnnnnnnnnnnnnnnnnnnnnnnnnnnnnnnnnnnacatgactctctaaaacacctgctggaaataagacacttaaatcacgttttaaccacacctaaatcattgtacacttttacatgacttgacacttaaagcaatytgttcttggtaaacagtaattttctgttctttgctttccattttgagttcatggacacaacattttatacttgactaaacgatacctgctatatctccattctcccagtgctgayacatttgtgtaaagcagctttagcagttctggtcatttgtgtgttaaaatttctattattactggaaaaagcccaggtcacctcccctcrgtgaaagcaggagcttgctgtagtaattatggaaaaactaacaacatccagacatgaaaatttggaccaattatttcacctgggatctctttca

SEQ ID NO: 8274 - DNA, 599 bp, Chicken  19866894202778_2
  misc_feature (1)..(81): n is any nucleotide
nnnnnnnnnnnnnnnnnnnnnnnnnnnnnnnnnnnnnnnnnnnnnnnnnnnnnnnnnnnnnnnnnnnnnnnnnnnnnnnnnacatgactctctaaaacacctgctggaaataagacacttaaatcacgttttaaccacacctaaatcattgtacacttttacatgacttgacacttaaagcaatytgttcttggtaaacagtaattttctgttctttgctttccattttgagttcatggacacaacattttatacttgactaaacgatacctgctatatctccattctcccagtgctgayacatttgtgtaaagcagctttagcagttctggtcatttgtgtgttaaaatttctattattactggaaaaagcccaggtcacctcccctcrgtgaaagcaggagcttgctgtagtaattatggaaaaactaacaacatccagacatgaaaatttggaccaattatttcacctgggatctctttcacaacatatttactttctcatttctttctccctcctctttaattgttggaaggctgtgatctcccttaactttttcagtttaatcatgtcctataaatatgggtaatatccaagaa

SEQ ID NO: 8275 - DNA, 600 bp, Chicken  19866894202778_3
tctaaaacacctgctggaaataagacacttaaatcacgttttaaccacacctaaatcattgtacacttttacatgacttgacacttaaagcaatytgttcttggtaaacagtaattttctgttctttgctttccattttgagttcatggacacaacattttatacttgactaaacgatacctgctatatctccattctcccagtgctgayacatttgtgtaaagcagctttagcagttctggtcatttgtgtgttaaaatttctattattactggaaaaagcccaggtcacctcccctcrgtgaaagcaggagcttgctgtagtaattatggaaaaactaacaacatccagacatgaaaatttggaccaattatttcacctgggatctctttcacaacatatttactttctcatttctttctccctcctctttaattgttggaaggctgtgatctcccttaactttttcagtttaatcatgtcctataaatatgggtaatatccaagaatttttgctgatgacaggaactttgccattgatttcaaggcagctggttcatatatcaggaacatgtgtgggcctgtctttaacaagaaaat

SEQ ID NO: 8276 - DNA, 600 bp, Chicken  19866894202786_1
aatcactgaaattttttcctcaagagaaactgaaaaggattacagtcaccctcagagattttgtttgattaagaaacacagggctatagttcttggactactcatgtagattactcatctacaagggagaaaaaaataccccataaatgtcaagtcaccaggtgatgatttttgtcagcttccgttaggcaaacttgtatttccaaaatttctttaagaatctccacactcaaagcccatttttattccaatagatataagggtttaagtccttcaagctacctgaaaatctcagtcacrtttgtggtttaaagtacccttctatatactgtggatagaatttaagttcagataggattcacttcatctaactgcagccctgtaaaatttaagcatcttgtccaagattgtcatccaggttacttgaacagacagtgcagagaaaattgtttctctggagggttcagcccatctattctacaaatttaatttttaatgaaatgaatcatcctttggaaatgcctgcacctctcagctgattacagagggaacatataaggccatctgagaataaaaatttgtttcttagatggctgatgt

SEQ ID NO: 8277 - DNA, 600 bp, Chicken  19866894202797_1
agcctcctctgctctcggctgagtaaacccagtgaactcagctgctcctcacacatcttgtcctctaatcacttcactattttcataatcatcctcctttgaacatgctataatagttttatttcctttttatatgtcatatttcagttctcctttctccatcccattttataaagaacctgttccacaatataatcatgactttggcctagcaaatgcattgttccaagattttgtagatggaaatatatattcaagtgctatgcagcaaatgctcaaaaattctggttctttgaatakgtatttcacctattttacataaactgcacatagttgggcgaggaggtttgcttatactgtgtcactaattaatgaattctaaaaggaaacaccatagggggaaaaaggaaaacacacacacaaaaaacctgagatcctactgaggatcaatttgtttcatttcttaatgtttacaattattccttcactcttctggaaaaagattttctagcatgagctatgtaaacactatctgatactatctgtacagttgcctctaaaaattctttttcaaggctctttgtccagatgcatctgatt

SEQ ID NO: 8278 - DNA, 600 bp, Chicken  19866894202802_1
gcattccgtgttctcagagcacgccccaaagcacaagttcccttacccggctccctctgctctgacacaccttcagcggcccggagccacaccgcctcacagctgcagcagggaaaccccagcccagcacgactgccctcacctattccttctgtttctctggtgaacatgcacacgcaaactccagagacatcacagggaggagcagaaagcctgcctggttaaccgacttgctacagctagctctcagacgttaaccaagacagcacagccccaaactaggctccaaacaccttcccractgctcgcagcatctcggcacagcagcacctcagcctccacttaggctcacacagatcccttcatctagacaccagcaagctggaaactgccctgctcctacacctggcatctgaatggggtccctacttccttcaagatcacctggggcagtcaccctgattcccaaaccctaagtcataaacacccaactaacatagctccctacacaaccctttgaaggagccctacagttctgttaatttacttaagtgctgatctattgtcttgctaaaaaaaagcatgattaataatgtagtc

SEQ ID NO: 8279 - DNA, 600 bp, Chicken  19866894202803_1
tttattaaatttaaaaatatctgcagtattgatgtttaaaatgaagggtaaaaatatttagaaatcaagctcttctctaacaaactctatggatatgaagtgattagtaaaacaaaccctgtgattttcttgctttatgctgattgcaaaaatctatataaggagaaatagcatggcagtgtggtatatgcaagtaagtggtgtgcaaattacatatccaaacagattgatttaaagcagtctagtgaatggcaggcttgtgctgctgtttccatttctggggtttttggttttttgggktttttttgttttgttttgtttgtttgttttgcttgtgtgatttgtaaacttttgtcctgggttacaagcagtaaactgccattgtcttttttcataaggatatacattaggtttcctctgggaaatggttctttatggtaatggtattgaaataaaagcacaagcttttgtggtagtcttagcaactatatattagtatatttctattgcatgcctttgtgttgtttattaatgacatttttttgcaagcttagtgcagtatctttgcagacttgcaatatcacctaatatttgtatcaa

SEQ ID NO: 8280 - DNA, 600 bp, Chicken  19866894202806_1
agtaaagaccctggcaggacatcacacagcctcttaatataacttcccagctatttgtggaactctgccttggtgtcactgagaaacaaagttggaggtgacagttcagattttgcatcctccttccggagagccatttcagtcgtgcagccaattgtgtctcttactgtgcatttatagcttaaggaatcactggcaaacgaaaatagtcctgggcacagcagagatggacagaggttgaaggcaaaggtacagctccatttttacgttaagttactgaaattgaatgtttatttactwggtttctgtttcagtgaaaatggtagagggaataactgttagtgtgatgtagttcagagaagatacggtttagaatgttaaaccatttaagtgaactcccaaatatcaaaggacctattatattaaaatagcatattaaaacaaaatacaaatattctcttccttagtctctgtcactttgatgattgaaaatattttttgcttatttttcaattgctgatccttttctgtgtagataaatgagcttgcaagtctaatggattttaacttctaaaacttctttctcctcagataattaaa

SEQ ID NO: 8281 - DNA, 599 bp, Chicken  19866894202813_1
  misc_feature (1)..(75): n is any nucleotide
nnnnnnnnnnnnnnnnnnnnnnnnnnnnnnnnnnnnnnnnnnnnnnnnnnnnnnnnnnnnnnnnnnnnnnnnnnncaaaaggtttagaaatgacttctaagaacacaaagtccaaccattgacccatcatcctccatggtcactcataggattgtggaattgttatggttggaaaagatttccaagatcgtcgagtccaactgtttacccaccaccaatcacagtgtccactcataggatcatggaatcacagagttatttaagttggaaattaactacagggagaagggaaagggaaayggaaagggaaaggggaggggagggaaaaagagaagggaaggggaaggagaaaggagaacagaaagaagaaaggaaaaggaaaagaaagagaataaggaagagaaaagggagaggaaaatggaaaaggaagtaggaaaggaaaaaggaagagggcaaaggggagaaggtgaaagaaatcagagtgttaacgcagtgagtttctcctatcgaatcctccacagcccatgtctctgtttcctgtgttcagtscgtgtaattatgggtatgtcggtgtcattaccaaaccctgtttatgaagt

SEQ ID NO: 8282 - DNA, 600 bp, Chicken  19866894202813_2
acagagttatttaagttggaaattaactacagggagaagggaaagggaaayggaaagggaaaggggaggggagggaaaaagagaagggaaggggaaggagaaaggagaacagaaagaagaaaggaaaaggaaaagaaagagaataaggaagagaaaagggagaggaaaatggaaaaggaagtaggaaaggaaaaaggaagagggcaaaggggagaaggtgaaagaaatcagagtgttaacgcagtgagtttctcctatcgaatcctccacagcccatgtctctgtttcctgtgttcagtscgtgtaattatgggtatgtcggtgtcattaccaaaccctgtttatgaagtgctgcatttacagatagaagccataaaattgtgtttatagtgcgaaggcatttatggcccgaaggacttcagcacagcactacaacacccccagcacccaaacagtaataaaaagcccataaaagccaacagagaacaaagggtgagattccttatctaccagaaatgccgcttaccatcccaattcccgatcccatcatttggcttcctacatgttctcattgcatttcacttctttttttgtgaaacc

SEQ ID NO: 8283 - DNA, 600 bp, Chicken  19866894202817_1
taaagagtgactgttttcatattctagaggtcattttctgtaattgcttgtaactaaaatggtttaatcacaacaaaattaatatacaagataatactctgtccctgcaatatttcaaatagctcccaggtagaaataactgtattttcattatgtgaagaacttctataaatttctgattaagaaatgtatctttcttctctcaaaacttgtttctctaatttgcataatgcctagatgaaaacattattatgccttcatagagaccttaataaaaccttctagtcttgctgaaaaccragaaattcaatcataaatcacctcaaacatacctacctcagcacttctttttccttatcaatgcatttggatgcaattctgttaattccaaatgcttatccagaaactgttagtccaaaagtacccattttgtgtttagttattttagtgttcaagttaaggtactgaaaacacccttgaagagtcccttttgtcaaagagattaagcaagaaataaagaaaaagtctctcttatttttatagattcctttgggatgagtatgaagctatgtgagaaaagggagactggatgaaaccctc

SEQ ID NO: 8284 - DNA, 600 bp, Chicken  19866894202817_2
tttgattttactttttttatggggaaaggccaggaataatcctcatcaccttctcacaaaatggcttggttgtctttatttatgttcattttccttggagctgattcttttttgatagcagtggagcagatttacaggagccgagaatctgctaaataactctctctctcattagtgcagtcccatgtctgagaaaaagtgattttacaagttacatgaatatgaaattacttctgagtattatttttagtgagtcacctcaaaacaagaatatgcagttgcagttttggtcacagctcrctgcctgaacctttgcatgtatccaaatggctgagttagtatcaggtatttctgccttggctctacacagtcctccaatactatcgagcagctagtacaatctcatacaatttttgttcactatgctggggatatctttgcatatgatcatatggaaaagagcttgctccttgcccttgaaggcaagtggcacagttcgcttcacatttgtatagtcagttctttccccatacaaaacagagtggcctcatccctacagcctgttgagaaaaatcctcaaatacacctgagcattgcccg

SEQ ID NO: 8285 - DNA, 588 bp, Chicken  19866894202821_1
cccaagggaagatgttagtggagtgtgggtcaggaagcaagagtattggactgcaaggtgggagctgtactgtgctaaaggagaaaagagagaaaagagcgatgttttgaaacaggatgatacacatttatagactgatgctgagaacaaaagagtttacgaagaggtcaggggctgccacgaagcgatccaagccagaggagacctgtctactcaacagagcagcaaatctgagctttcttgtgtatgtgtatttttgcgtcgcaatctgcttaagaaagaaaagcacattctaattgyactctaaacaaggatttctccctcagcattttacagctgtttctcttgtgcagtgccaagctaatcttggtgagatgttatagcacagcatggacacgagcccagtgggcagatgtttcttctgctgctttttcattcactcttccaaggggctgttgaggaagagagactgttttgctcctttatgatgctttataatccatgaagcctgttacagcgtacagaagtgtacatctggtttagaagcactcgggggcccaaagaatgtgctcagcaggaagcaagatg

SEQ ID NO: 8286 - DNA, 600 bp, Chicken  19866894202828_1
acgtgtgaatgtttgtaattgactaaagatctgacttccacttgtaaatctgtaatgaaaagcatatccttaatttccaaagcaagtggggttacatccaattgatttgattatagctatgttttgggaaggaaacatctgtgccaatgtaagaacagaaaaatgtacaccagagttacactgtagtttgtgaacagcaggctttatagaataagttcccttttgtgtccgcccctgaaaaatgtggtactagtaacagtaatgtgtggcagattggctaggtaacattgtaagtgacasagcaaaaacaaacaaacaaatctgtttgaaaagtaaaaccagtgcaagaattctctgcttgtagttagaatgtattcataatttaaagcaatcagaaatctcttgcttatgtcacgttttcttacttggcctgttctgatgggaatagaacaaaggcagaatccttttatctcttcaagccktctgtatttcatacactgtccttgctatcaatcctttgtaatgtttctttaataagagtgacaggattgaagttttgagtgatttagaatacttctttgtaaaatctgatatggtttt

SEQ ID NO: 8287 - DNA, 600 bp, Chicken  19866894202828_2
gtagtttgtgaacagcaggctttatagaataagttcccttttgtgtccgcccctgaaaaatgtggtactagtaacagtaatgtgtggcagattggctaggtaacattgtaagtgacasagcaaaaacaaacaaacaaatctgtttgaaaagtaaaaccagtgcaagaattctctgcttgtagttagaatgtattcataatttaaagcaatcagaaatctcttgcttatgtcacgttttcttacttggcctgttctgatgggaatagaacaaaggcagaatccttttatctcttcaagccktctgtatttcatacactgtccttgctatcaatcctttgtaatgtttctttaataagagtgacaggattgaagttttgagtgatttagaatacttctttgtaaaatctgatatggtttttctcttatagaagtgtcactacaacaatacactgggagaggagagaaagctgacagggttggttctcttaaaacctgattctattcagaaggcaaaatgtcaaaacagcccaaacctgcaaagagcaagattacaaacttcttattgtaggtgctaattttaacccttcattgttttttctg

SEQ ID NO: 8288 - DNA, 599 bp, Chicken  19866894202829_1
  misc_feature (1)..(63): n is any nucleotide
nnnnnnnnnnnnnnnnnnnnnnnnnnnnnnnnnnnnnnnnnnnnnnnnnnnnnnnnnnnnnnntgagcgattgcttctggacaggcagagacagcacagacgtgcacagaagactgcatgcagaatatgcccagaatcagacaggagctggatgaaagccatacacctctaatttgcaatacaatatcagtgcagctcattttgcagctcataacaatgcaagtaatttgtccattttacaaataaagaccaatagtttcttttgtcagtactccataccacagcaagagctctgatctstatctagaatctgagtaaactgcaaaatcctcaagaactccattcaaaatatgagtcctatttttcacagctgttatctgttactaaaagtggaggggggaaaacaccaaaaacccacagccaaaaaaaaaaaaggcttttttttttttttttacttatgagttcagtcaaacagccatttgttttagaaaaaacaacaacaaaacaacctggtaaaatggaagcacccacattacttattaaaacaagaattcacctttcacctgcgtatcatccttggccttatattcggtactttt

SEQ ID NO: 8289 - DNA, 599 bp, Chicken  19866894202831_1
  misc_feature (1)..(54): n is any nucleotide
nnnnnnnnnnnnnnnnnnnnnnnnnnnnnnnnnnnnnnnnnnnnnnnnnnnnnnccccagtgtggattgctctttgaagttcagaatgcagtgtggaaagatgtctcacaggttttgaaaacagcataccaaattctagagactcttattgcaagcagaaggaagtttcatcccacgaaaccttttttgggattaccacagcccagagctggaaccctggtcactcctgggctttaaccagtctctgagcacactgagggtctctggtgcaaaggtcgcctccctgtccaggtatgaaayggaagggaagtactatcaagcagattggtcaggcttaactcattctgggacattctcagattagaagctatgaggtctacaaaggtactctgacagtgagtactgccctgctgccattgatgttcttgctctctttggaagaagttagctgggaatgcaaataaacgtcaccagttgtcctacagtgttgaggttacygctgacagctggcraggttacaccctgtaggaactgaggtttccttgtgttacctctgtgtgtccctgtgrgacaccctactagaggtggagagctgtgta

SEQ ID NO: 8290 - DNA, 600 bp, Chicken  19866894202831_2
cagcccagagctggaaccctggtcactcctgggctttaaccagtctctgagcacactgagggtctctggtgcaaaggtcgcctccctgtccaggtatgaaayggaagggaagtactatcaagcagattggtcaggcttaactcattctgggacattctcagattagaagctatgaggtctacaaaggtactctgacagtgagtactgccctgctgccattgatgttcttgctctctttggaagaagttagctgggaatgcaaataaacgtcaccagttgtcctacagtgttgaggttacygctgacagctggcraggttacaccctgtaggaactgaggtttccttgtgttacctctgtgtgtccctgtgrgacaccctactagaggtggagagctgtgtaggccaattagtcccaaatggagtcgtcagttgttgagggaatgcacgcttccctttccagcccagcactggcagaagccattttaagaagagttgagatggtggggatgtgccttggtccccatggcgaccctcttcaataactaaccagttaaactgtcccagccgcagggctgtgtgctgctctgagcaaggccgct

SEQ ID NO: 8291 - DNA, 600 bp, Chicken  19866894202831_3
aaccctggtcactcctgggctttaaccagtctctgagcacactgagggtctctggtgcaaaggtcgcctccctgtccaggtatgaaayggaagggaagtactatcaagcagattggtcaggcttaactcattctgggacattctcagattagaagctatgaggtctacaaaggtactctgacagtgagtactgccctgctgccattgatgttcttgctctctttggaagaagttagctgggaatgcaaataaacgtcaccagttgtcctacagtgttgaggttacygctgacagctggcraggttacaccctgtaggaactgaggtttccttgtgttacctctgtgtgtccctgtgrgacaccctactagaggtggagagctgtgtaggccaattagtcccaaatggagtcgtcagttgttgagggaatgcacgcttccctttccagcccagcactggcagaagccattttaagaagagttgagatggtggggatgtgccttggtccccatggcgaccctcttcaataactaaccagttaaactgtcccagccgcagggctgtgtgctgctctgagcaaggccgctttcttcctcttttg

SEQ ID NO: 8292 - DNA, 600 bp, Chicken  19866894202831_4
caaaggtcgcctccctgtccaggtatgaaayggaagggaagtactatcaagcagattggtcaggcttaactcattctgggacattctcagattagaagctatgaggtctacaaaggtactctgacagtgagtactgccctgctgccattgatgttcttgctctctttggaagaagttagctgggaatgcaaataaacgtcaccagttgtcctacagtgttgaggttacygctgacagctggcraggttacaccctgtaggaactgaggtttccttgtgttacctctgtgtgtccctgtgrgacaccctactagaggtggagagctgtgtaggccaattagtcccaaatggagtcgtcagttgttgagggaatgcacgcttccctttccagcccagcactggcagaagccattttaagaagagttgagatggtggggatgtgccttggtccccatggcgaccctcttcaataactaaccagttaaactgtcccagccgcagggctgtgtgctgctctgagcaaggccgctttcttcctcttttgaagcttgttttattgcaaattaaatcagtgttgatcaagagatgagcaagcatgact

SEQ ID NO: 8293 - DNA, 600 bp, Chicken  19866894202832_1
cacactgagagacctggggctgctcagcgtggagaagaggtctaaagtgcgggagtcaagtcgatgggagcagtttcttttcagtggtgaacagtgacagaacaaggggcaaggggcacaaactggaatacaggaatttccatacaaacataaggaagaaatgctttactgtgagggtgacagagcattggcacagattgcccagggagttgtagagtctccttctatggagatatttaagacctgcccagatgcccatctgtgagacctgctgtagggaacctgctctagcaggggttyggagttgacsatctccagaggtcccttccaacccctgcagttctgtgattctgtaagataaaagaaacaccacagtgccacatctgagatgcaattagcctgttatcctkcatctcacagtaatcaacagtaaatgaaaagctgaacaaaaccggggtacatctacagagaaacttccctgcaatataggactgcaactgaagaacttgatatgaacagattgaattgcagcaaaacctagcaagaacttatccattcttttatgaatagaaagctwatgataaattgactgcttgcaag

SEQ ID NO: 8294 - DNA, 600 bp, Chicken  19866894202832_2
gacctggggctgctcagcgtggagaagaggtctaaagtgcgggagtcaagtcgatgggagcagtttcttttcagtggtgaacagtgacagaacaaggggcaaggggcacaaactggaatacaggaatttccatacaaacataaggaagaaatgctttactgtgagggtgacagagcattggcacagattgcccagggagttgtagagtctccttctatggagatatttaagacctgcccagatgcccatctgtgagacctgctgtagggaacctgctctagcaggggttyggagttgacsatctccagaggtcccttccaacccctgcagttctgtgattctgtaagataaaagaaacaccacagtgccacatctgagatgcaattagcctgttatcctkcatctcacagtaatcaacagtaaatgaaaagctgaacaaaaccggggtacatctacagagaaacttccctgcaatataggactgcaactgaagaacttgatatgaacagattgaattgcagcaaaacctagcaagaacttatccattcttttatgaatagaaagctwatgataaattgactgcttgcaaggtatcttgag

SEQ ID NO: 8295 - DNA, 600 bp, Chicken  19866894202832_3
aaggggcacaaactggaatacaggaatttccatacaaacataaggaagaaatgctttactgtgagggtgacagagcattggcacagattgcccagggagttgtagagtctccttctatggagatatttaagacctgcccagatgcccatctgtgagacctgctgtagggaacctgctctagcaggggttyggagttgacsatctccagaggtcccttccaacccctgcagttctgtgattctgtaagataaaagaaacaccacagtgccacatctgagatgcaattagcctgttatcctkcatctcacagtaatcaacagtaaatgaaaagctgaacaaaaccggggtacatctacagagaaacttccctgcaatataggactgcaactgaagaacttgatatgaacagattgaattgcagcaaaacctagcaagaacttatccattcttttatgaatagaaagctwatgataaattgactgcttgcaaggtatcttgagaagaaacaaaaagttggctttgctaartatttccaggcataaaatccactgttaacctgtaacctctatgctctggagcagagcactctagtgttttgct

SEQ ID NO: 8296 - DNA, 600 bp, Chicken  19866894202832_4
ggaacctgctctagcaggggttyggagttgacsatctccagaggtcccttccaacccctgcagttctgtgattctgtaagataaaagaaacaccacagtgccacatctgagatgcaattagcctgttatcctkcatctcacagtaatcaacagtaaatgaaaagctgaacaaaaccggggtacatctacagagaaacttccctgcaatataggactgcaactgaagaacttgatatgaacagattgaattgcagcaaaacctagcaagaacttatccattcttttatgaatagaaagctwatgataaattgactgcttgcaaggtatcttgagaagaaacaaaaagttggctttgctaartatttccaggcataaaatccactgttaacctgtaacctctatgctctggagcagagcactctagtgttttgctaatggtgacagaattagcagctattaaaacctcaattaagcagggcacatctaagaacctgtctttagcacatagcactgagtaaatctaaacgttaacaggcyacccagacccagctttcacagaagtgttaggaaatactctgtctttcaaaggcttacaacatt

SEQ ID NO: 8297 - DNA, 600 bp, Chicken  19866894202832_5
cagttctgtgattctgtaagataaaagaaacaccacagtgccacatctgagatgcaattagcctgttatcctkcatctcacagtaatcaacagtaaatgaaaagctgaacaaaaccggggtacatctacagagaaacttccctgcaatataggactgcaactgaagaacttgatatgaacagattgaattgcagcaaaacctagcaagaacttatccattcttttatgaatagaaagctwatgataaattgactgcttgcaaggtatcttgagaagaaacaaaaagttggctttgctaartatttccaggcataaaatccactgttaacctgtaacctctatgctctggagcagagcactctagtgttttgctaatggtgacagaattagcagctattaaaacctcaattaagcagggcacatctaagaacctgtctttagcacatagcactgagtaaatctaaacgttaacaggcyacccagacccagctttcacagaagtgttaggaaatactctgtctttcaaaggcttacaacatttttatctgtagtggagcaagccagaaaaaaatattcacacaaatattattttcactttgg

SEQ ID NO: 8298 - DNA, 600 bp, Chicken  19866894202832_6
aacagattgaattgcagcaaaacctagcaagaacttatccattcttttatgaatagaaagctwatgataaattgactgcttgcaaggtatcttgagaagaaacaaaaagttggctttgctaartatttccaggcataaaatccactgttaacctgtaacctctatgctctggagcagagcactctagtgttttgctaatggtgacagaattagcagctattaaaacctcaattaagcagggcacatctaagaacctgtctttagcacatagcactgagtaaatctaaacgttaacaggcyacccagacccagctttcacagaagtgttaggaaatactctgtctttcaaaggcttacaacatttttatctgtagtggagcaagccagaaaaaaatattcacacaaatattattttcactttggttaaatattaccgttttcttagagtttgtcctttggaagctctgaaactttagcaaaaagatctccacactgaaagtgtttcagggtttgataatcatgttatggcaagaattttattwggaaatttttctccattttctgagaattaaatgttggttttgagttaacaaattttat

SEQ ID NO: 8299 - DNA, 600 bp, Chicken  19866894202832_7
acatctaagaacctgtctttagcacatagcactgagtaaatctaaacgttaacaggcyacccagacccagctttcacagaagtgttaggaaatactctgtctttcaaaggcttacaacatttttatctgtagtggagcaagccagaaaaaaatattcacacaaatattattttcactttggttaaatattaccgttttcttagagtttgtcctttggaagctctgaaactttagcaaaaagatctccacactgaaagtgtttcagggtttgataatcatgttatggcaagaattttattwggaaatttttctccattttctgagaattaaatgttggttttgagttaacaaattttataacgtcaaaacaacaccacgstcctcccaagaggccctgcagatcccattttaattctaatactcaaaatacgatgttcrtaattctcttatcttcttcactggaaagttcaagactgtaaacatcaaaacattttttttcaggatttgtgtgtccttctgatggtgacgcaccatattctgaagacataatgctgatattctgctcatacattttgaaggcaaaatattgaccttacaaag

SEQ ID NO: 8300 - DNA, 600 bp, Chicken  19866894202832_8
aagtgttaggaaatactctgtctttcaaaggcttacaacatttttatctgtagtggagcaagccagaaaaaaatattcacacaaatattattttcactttggttaaatattaccgttttcttagagtttgtcctttggaagctctgaaactttagcaaaaagatctccacactgaaagtgtttcagggtttgataatcatgttatggcaagaattttattwggaaatttttctccattttctgagaattaaatgttggttttgagttaacaaattttataacgtcaaaacaacaccacgstcctcccaagaggccctgcagatcccattttaattctaatactcaaaatacgatgttcrtaattctcttatcttcttcactggaaagttcaagactgtaaacatcaaaacattttttttcaggatttgtgtgtccttctgatggtgacgcaccatattctgaagacataatgctgatattctgctcatacattttgaaggcaaaatattgaccttacaaagatgatgaaatgtttccagttttcaaatgtttcagaaaaaaatatatatatacatacataggaaaggtgtttatcctatg

SEQ ID NO: 8301 - DNA, 600 bp, Chicken  19866894202832_9
aagccagaaaaaaatattcacacaaatattattttcactttggttaaatattaccgttttcttagagtttgtcctttggaagctctgaaactttagcaaaaagatctccacactgaaagtgtttcagggtttgataatcatgttatggcaagaattttattwggaaatttttctccattttctgagaattaaatgttggttttgagttaacaaattttataacgtcaaaacaacaccacgstcctcccaagaggccctgcagatcccattttaattctaatactcaaaatacgatgttcrtaattctcttatcttcttcactggaaagttcaagactgtaaacatcaaaacattttttttcaggatttgtgtgtccttctgatggtgacgcaccatattctgaagacataatgctgatattctgctcatacattttgaaggcaaaatattgaccttacaaagatgatgaaatgtttccagttttcaaatgtttcagaaaaaaatatatatatacatacataggaaaggtgtttatcctatgttcagcaacattccatcagcatttatcatgttctggctgaacttggcttcataggatca

SEQ ID NO: 8302 - DNA, 600 bp, Chicken  19866894202836_1
gagtgtaagcagcaggcagaagccaagcggctatcgcttcaaggatcttcaatgacattgcacaactgcaaaggcaatttaactcgtgtactagaaataggaaacaactcgatttcaggtgccaggagggactgctgtggtaggagagcattcgaagttaccaaatctgtttatcaagcaccaagtcatccgcgaagcaccgctttccatggccacgtttcaaaccagaactgcattggtgagttttgctgttaggtgcttctatgtatttatatcctccttctgcctgtactacgatayrtggtaaaagaccataaaaacactgctttggtcatcacaacgctgactaggagccgagcagctggtccagtcggtgagcgcacagcagcagggctgggtgggatgcggctcgcgtggctacccgtgcttgccagaggctccgctcgcagccagcccgcttggcagcctgctatggacaacgtcgaggataagctgcaaattaagcgcaagtcatggtaaaacaattcaggcagatccagacagattgagagtcaccagagaaacaaacggcagcagcaggctgcgaaaacaaacacgacg

SEQ ID NO: 8303 - DNA, 600 bp, Chicken  19866894202836_2
agtgtaagcagcaggcagaagccaagcggctatcgcttcaaggatcttcaatgacattgcacaactgcaaaggcaatttaactcgtgtactagaaataggaaacaactcgatttcaggtgccaggagggactgctgtggtaggagagcattcgaagttaccaaatctgtttatcaagcaccaagtcatccgcgaagcaccgctttccatggccacgtttcaaaccagaactgcattggtgagttttgctgttaggtgcttctatgtatttatatcctccttctgcctgtactacgatayrtggtaaaagaccataaaaacactgctttggtcatcacaacgctgactaggagccgagcagctggtccagtcggtgagcgcacagcagcagggctgggtgggatgcggctcgcgtggctacccgtgcttgccagaggctccgctcgcagccagcccgcttggcagcctgctatggacaacgtcgaggataagctgcaaattaagcgcaagtcatggtaaaacaattcaggcagatccagacagattgagagtcaccagagaaacaaacggcagcagcaggctgcgaaaacaaacacgacgg

SEQ ID NO: 8304 - DNA, 600 bp, Chicken  19866894202841_1
aatggatgtcttaatttgaaaaaataaaaaataacaaacagaaagaagagttaatgtcaacccatgagatcagaatcagaagccacaaatttgaaactataacgagaaaaacaggttctcaaacaatctctgaaaagccttgtttgtgttgagggaagcatcaaaaaaataggtttttttttttttttgcaactgactgcaggaggtattttatggacttttagcatttagttagtactgtgaacacttaatcccagaataacctttcatttcctttccccttaccctgtgtgtgtcctrtatgatgggatgttatgaggtaacgtggctgtcagcatgcccgctcaacagtcctgggcaaagtctcacctcttaacatctgggacatattaggcttttgaaaatctaaatcccactggaatcagtgaacatgcagtattccctttccagactcatggattcgcatctttacaggagacagtttatatgtaatcacaggaagatctaatattatgtgtttcaaatcttgtaaccacaaggcaattccaatacatctttcagagtctgcataaggcatttcttgcagtacatctgtggctg

SEQ ID NO: 8305 - DNA, 600 bp, Chicken  19866894202841_2
tttgtctattgaaagtccttgattacagcaagcaactgcagtgtcacagctccatttagctgtttctcttacaaaaattgttgagctttgaactgctaatattaagcagtacttttttgcctcctgcaacaattacttaatcagtattcctgttgtgcagaatgtataacaaacacctcagtaaactgaaaaactatagtttctagctggtacagctcaatcatagcccttttactctaaatgtaattgtatgtatgcttgtcagatgcgggtctcttttaacaactcaaactactgatwaaaaatattttatatgacacttcactgcagaatcttttttctttaccatcactgttgttatttgttaaaaaaaaaaaatcaatcctaatggctaaactgtaactaggatatgtatctttattcacaaatccaatatttaataatcttttgtaccgaagaaatcaagtaatcacatctcacttcattcccttacaaaatgggtgctgtcccctgccctgcttcacacagctcagcttcaagcttcagccttaattagttggaggcagctgtgggttttaaaattcccagataaaatatgta

SEQ ID NO: 8306 - DNA, 599 bp, Chicken  19866894202843_1
  misc_feature (1)..(37): n is any nucleotide
nnnnnnnnnnnnnnnnnnnnnnnnnnnnnnnnnnnnnggagctttgaaagtcaatgatctttgaggtccttgtcaacccaggccattctatggttctatgattctatgaagcttctctttacaggaaggctccctgtgttcacattttttctctgtcacaattttctgttactggtgttgctgtttccatgctttgcagtcactaggctctgaaacaagatgcttactgctcttaaatttcttgctattgctgctgtctcccagaattttattcttctggtacagattcaatagcctacrgrcatccttaartcatacttcttaagttctaaatagctgttaacagtgcggtgcttyttattggttcatgttttctggatggtttggggattatttctttggcaagaagtaaacaacttcgggcatgccttcagtgctttaattacttcagaacagtagggagggattaacccatttcatagactcactgaacagcagaatggttgaggttggaaggaacctttggaggttcctgctcaagcraggctgctgagaacagtttgtggaaagataatggtaggacaaggggaatggtttta

SEQ ID NO: 8307 - DNA, 599 bp, Chicken  19866894202843_2
  misc_feature (1)..(35): n is any nucleotide
nnnnnnnnnnnnnnnnnnnnnnnnnnnnnnnnnnnggagctttgaaagtcaatgatctttgaggtccttgtcaacccaggccattctatggttctatgattctatgaagcttctctttacaggaaggctccctgtgttcacattttttctctgtcacaattttctgttactggtgttgctgtttccatgctttgcagtcactaggctctgaaacaagatgcttactgctcttaaatttcttgctattgctgctgtctcccagaattttattcttctggtacagattcaatagcctacrgrcatccttaartcatacttcttaagttctaaatagctgttaacagtgcggtgcttyttattggttcatgttttctggatggtttggggattatttctttggcaagaagtaaacaacttcgggcatgccttcagtgctttaattacttcagaacagtagggagggattaacccatttcatagactcactgaacagcagaatggttgaggttggaaggaacctttggaggttcctgctcaagcraggctgctgagaacagtttgtggaaagataatggtaggacaaggggaatggttttaaa

SEQ ID NO: 8308 - DNA, 599 bp, Chicken  19866894202843_3
  misc_feature (1)..(25): n is any nucleotide
nnnnnnnnnnnnnnnnnnnnnnnnnggagctttgaaagtcaatgatctttgaggtccttgtcaacccaggccattctatggttctatgattctatgaagcttctctttacaggaaggctccctgtgttcacattttttctctgtcacaattttctgttactggtgttgctgtttccatgctttgcagtcactaggctctgaaacaagatgcttactgctcttaaatttcttgctattgctgctgtctcccagaattttattcttctggtacagattcaatagcctacrgrcatccttaartcatacttcttaagttctaaatagctgttaacagtgcggtgcttyttattggttcatgttttctggatggtttggggattatttctttggcaagaagtaaacaacttcgggcatgccttcagtgctttaattacttcagaacagtagggagggattaacccatttcatagactcactgaacagcagaatggttgaggttggaaggaacctttggaggttcctgctcaagcraggctgctgagaacagtttgtggaaagataatggtaggacaaggggaatggttttaaactgaaagaag

SEQ ID NO: 8309 - DNA, 600 bp, Chicken  19866894202843_4
tctttgaggtccttgtcaacccaggccattctatggttctatgattctatgaagcttctctttacaggaaggctccctgtgttcacattttttctctgtcacaattttctgttactggtgttgctgtttccatgctttgcagtcactaggctctgaaacaagatgcttactgctcttaaatttcttgctattgctgctgtctcccagaattttattcttctggtacagattcaatagcctacrgrcatccttaartcatacttcttaagttctaaatagctgttaacagtgcggtgcttyttattggttcatgttttctggatggtttggggattatttctttggcaagaagtaaacaacttcgggcatgccttcagtgctttaattacttcagaacagtagggagggattaacccatttcatagactcactgaacagcagaatggttgaggttggaaggaacctttggaggttcctgctcaagcraggctgctgagaacagtttgtggaaagataatggtaggacaaggggaatggttttaaactgaaagaagtgtgactaatattagatattagggagaagatctttactcagtgggt

SEQ ID NO: 8310 - DNA, 600 bp, Chicken  19866894202843_5
gctattgctgctgtctcccagaattttattcttctggtacagattcaatagcctacrgrcatccttaartcatacttcttaagttctaaatagctgttaacagtgcggtgcttyttattggttcatgttttctggatggtttggggattatttctttggcaagaagtaaacaacttcgggcatgccttcagtgctttaattacttcagaacagtagggagggattaacccatttcatagactcactgaacagcagaatggttgaggttggaaggaacctttggaggttcctgctcaagcraggctgctgagaacagtttgtggaaagataatggtaggacaaggggaatggttttaaactgaaagaagtgtgactaatattagatattagggagaagatctttactcagtgggtggtgaggcactggcacagctgcccagagaagctgtggtgccccatccctggaggcgctcaaggccaggttggatggggccctgggcagcctgagctggtggggggcagccctgcccacagcaggggttgtggctgggtgggctttgagctcccttccaacctatgctgttctgtaattctatgcta

SEQ ID NO: 8311 - DNA, 600 bp, Chicken  19866894202858_1
aggtctcatgaaggctacaggaaaaccagctctcataactggaggcagggaatggcttggtgggatatcgagtccccgtcctccatattagaaatgattgtatttatacatgctgcataattctttctgctacttggccaaattccatcagtctctatatccatttgttcagtgtcagcaatttttccctatccttgctagatatactgctactgtattactccaatagttaatagttatcctgtgacttgctaatatacccaggtttttctcttcctcagtcatttctaacaaatgacyccttagcctgtagaagaggcttttgttattagcccataagttcataaccttgcattttgcagtattgaatttcagttactccagcctatgacgtcacacagtcctgcatgcctcttcctggccatccttcagaatcatgttcctgcaccaaggtatcgccagcaaacatcagcaccacactggccccgtgcttaccaagggcattgaaaactcatcacacaaaaaacagtgccaagaatccatacctgggaccagcagcaggaacctctgtgaagttaaacattctgtatcccaagatta

SEQ ID NO: 8312 - DNA, 599 bp, Chicken  19866894202863_1
  misc_feature (1)..(20): n is any nucleotide
nnnnnnnnnnnnnnnnnnnncgttgaattgccaagtgtactatgtctaggaaaaaaaaaaagacaaaacatcaaaaatctgttgtaaggggtcacagtagatcatttttcccttggacagctattcctccttcaagaacaatcatggtcagatgtttgacttgcaggggatttaaaattagtgcttgggtatgaaagacacaagtgtgaggtgggtatgatgcaagaggatcttcctcaagttgtattgctaactgctgagtatcaggctttaatgtcacacttgcaagctcttttagasacttaataatgaatacaacagcactctcaaaaatcagtagccttcactctcagtagcctagtggatgatgaatagcctggcaatctttagtggtaaaggaaaaagaaccccttcagagcaaaatgaaaatatatttatatgttttgacattattcgggcagcctctggaaatctaactttgtaaaaacccatggtcttgtcttactctcctgctctctctctttttgtaatttcctctttgtcttagtgtgactcatttctctctttctttcctccagctttatccctggcactcccac

SEQ ID NO: 8313 - DNA, 600 bp, Chicken  19866894202865_1
ccttcctctgcttgcattgagtcctcattttactttattgtcctgatgctctctgtactgttttattttttgaataacctcttaattgaaagagttgtataatcagagcaataagctgttcactaaggtgtcctaattaggaggattttactgtgtttctgaattgtattactaatgatgtttattgaattgtatttgaatacttcagaaatacgtaatgtttctgttacttctgtgctccttggaaaaatagggcatgcagataggaaggtgtgtcatgtgagtattagatcatttgtraatccacataaagcctagcaattagtttaacagctaattgtcctagtgaatgtcatcagtaagacatcgcaggaatgaaattttatgtctggaattgcagcctcataagacagccaaaaaaaaagaaaatcacttgtgatgtaaytcaccctttggtgcaggtagatgctttaggtttgatcactgcaggctggaagttgttccaaatggaagagggttgtgggtttggctgtgagggagtaaaagttgttagggttgggaatcaaggtctcatgtgtgtttctcattattacattaacc

SEQ ID NO: 8314 - DNA, 600 bp, Chicken  19866894202865_2
ttttactgtgtttctgaattgtattactaatgatgtttattgaattgtatttgaatacttcagaaatacgtaatgtttctgttacttctgtgctccttggaaaaatagggcatgcagataggaaggtgtgtcatgtgagtattagatcatttgtraatccacataaagcctagcaattagtttaacagctaattgtcctagtgaatgtcatcagtaagacatcgcaggaatgaaattttatgtctggaattgcagcctcataagacagccaaaaaaaaagaaaatcacttgtgatgtaaytcaccctttggtgcaggtagatgctttaggtttgatcactgcaggctggaagttgttccaaatggaagagggttgtgggtttggctgtgagggagtaaaagttgttagggttgggaatcaaggtctcatgtgtgtttctcattattacattaaccattagcttgttgaagatattctctgcagaggtatctttatgccaacatttccagctagaagatttatttcagaagtgagttcagccatctggagagcatgagccttgggataggtagggcagtgagtcgcagcaaagttgctagt

SEQ ID NO: 8315 - DNA, 599 bp, Chicken  19866894202883_1
  misc_feature (1)..(79): n is any nucleotide
nnnnnnnnnnnnnnnnnnnnnnnnnnnnnnnnnnnnnnnnnnnnnnnnnnnnnnnnnnnnnnnnnnnnnnnnnnnnnnnacttttcctctgcatggacgatgaaagtgaaagagttccatggattaactgtatcacattttttttctaaaagatttaatgtagcatattttctgccaacatttccaacatatggaattcatgttataaactaaatgatcttagcaatgtaaaactaagagttgtggataacaaaagcagaattcttacagagcctgttagttacaaatgtgcattaaatygtgcaaatctgacttgtaaacactgtagcttatakctcatacaatatagttccgcattcaaaagaygcaattgggaagattcgatatccaaatcttttatagtaatataaaaaatatccccctgaaatcagcagtataaaaaaaatcagtgcatagacaatggcagttttgaccattattatactgtcaccttctgtacaagaaaaagcatcctagggctttcaagtgtccagcttgagcagctaatttggttgcttttctcaatatcttttggttgcttttcttcatcttcttcttac

SEQ ID NO: 8316 - DNA, 599 bp, Chicken  19866894202883_2
  misc_feature (1)..(44): n is any nucleotide
nnnnnnnnnnnnnnnnnnnnnnnnnnnnnnnnnnnnnnnnnnnnacttttcctctgcatggacgatgaaagtgaaagagttccatggattaactgtatcacattttttttctaaaagatttaatgtagcatattttctgccaacatttccaacatatggaattcatgttataaactaaatgatcttagcaatgtaaaactaagagttgtggataacaaaagcagaattcttacagagcctgttagttacaaatgtgcattaaatygtgcaaatctgacttgtaaacactgtagcttatakctcatacaatatagttccgcattcaaaagaygcaattgggaagattcgatatccaaatcttttatagtaatataaaaaatatccccctgaaatcagcagtataaaaaaaatcagtgcatagacaatggcagttttgaccattattatactgtcaccttctgtacaagaaaaagcatcctagggctttcaagtgtccagcttgagcagctaatttggttgcttttctcaatatcttttggttgcttttcttcatcttcttcttacctaatacagaaccacagtggcaacaagaaaaacac

SEQ ID NO: 8317 - DNA, 599 bp, Chicken  19866894202883_3
  misc_feature (1)..(13): n is any nucleotide
nnnnnnnnnnnnnacttttcctctgcatggacgatgaaagtgaaagagttccatggattaactgtatcacattttttttctaaaagatttaatgtagcatattttctgccaacatttccaacatatggaattcatgttataaactaaatgatcttagcaatgtaaaactaagagttgtggataacaaaagcagaattcttacagagcctgttagttacaaatgtgcattaaatygtgcaaatctgacttgtaaacactgtagcttatakctcatacaatatagttccgcattcaaaagaygcaattgggaagattcgatatccaaatcttttatagtaatataaaaaatatccccctgaaatcagcagtataaaaaaaatcagtgcatagacaatggcagttttgaccattattatactgtcaccttctgtacaagaaaaagcatcctagggctttcaagtgtccagcttgagcagctaatttggttgcttttctcaatatcttttggttgcttttcttcatcttcttcttacctaatacagaaccacagtggcaacaagaaaaacaccagtaaacaactacrgatttctaaacatttt

SEQ ID NO: 8318 - DNA, 499 bp, Chicken  19866894202883_4
ttccgcattcaaaagaygcaattgggaagattcgatatccaaatcttttatagtaatataaaaaatatccccctgaaatcagcagtataaaaaaaatcagtgcatagacaatggcagttttgaccattattatactgtcaccttctgtacaagaaaaagcatcctagggctttcaagtgtccagcttgagcagctaatttggttgcttttctcaatatcttttggttgcttttcttcatcttcttcttacctaatacagaaccacagtggcaacaagaaaaacaccagtaaacaactacrgatttctaaacatttttaaaactttctgaaatgtatcctgagacaattaacccttcatggtggagaaacagtgtgaaacagaatgcttttacttatattcctgtataaagagaatgctttcacagagtaggcaggttttttgtatactaacaacctcaggagttgtgctattaggaaattttaactcatggtagagtta

SEQ ID NO: 8319 - DNA, 600 bp, Chicken  19866894202885_1
tctggttgtctaaggatttatggagtctattctttgcatgggattaaaaagatatgtgaagtaaatgttctgagtagacaactaaaaccaggaagaatcttaatctgctccgtactgcctactgtgtgtcagtctaatggaatccagtcttaagaaatcttccactaggcctttgaaaatgcttgatatgaatgggaaagtgtgcaactaacacgtttgctgagggatgtgtactgcatgtaggctgtagccattaaaaatgagtgatctcagtacttaatttatgtatttcaagaaaarttgaagactttcttaagaagaaagtgaatcatagtgaatacttctgatagaatttcctagtctcaaaacgtataggactccacatctatttctttgtgacgataatattttctgatggtttttttctgatatgtttttttcttcacctcaaaacatgagaaaattttgaacctaaaggtaagttcaattaccacctcacttctccccacctagttttccttgctgcagtgtcagcagtcaagcttgctatggctctgctgtgggagcagtctgttttcagcatgaggtgatcacagtaca

SEQ ID NO: 8320 - DNA, 600 bp, Chicken  19866894202885_2
cagtgtcagcagtcaagcttgctatggctctgctgtgggagcagtctgttttcagcatgaggtgatcacagtacagtgaggtagggctgcacgcattgtgccatgtagtggtgtgttgcatttgataatactcatccaagaggtaaattccctgaactgatgtttgatgcctcttatcctttctcagtggatatttcagtatgaccatcataaacttcctgtttctgtggcaccttgcatcaatgtggaagtaagatgagtgttgtgcgcatcctctctcacatcctgttctgcaggcaytgagcacatgcttctgcttgacttgtttgaaaatacagaggtttgttccttgatctgtttttcttcagtaggcatcttgaataggccataattcctcaratgagaaaagcctagcaaaggccctttgatactgtatgaaaatattctaggtaggaacaaaagtacatctcaggactgaacaatgaagtaggtgtgaaaatcatgtgaggtttgcattgaaatagggatttctttatggatcactccatagttttaaactcttgctctgctattctaactccaccccttaacagttataat

SEQ ID NO: 8321 - DNA, 600 bp, Chicken  19866894202885_3
gccatgtagtggtgtgttgcatttgataatactcatccaagaggtaaattccctgaactgatgtttgatgcctcttatcctttctcagtggatatttcagtatgaccatcataaacttcctgtttctgtggcaccttgcatcaatgtggaagtaagatgagtgttgtgcgcatcctctctcacatcctgttctgcaggcaytgagcacatgcttctgcttgacttgtttgaaaatacagaggtttgttccttgatctgtttttcttcagtaggcatcttgaataggccataattcctcaratgagaaaagcctagcaaaggccctttgatactgtatgaaaatattctaggtaggaacaaaagtacatctcaggactgaacaatgaagtaggtgtgaaaatcatgtgaggtttgcattgaaatagggatttctttatggatcactccatagttttaaactcttgctctgctattctaactccaccccttaacagttataataacaatcacagtactaaagtatgtggagggctttctattcttctgctcagtactggatgatttgyttttacagtgtggtgcaagtattcttaaatgaag

SEQ ID NO: 8322 - DNA, 600 bp, Chicken  19866894202885_4
cagtaggcatcttgaataggccataattcctcaratgagaaaagcctagcaaaggccctttgatactgtatgaaaatattctaggtaggaacaaaagtacatctcaggactgaacaatgaagtaggtgtgaaaatcatgtgaggtttgcattgaaatagggatttctttatggatcactccatagttttaaactcttgctctgctattctaactccaccccttaacagttataataacaatcacagtactaaagtatgtggagggctttctattcttctgctcagtactggatgatttgyttttacagtgtggtgcaagtattcttaaatgaagttagcccccaagagccagaaaagacaataaaagtccaatttaaacttcaaggaaatgtgatgccaagcgttaataaagcattagttggttattacagggtcttgattttatttcctcctggaagctctgcatgcctatgcatgaatatgttatcgcttctgactatgaaatgctgctgtaagcacctgcatcatcaagctgcactgtaataaccaccaaactctttgaacgtgataattctactcccacggttttagtctttttgt

SEQ ID NO: 8323 - DNA, 599 bp, Chicken  19866894202888_1
  misc_feature (1)..(43): n is any nucleotide
nnnnnnnnnnnnnnnnnnnnnnnnnnnnnnnnnnnnnnnnnnnagacttcctgtatttatatacaattgtcttatgtataaatttcattaaaacgcaagctattgcttactcaaatacggattattattagtattattactattattattattattatttgaagcaataaaaatcaacaagccaaaaaccaataaccaaactagaaagctcagatgttcttggtgtgctcaggtgttgacatctgggaacatgcccaggtctccagttcctttgtatttcacatttgactgtatttgccrttcccaggggtaaattcaagaagctaggattacccttgatttaagaatcctgcttggctatcatctcagcaatacacacacatactggtaatgccaygacccatcttttcatacccaccatggagagaggtttcctggagttgggtggccmcagtgaggtggcattatgttcagtacagaggatgcccagtgagtgccagggaccactctagataaagtagtcagagtggtgctgaacttcagctgatcacacagcagtgagacagatcttattacctcaggcatggaacaatgctaat

SEQ ID NO: 8324 - DNA, 600 bp, Chicken  19866894202888_2
agctattgcttactcaaatacggattattattagtattattactattattattattattatttgaagcaataaaaatcaacaagccaaaaaccaataaccaaactagaaagctcagatgttcttggtgtgctcaggtgttgacatctgggaacatgcccaggtctccagttcctttgtatttcacatttgactgtatttgccrttcccaggggtaaattcaagaagctaggattacccttgatttaagaatcctgcttggctatcatctcagcaatacacacacatactggtaatgccaygacccatcttttcatacccaccatggagagaggtttcctggagttgggtggccmcagtgaggtggcattatgttcagtacagaggatgcccagtgagtgccagggaccactctagataaagtagtcagagtggtgctgaacttcagctgatcacacagcagtgagacagatcttattacctcaggcatggaacaatgctaatgtagttacagcttttaggactagagctaatatttccaacagaattcagagctgagttataccagattgaccagtcctagatctgtttatgaaaggaat

SEQ ID NO: 8325 - DNA, 600 bp, Chicken  19866894202888_3
ttattatttgaagcaataaaaatcaacaagccaaaaaccaataaccaaactagaaagctcagatgttcttggtgtgctcaggtgttgacatctgggaacatgcccaggtctccagttcctttgtatttcacatttgactgtatttgccrttcccaggggtaaattcaagaagctaggattacccttgatttaagaatcctgcttggctatcatctcagcaatacacacacatactggtaatgccaygacccatcttttcatacccaccatggagagaggtttcctggagttgggtggccmcagtgaggtggcattatgttcagtacagaggatgcccagtgagtgccagggaccactctagataaagtagtcagagtggtgctgaacttcagctgatcacacagcagtgagacagatcttattacctcaggcatggaacaatgctaatgtagttacagcttttaggactagagctaatatttccaacagaattcagagctgagttataccagattgaccagtcctagatctgtttatgaaaggaataaagattgcctcaccttatggatatagggctagataacttcctcttttatacca

SEQ ID NO: 8326 - DNA, 599 bp, Chicken  19866894202889_1
  misc_feature (1)..(49): n is any nucleotide
nnnnnnnnnnnnnnnnnnnnnnnnnnnnnnnnnnnnnnnnnnnnnnnnntcttttacttctggatgtccttttctgttcgtttcattgactgttttttctctttgcaagtgacgtgccttctgttcttgtcttatccttcatctgaaatgcagctctgcacttccctgtatgagatctatggtctggcttgccttgacacaaatatttgatatactctgcttgtatttaatgttcttttccaaaggaaatacattttttttctcagctccgaactgaatatatttaaatgtaaatgtgcygtggtagtttaaataacactgataaaatactgagttacaaaatactcrtgggcaacactcatcccattcttttaaggtatcggwggacttcttgtttcatttctttgccatcaacgtctgtagaaggcaggtaggcaggaggtatgtagcatgcagcaggataaggcagtaattacatatttgccattctttccttatgatgaggatcattatcccagtatacgttcctgagagccagaagaggctgcccataaggcttcgggcaggctgtacagatgcaccattcagtgccaccacaa

SEQ ID NO: 8327 - DNA, 599 bp, Chicken  19866894202889_2
  misc_feature (1)..(1): n is any nucleotide
ntcttttacttctggatgtccttttctgttcgtttcattgactgttttttctctttgcaagtgacgtgccttctgttcttgtcttatccttcatctgaaatgcagctctgcacttccctgtatgagatctatggtctggcttgccttgacacaaatatttgatatactctgcttgtatttaatgttcttttccaaaggaaatacattttttttctcagctccgaactgaatatatttaaatgtaaatgtgcygtggtagtttaaataacactgataaaatactgagttacaaaatactcrtgggcaacactcatcccattcttttaaggtatcggwggacttcttgtttcatttctttgccatcaacgtctgtagaaggcaggtaggcaggaggtatgtagcatgcagcaggataaggcagtaattacatatttgccattctttccttatgatgaggatcattatcccagtatacgttcctgagagccagaagaggctgcccataaggcttcgggcaggctgtacagatgcaccattcagtgccaccacaaggttttctgctctgtgctgacctcaggtgctttccaaaggtctgtaga

SEQ ID NO: 8328 - DNA, 600 bp, Chicken  19866894202889_3
attgactgttttttctctttgcaagtgacgtgccttctgttcttgtcttatccttcatctgaaatgcagctctgcacttccctgtatgagatctatggtctggcttgccttgacacaaatatttgatatactctgcttgtatttaatgttcttttccaaaggaaatacattttttttctcagctccgaactgaatatatttaaatgtaaatgtgcygtggtagtttaaataacactgataaaatactgagttacaaaatactcrtgggcaacactcatcccattcttttaaggtatcggwggacttcttgtttcatttctttgccatcaacgtctgtagaaggcaggtaggcaggaggtatgtagcatgcagcaggataaggcagtaattacatatttgccattctttccttatgatgaggatcattatcccagtatacgttcctgagagccagaagaggctgcccataaggcttcgggcaggctgtacagatgcaccattcagtgccaccacaaggttttctgctctgtgctgacctcaggtgctttccaaaggtctgtagaggaaagtgcactatgaaatggatttttggttttttct

SEQ ID NO: 8329 - DNA, 600 bp, Chicken  19866894202896_1
aagtttcaagtacatgtatatcaattgcttggtgacctagaagaagttattcacaagcttaacaaaactccattaaagaaaaagaaggaaaaaaaatattcggaacttattcaacatattttttataacattgcatattcttgttcagctgtgtgctgtcttgttcactatctttatggtgattgcggggctgtatggcattattcagtatattagctgtttggattgttttgtttgtttgtttgctgatggtgtgggtccaagctattcttgaattcttttctgttacggcagagcacrcatataggcggaggtggagggcagggaaagaacagtgacaaaagaactgttttggtttaaccccagcaccacactgttgttcgcttactatcccttcttcccagtgggatgaaggagagaattgggaaaaaaagtagaactcgtggttgagataaaactgtttattgaggtagagaaaaggaaaatagttatgactatatctatatgcatatgactgtatataacaagtgatacacaagcaattgctcaccactccctaaccgatgcccagctagccccctgagcagtggaagagagtga

SEQ ID NO: 8330 - DNA, 600 bp, Chicken  19866894202897_1
gaaaatagttccatggtaaatataaaaacattcaatgaccaaatcaaatctgtgtaactgttccacactggacctcatcagagtttcaaacatgttctccaggacattttcttctcttttgtaccaattattagtttggtataataagtgtctttcatatatttcagggatactcactcccccctttctctttccctaactcaatgtcaattttggtggtatttatacatcacaaatctcagtttactcgtatcatttccttcagcgtggaaatcacgaacagcagacaatccatcaagyactctgagtgctcaactgacactgcaattagtgacaccacggcagaaaacaagtttaagaatgaatgaaattataaatctgagtgcacatgacacttgctacttccatttgagttcagtgaaaagcaaaggcaagtaggaaagggctctaagagccctgtgcatcaagcaacacctagaaaccagtggtaaattattttctgaagaatggaaccttactaggggactccttttcccctataacagtggctctggaacaacttcataattccaacagactttccttaccaaaactgtctca

SEQ ID NO: 8331 - DNA, 600 bp, Chicken  19866894202910_1
acattgttgctctctgcaattgcgactttggcatggatcatttaactggggcatgcttcactaatcttgagggaaaaacctctgcaaaatggctgcagttagatgcaagattagtccaacaatgaagaaccagtttagtgggaatacacttagctggtactaaaggatgcaagcactgtttaataaaagaccaaggatcaatggagcaggcaggaacagagcacattgcaacactggcaattcccagcaatgtgctgggaagtcctggatgtgtctttcaggctctttcttccttatgtygataagggaaagggaggaacaatgactcttaattgctgtaacaacttttagatccaggaccagattgcaccacagcagcccattgttcagccatcaggtgctgaggaatccaccgaactctgggaacaatgcggaggtgtgacagcacacagcaggccctgcttttggtgcagaaagcaccccttgagcagatcagcaaagttatttaaaagaaacctaaaaatacattaactcagctcttctgtaactcgatgaggaagtcccagcagctgactgtaacacaccaacggggttacaagc

SEQ ID NO: 8332 - DNA, 600 bp, Chicken  19866894202910_2
ctcttaattgctgtaacaacttttagatccaggaccagattgcaccacagcagcccattgttcagccatcaggtgctgaggaatccaccgaactctgggaacaatgcggaggtgtgacagcacacagcaggccctgcttttggtgcagaaagcaccccttgagcagatcagcaaagttatttaaaagaaacctaaaaatacattaactcagctcttctgtaactcgatgaggaagtcccagcagctgactgtaacacaccaacggggttacaagctgatttccagtgtgactttatcaaygaaaacaaaagtacaactttctttgaaggggtaacttccagaaaaataaacacgaccaatattcacgtgtaacactctgggcaatgaggggttctgctaagcagaacgaagtggcttttccttaattaccccaaagctgcactgctggctccctgagctccttggaaagcaaacaggagcctcatcccataggtccacagggatccagaccccacagaatagttatctaaagaaaatccaagatttgcgagattaagaattacttctaaataacagtattttaattttaaataacgtttt

SEQ ID NO: 8333 - DNA, 600 bp, Chicken  19866894202912_1
atgctgtgcttgtaaaaacctgcagcagcagaggtgacctattgtcactgttgccacagctgaaaggcaccacccactgcctcactgtgctcacgtctactggttggtttccagaaccattcacaagcattgacgaatgtcagtgggtgccattttttctgcatggaggaacttaatgacagacctttgcttcatttgcacttccatgtcagactgcccctctgctgccatctgtcacatggcaacaacatgtaatgagatattggtgggaaggttcaacctctgctgtcataccaccamcatcagcctgtgtcatcgtgaaccaacgtaataaaataggaggcattactttcagagcatccstmttacaaataaacaggtcaatcagcctygtaggaacatgctcctgaaatgcaggctgaaggatcactgtcttcaaaagcccaaataaaggagagacactgaaatattgatgctgagcaaaaataatgtatgaacacaccaacatataatgatgaatccctggcgcttgttttatacagactgtacataaacraagactgttcaatgcagattttattttttgaaattatattttat

SEQ ID NO: 8334 - DNA, 600 bp, Chicken  19866894202912_2
aaggcaccacccactgcctcactgtgctcacgtctactggttggtttccagaaccattcacaagcattgacgaatgtcagtgggtgccattttttctgcatggaggaacttaatgacagacctttgcttcatttgcacttccatgtcagactgcccctctgctgccatctgtcacatggcaacaacatgtaatgagatattggtgggaaggttcaacctctgctgtcataccaccamcatcagcctgtgtcatcgtgaaccaacgtaataaaataggaggcattactttcagagcatccstmttacaaataaacaggtcaatcagcctygtaggaacatgctcctgaaatgcaggctgaaggatcactgtcttcaaaagcccaaataaaggagagacactgaaatattgatgctgagcaaaaataatgtatgaacacaccaacatataatgatgaatccctggcgcttgttttatacagactgtacataaacraagactgttcaatgcagattttattttttgaaattatattttattgttagagaaatttaatacactgtatgcccttagtctttgtgtcatttactatgaaaggataa

SEQ ID NO: 8335 - DNA, 600 bp, Chicken  19866894202912_3
ggcaccacccactgcctcactgtgctcacgtctactggttggtttccagaaccattcacaagcattgacgaatgtcagtgggtgccattttttctgcatggaggaacttaatgacagacctttgcttcatttgcacttccatgtcagactgcccctctgctgccatctgtcacatggcaacaacatgtaatgagatattggtgggaaggttcaacctctgctgtcataccaccamcatcagcctgtgtcatcgtgaaccaacgtaataaaataggaggcattactttcagagcatccstmttacaaataaacaggtcaatcagcctygtaggaacatgctcctgaaatgcaggctgaaggatcactgtcttcaaaagcccaaataaaggagagacactgaaatattgatgctgagcaaaaataatgtatgaacacaccaacatataatgatgaatccctggcgcttgttttatacagactgtacataaacraagactgttcaatgcagattttattttttgaaattatattttattgttagagaaatttaatacactgtatgcccttagtctttgtgtcatttactatgaaaggataaga

SEQ ID NO: 8336 - DNA, 600 bp, Chicken  19866894202912_4
acgtctactggttggtttccagaaccattcacaagcattgacgaatgtcagtgggtgccattttttctgcatggaggaacttaatgacagacctttgcttcatttgcacttccatgtcagactgcccctctgctgccatctgtcacatggcaacaacatgtaatgagatattggtgggaaggttcaacctctgctgtcataccaccamcatcagcctgtgtcatcgtgaaccaacgtaataaaataggaggcattactttcagagcatccstmttacaaataaacaggtcaatcagcctygtaggaacatgctcctgaaatgcaggctgaaggatcactgtcttcaaaagcccaaataaaggagagacactgaaatattgatgctgagcaaaaataatgtatgaacacaccaacatataatgatgaatccctggcgcttgttttatacagactgtacataaacraagactgttcaatgcagattttattttttgaaattatattttattgttagagaaatttaatacactgtatgcccttagtctttgtgtcatttactatgaaaggataagaggagctttttttgtactaatattcatc

SEQ ID NO: 8337 - DNA, 512 bp, Chicken  19866894202912_5
gagatattggtgggaaggttcaacctctgctgtcataccaccamcatcagcctgtgtcatcgtgaaccaacgtaataaaataggaggcattactttcagagcatccstmttacaaataaacaggtcaatcagcctygtaggaacatgctcctgaaatgcaggctgaaggatcactgtcttcaaaagcccaaataaaggagagacactgaaatattgatgctgagcaaaaataatgtatgaacacaccaacatataatgatgaatccctggcgcttgttttatacagactgtacataaacraagactgttcaatgcagattttattttttgaaattatattttattgttagagaaatttaatacactgtatgcccttagtctttgtgtcatttactatgaaaggataagaggagctttttttgtactaatattcatctaccattgatagaaactctttcacatcatctgaaactctgcctggctcttgtttattcagttaaaataaagatgat

SEQ ID NO: 8338 - DNA, 599 bp, Chicken  19866894202914_1
  misc_feature (1)..(146): n is any nucleotide
nnnnnnnnnnnnnnnnnnnnnnnnnnnnnnnnnnnnnnnnnnnnnnnnnnnnnnnnnnnnnnnnnnnnnnnnnnnnnnnnnnnnnnnnnnnnnnnnnnnnnnnnnnnnnnnnnnnnnnnnnnnnnnnnnnnnnnnnnnnnnnnnnnattacatgttgttgccatgtgacagatggcagcagaggggcagtctgacaaaatggtgtctgacatggaagtgcagatgaagcaaaggtgtgtcaatgaattcctccatgtgcaaaaaattgcactcattgacattcatggatgcttgctgaaygtctgtgtagactaaactgtggctgtgattatagtgaggcagtggtgcattttggcagtagtgacagtgacatgaaggacaagccaggttttggatggccacgcacagctgtcacactgcaaaataaagagcgtcttgatttggtcatctgtgcaaatcagtgatttatgaccaaggaacatatgggcctgaatatcagcttcagtgcattgtaaatgatggtagcaatgttggatatcaaggcctttgtgccaggtgagtcccaagaaygctcatgcagaagcagaagccttattcaa

SEQ ID NO: 8339 - DNA, 600 bp, Chicken  19866894202914_2
ctcattgacattcatggatgcttgctgaaygtctgtgtagactaaactgtggctgtgattatagtgaggcagtggtgcattttggcagtagtgacagtgacatgaaggacaagccaggttttggatggccacgcacagctgtcacactgcaaaataaagagcgtcttgatttggtcatctgtgcaaatcagtgatttatgaccaaggaacatatgggcctgaatatcagcttcagtgcattgtaaatgatggtagcaatgttggatatcaaggcctttgtgccaggtgagtcccaagaaygctcatgcagaagcagaagccttattcaagtttgtcaggacctactgaacctgtaggaggctgaaggtgacagtttcctggaccacatcattaccagtgatgagatgtgttgccactgtgagcccggagtcaaaatgacagtctatgaaatggcaatgtgtgagttctccacggaagaaaaagttgaaagacacagttctctgtgagttaagtgatgtgcactgtcttttgggatgggaaaggcgtggtccatctgtatttcctggaacccagacaaactatcaaatagtgttattgtgc

SEQ ID NO: 8340 - DNA, 600 bp, Chicken  19866894202922_1
tagactattattattatactagtatagactattattcatcttagatcttcagcacagttaatttattgtcaataagcagatgagactatggacagttttctttaatacggtatataagtgcatcattcttagactgtgatcccttttacctctatttccattatctctctccttccatttctcaaacctgtagtttgctaatcagtgatggatacagaaaaatatcatattttgagagataaaattactgtccgagtaaatgctagcgcaatcagagctgaacaacacaggaaccttacratttccagacttgataaaactgtgaaccaacaacagcagcagaggggtcccatttttgagtgcctcttctgtttacagtcagtcaagaagacagtgtaactgtatgaaaagcagttttattaggatgcttgaaagtgcagtgtgtcttgccaacaagacagaaatatagcatttctctttattgtgtactcagtgtcatagaaatttttcgacagaagtgttgaaagaaatcaaaacaatttcttctgctgcaatgttatataaattgcattagatttgacaaccacaatgaaatgaaac

SEQ ID NO: 8341 - DNA, 599 bp, Chicken  19866894202926_1
  misc_feature (1)..(153): n is any nucleotide
nnnnnnnnnnnnnnnnnnnnnnnnnnnnnnnnnnnnnnnnnnnnnnnnnnnnnnnnnnnnnnnnnnnnnnnnnnnnnnnnnnnnnnnnnnnnnnnnnnnnnnnnnnnnnnnnnnnnnnnnnnnnnnnnnnnnnnnnnnnnnnnnnnnnnnnnnctctgtgtttcctgaacacctccagggacagtgacagcaccagctccctgggcagcctgtgccactgcatcactgctctttctgagattaattttttcctaatatccaacctaacagtcaacttctgcactatccttaagctactgrgatgcagccttttgtccagggagacaaaaaggtctttgccataagcatccacgggccatttgcaggtagtggtcagcaaatgtgcagtagcaacaagtagcaaaatagctgtgtgggactgccgcctgcaaacagaggaaggatttttgcatgtttgtgttttagtaaactaatgcgtttgtttattcattcctttctcatttaggcactttcattttccgcttatcaactgcaaatgtaaggtctcaaggtttccaattgattctgctttataatgctacggggaggcagaagctatc

SEQ ID NO: 8342 - DNA, 600 bp, Chicken  19866894202932_1
ttactcatgccagcagtccaactgtggattgtaggatggcatttatatcacagagcctgttacagcaggtgttttttccttttttttttttctttttttcttttttttttccttcctctaaaacatgctcattccttcagaaaatcagctgcatttggcacctattgtaagaaacgctgattgaaatttccaaactgctctaaccacagagaaagaaatcttctaatgttggtgttgaaacacaactttcagttttaaaggctgagtgtccgttttttcttttctaataaataaataaawaagttaaatgctaaagcagcaagcaagcacactttacagtctattgcatcgggctctttttcagtaggttggctcctgccaacagcaggttcagaactgccagttctaattaaaaacttaattttaaagatacatttcacagtttattcatggcagtaagtccttcccactctcagaaatttagattgttagattgagcaaatggaaacagctagttttctaatgattcccaagtaatggctttagctaatttcttttggcaatccatgattgatctcctatggctactgatatcaattt

SEQ ID NO: 8343 - DNA, 600 bp, Chicken  19866894202932_2
tactgatatcaatttcttcttttagaccagtcacctggagtgggctccctcaattgtgtccatttctttgcccagtctttaactgcattttattttcctctgtaattttgtattgcctcagctcaaaaagggtcaaagattattctcatctcaggaattccagtgacaaatccttttagtactcccagttgcaacggacaaacaattgccatcataaactctatataagtaccactgtgaaatctatgatttataagcatactccgtagcaaaaacaattctgatagcccttgcctctcyctgctgtggtaagctctcagcctcagaaataaaagaaaagtgaaacagttttctgccttctagattcagtgtgaaaacactggcttcaacatcaaagttctttctgaacacaaactctagaaatgccacacgtatggatgtctaaattttgcttggggctatttctggaccagtaaggcacacactgaattgagttttgaaggagcagactgtatcataacctcttgactcaccgtgtgtttacaattattgatccaaaagccagtatgcagtataatcatttgcatcataaaaggagag

SEQ ID NO: 8344 - DNA, 600 bp, Chicken  19866894202940_1
gcatgttattagaggcaaaccacatgtaacatctctaactgcagagtgaaaagggtggggcgaaagttcttcacaaagagctggtgagcaaacccagctgtggagataggctgatgggcagagcaagctagatgctgtttccaactcctttaaatatatcagccctggttccacagaagtctagtttggatgctggattttgtttctgaatgaataatgtgttattccagaaaaaaaaatgacatgctagtgactacaagtggaacaacactgccacactctaaccttaccatggctcaycgaggccttgctcactgtgggatcctgctgttagcctcactgctacattttgtcatttttgcatttaaaaaaagttatttagatagggttagaagccctttttgtagtggactgcctatagcatctgggccactgtgcagagatgtcaccaccatgacatgtgggacatgtgggctccatctcccaatggaacccaggccatrccagtcgggttccattggcaacacgcatcccggctgctctgcagcatggctgcctacctcagtcagatagagaacaaggaaaccaagagggaaccat

SEQ ID NO: 8345 - DNA, 600 bp, Chicken  19866894202940_2
ttctgaatgaataatgtgttattccagaaaaaaaaatgacatgctagtgactacaagtggaacaacactgccacactctaaccttaccatggctcaycgaggccttgctcactgtgggatcctgctgttagcctcactgctacattttgtcatttttgcatttaaaaaaagttatttagatagggttagaagccctttttgtagtggactgcctatagcatctgggccactgtgcagagatgtcaccaccatgacatgtgggacatgtgggctccatctcccaatggaacccaggccatrccagtcgggttccattggcaacacgcatcccggctgctctgcagcatggctgcctacctcagtcagatagagaacaaggaaaccaagagggaaccatcccctgcacagacatcattgctccgtgctccagagcagctgcctgaggccccagaggccactgtgcccttccctccagtgactgctgccccaatgccagcacggcagcaggatggcctaggtggcactaaggaccgaggcacccaaagaggctgccatctttcagccaaggaacatggcaacaaagccaatgactgcccagcc

SEQ ID NO: 8346 - DNA, 600 bp, Chicken  19866894202969_1
catacaatgcttgttttagtagtctgaatacatcttaaaataaatggaaaaccaggaaaaatactctaattccaggctaacatcccacaggtataaagggatgtaatttgtatttaaaaatatagactacagttgcatcttcaaacatcctcaaattaagcttttcttatcccatcaagtattttaaataaaacctggccattctcaataggaaaacagagatagatggattgatgacttaatatactcgccctaatggacaaaacattgttacatcaaacacaagaaaatagggtcacrgctgcggtatttgcagctatagataaatttacataggaagagttttaaacagaaaaagctagagtgtccaaacacttrttttcacaagcatttaggagtagtaataatactgcattattggatgtctcatagtttttgggaaaaaaagtaggaaaaagaacatgtgcactgagatggaataccagctcacgtgattcagatggttagtttaatgcaagttaaattggtatacaacagattattgtttacgtgattaaaccagatgtgaaagcagacagaggtaggcaggatctaggctgc

SEQ ID NO: 8347 - DNA, 567 bp, Chicken  19866894202969_2
aacatcccacaggtataaagggatgtaatttgtatttaaaaatatagactacagttgcatcttcaaacatcctcaaattaagcttttcttatcccatcaagtattttaaataaaacctggccattctcaataggaaaacagagatagatggattgatgacttaatatactcgccctaatggacaaaacattgttacatcaaacacaagaaaatagggtcacrgctgcggtatttgcagctatagataaatttacataggaagagttttaaacagaaaaagctagagtgtccaaacacttrttttcacaagcatttaggagtagtaataatactgcattattggatgtctcatagtttttgggaaaaaaagtaggaaaaagaacatgtgcactgagatggaataccagctcacgtgattcagatggttagtttaatgcaagttaaattggtatacaacagattattgtttacgtgattaaaccagatgtgaaagcagacagaggtaggcaggatctaggctgcctagatctcattcttcatttactcttttcatcgtgaagggaagga

SEQ ID NO: 8348 - DNA, 600 bp, Chicken  19866894202972_1
caatttaaaacaactttgtttttaacaaaagtctccaacatgctaaggtactatgcaagatatatgatatcaaaatagaagataaatacgctgtattttttgttagacagaataaatccacttttttcaggttctatggaattcttctgtgaagaacttttcatagtttcagtagcgtacaatttgtagataaaataagtttgtatgatttttacatcaaaatctgattgcatcagctgtgtttataaatgtaatatgggcatttttcccccttcagacatctgagttacagtattctcyacatatgaagacagtctcatccagcactgaagaaacccttcacaaagcctgaaggtggtacttcgcaacaccttctacacattcatactaagacaagaatttcggcgttgtctttctattagtatcccgacccttctcatgcaaacttacctctgctacaaagatgattattacacagtcattcttttgcttttcagaaagtccatacaataaggactgcagagtgctcatcaggtaactttgtttttcccttttcacggtaggaatacccatcaccagtgagactgcaaagaaagaaat

SEQ ID NO: 8349 - DNA, 599 bp, Chicken  19866894202984_1
  misc_feature (1)..(167): n is any nucleotide
nnnnnnnnnnnnnnnnnnnnnnnnnnnnnnnnnnnnnnnnnnnnnnnnnnnnnnnnnnnnnnnnnnnnnnnnnnnnnnnnnnnnnnnnnnnnnnnnnnnnnnnnnnnnnnnnnnnnnnnnnnnnnnnnnnnnnnnnnnnnnnnnnnnnnnnnnnnnnnnnnnnnnnntagtggttggggtctactacaggccacctgatcatgggaacctgttgacaaagtcttgcttcagctacaagaggtgtcacactcacaggctctcatcctgataggggatttcaaccatccaaacagggaaaamaacaggggaggatatcttcctggtcagtatattggacagaccaatcagaagtacagtgttactaaatctggtgctcacyaatgtggagaagatcattraagaagactggaggcagtctgggctgtaatgactatggcctagttgagtacatgtctttgaggaacataggcctggcaacagaagagtaaggacyctgaacttcaggagagtgaacttctggctatttaaggaattattggatgagatcccctgagaaactgtccttaggaacaaaggaatggaacagaactggcagcaat

SEQ ID NO: 8350 - DNA, 599 bp, Chicken  19866894202984_2
  misc_feature (1)..(88): n is any nucleotide
nnnnnnnnnnnnnnnnnnnnnnnnnnnnnnnnnnnnnnnnnnnnnnnnnnnnnnnnnnnnnnnnnnnnnnnnnnnnnnnnnnnnnnnntagtggttggggtctactacaggccacctgatcatgggaacctgttgacaaagtcttgcttcagctacaagaggtgtcacactcacaggctctcatcctgataggggatttcaaccatccaaacagggaaaamaacaggggaggatatcttcctggtcagtatattggacagaccaatcagaagtacagtgttactaaatctggtgctcacyaatgtggagaagatcattraagaagactggaggcagtctgggctgtaatgactatggcctagttgagtacatgtctttgaggaacataggcctggcaacagaagagtaaggacyctgaacttcaggagagtgaacttctggctatttaaggaattattggatgagatcccctgagaaactgtccttaggaacaaaggaatggaacagaactggcagcaatttaaggatgcctttctgatagcacaagagctctccattccccagcataagaaactgagtacaggaggcagcaaaccggc

SEQ ID NO: 8351 - DNA, 599 bp, Chicken  19866894202984_3
  misc_feature (1)..(69): n is any nucleotide
nnnnnnnnnnnnnnnnnnnnnnnnnnnnnnnnnnnnnnnnnnnnnnnnnnnnnnnnnnnnnnnnnnnnntagtggttggggtctactacaggccacctgatcatgggaacctgttgacaaagtcttgcttcagctacaagaggtgtcacactcacaggctctcatcctgataggggatttcaaccatccaaacagggaaaamaacaggggaggatatcttcctggtcagtatattggacagaccaatcagaagtacagtgttactaaatctggtgctcacyaatgtggagaagatcattraagaagactggaggcagtctgggctgtaatgactatggcctagttgagtacatgtctttgaggaacataggcctggcaacagaagagtaaggacyctgaacttcaggagagtgaacttctggctatttaaggaattattggatgagatcccctgagaaactgtccttaggaacaaaggaatggaacagaactggcagcaatttaaggatgcctttctgatagcacaagagctctccattccccagcataagaaactgagtacaggaggcagcaaaccggcatggctgaacacggacctt

SEQ ID NO: 8352 - DNA, 600 bp, Chicken  19866894202984_4
cctgatcatgggaacctgttgacaaagtcttgcttcagctacaagaggtgtcacactcacaggctctcatcctgataggggatttcaaccatccaaacagggaaaamaacaggggaggatatcttcctggtcagtatattggacagaccaatcagaagtacagtgttactaaatctggtgctcacyaatgtggagaagatcattraagaagactggaggcagtctgggctgtaatgactatggcctagttgagtacatgtctttgaggaacataggcctggcaacagaagagtaaggacyctgaacttcaggagagtgaacttctggctatttaaggaattattggatgagatcccctgagaaactgtccttaggaacaaaggaatggaacagaactggcagcaatttaaggatgcctttctgatagcacaagagctctccattccccagcataagaaactgagtacaggaggcagcaaaccggcatggctgaacacggaccttctggtcaaactgaaagataaggaaaagtgcaggcagtggaagcagggatgagtggcctgggaagaaaagagacagccaaaagagagtgtgtcccct

SEQ ID NO: 8353 - DNA, 600 bp, Chicken  19866894202986_1
attattataattcaccatgtgacttccttaagtctcacacaaacgcccttactctcccaaggaaaccttctcgattcttcacgcttttccttgtatgaatgtgctttattatcccacgataggtggtgacaattaatatgtacactggttgggaattctttctggcatctgctttcccctgagactattgaaacggaggcatttacatatgtatagtacaatgaactcagtcttccttaacatcatattttacaaaaatggctgtgatatctgtgacagcattatgattccattacatgyaggaggaagatctaggcctaagatacttgcttggctacaaattaggaattctgatgtgaaagcacaaatagcactaatggggacttacaaatactttgagtataaagatatgctttttaaaaaagtgattctagaaagcaatgaatatttataacttttttcatcattcatataacatgcaagcatgaatcttgaggtttctttaaacaacagaacacagatcgtaagtatttttttcactcagaattgaataaaatggtttaacaaattgtaaaaaacatgccactcaaaaaagtcaat

SEQ ID NO: 8354 - DNA, 600 bp, Chicken  19866894202990_1
tatgcactaagccaaaacaaaaaaaggaaaactgaaacaaaaatgcaacaatagcaatacgtacacacccgcaacgcaattactcaccaactagctggcgatcaggcggctcaccaacccacgcactgctcctcacaaggtcgcagccctgcagccgacgcccggcagcccccacagctttatcgccgtctcgtgccgtggaagaaccgttggccgaactcggagcacctgtgcgggccccgccccgcccctgcggccgcgtgaggggcggctctgccccaccgcgtggccgcgctcccygctgcagccgaacatcggcgtgctgttaacaacgacttggctgaaaccaaaacgtatcggtatacagatgctaagttccttagcatcagagaaggagtcttatttattttacaatcaaacccaacatgtattttgaataaacttaactgaccttcaactttgaagagtgatccagtaccattcattctagggtcactgaatatcctgagttggaagggaaccagaaggaacaccgagttctgtccctggctccacacaagaccactcaaagtcagatcaattctttggataaatgactgg

SEQ ID NO: 8355 - DNA, 600 bp, Chicken  19866894202991_1
aaaagcggcctggtagagagctacagctttatattctgtcattttgtatacctcactgcataaattctgaccaaatttaaaaaaaaaaaaaaaaagaaaacacaaaaaaactttaatatggtcttaattcctttttatttttaagaaaaggaatttcagtattggctgtaatccctgagaaatgagaaacacacactgctagtttacgggtctctgctgaatgttgattttaacctacaaagtacttcagctcattagcaggtgattcaaatgctgcttgtgctgtactgaaagcaaagrgcaccttttgagaaatacatgctaatgcaaactgtaaacacttggattatttgggacttacagaaacagtattcctcacggactccttcacagtttggygaaccaactcatgacacgctggatgctgaactattcttgctgtgtcctttcagaaatttcaggcaaataaaatgcgtatgtatgtgctatgtgttaggtgaccacgtgggatatatctgagatgttgtctcagtctgtttccatcttgaaaaagcaggatgggtatgttacctctggacatctgccctgcctgtggctgct

SEQ ID NO: 8356 - DNA, 600 bp, Chicken  19866894202991_2
acacaaaaaaactttaatatggtcttaattcctttttatttttaagaaaaggaatttcagtattggctgtaatccctgagaaatgagaaacacacactgctagtttacgggtctctgctgaatgttgattttaacctacaaagtacttcagctcattagcaggtgattcaaatgctgcttgtgctgtactgaaagcaaagrgcaccttttgagaaatacatgctaatgcaaactgtaaacacttggattatttgggacttacagaaacagtattcctcacggactccttcacagtttggygaaccaactcatgacacgctggatgctgaactattcttgctgtgtcctttcagaaatttcaggcaaataaaatgcgtatgtatgtgctatgtgttaggtgaccacgtgggatatatctgagatgttgtctcagtctgtttccatcttgaaaaagcaggatgggtatgttacctctggacatctgccctgcctgtggctgctggctctgctggaccaggtgattagttaattcgagccaggctcctcctcttcagtggtttgatcaaggctcttccttccttgataattagtaaactataa

SEQ ID NO: 8357 - DNA, 600 bp, Chicken  19866894202995_1
cttttctcacctctgtagacctctctcaggtacagctttctgtagtagaaaacgactcatcatttcagtttgatctgaagttacgtcttaaaatagatttaaaaaagcaatgtaggataaaatagtgttgatactacaactcccagtgatttcaacaaggctagactatatttacaacaaggatcctaacattcattgatataataaagaatctgtgtttgttatgtattttcaatgtgaaatttcctcacttaaagagctgttttgttgctagccatcattagctaacataaaaatttstgtgcatatgtagagtaagttctgtgtgtctatagataaatgtgtgtatttaattattcaaaatacctctgtagagattttgtcagagagaaaattatggattctgtatttctgttgaaaacaaattaaacttctgagaattaaattaaacttctgaaaaaaaaaaaaagactttgaaagaggaatatatcagcttaatgtgcatttggatataagaaatctattttggcattttttcttcttacatagtttacaagagaggtcctactgtgaaccttccaatattttaaaataatgctc

SEQ ID NO: 8358 - DNA, 600 bp, Chicken  19866894202996_1
caaatcagttcagtgttcttcaaatgggggtgggagtaactcaggtctttatctgaagaagttaaatggattttattctgggaaaaaaaatgatgtctagtcccagaattgctaaattgtactggcatactaaggctgttaaaaggtctcttgccaagctcaattctagctagtttcaagaatttagggagaaagtagtttctggcatgacaacttcctccactttgtcacaccactgttacgacactcttagaaataagttttgcaggacagttgggaggggagctgtatgacagcacrgaggcactgtgctctgcatattgatttcaccaaagtaggcagagatttaaaaaagaaaacagttctctctttggtcatagaaatttcaaatattgcatgcatcgtgaatttggttgcaatttatctgcatttattaatatcccaatgaacagaatatctttatttcaaactcaaactcagtagcgatgaaaccagattagcaccttcaagtcttccaaacaatgaaatactaaatggcagttcttccccttgctcttttatttcaaaattagagatacttatgctcccccccaaaaaatt

SEQ ID NO: 8359 - DNA, 600 bp, Chicken  19866894202996_2
atctttatttcaaactcaaactcagtagcgatgaaaccagattagcaccttcaagtcttccaaacaatgaaatactaaatggcagttcttccccttgctcttttatttcaaaattagagatacttatgctcccccccaaaaaatttgttttaagcagtgtattataacaggcagtatagcaacagttaaaaagattgtttccgtctttgaatatacccctcccctttacatgtcaaatcagctttgaagcttcagatttgattttgggcacagtgttagaatttgaagttattatgataycagagagacactgtttttcttgaacaactgcttttgttatggagtgattaaaaactaggctacctaataaatcaattttcctagctggaaagttcattatgccgagacaatttaagtgcccacagacatgttttgacatttggctatgacatcttcactgaaaggttcaaaaagttcttgtataaagcaaaatgcacttaaaagacacctccgaagagggaaaaaataagcagaacccatggacatacgggaagatggtagagtagcactatcaggaattcagctcagttaaaaacgtca

SEQ ID NO: 8360 - DNA, 599 bp, Chicken  19866894202997_1
  misc_feature (1)..(101): n is any nucleotide
nnnnnnnnnnnnnnnnnnnnnnnnnnnnnnnnnnnnnnnnnnnnnnnnnnnnnnnnnnnnnnnnnnnnnnnnnnnnnnnnnnnnnnnnnnnnnnnnnnnnnaagacgtcccttctgcagctgcctgaagaggcccatctcagtctgtaagcgcttggccatggtaggtgcacaggagaagaacttctgatggggatgcagaaagtactgctaaaactgaaatttcaccagcagagtctgtttcagccccaccttgccccacaaccaaaatccacaggtttggctggtctaactgtgcctstgcttgaggctcatgccagccatcgctgtcagtcagggaccacacctcttcacacccaaaatgcacagagtagcagcagcagacagaatcccacagtccttgcttaagttttgctctacgctttgaagtttcacagctatggaaggagtgggagtttttgttttaacccaacaagactggtggtaaggccctgggcttgagtggagcaacccaaaaccattttgccatgatggtttatagtgctggagggaatttccactggatgtgctattacactgctgtgtctgtcatcaaagtaa

SEQ ID NO: 8361 - DNA, 600 bp, Chicken  19866894203003_1
cagccccttgccccgagagcacaatgtggggtgatgcgtgctcctgcactgggtggggagtccccatggctgtgcagcccctcatgataagtaaaaggatgaaagaaaagctagaaatttagatatgcaggtgttagtatatttttaatccaatttttctgaaaatcaggttgggatccctgctgcaagtgtatgattatatgattaaatgggctgtattgtaatggatgcgtctgcgttagaatcactgggttttgcagtagtaaaacatcagaggatttttttaaaaagaggaaaaaratgaattaaaattggacactgttgtaaaaagtcctctactttcttaacattcatacatttaccggggttattgccaaccctcaaataatgatggcacaaactaacccacgttttagctttcttaggctcacaaagccatcacaactcacaggctgcagcaacatggtgtttggctaccatatatttattaacttctcagctgatactgagctgataattttttaaaaactattgctaatcttatgttttaaccattaaaggcaaagtgtaatgcttggaagatcctgccagtgcatatga

SEQ ID NO: 8362 - DNA, 600 bp, Chicken  19866894203008_1
agggatgctgacactgaactgcaggcctcgatcaaatcagggtccaaactgccaataccagccacttctccacagttactgaagagtttacatggacacaggcaatagcattagcagaacatcttacctgtcttctatttaatatctggtatttataggttctgtactagactggtaccacaaactgcaaggccttgtgcgaacattatagcagagcgtgaccattgcaaacggatttacttgcaattgttatttagggagcaacatgtgtgcagtcagtgttgtgttttgttgctgtaytgtaggagtgctaaagggagagatctggctttgaaacaagaagaattgaagcatatgagatgtcaatagatatagacctctatatctgttgaggacagtcaggcatttgggggttctggaccaggctctgtttgagtcagattttttattttttttgcaaagtcaacacaaacaatgggtttgttcttgtaccacagatgtagtctgcactgctgaggaaatgcctgcattcatcagtttttctcatactggaagatttatgtccaactatcagtttctctagtccagccaagaaacagt

SEQ ID NO: 8363 - DNA, 600 bp, Chicken  19866894203013_1
acaaagggttagtctcttgccaactgagaagccattggcaatgtatttctatttccttcaatgacaggaagaaaaggttgttttttctccttttaagcactcatgcttaaacatccctaattgcaatttgtcacaacaacaactattactactaaatggttaaatcaaacaactcaacttctgaaagcagcagttttaaagcaacaatggttctgcagctgtatgtttcttttctttccaacagtcacttatactacttaacctattacatttctgacgtggcagatatatcccaattaygcaatcattacaaagaaacagagaaacaaatgtgaaaggacaaaaacaattctgtagactgcctaggaagasaaataccctatttaatattacggatgatatatggacacaactgatgggagtccaattgatgtaagcaaagacaaggtttcacttcaactcttctcatttcagcgtggtccctgcaagttgcacagcctcgttctcaagactgaaagccacaaacatgtcaagcttgctgaaatgtctttacacacttcaaccatctccctcttcaaacacaggcatctctaaggcaat

SEQ ID NO: 8364 - DNA, 600 bp, Chicken  19866894203013_2
aaaggttgttttttctccttttaagcactcatgcttaaacatccctaattgcaatttgtcacaacaacaactattactactaaatggttaaatcaaacaactcaacttctgaaagcagcagttttaaagcaacaatggttctgcagctgtatgtttcttttctttccaacagtcacttatactacttaacctattacatttctgacgtggcagatatatcccaattaygcaatcattacaaagaaacagagaaacaaatgtgaaaggacaaaaacaattctgtagactgcctaggaagasaaataccctatttaatattacggatgatatatggacacaactgatgggagtccaattgatgtaagcaaagacaaggtttcacttcaactcttctcatttcagcgtggtccctgcaagttgcacagcctcgttctcaagactgaaagccacaaacatgtcaagcttgctgaaatgtctttacacacttcaaccatctccctcttcaaacacaggcatctctaaggcaatacatataacagtcactcctagaagcacaccataacttaattctggtgtacataaaatggaagaatgttctga

SEQ ID NO: 8365 - DNA, 600 bp, Chicken  19866894203015_1
aacatgctgttcagtgcactagtaattggcttttagcttatatttacaaatggacatatattttgaatgctttcttcaggtgaaataaagcagtggcaaacatggcctaaaacaaaaaatattccagtgcctttagatgcactacataaatcatgatggcatcctgccaaatttgcagccaaatttaaatgtaactttttttcttttttatcattaatttctttcctgctaagaattcacaatgtctttattgcagaacttaaataaagtagctacggatctctcaaataagaatgggamaatttgatagtatattctcatgtgtctgaatgcaggacagatgaataaaatacctaggtagggcctctccatccagggtacattccaacacctcagccaggagcatggcagatggagaacagcaagagaatgcccacatattgagtagaacctcgggatgtggactagtgaaggacagtgcaggtcaggatcatacctagtgagcaaaggcagtgtcagacaaaaccctggcataaggaaatataaactatgaaaaatattgtcttgtttgcaggtacagcctgaataatgctgtgtttc

SEQ ID NO: 8366 - DNA, 600 bp, Chicken  19866894203023_1
tgcatgctggttgcatgcagacaggtgggcaggtaaggcacctgcgaaggaatgtttggctgtgggacttagctataagggaagcagtcagaaacccatcagggtttggagactccaaactgaacgaaatgtaaatccatttgccagtgagctgaaagggcaagaaagttggaggtgttaactgaaaaagcaaaagaaattaaggccattgttctatgagggggaggcacactcataatgtgaaggaaagagccagaggaaagtgagctacaatggatggtttgagccagtcttatagcytgtggccactgaaagaggaaggtcccacttctccacccactctctcccttcctacttagccagatgctgcccctgcccccaytcctctggttttcaattcactattgtaaattcaacctgataaaaccccacaggaagaaggcaagctaaaatcatagaatcatagaatcatttgagttggaaggaaagttttaaggtcatctagtctgacaccccataatgaatggagatacaaggagctagatcacactgctcagagccctctgcagcctgaccttgagtgtctccaggatcggggca

SEQ ID NO: 8367 - DNA, 600 bp, Chicken  19866894203023_2
agcagtcagaaacccatcagggtttggagactccaaactgaacgaaatgtaaatccatttgccagtgagctgaaagggcaagaaagttggaggtgttaactgaaaaagcaaaagaaattaaggccattgttctatgagggggaggcacactcataatgtgaaggaaagagccagaggaaagtgagctacaatggatggtttgagccagtcttatagcytgtggccactgaaagaggaaggtcccacttctccacccactctctcccttcctacttagccagatgctgcccctgcccccaytcctctggttttcaattcactattgtaaattcaacctgataaaaccccacaggaagaaggcaagctaaaatcatagaatcatagaatcatttgagttggaaggaaagttttaaggtcatctagtctgacaccccataatgaatggagatacaaggagctagatcacactgctcagagccctctgcagcctgaccttgagtgtctccaggatcggggcattcacacctctttgggcagcctgttccagtgcctcaccacccttatcattaaaaccttttttcttatgcctagacaaaatct

SEQ ID NO: 8368 - DNA, 600 bp, Chicken  19866894203026_1
ttacctcttgaatgttgttcagtctatcgaatgtgcaatatggtgggatttacaaggcatttttatagcaaactttgcatcagagaatttctgactgaactgtacatacagtattataagcatatttcaaacttctgggaagatagaaattttacacactgttctaggaactaatacagactccaagagtatgaagagtttagagaccaactagaaagcagtctgcatgtggattcaagagttaaatttcttgttcacctaattaaacatcacttagcaagggaggatcagcagcatgawgtaaaagaagatgggctctgagtaggtactggtcccatccctaggctccacatacaagggagacaggagaggctgaagtagttttgagcctctgcagcagagactgcttgtctgcaagggtgtgagtctgaagccattactgctgtatatragtacctgttctattctcgaagttgcctgtatagccttaattcttttattctgtggatatttaatatggggagcagtctctaatgctgtagatcgttactgctttgcaaatggtgcagtatttttataaaactttacaaaactgtaggg

SEQ ID NO: 8369 - DNA, 600 bp, Chicken  19866894203026_2
ttacacactgttctaggaactaatacagactccaagagtatgaagagtttagagaccaactagaaagcagtctgcatgtggattcaagagttaaatttcttgttcacctaattaaacatcacttagcaagggaggatcagcagcatgawgtaaaagaagatgggctctgagtaggtactggtcccatccctaggctccacatacaagggagacaggagaggctgaagtagttttgagcctctgcagcagagactgcttgtctgcaagggtgtgagtctgaagccattactgctgtatatragtacctgttctattctcgaagttgcctgtatagccttaattcttttattctgtggatatttaatatggggagcagtctctaatgctgtagatcgttactgctttgcaaatggtgcagtatttttataaaactttacaaaactgtagggttataaattccctcgtgttttctatggcagctggcttttctcctctgcaccagtgcaggggtttctgctctgtaggctgaaactctgaaataacatgtcaaaaagaaaggctttcaaaaaagacaaggatgggaaaaaataatgggaggct

SEQ ID NO: 8370 - DNA, 600 bp, Chicken  19866894203027_1
tggcagcagagattcaaccttcccaccagtattgcattacgtgttgttgctgtgcgacgggtggcagaagagggacagtctgagaaaacatggaagtgtgtatgaagcaaaggtgtgtcactgaattccaccatgtggaacaaatgaacacccgctgacattcatcgacacttactgaacgtttatgggcaccaaacagtggatgtgcacacagtgaggcagtgggaggtgttgtttctacagtggtgacagtggcagtggggcacctccaccggtgcagattcttgtgagcacagcatrcatgctcttggtcatcgctggcaaaaatgcacagctaatggtggttactacgctgaaaaacagtgttttgtagctgagaatttgctctatcaaacagtgttattgtactctttgtatcagctgtagtttccatggtaataaataggaggcattactttcagagtgacccatgtactgatatttcctaatctaatcaaacagctcttcttctccggatttaaaaaaaacagtgcattttgattaaaggaagaagaaggagaggaagaagaaaggaaataaaagcagcaggataaaaaagag

SEQ ID NO: 8371 - DNA, 600 bp, Chicken  19866894203027_2
agcgtaggaaattcaaagtgagtgtgaaggtataagaaactctaataacagtaaatacagaattgcacggtgaagcaaccttaagtctgactccagcaatgatttgagaaaaatcagacattctgagactaaccttgtccatccattacccgcagtgtcatcagatcaatggccacaaaactagaatgctttattctccatcgctctgaggttgtgctgactctggcccttctttacagccatgcacgctctacagaaaaacacatatttcacaaattcctcaccagacaaatagcccgytgaaaccatcactctgcacttgtcattctgattctatttaccccaattaaaaaaaggactgtgaaacacrgtggagttgaatctcggagaagcagagcctgacgccctgggaggtgctgggcagggcggtgagcstcgctttcctgatgcaaggagctgcatgccagcacagatacctgcccaggtccccaggaatggaggaaacagatytccctagctctgcttcaggtctcaacagcttccccatcgctgtgctggtgctgtactttcttcctctacrcccagcgttgcagtgtgctc

SEQ ID NO: 8372 - DNA, 600 bp, Chicken  19866894203027_3
tgaagcaaccttaagtctgactccagcaatgatttgagaaaaatcagacattctgagactaaccttgtccatccattacccgcagtgtcatcagatcaatggccacaaaactagaatgctttattctccatcgctctgaggttgtgctgactctggcccttctttacagccatgcacgctctacagaaaaacacatatttcacaaattcctcaccagacaaatagcccgytgaaaccatcactctgcacttgtcattctgattctatttaccccaattaaaaaaaggactgtgaaacacrgtggagttgaatctcggagaagcagagcctgacgccctgggaggtgctgggcagggcggtgagcstcgctttcctgatgcaaggagctgcatgccagcacagatacctgcccaggtccccaggaatggaggaaacagatytccctagctctgcttcaggtctcaacagcttccccatcgctgtgctggtgctgtactttcttcctctacrcccagcgttgcagtgtgctctgcagtagagggattttgccattttgcagtggaaaggttctttaaagagggcacaggggctggtttggaa

SEQ ID NO: 8373 - DNA, 600 bp, Chicken  19866894203027_4
tgtccatccattacccgcagtgtcatcagatcaatggccacaaaactagaatgctttattctccatcgctctgaggttgtgctgactctggcccttctttacagccatgcacgctctacagaaaaacacatatttcacaaattcctcaccagacaaatagcccgytgaaaccatcactctgcacttgtcattctgattctatttaccccaattaaaaaaaggactgtgaaacacrgtggagttgaatctcggagaagcagagcctgacgccctgggaggtgctgggcagggcggtgagcstcgctttcctgatgcaaggagctgcatgccagcacagatacctgcccaggtccccaggaatggaggaaacagatytccctagctctgcttcaggtctcaacagcttccccatcgctgtgctggtgctgtactttcttcctctacrcccagcgttgcagtgtgctctgcagtagagggattttgccattttgcagtggaaaggttctttaaagagggcacaggggctggtttggaacttctctctgttaccagatggctataaagaaacttctgaattcayaggctttcccatgcggagta

SEQ ID NO: 8374 - DNA, 600 bp, Chicken  19866894203027_5
gttgtgctgactctggcccttctttacagccatgcacgctctacagaaaaacacatatttcacaaattcctcaccagacaaatagcccgytgaaaccatcactctgcacttgtcattctgattctatttaccccaattaaaaaaaggactgtgaaacacrgtggagttgaatctcggagaagcagagcctgacgccctgggaggtgctgggcagggcggtgagcstcgctttcctgatgcaaggagctgcatgccagcacagatacctgcccaggtccccaggaatggaggaaacagatytccctagctctgcttcaggtctcaacagcttccccatcgctgtgctggtgctgtactttcttcctctacrcccagcgttgcagtgtgctctgcagtagagggattttgccattttgcagtggaaaggttctttaaagagggcacaggggctggtttggaacttctctctgttaccagatggctataaagaaacttctgaattcayaggctttcccatgcggagtactgaaggcaatctactttagcaggagggttggattagctgatccccagaggttccttccacccactacaattctg

SEQ ID NO: 8375 - DNA, 600 bp, Chicken  19866894203027_6
tcaccagacaaatagcccgytgaaaccatcactctgcacttgtcattctgattctatttaccccaattaaaaaaaggactgtgaaacacrgtggagttgaatctcggagaagcagagcctgacgccctgggaggtgctgggcagggcggtgagcstcgctttcctgatgcaaggagctgcatgccagcacagatacctgcccaggtccccaggaatggaggaaacagatytccctagctctgcttcaggtctcaacagcttccccatcgctgtgctggtgctgtactttcttcctctacrcccagcgttgcagtgtgctctgcagtagagggattttgccattttgcagtggaaaggttctttaaagagggcacaggggctggtttggaacttctctctgttaccagatggctataaagaaacttctgaattcayaggctttcccatgcggagtactgaaggcaatctactttagcaggagggttggattagctgatccccagaggttccttccacccactacaattctgtggttctgtgattctgtggctataagaaccaaagcacttttacatgtttgttctttgtggacctatcttt

SEQ ID NO: 8376 - DNA, 600 bp, Chicken  19866894203027_7
gctgggcagggcggtgagcstcgctttcctgatgcaaggagctgcatgccagcacagatacctgcccaggtccccaggaatggaggaaacagatytccctagctctgcttcaggtctcaacagcttccccatcgctgtgctggtgctgtactttcttcctctacrcccagcgttgcagtgtgctctgcagtagagggattttgccattttgcagtggaaaggttctttaaagagggcacaggggctggtttggaacttctctctgttaccagatggctataaagaaacttctgaattcayaggctttcccatgcggagtactgaaggcaatctactttagcaggagggttggattagctgatccccagaggttccttccacccactacaattctgtggttctgtgattctgtggctataagaaccaaagcacttttacatgtttgttctttgtggacctatctttcagctgtgcacaatctatattggtttttttaatgtcctgtaataactacagctgttctctctcgtttgcaggcgctgcagcagaagggagcagcagggtgggtggccaggagctgggaatacgggcttggaggca

SEQ ID NO: 8377 - DNA, 600 bp, Chicken  19866894203033_1
ttcacatatcctgttctaaaagcttgaatgacagtaaggtataggaccagatttagcatattattcacaagaactaccctagaaatgtctcccctactctgtccccactttgacagtgaagttctgagaacaactcttctgaaaattgcccattcacactatgaatatgttttcctgttttggcagagaggacagtgtcaaaattttcctcatttcctcattttcctcataagctcatctggcttaatttacttggtcaagagtcctggtttaaaatacagaaaataaagaaagaaaaakaaaagaaaaagtaaataaaaggaaaagtaagagtttcacaagattcacgttgattttggtgtttttggggggggagtggttctgtattttttttaaatagttattttggcatttatttcagaattcttctaaaaagggtcttatttacccttctctctgctacacttcttattttttcttttataaagtagatattgcactttttctccttcaggtcctcgagttctctccacccttcatcacttttacaccaattgcttcaaactgctttttaaattttcatagatttcctcaaacatc

SEQ ID NO: 8378 - DNA, 600 bp, Chicken  19866894203033_2
aaaaagtaaataaaaggaaaagtaagagtttcacaagattcacgttgattttggtgtttttggggggggagtggttctgtattttttttaaatagttattttggcatttatttcagaattcttctaaaaagggtcttatttacccttctctctgctacacttcttattttttcttttataaagtagatattgcactttttctccttcaggtcctcgagttctctccacccttcatcacttttacaccaattgcttcaaactgctttttaaattttcatagatttcctcaaacatcacccrtagtatgtctaattgatcttaacgtacttcagcttttacctaaaaaccaacaagaagccatatcaaaccagccttcttcacagcaactgttgattgttctcctttgccttcagacatgagtttgtattctcctttgcctctctgcttcttagccaagtattctttttgatatttcacaagtgatattcagactgcagctggttattcttactttgattgaaaaatcatatatatcttttcctctccgagtttggttccccaccatctgaaggaaagtgttgtttccatcttaggtctttc

SEQ ID NO: 8379 - DNA, 600 bp, Chicken  19866894203036_1
caggaaaatccacatccatatctgaagaccagactatagattaaggaacctacagccacccagacagcaagaagataaaacaatgggctgatttttttttaatgtattgcagccacagttcaccttctttttgatgtccatgaagttttttttttccttgatttgtttttttgttttttgttaaaaaaaaaaactaagaaggttttcatttaattatagcaaatgagtctttttgcatagctgtcaaagtctatgtgttcattataaaaatcagtaatgtcatttgcatacacatggaartgatgaccacagatatatttaacaytgtattccattccttgcactacagtcttctccagggtgatatttccaactttgatggttccttcctttgccactctgaggcagtcacatctgtttctcactttttttgtttgtgaattgggcagcagggaaggcctgcaggttttcagtttagatgtgtgaaaaataagtttttttttttcaaaagtaaacagtatcataaccaagaggccgagggtgtggttcagattaattaaaaaatatatttctttcattatagttcaatctagttacagt

SEQ ID NO: 8380 - DNA, 600 bp, Chicken  19866894203036_2
agaccagactatagattaaggaacctacagccacccagacagcaagaagataaaacaatgggctgatttttttttaatgtattgcagccacagttcaccttctttttgatgtccatgaagttttttttttccttgatttgtttttttgttttttgttaaaaaaaaaaactaagaaggttttcatttaattatagcaaatgagtctttttgcatagctgtcaaagtctatgtgttcattataaaaatcagtaatgtcatttgcatacacatggaartgatgaccacagatatatttaacaytgtattccattccttgcactacagtcttctccagggtgatatttccaactttgatggttccttcctttgccactctgaggcagtcacatctgtttctcactttttttgtttgtgaattgggcagcagggaaggcctgcaggttttcagtttagatgtgtgaaaaataagtttttttttttcaaaagtaaacagtatcataaccaagaggccgagggtgtggttcagattaattaaaaaatatatttctttcattatagttcaatctagttacagttcctctgtttatgtcacatcatttg

SEQ ID NO: 8381 - DNA, 600 bp, Chicken  19866894203045_1
actcccctggtgcaacttgaggccattccctctcatcctatcactgttacctgggctaagaggccaacccccacctcaccacaacctcctttcaggcagctgtagagagggatgaggtctcccctgagcatcctcttctccagactgaacaattccagttccctcagccactccccataagacttgtgctccagacctctcacaatttcagtgcccttctcttgacatgctccagggcctcaaattctttcttctagtgaagagcccaaaactaaacacagtacttgaggtgcagccccrtcagagctgagtacagtgagataatcacctccctgctcctgctggctgcactatttctgacacaggccaggatgccattggtttcttggctgcctggcacactgctggcctgtgttcatctgagcgtcaaccaacatccccacatccttttcctccactcagcgtgccagccactctccccaaggctttagcactgcctggggttgttatgatcaaagtgaaggacctggcagttggtcttgttgaatttcatcccactggcctcagcctatcaatccagcctgtctaggtccctctgta

SEQ ID NO: 8382 - DNA, 599 bp, Chicken  19866894203047_1
  misc_feature (1)..(72): n is any nucleotide
nnnnnnnnnnnnnnnnnnnnnnnnnnnnnnnnnnnnnnnnnnnnnnnnnnnnnnnnnnnnnnnnnnnnnnnncaacaggctagtgggctgacacacctgttcgagagaaaagctgccgtcaggtgggctcaagcctgctgtgagataatcagctcatgcccacactcgccccagtgaaaaccccaagacgtgctgctgaaaacatccaggtgccttcgctaagagaaacacaaatctgaggcaacgacttaactgcttagctctccttgcagctatcttcattcagtcctcttgcttaaygtgagaaacaccaaaaccccatgctgaagcagagcattaaccagtaatttctggaacaggcctgaaaacaacaatctgctgagtaaaatactgtagcctcccaagagttaactaaattcaagataggatgcagcggaaacccttggaggagttatcttagaaattacggtgcaaaacccaagctgggtgacagccagcagtggagctcaaggatgtcactgctgccccacgggtcgcctgctggcacaatgtctttacgctcatgaatatgataagatgaagcgcagggcaggcctgag

SEQ ID NO: 8383 - DNA, 600 bp, Chicken  19866894203047_2
aaacaccaaaaccccatgctgaagcagagcattaaccagtaatttctggaacaggcctgaaaacaacaatctgctgagtaaaatactgtagcctcccaagagttaactaaattcaagataggatgcagcggaaacccttggaggagttatcttagaaattacggtgcaaaacccaagctgggtgacagccagcagtggagctcaaggatgtcactgctgccccacgggtcgcctgctggcacaatgtctttacgctcatgaatatgataagatgaagcgcagggcaggcctgaggtcttygctgttcccagatgggaaaaaaaaacactgctagctttgaagcgtttccttgacccacagcggtgtctctcattttaatgcttactcaaagactgagatgagccactgaacagacaaataattcccttcacaaacagggctgtgggttttttgtttgtttggttggttgtttttttgtttttatggttcagggtggccgggtgcttttcttcttttcaaatcagagaactgcatttctgggaaggatccgaaaggttcactcagaagaaaggtagaagtaacgtcacccaccgcaaagag

SEQ ID NO: 8384 - DNA, 600 bp, Chicken  19866894203053_1
aatgggaatcaccacatttctacacatttggaacataatgaaaaaacttgagtttttctccaaataagcaatttgtgagtctacatgcctagaaatattctaagagaaaagctgttttcattataccttaaaaagattctgactgtggcagaccacagattgctcttttatgttgccaagacctaataaatagagctctatatgtcaaattggaactttgaatcaaaattaattaaaaaggaaaagcaattagaaatctgattttgacttaacatctcaattatgcatttttcatagttmttttatatgcatatgataggaatgcaggaaatgtgtactttggctgctctgaaagtaatgcctgctattttagtatgttggcccacaatgtcagtggcagatgctggtatggcagtagaggttgaaccttcctagcaatattccattacattttgttgctgtgtaacagatggcagcagaggagtggtctgacaatatggcatctgacatggaaatgtgtatggaccaaaggtgcgttgttgaatttgtccatgcagaaaaaatggcacccgctgaccttgcttgctgcttgctgaacat

SEQ ID NO: 8385 - DNA, 600 bp, Chicken  19866894203061_1
cctgaagatgtactttgccataatacattagatggcaaacagtactaaaactgtttaaaaaaaaactaaaaattttcagatatgctagtaaaattttgctggtaatttaaatagcaaaaaatagggaaaattattttttatcataaaaaaacattattttttatcataaaaaaacatcaaacccagacaaaaaatgtctgccagttcttctgggtacacaggataaatttttcaaatcctagcatttagatttagcactaatttacactgacattaattggaattacttacggaactaartttcctatgcaatgctttaaaaatataccttgatgcttccaactgtgtgccttgggctgctgttttggtacactgatatactgatttgataatgcatatctctatcagcgtgagtatgcagggacataggcttatctgcataaggaggtactgcagatcaggtcttcctgataaaatctgctgtggatattattacaacagaaatagatcttctgtcataaatcctattattaggtcattctttccttttaccacttgcagtttcttatggttttgtatgttttctataggcataaaaaa

SEQ ID NO: 8386 - DNA, 600 bp, Chicken  19866894203062_1
caagctgcctttattctaatagtgatggtcaaatgttatcagtaactaaagacacctccacatggcactacttcacttcttatgttttgactcagtttatgagagaggacaaaacagattaataatataaaacattacatttgttaatatttgcagtggtgaaccctgagagcagttaatatggagtaaatcaaaatctttgccaagcaattaagctcgcagaagataagcggatgacaattagtaaactcattagttcactgcacaaaagctgcagataacaggagtgcagaacatccrgctactctagttcacaggcactcccttaccatactgcaggcccagcacagtccttgctgccttcttctttcccattcctcacacaaggtggtcatgaccatcttgtttttcattctttactaatcctttgatttttgcatcttcttgaacagaattatagaattaaaaagccacccaacatcaaaaagaaactgattgctttcaggtgactccaggcagctgtgcaaagcaggtttccacaccaagaatgtcagaaaagatggagaaagcatgtgcagtgtggtggagaaacaaagaaca

SEQ ID NO: 8387 - DNA, 599 bp, Chicken  19866894203066_1
  misc_feature (1)..(19): n is any nucleotide
nnnnnnnnnnnnnnnnnnnatttaaagaaggaaatgtgagttttttccccaaactgagattcctgtagctctcagcccgcagtgcttccaggatgtgaaataacacagtcagcaggacaacatgtcagtcaccagcacagccaaaaatagcacgtgtacggccaaactcaaagggctaaaagggtgcacttagagcagatgttttaaagcttgtgcacaagctatgggcttattagccagcctgaatcaactgaaaaaggcctttgggaagtattaaaactcttggctaggacactcctytctctgttggaggcactggagattagtcatacttaatagtaaaaataaaagcactaacctgggctgaagtctcgttcagaggtttctggacctggcgtcattcttgctttgtgacacagctcattacatgcaccaagagtctggtctcaggaagaastaaccacggggagttatggttcaggagagcactatcctatgggggatggggtrgaagcaactacttcagaaatggagaaatttggtaatgacagaaagacaagaaatgggaaattctacaacaaaaaaagcacaatatacta

SEQ ID NO: 8388 - DNA, 600 bp, Chicken  19866894203066_2
acggccaaactcaaagggctaaaagggtgcacttagagcagatgttttaaagcttgtgcacaagctatgggcttattagccagcctgaatcaactgaaaaaggcctttgggaagtattaaaactcttggctaggacactcctytctctgttggaggcactggagattagtcatacttaatagtaaaaataaaagcactaacctgggctgaagtctcgttcagaggtttctggacctggcgtcattcttgctttgtgacacagctcattacatgcaccaagagtctggtctcaggaagaastaaccacggggagttatggttcaggagagcactatcctatgggggatggggtrgaagcaactacttcagaaatggagaaatttggtaatgacagaaagacaagaaatgggaaattctacaacaaaaaaagcacaatatactaaaagctgaggaacgctggcactcccagcctccttttgcttctagcccaaaacttacttgaagcaccagatctgtgacaacaggcaatattcaagagtctgccatttttcccacctggtacctcagtaatgcttgctgatgagcaaagccttttctctc

SEQ ID NO: 8389 - DNA, 600 bp, Chicken  19866894203066_3
ttgtgcacaagctatgggcttattagccagcctgaatcaactgaaaaaggcctttgggaagtattaaaactcttggctaggacactcctytctctgttggaggcactggagattagtcatacttaatagtaaaaataaaagcactaacctgggctgaagtctcgttcagaggtttctggacctggcgtcattcttgctttgtgacacagctcattacatgcaccaagagtctggtctcaggaagaastaaccacggggagttatggttcaggagagcactatcctatgggggatggggtrgaagcaactacttcagaaatggagaaatttggtaatgacagaaagacaagaaatgggaaattctacaacaaaaaaagcacaatatactaaaagctgaggaacgctggcactcccagcctccttttgcttctagcccaaaacttacttgaagcaccagatctgtgacaacaggcaatattcaagagtctgccatttttcccacctggtacctcagtaatgcttgctgatgagcaaagccttttctctccacccttattctttctgctgtaatttcacttttacgtatctcctagctataac

SEQ ID NO: 8390 - DNA, 600 bp, Chicken  19866894203067_1
aaaaaaaatacagcttatagaatgctgaaaacttcctctgtaaatacttagaagtttgtctcaaatattaatggctcagtatgtgactgacaaaatatacctgtctgccaaaaatagcacttctcactcagtttttgagttctcactcaaaaaaagttgagtttaagcctcaactttggtcatctgaagcaacagtaattttatgataaagtcccataatggtggtgtgataacagatggcacctattacactaaaagcattatacacaaattagtgtctcacatttcaggtgctttgarytggctgtgcgtttacagtatctgagctmtctttccctaccttaaccttagagatactacagctttttctrtaggccaaccttgccacctgttagaagtgctctrtatgttacttatattagacaggtccaggcttagggaayacggtggctacctctggaataccaatctaaaaaccatcaagaagcatccacaagtgcttattgccatgagattcccaaccatcctacaatgcttagttataggactgcattctccaagacagatctgcttagcgaaaagccaatgagatgtgagact

SEQ ID NO: 8391 - DNA, 600 bp, Chicken  19866894203067_2
aaaaaaatacagcttatagaatgctgaaaacttcctctgtaaatacttagaagtttgtctcaaatattaatggctcagtatgtgactgacaaaatatacctgtctgccaaaaatagcacttctcactcagtttttgagttctcactcaaaaaaagttgagtttaagcctcaactttggtcatctgaagcaacagtaattttatgataaagtcccataatggtggtgtgataacagatggcacctattacactaaaagcattatacacaaattagtgtctcacatttcaggtgctttgarytggctgtgcgtttacagtatctgagctmtctttccctaccttaaccttagagatactacagctttttctrtaggccaaccttgccacctgttagaagtgctctrtatgttacttatattagacaggtccaggcttagggaayacggtggctacctctggaataccaatctaaaaaccatcaagaagcatccacaagtgcttattgccatgagattcccaaccatcctacaatgcttagttataggactgcattctccaagacagatctgcttagcgaaaagccaatgagatgtgagacta

SEQ ID NO: 8392 - DNA, 586 bp, Chicken  19866894203067_3
aacttcctctgtaaatacttagaagtttgtctcaaatattaatggctcagtatgtgactgacaaaatatacctgtctgccaaaaatagcacttctcactcagtttttgagttctcactcaaaaaaagttgagtttaagcctcaactttggtcatctgaagcaacagtaattttatgataaagtcccataatggtggtgtgataacagatggcacctattacactaaaagcattatacacaaattagtgtctcacatttcaggtgctttgarytggctgtgcgtttacagtatctgagctmtctttccctaccttaaccttagagatactacagctttttctrtaggccaaccttgccacctgttagaagtgctctrtatgttacttatattagacaggtccaggcttagggaayacggtggctacctctggaataccaatctaaaaaccatcaagaagcatccacaagtgcttattgccatgagattcccaaccatcctacaatgcttagttataggactgcattctccaagacagatctgcttagcgaaaagccaatgagatgtgagactattcctgcccccagt

SEQ ID NO: 8393 - DNA, 544 bp, Chicken  19866894203067_4
tggctcagtatgtgactgacaaaatatacctgtctgccaaaaatagcacttctcactcagtttttgagttctcactcaaaaaaagttgagtttaagcctcaactttggtcatctgaagcaacagtaattttatgataaagtcccataatggtggtgtgataacagatggcacctattacactaaaagcattatacacaaattagtgtctcacatttcaggtgctttgarytggctgtgcgtttacagtatctgagctmtctttccctaccttaaccttagagatactacagctttttctrtaggccaaccttgccacctgttagaagtgctctrtatgttacttatattagacaggtccaggcttagggaayacggtggctacctctggaataccaatctaaaaaccatcaagaagcatccacaagtgcttattgccatgagattcccaaccatcctacaatgcttagttataggactgcattctccaagacagatctgcttagcgaaaagccaatgagatgtgagactattcctgcccccagt

SEQ ID NO: 8394 - DNA, 510 bp, Chicken  19866894203067_5
tgccaaaaatagcacttctcactcagtttttgagttctcactcaaaaaaagttgagtttaagcctcaactttggtcatctgaagcaacagtaattttatgataaagtcccataatggtggtgtgataacagatggcacctattacactaaaagcattatacacaaattagtgtctcacatttcaggtgctttgarytggctgtgcgtttacagtatctgagctmtctttccctaccttaaccttagagatactacagctttttctrtaggccaaccttgccacctgttagaagtgctctrtatgttacttatattagacaggtccaggcttagggaayacggtggctacctctggaataccaatctaaaaaccatcaagaagcatccacaagtgcttattgccatgagattcccaaccatcctacaatgcttagttataggactgcattctccaagacagatctgcttagcgaaaagccaatgagatgtgagactattcctgcccccagt

SEQ ID NO: 8395 - DNA, 472 bp, Chicken  19866894203067_6
cactcaaaaaaagttgagtttaagcctcaactttggtcatctgaagcaacagtaattttatgataaagtcccataatggtggtgtgataacagatggcacctattacactaaaagcattatacacaaattagtgtctcacatttcaggtgctttgarytggctgtgcgtttacagtatctgagctmtctttccctaccttaaccttagagatactacagctttttctrtaggccaaccttgccacctgttagaagtgctctrtatgttacttatattagacaggtccaggcttagggaayacggtggctacctctggaataccaatctaaaaaccatcaagaagcatccacaagtgcttattgccatgagattcccaaccatcctacaatgcttagttataggactgcattctccaagacagatctgcttagcgaaaagccaatgagatgtgagactattcctgcccccagt

SEQ ID NO: 8396 - DNA, 600 bp, Chicken  19866894203083_1
tagcaacatcaggcaagatgctacagcactatacaaaccacacctcacacaaagcctttgggcttgtacacacttcaaaggccagctgacctcattcaaaacattacaagggtcaccatgagcactctattgattacactgcagaaaaaggatgttttgttccaatttgcagctaaacaagcagcttttacacttcaaccatataatccatttcctatgcaatagtaacaaagtttggggctaaaagaatggagagcacagctcataacagctacacacagaacagcaggaccacaggcrttttccagtctctaatcttccatcctccagcattaaggtggtgtgaaatctattcgaaggctcaggaaatacacaagctggatgctggagactaagtatcatrtctcaagtaaggatgctgataacactactttatctagctacagccacttaaattaagcaattccttgcatcgaagagcagacaggaagaacagggactattaaagctcctatatggccgtgaggaggcttactgccttactgaccagatctgcttctcctctgtacctgcacctgaggcccctggcagttctgcttt

SEQ ID NO: 8397 - DNA, 600 bp, Chicken  19866894203083_2
ttacaagggtcaccatgagcactctattgattacactgcagaaaaaggatgttttgttccaatttgcagctaaacaagcagcttttacacttcaaccatataatccatttcctatgcaatagtaacaaagtttggggctaaaagaatggagagcacagctcataacagctacacacagaacagcaggaccacaggcrttttccagtctctaatcttccatcctccagcattaaggtggtgtgaaatctattcgaaggctcaggaaatacacaagctggatgctggagactaagtatcatrtctcaagtaaggatgctgataacactactttatctagctacagccacttaaattaagcaattccttgcatcgaagagcagacaggaagaacagggactattaaagctcctatatggccgtgaggaggcttactgccttactgaccagatctgcttctcctctgtacctgcacctgaggcccctggcagttctgctttgttccttgctacctgttttaccatctgcataaaagcttccagataaagtgacacagcccccacgttactggtttctggccttgcttatgcctaagctgactgc

SEQ ID NO: 8398 - DNA, 600 bp, Chicken  19866894203101_1
tttagatgacatggttatagtatagatcgacatttgagcttgttttattaatagtcaaaatgcagtgaaatgacagtgaatttaaaggatttttattaacttgtttttctttgtttcatctttttttttttttttttgtaatattaggcttgaaattttccagaagttggagtccaacacagtaattgcaaaatcttcatttgaagaagctttttcaggactgcagaaactgttagcggctgtgaattatatccttgaaggaatttgtaggtaagcatttcagctagtcataagatctartgagaataacagtcgtgtagtcgtaaaagtcacttaactattggtgccaaactagaagttaaatatgcatgcttagtttcacaagtttcagtaacatctcagtattacatgtatctagaacaatttattggtaataaaagaataattaactcttagtagacaaccagatttcttgtagtgaattttctcttttatgacttggaacttgttttccagtattttgatgacaagtcactggcaactgcttatagtgttacagcaactgtgacatggttaaatgctgcattagctctggtggca

SEQ ID NO: 8399 - DNA, 599 bp, Chicken  19866894203116_1
  misc_feature (1)..(5): n is any nucleotide
nnnnncctttttactgccctgttagcaggttcctctagccatcctgggctgggaggcatgccagcttaccagagttgtgtcctgtttgatataaatgacgagttgtcaccttggggtgtctgacactgccagttctttgcaaacacctgctatttaaagcatcccatttcctttttacctcttgtccgtaatggtaaggtgttagcaacgtatccctgatgttgtattttagtgaaaaatgtggacctgctgtgctaatagtgtgactgcactgactgttctcttgctgcactgacagtrttctcactactctttatgatttccataaaaaggctttatgtaaataactggtttttactttcataggccttaaaatactttcttctaatgcaccttacaacactgcatttgcagctgcagttgaagtaataaagatacttggctagggaactgaattacttgataaatgcagatgaggaaatggaggacctggagggtaggaaaaattctaaggggagcaatgcttgttgcatggtctgtgtgcagaatkgggagatggttcagaaatctccttgttcagcccagtatttttaactaga

SEQ ID NO: 8400 - DNA, 600 bp, Chicken  19866894203116_2
tgtgctaatagtgtgactgcactgactgttctcttgctgcactgacagtrttctcactactctttatgatttccataaaaaggctttatgtaaataactggtttttactttcataggccttaaaatactttcttctaatgcaccttacaacactgcatttgcagctgcagttgaagtaataaagatacttggctagggaactgaattacttgataaatgcagatgaggaaatggaggacctggagggtaggaaaaattctaaggggagcaatgcttgttgcatggtctgtgtgcagaatkgggagatggttcagaaatctccttgttcagcccagtatttttaactagactccgttctgtttctaatggtctgcccctctgtattaggcttactcttaaaaagaccttctgaccagaatttccacactgagtacagtgctataggaaagagcaggatgactgctggactgcaggcctcatttgggtctctgtgtgtctcttcatgacatctttctgctactgtttggaacccagtggtccttgctatattcctgctggtggcaatttttggtaactaaggaggatgggaagcaaattatt

SEQ ID NO: 8401 - DNA, 571 bp, Chicken  19866894203116_3
taaaaagaccttctgaccagaatttccacactgagtacagtgctataggaaagagcaggatgactgctggactgcaggcctcatttgggtctctgtgtgtctcttcatgacatctttctgctactgtttggaacccagtggtccttgctatattcctgctggtggcaatttttggtaactaaggaggatgggaagcaaattattgaatgtgttttaatttggaagttaaatgtgtataaattaagaggatgatattcttacatacgtcttttataattgccacagaacacgtgtatggartttgttctttycaatatgggctattttgtgggtttaagtactggaatrgaggaagggaattgttgatgtatgcatcaaaattgggtytgttctctgtatttaaaaggttgaattaggctwgttgggtctggaacaaaatgactgctcgagggaaaatgaaattgctatcttttgttcgctaacattgagaagtagaacttgcaaagacagtaaaatcagtgttttccttcaactgaatgaaaagatctcttgccatcgcacatttaatata

SEQ ID NO: 8402 - DNA, 560 bp, Chicken  19866894203116_4
tctgaccagaatttccacactgagtacagtgctataggaaagagcaggatgactgctggactgcaggcctcatttgggtctctgtgtgtctcttcatgacatctttctgctactgtttggaacccagtggtccttgctatattcctgctggtggcaatttttggtaactaaggaggatgggaagcaaattattgaatgtgttttaatttggaagttaaatgtgtataaattaagaggatgatattcttacatacgtcttttataattgccacagaacacgtgtatggartttgttctttycaatatgggctattttgtgggtttaagtactggaatrgaggaagggaattgttgatgtatgcatcaaaattgggtytgttctctgtatttaaaaggttgaattaggctwgttgggtctggaacaaaatgactgctcgagggaaaatgaaattgctatcttttgttcgctaacattgagaagtagaacttgcaaagacagtaaaatcagtgttttccttcaactgaatgaaaagatctcttgccatcgcacatttaatata

SEQ ID NO: 8403 - DNA, 523 bp, Chicken  19866894203116_5
gaaagagcaggatgactgctggactgcaggcctcatttgggtctctgtgtgtctcttcatgacatctttctgctactgtttggaacccagtggtccttgctatattcctgctggtggcaatttttggtaactaaggaggatgggaagcaaattattgaatgtgttttaatttggaagttaaatgtgtataaattaagaggatgatattcttacatacgtcttttataattgccacagaacacgtgtatggartttgttctttycaatatgggctattttgtgggtttaagtactggaatrgaggaagggaattgttgatgtatgcatcaaaattgggtytgttctctgtatttaaaaggttgaattaggctwgttgggtctggaacaaaatgactgctcgagggaaaatgaaattgctatcttttgttcgctaacattgagaagtagaacttgcaaagacagtaaaatcagtgttttccttcaactgaatgaaaagatctcttgccatcgcacatttaatata

SEQ ID NO: 8404 - DNA, 484 bp, Chicken  19866894203116_6
ggtctctgtgtgtctcttcatgacatctttctgctactgtttggaacccagtggtccttgctatattcctgctggtggcaatttttggtaactaaggaggatgggaagcaaattattgaatgtgttttaatttggaagttaaatgtgtataaattaagaggatgatattcttacatacgtcttttataattgccacagaacacgtgtatggartttgttctttycaatatgggctattttgtgggtttaagtactggaatrgaggaagggaattgttgatgtatgcatcaaaattgggtytgttctctgtatttaaaaggttgaattaggctwgttgggtctggaacaaaatgactgctcgagggaaaatgaaattgctatcttttgttcgctaacattgagaagtagaacttgcaaagacagtaaaatcagtgttttccttcaactgaatgaaaagatctcttgccatcgcacatttaatata

SEQ ID NO: 8405 - DNA, 451 bp, Chicken  19866894203116_7
ctactgtttggaacccagtggtccttgctatattcctgctggtggcaatttttggtaactaaggaggatgggaagcaaattattgaatgtgttttaatttggaagttaaatgtgtataaattaagaggatgatattcttacatacgtcttttataattgccacagaacacgtgtatggartttgttctttycaatatgggctattttgtgggtttaagtactggaatrgaggaagggaattgttgatgtatgcatcaaaattgggtytgttctctgtatttaaaaggttgaattaggctwgttgggtctggaacaaaatgactgctcgagggaaaatgaaattgctatcttttgttcgctaacattgagaagtagaacttgcaaagacagtaaaatcagtgttttccttcaactgaatgaaaagatctcttgccatcgcacatttaatata

SEQ ID NO: 8406 - DNA, 600 bp, Chicken  19866894203132_1
cacccagagagaagtgtttcatgctaagtggcagtttctggtgcagaacagttctgcaatgagggaggaggcagaaaacataagtgtgtaataaggcaacctgcttatgaagaacagctgtatgtgtgtctaagagcaaaaagcgtaaggaacaatatgaataaagctatgaaacaaaatgtaaggagatgttttctgtgtgcatgtgtttgtgtgtgcgtagaagtgagcaggtgaggctagcccctaaaagaaagaagaaaacaggaaagcaaaacagctcagtatgtacacgtggayatgtgaaggacaacaacagaaaagcaacaggataaagcaagggaggcmctgtgccatgcaaaccagctcactcactgaagaaccccacccactctcagagcacagccacacacacctgtaacgctttgggaggtttcctatgaaaatgccaggcctaatgctgcttccttctaaatatccagcagtgggattctcgtgtggagttcactgagacctttaggagctgttgtatcagtgttgatgggattcttgcacacagaacagaaggtgggcacgtaggattaacagttctttctcagg

SEQ ID NO: 8407 - DNA, 600 bp, Chicken  19866894203132_2
cagttctgcaatgagggaggaggcagaaaacataagtgtgtaataaggcaacctgcttatgaagaacagctgtatgtgtgtctaagagcaaaaagcgtaaggaacaatatgaataaagctatgaaacaaaatgtaaggagatgttttctgtgtgcatgtgtttgtgtgtgcgtagaagtgagcaggtgaggctagcccctaaaagaaagaagaaaacaggaaagcaaaacagctcagtatgtacacgtggayatgtgaaggacaacaacagaaaagcaacaggataaagcaagggaggcmctgtgccatgcaaaccagctcactcactgaagaaccccacccactctcagagcacagccacacacacctgtaacgctttgggaggtttcctatgaaaatgccaggcctaatgctgcttccttctaaatatccagcagtgggattctcgtgtggagttcactgagacctttaggagctgttgtatcagtgttgatgggattcttgcacacagaacagaaggtgggcacgtaggattaacagttctttctcaggctctgaagccacactctccattcgtgtcttttcttacactgctgctag

SEQ ID NO: 8408 - DNA, 600 bp, Chicken  19866894203132_3
aacgctttgggaggtttcctatgaaaatgccaggcctaatgctgcttccttctaaatatccagcagtgggattctcgtgtggagttcactgagacctttaggagctgttgtatcagtgttgatgggattcttgcacacagaacagaaggtgggcacgtaggattaacagttctttctcaggctctgaagccacactctccattcgtgtcttttcttacactgctgctagctgtccctcctcgcaaccagctcatgtccaggcacgtggggcagcccgcatccccggggttccccccaccrcccccgaggagccgcttcccggccgtgctgccgggctgtccccaccaggtggcactccaggagcggcggagcggcgggacccggcacggcgcggcccggacgcagtgacctcggcccctttctccactgcgcgcaaacatatggcctgctggtgcaagtcctactgctttcagggcttcatgagttcatgatttcggggcattagagatatctggggatggagattccctccgtgcatctctctgcccggagtctgcggcgattaaatgaggagtaagggaaagctctcccgacggcaga

SEQ ID NO: 8409 - DNA, 600 bp, Chicken  19866894203136_1
gttgtttctgaaaaagagttgtagtttgaaattcacaagacttaattttatttaatcttttaatcataggggcttagaaagtaggaactcttgcatatcttattagaattatatttaattaagattgattgcaggtggcttaacttcttgatttaagtctagggtaagaaatgtggcttaagaggaccattagttactgtaatgatgccagtgagagaagtgtcagtttgtgtcactggagcttgtgtggggactccagatctcttcattcactttaaaccaaagttgtctttctgaatrtgctctcagctagttctgcttcctaaatcatttggcatagagctctaatgagcaaaggcgaatcttccattaagtgattgtcccttgcagattgcatatttacatgcctaaagaaagattgttttctgttttgattggcttcaggtttcttcatattatttaatgactgtttgcagggatgtttagtttttagaagtttttacgtggccagaaatgtgtttctctttgaaatgcataggtaacatgattcctctttttttttttttaatatatttgcagataataaaaatgctattcgat

SEQ ID NO: 8410 - DNA, 600 bp, Chicken  19866894203138_1
accacagcattaactaaggcatctcttgcatctggaagactagatgaaactgagcgatccacagctgttgaatagaaggataaaagaagttactagtttaatttgttcgttctattttccatacagaaactccctttcatgatgctcaaatgaaaaaaaaaaatgcactatgctggtctgtacttcctcgttcccatccttaagaagttctaacaacatatttaatctgtggtatacaaatacactttctcccatcacttcaatggcacaatagatagggcaacttaagtttcacttttmtctgctaagaaagggctacaaatcttttggttggaggaagccacctgctggactgaatgcacatttttgagaacatatggaagtactattcattttttctaatttatgtgccatacactagaatcctgcacagagctgtacacattctgttgcagagatcaacctatgaaacagctactcgtgactagcaagcggcagataagcaagactcctcaatccagcaatgatagaaaactagtacagagaagagaatgtcagaagtactctcttcctgttcctttcttttttaagtaaatgaaa

SEQ ID NO: 8411 - DNA, 599 bp, Chicken  19866894203140_1
  misc_feature (1)..(99): n is any nucleotide
nnnnnnnnnnnnnnnnnnnnnnnnnnnnnnnnnnnnnnnnnnnnnnnnnnnnnnnnnnnnnnnnnnnnnnnnnnnnnnnnnnnnnnnnnnnnnnnnnnnttactttgactctttgtaactttgactggaaggtttcaaccgttgtgtatttcaaaatgtcacattagcagccacgttccgttaagaatcacagaatggcttaggttggaagggaccatccggttccagccccgtgccatggacagggctgccacccacccgctcaggctgcccagggccccatccaacctgacctcaaamgcctccagtgatggagcatccacagctccgggcagctgtgcctgtgcctcaccaccttctgagtaaagaatttcctcctaacatctaacctcaatttcctttcttttagtttaaagccattccccctttacttgcttaaaagttcccattaagatagtagttcccataattcccccaccagatcttcataaagatacacacggtgttggagatgccgtagatgagttcctatgaggtatgtggtgagcgtagtcttctcgtgcaattccagaagatctaaagtgaaccaatcacgaggc

SEQ ID NO: 8412 - DNA, 600 bp, Chicken  19866894203145_1
atttgatactaatgatttcagtcaccatcctaatgcttcatgttttaaagatcattttgcaataaagacatcatgattttacagtcattttagaataataaaccatagcacttatggattactttaaaacagaaaataaattggagcaataaatgtttttctcattttagagttggagaaactgggtcgcaaggaggtgaccttgtcatagtgcagtcgaggacatcttctcctcacccctcattctggggctgcattttgggtggtactgtcccttacctgcttctgcagacaagatgwccgatgacaactctctgcagaagacaacagatgcagactgatgttctagctcccttccttgtgacgtcaggcacttcactgaggcatctaaaacaggagtgccgaaactcccattagggggaaaaaaaataaaagtggagagaagtgacgatcttctcacagtagatgagatgaacacaattcactagacttgctgatgttttctggaggcaggaggtggccattaatccactcttccccatcatttttgctggcgcattctctgccccatggcctgtaggagaggggcagctccccagt

SEQ ID NO: 8413 - DNA, 600 bp, Chicken  19866894203145_2
gcagactgatgttctagctcccttccttgtgacgtcaggcacttcactgaggcatctaaaacaggagtgccgaaactcccattagggggaaaaaaaataaaagtggagagaagtgacgatcttctcacagtagatgagatgaacacaattcactagacttgctgatgttttctggaggcaggaggtggccattaatccactcttccccatcatttttgctggcgcattctctgccccatggcctgtaggagaggggcagctccccagtctaggtagctgctgcccaccccgctccaccargggactctgtggctcgaatgggcaccagcaggcaggcgctgcacagagatgtggctgctgcaaagcatcctttgagctcagggagcaygaggatgggaggccaaccaataagtcatatcgctagtgacggttcaccagcctccaatccagcttgattcattattcaccgtgaaattctcttccctcacttgctaagcaagggtatgtgtttccctccaagaaactccacaaacatctctgctaacacacagctctcagatgatgacagaaaagaaacagatggttctatacaggatcccc

SEQ ID NO: 8414 - DNA, 600 bp, Chicken  19866894203145_3
gaaaaaaaataaaagtggagagaagtgacgatcttctcacagtagatgagatgaacacaattcactagacttgctgatgttttctggaggcaggaggtggccattaatccactcttccccatcatttttgctggcgcattctctgccccatggcctgtaggagaggggcagctccccagtctaggtagctgctgcccaccccgctccaccargggactctgtggctcgaatgggcaccagcaggcaggcgctgcacagagatgtggctgctgcaaagcatcctttgagctcagggagcaygaggatgggaggccaaccaataagtcatatcgctagtgacggttcaccagcctccaatccagcttgattcattattcaccgtgaaattctcttccctcacttgctaagcaagggtatgtgtttccctccaagaaactccacaaacatctctgctaacacacagctctcagatgatgacagaaaagaaacagatggttctatacaggatccccaagtgttcatcagtatttacggacatcagacaacgacttatcttagaccatctacatttaaaccacagcaatgcaaatgaagcttcct

SEQ ID NO: 8415 - DNA, 600 bp, Chicken  19866894203147_1
ataatgtcattctctccaaattggaaaggtatgaattggatatgtagactgtttgatggatgaagaactgattgaaagatcgtatccagagagtggtggtcaatggctcaatgtctggatggaaattggtgatgagtggtgtccctcaggggttagtactgggaccagtgttttttaacatcttcatcagtgacactgacagtaggatcaagtgcaccctcagcaagtttgctgatgacaccaagatgtgtggtgtggtcaacacacccaagagatgggatgccatccagcgaggcctaracaggctcgagcagtgaacccaggagaaccacataaggttcaacaaattcaagtgaaggtcttgcacctggatcgtggcaacccccactatcagtacaagctggggaatgaaaggatagaccacagctgtgctgaaaaggacgtggggatactggtggataggaagctggacatgagccagcaatgtgcccttgtagcccagaaagccaactgtgtcctggactgcacaaacagaaatgtggccagcagagtgaggggaggtgatcctgcccctctgttctgcaccagtgaggcctcacc

SEQ ID NO: 8416 - DNA, 600 bp, Chicken  19866894203149_1
ctctgtttcattcccatcaactgtgagagaccatatgatgtctccagcagcttccttcagctgttgttccaaaggctctctggaataatgggcccagggggcagcagaaggtgtgtcacgttggtcttgatttcaagtacagaaatgttctgcctatgtttcgcttcctcttacagtctcctttatggttcatgccagccatctggctttggtccaggtccacttacttcctctcaaagcctgagccttttcagcgtcgcagtcccttcgaacagttgattctttggatctcagaacagrctgtggacaaagatgtgtagtaaagtattcttcaggaggaggaggacaggacacagatctgctgccatttctgtcactctctagttgaatgtgaagctgtgttacttaaatttccccaaaaattaatgattaagatcccttagaagtttaatcagcctcctttttaggtaatgattggaaatagaactgtttcacttccttatgaggccccatctggagtactttcccaagcccagggcctttggtacaggagggatgtggagctgttggagcatgaccagaggagggccactaaaatga

SEQ ID NO: 8417 - DNA, 600 bp, Chicken  19866894203149_2
gtgaagctgtgttacttaaatttccccaaaaattaatgattaagatcccttagaagtttaatcagcctcctttttaggtaatgattggaaatagaactgtttcacttccttatgaggccccatctggagtactttcccaagcccagggcctttggtacaggagggatgtggagctgttggagcatgaccagaggagggccactaaaatgatcagagggctggagcacctctcctatgaggaaaggttgaggaagttgggcttatttagcttggagaagagaaggctctggggagacctcrttgcagtcttccaccacctgaagggagtgtataaacaggagggagagagactttttacatggtctgatagtgacagaacacggaggatgggtttaaactaaaagaagggagatctaggttagatgttaggaagaatttttttactcccaagatggtgaggcattggaacakgttgcccagagaagttgtaggtgccccatccctggaggcaattaaggccaggttggatgggaacctggcatcctggtgcagtgggtggcagccctgctttggccagggagttggaactgggtgatcttt

SEQ ID NO: 8418 - DNA, 600 bp, Chicken  19866894203149_3
agctgttggagcatgaccagaggagggccactaaaatgatcagagggctggagcacctctcctatgaggaaaggttgaggaagttgggcttatttagcttggagaagagaaggctctggggagacctcrttgcagtcttccaccacctgaagggagtgtataaacaggagggagagagactttttacatggtctgatagtgacagaacacggaggatgggtttaaactaaaagaagggagatctaggttagatgttaggaagaatttttttactcccaagatggtgaggcattggaacakgttgcccagagaagttgtaggtgccccatccctggaggcaattaaggccaggttggatgggaacctggcatcctggtgcagtgggtggcagccctgctttggccagggagttggaactgggtgatcttttacatcacctccaacctaaaccatactatgattctgtgattgtccattaagtgtgagaagcagcattttgccaagagtctttgaataggttttaagaacgggagaagttgatgctgcttgtgcctcactagcgttagtgacaggcaagatctccaagctgcacgattgttc

SEQ ID NO: 8419 - DNA, 600 bp, Chicken  19866894203149_4
gattctgtgattgtccattaagtgtgagaagcagcattttgccaagagtctttgaataggttttaagaacgggagaagttgatgctgcttgtgcctcactagcgttagtgacaggcaagatctccaagctgcacgattgttcatataccagggggctataagcttattgtcttggttttcaacttcaggagcagtagaagttttctgtttttaaccggagtagcactatgcagtcagcttggagaagttcatggtggctaattttagacatccaatttagatgtctaaacagcccaggcrttggtatcagtgtcagaaatacatagtatgattcctttgtaggattaaatcagtttataggcccaagcttgctctcctctcagaagcgtaacaaaagccaccctctgacattccatccaccttcactcccagtgtagcagcccaagatttggaggcctaattttataaagctacagcaggcttacagcagggggttgtgatagaggttaatgataagcagtgaaggtaaaaggcatggagtatttatgctgaagtttgaaacttctcttaaggcctatgatacagtcacctgatccactg

SEQ ID NO: 8420 - DNA, 599 bp, Chicken  19866894203156_1
  misc_feature (1)..(62): n is any nucleotide
nnnnnnnnnnnnnnnnnnnnnnnnnnnnnnnnnnnnnnnnnnnnnnnnnnnnnnnnnnnnnnattaaagtggcagaaaacttaagccagagactggccttttctcttgctttttttgcctccctcccccaagaaaaaagaaatctatagtaaatacttggtgcttaaatgccccactcctcaatatttttctctgagtagatctatgtagatttttagtatataacttacaaagaaaatgccatgtggtgcatggctgacaggttttaagcttttcatggctacatctcacaacaacatytacttttctatttggtatgcctttaaaggaagaatattcattgtatagcttcagaatgtgctgaactatgtcaggatataataatggtaagactgaacatccttaactcttatccacgtgtcttctctaatatatactactaaaatacatctgatgcttttttctatggggctgcttgagttaacgtggttgacctaaaatctgttcccacctacttggttatattgcctgggtagtcagtgggaaggaagagactcttcagaaaggcaattggtcccatatatcttaggcacctgtct

SEQ ID NO: 8421 - DNA, 600 bp, Chicken  19866894203156_2
gtatgcctttaaaggaagaatattcattgtatagcttcagaatgtgctgaactatgtcaggatataataatggtaagactgaacatccttaactcttatccacgtgtcttctctaatatatactactaaaatacatctgatgcttttttctatggggctgcttgagttaacgtggttgacctaaaatctgttcccacctacttggttatattgcctgggtagtcagtgggaaggaagagactcttcagaaaggcaattggtcccatatatcttaggcacctgtcttaactgaaatgacaygctgtctgaggatacccttctcctgctactgactgtaaataaaactgtactctatcatggatcggatgcccaatggtgataggaatagaggtgggggagatgatctcaagaattaatgttctgttagttcagttacagtggaaaagatgaacataaagattgtttttgtagaggaaaaggagagagataaccacaataaaagatgaataacatatggctgtaaaaattaaccaagtgggggagagtattttgaaaaaatgtagtaattaagattacgtttcatttttttcctttagaaat

SEQ ID NO: 8422 - DNA, 599 bp, Chicken  19866894203158_1
  misc_feature (1)..(30): n is any nucleotide
nnnnnnnnnnnnnnnnnnnnnnnnnnnnnncgtggcacattgaggaatggagcactgttgctttttgctgggcaggcagtatgctggctctgtttgctgctagctctctgggtgctggatgcatttctgttcattctcccttgaaagcatcagacccttttttttttttgtgtgtgtgactttgatcatctcttccccccccctctttctcagcctcttggcagcagtctgaccacgttccacttcccctttcttttacttacgcatccacgagcctttagcgaaggattcccagccccscctccttgctgggagcgcttccttcagccgcgtccacagctttgctggagcagcagcagcacaaaccatctgattcctgacagcagcacagctgtccgcaccgttccacagcggagctgtgaatctcccagctctgctgttcgctcygcctgcagaaagctgtgatccaggcagcctccagaaacgtctgccttacccctgcatgcctttggaaggtactrcggcttaaaagttaagagtttttcaaaattactctttcatattcttttctaagccttaacactcctgcatatttgcta

SEQ ID NO: 8423 - DNA, 600 bp, Chicken  19866894203158_2
catcagacccttttttttttttgtgtgtgtgactttgatcatctcttccccccccctctttctcagcctcttggcagcagtctgaccacgttccacttcccctttcttttacttacgcatccacgagcctttagcgaaggattcccagccccscctccttgctgggagcgcttccttcagccgcgtccacagctttgctggagcagcagcagcacaaaccatctgattcctgacagcagcacagctgtccgcaccgttccacagcggagctgtgaatctcccagctctgctgttcgctcygcctgcagaaagctgtgatccaggcagcctccagaaacgtctgccttacccctgcatgcctttggaaggtactrcggcttaaaagttaagagtttttcaaaattactctttcatattcttttctaagccttaacactcctgcatatttgctacgacttcacttgaaggagctctgttacttcagtcgtaattatcctcaagtctgttagtgagtagcgacagtctgtcctaacaggatgtgtgaataattatttattctgccgtggataatcttgtgtttgtaactggtgtaatttatag

SEQ ID NO: 8424 - DNA, 600 bp, Chicken  19866894203158_3
cagcagtctgaccacgttccacttcccctttcttttacttacgcatccacgagcctttagcgaaggattcccagccccscctccttgctgggagcgcttccttcagccgcgtccacagctttgctggagcagcagcagcacaaaccatctgattcctgacagcagcacagctgtccgcaccgttccacagcggagctgtgaatctcccagctctgctgttcgctcygcctgcagaaagctgtgatccaggcagcctccagaaacgtctgccttacccctgcatgcctttggaaggtactrcggcttaaaagttaagagtttttcaaaattactctttcatattcttttctaagccttaacactcctgcatatttgctacgacttcacttgaaggagctctgttacttcagtcgtaattatcctcaagtctgttagtgagtagcgacagtctgtcctaacaggatgtgtgaataattatttattctgccgtggataatcttgtgtttgtaactggtgtaatttataggccattgtgctgcctgcttaaatcccttaagtcccctcacaagcctctccagtctcagccagcccagagagctt

SEQ ID NO: 8425 - DNA, 578 bp, Chicken  19866894203159_1
tttatttaaatgtttgcatgatttatggttataaaatttacgatcgaatagaggtcttttggagctaatttaagaagacagatattcaaagtaatggacatacaactacagttttaaatacctttatgtctcatactgaggcatttataaggcagcttctcttgctgtgattttgtcttgagatacttttttcaaggcagaaagcaatttatccctcccttacaattatgggaagatgatacaacagagaacaagccatacattgaaagagattaacatagagacaaggagtagtaagcrtatagatcctgttgaacactgctgcattgctatttgaatgactggggatactatctttcattataaaacctttctgatagatagaaattgaactgataaccattgtttttttgtttttttttcttcttgtttttaacctcatgctctcttcaacctgtgacatcttgctcggcagcccagtcatcccatagtgcctattccagaaaatgaaacactcagctctaaggaggtaatcagttgacatttaatagggttatgcatttgcatgctggctttct

SEQ ID NO: 8426 - DNA, 600 bp, Chicken  19866894203166_1
tgcaagagcaaaccccagatggaatgaggtcatgctccttcctctctatgcgtgcacctgcctgttgcctcttcatgttacttcagccttgctgctcctgctattagtagtggagagcttgtgaaggtttcatggagtgaccaggtgagattttataacagatcagctcctgtcatgtgctgtacacaggggaaatgagtgctgataaagctccgtacccataaagtgctgggaaacccagaaagtgagcctattgcagaagattttttttcttacagttattgataatcgcaacacatmggtaactgtcagtacgtattttcttgtggaacatttgtttcactgtctcctagcattttgtcgctacatgagctgttagttaggggcacatgtacttgaattacactttcattgatgcagaggaaggagagacaatcctataaatctgatatctctttattaagtctgaaaagaaagagtaggaggaaataatactctaagagagttttatttactgtctccatccctgtttggctaagttttcggtggttggttcgaaggaagccatcggagagtcaatatatggctaaccagacccag

SEQ ID NO: 8427 - DNA, 599 bp, Chicken  19866894203167_1
  misc_feature (1)..(106): n is any nucleotide
nnnnnnnnnnnnnnnnnnnnnnnnnnnnnnnnnnnnnnnnnnnnnnnnnnnnnnnnnnnnnnnnnnnnnnnnnnnnnnnnnnnnnnnnnnnnnnnnnnnnnnnnnnccagcattaacgtctctaagaatgaacaatgcattgagtggaaaattgattaaatggtcaaagaacagccctatgtggcctcgtttgctttttcaattagtgcagatgtcacaagtagtccaagtggccctcaacccttcacaaaaattgtccttgaagctttgtctttttttctgaggttttctttttgaagraaaatgattctgcattgaaattattggttctgtattttttcttactccagatttgcatgaaagtaacaataccgtaacataagatgtgaattgctcttttaactggtgagagtttgggaaaaaaaatgaacatgtatacttttgaaggatttgatttttatattattgatgaattccatctttgtttctcttctttgggaatgatagttcatgyatgtgttttctagaaagcagctgacaaggaaatagctgatagctgcagctgtctcaaattgcttctgaccagacttccggggtct

SEQ ID NO: 8428 - DNA, 532 bp, Chicken  19866894203167_2
tcacaagtagtccaagtggccctcaacccttcacaaaaattgtccttgaagctttgtctttttttctgaggttttctttttgaagraaaatgattctgcattgaaattattggttctgtattttttcttactccagatttgcatgaaagtaacaataccgtaacataagatgtgaattgctcttttaactggtgagagtttgggaaaaaaaatgaacatgtatacttttgaaggatttgatttttatattattgatgaattccatctttgtttctcttctttgggaatgatagttcatgyatgtgttttctagaaagcagctgacaaggaaatagctgatagctgcagctgtctcaaattgcttctgaccagacttccggggtctacaggtgaagaaatgatgggaacatgtttgaattcatttaggagatctccagtaagtcatgtgattaaggtacttaactggaatttagaagatctgagtgtaattccaatcccagttctgtcgcaggcttgctacttgatgctgaga

SEQ ID NO: 8429 - DNA, 600 bp, Chicken  19866894203175_1
gcatgtccttcgagatctggcagcacaaaaggcaatcgtgtaaatagatacaaaattccatgatataatctattcattatttctctgagatgcaatgaaattcattgatctagtctaataaaattatcttcttttccaatggactttaacatttatttccaagagattgttagtaattctaactagagctcagattgcagtgtcacactatgtcctgagctcctagaaggtgggagcttctcccaagcctggacagactctggagtaccaaatgggtggctgtcaaatatacctcactayacttgaagagatctcatgctttgacagacatgaggatttcttctcatttctccagtgaaaagagggagactgaacatattttacttactttctgctcttgtatttgggcyttcacaactttgaattcggcagatggcggcttttgattagccacaagttcttctgtatcaatgagccaactaagcagagattcaagtgcatcctgaaatctcccgcagtgaaggagggcttcctgcaattgtgctgcacgttgagcaacctgaaagaaagtagagcacctgactgtactatttttcctta

SEQ ID NO: 8430 - DNA, 600 bp, Chicken  19866894203175_2
tagtctaataaaattatcttcttttccaatggactttaacatttatttccaagagattgttagtaattctaactagagctcagattgcagtgtcacactatgtcctgagctcctagaaggtgggagcttctcccaagcctggacagactctggagtaccaaatgggtggctgtcaaatatacctcactayacttgaagagatctcatgctttgacagacatgaggatttcttctcatttctccagtgaaaagagggagactgaacatattttacttactttctgctcttgtatttgggcyttcacaactttgaattcggcagatggcggcttttgattagccacaagttcttctgtatcaatgagccaactaagcagagattcaagtgcatcctgaaatctcccgcagtgaaggagggcttcctgcaattgtgctgcacgttgagcaacctgaaagaaagtagagcacctgactgtactatttttccttatttctgtgaaataagtagctaaaatttgctcaacatttggcaatatcattaccacatactctcactttcataggtttttgtaacagcactgttgcacaatttaccattaa

SEQ ID NO: 8431 - DNA, 600 bp, Chicken  19866894203180_1
gtacatatgcagataatgagatagcagttcaagaaagcgacttaagtattatgtaaacagctgactgtttggacttcttttcaagagcctctgtcccttatcatcagcaatactgaagtcaagtcaaaacacttaccatgctcttgcattcctctcagactaaattgcagtcactgctctactgggaatgaatattaaacaagttaatcttcatcatagcaggttgtaaagcagcttttctgcatgaaaatgtaagctacttaagaaacaaagcattcaggttaatatggtgactctacrtccacgtacttctcctaccacaacctctacatttgtttatggttttataagaataaatgacatgctaaataagcaataagagcgaaacatcacctcatgacatcacttctcgagtgcaacctcttatatgtcacaacaggagatgctgcctgcatactgaagctaccagctaagcccaaggttttatgtgaggtcttctctgtgaaacacaaccaccacctttggccttaaaaaaaaaaaacaataactaagagattaattatgctttccacacatagcaaaaagagggcttaatggctg

SEQ ID NO: 8432 - DNA, 600 bp, Chicken  19866894203181_1
cgtatgctgtcgtggtggaaggcgctctggttcaacaacgagacaataattgaagggaggatgaggaaatacaagcagctggcagcccacagccaggatgtgggatgcctttgttctgagtggatcagatataaaggcaagtggtgcagaccagggattgagctgttgtcttccgactcgtgttgggttggaaaaccaccccttcccctacagccgtgatatggtggctttggtgcagggatatgggagggctgaccacccagagcctcagtttcagccttttacaagggttggccaagscaagcaggtcttccttccccagaaacyatgcctggaaccatttggaccagtaggcagrcaaaggtgagtggctgcaccaggagtaatgtgggatcccttgtagaaaggctcagggttgctctgaccatactccatgctggacaaagccctgctgccccctaacgcagtgcaggaaaaatggtttgttttttgctcctcattgtctgcttcagcagtcatgtatgataaaacagagtcttcccagttaatttttaccagttaaagagaaagactctctcctaagccagcacttctctgact

SEQ ID NO: 8433 - DNA, 600 bp, Chicken  19866894203181_2
tggttcaacaacgagacaataattgaagggaggatgaggaaatacaagcagctggcagcccacagccaggatgtgggatgcctttgttctgagtggatcagatataaaggcaagtggtgcagaccagggattgagctgttgtcttccgactcgtgttgggttggaaaaccaccccttcccctacagccgtgatatggtggctttggtgcagggatatgggagggctgaccacccagagcctcagtttcagccttttacaagggttggccaagscaagcaggtcttccttccccagaaacyatgcctggaaccatttggaccagtaggcagrcaaaggtgagtggctgcaccaggagtaatgtgggatcccttgtagaaaggctcagggttgctctgaccatactccatgctggacaaagccctgctgccccctaacgcagtgcaggaaaaatggtttgttttttgctcctcattgtctgcttcagcagtcatgtatgataaaacagagtcttcccagttaatttttaccagttaaagagaaagactctctcctaagccagcacttctctgactcaattgcttagtttatattgctgcatc

SEQ ID NO: 8434 - DNA, 600 bp, Chicken  19866894203181_3
ggatgaggaaatacaagcagctggcagcccacagccaggatgtgggatgcctttgttctgagtggatcagatataaaggcaagtggtgcagaccagggattgagctgttgtcttccgactcgtgttgggttggaaaaccaccccttcccctacagccgtgatatggtggctttggtgcagggatatgggagggctgaccacccagagcctcagtttcagccttttacaagggttggccaagscaagcaggtcttccttccccagaaacyatgcctggaaccatttggaccagtaggcagrcaaaggtgagtggctgcaccaggagtaatgtgggatcccttgtagaaaggctcagggttgctctgaccatactccatgctggacaaagccctgctgccccctaacgcagtgcaggaaaaatggtttgttttttgctcctcattgtctgcttcagcagtcatgtatgataaaacagagtcttcccagttaatttttaccagttaaagagaaagactctctcctaagccagcacttctctgactcaattgcttagtttatattgctgcatctccaggtataagtagtgttcgttcacaacca

SEQ ID NO: 8435 - DNA, 600 bp, Chicken  19866894203189_1
acttgttctccacagtctatttaaagctcatgcctggatgaaaggctgtatctgctcagagttctggctacaggccgggccaaaagcattcaaacccagtgcttaagagtaaaaaaaggaggcagcctgcaatattaacaggttggtcagtgctttgaggaagatttctttctgttgctatagcagttaaatctacataaatggtaagggggcttagctatgtgggaagtgatgcatgctctgtgagatagcagggacgtggcagctggctgcttactggagcctgatgagcattagcakcctggcatgtccacccagcagggtgagtgagcagagatgaggccagaaacagcctctagatgctgccaagaaagagatgccagcaagcaactagaagcgtggcagtgtacactgtggcctagccagacagtatctcataggcatgggagcaacagctgagatggctgaagccatacagcagaccctctacatcttaaaaatgtgacagtgtgcagaatatccctggaagaagaattcattcttttatcaagaagctgagaacaaaactggatgatgcaggatcaattgtgaacctttgga

SEQ ID NO: 8436 - DNA, 600 bp, Chicken  19866894203195_1
atttacaatacctgattggatttttaagattatattgtgcataagactaaagctgggggtacgtttctctagtgcaagcaggcgtgagtagatctgaaccttagatcacagcccctagagtttatcctcagaccccaggaggacctgtaaacttcacttcaccttcactgtcagtggcatctgtgagttccggtcaacccagcagcacccacggcaggtagctcggtgcggagcagcacatttacatcagtgcataaccaaaaccaaacctgttgcactcaaaagatgaggaaatggggrcaaggtcctctgggctgcagccatcataattgtctaaactaaagggtgagtgaaccaaagccagctctgtgtgcctgtgtcagcctacacaagcagagcagctgcagaagtgtttttgctagagatgcaaccaactgtaagtcagatacgtgaacagctttgcatacaaatccctgtgtttgctaacacacaagcattcttccagctgcacaggagtgtagtgtagaaacaggagagagatccaccagccagcaacccttcaccacaagcatccaggacatccccagtgccaagcactgc

SEQ ID NO: 8437 - DNA, 600 bp, Chicken  19866894203195_2
gggaagagccccgtcactccattcatgaccccttcgtaccaaccatcatcattcttcttgatgacataaatgatggcaccttcctgaaatgagagctcatcttctttgtccttcgtgtagtcatagatggctaccactaaaaaagaacacaggatgggctgttagaagaagtacaagcatgcacctcagtcacctccacatttagatctatacaatgctcaagtgcagttcccttacctagatgtcattcccatggtacatagtaataatgtaagtgaaaacaacttagaaaaaaacgcrgcacctctctaaaataaaatgcatgcctactgtatcrgcatctttttcatacaggaacaaaagaayttcatcttactaaacagatgaaaactgcttcagaaagtcaaggaaaggcaataaaacagtggcaaataccaaacatggaagatccgtacaaatgttatctgtgcaatgtggtacatcacatgcagcatactttcagcaaactttccagtcaagcgtgtgtagttgtttagaaacttcatagggaaaaataatatatacagataaacacatatagcatatctatatgcacacata

SEQ ID NO: 8438 - DNA, 600 bp, Chicken  19866894203195_3
accaaccatcatcattcttcttgatgacataaatgatggcaccttcctgaaatgagagctcatcttctttgtccttcgtgtagtcatagatggctaccactaaaaaagaacacaggatgggctgttagaagaagtacaagcatgcacctcagtcacctccacatttagatctatacaatgctcaagtgcagttcccttacctagatgtcattcccatggtacatagtaataatgtaagtgaaaacaacttagaaaaaaacgcrgcacctctctaaaataaaatgcatgcctactgtatcrgcatctttttcatacaggaacaaaagaayttcatcttactaaacagatgaaaactgcttcagaaagtcaaggaaaggcaataaaacagtggcaaataccaaacatggaagatccgtacaaatgttatctgtgcaatgtggtacatcacatgcagcatactttcagcaaactttccagtcaagcgtgtgtagttgtttagaaacttcatagggaaaaataatatatacagataaacacatatagcatatctatatgcacacatacctacaaaaaaaaagatagacatatacattataccta

SEQ ID NO: 8439 - DNA, 574 bp, Chicken  19866894203195_4
taaatgatggcaccttcctgaaatgagagctcatcttctttgtccttcgtgtagtcatagatggctaccactaaaaaagaacacaggatgggctgttagaagaagtacaagcatgcacctcagtcacctccacatttagatctatacaatgctcaagtgcagttcccttacctagatgtcattcccatggtacatagtaataatgtaagtgaaaacaacttagaaaaaaacgcrgcacctctctaaaataaaatgcatgcctactgtatcrgcatctttttcatacaggaacaaaagaayttcatcttactaaacagatgaaaactgcttcagaaagtcaaggaaaggcaataaaacagtggcaaataccaaacatggaagatccgtacaaatgttatctgtgcaatgtggtacatcacatgcagcatactttcagcaaactttccagtcaagcgtgtgtagttgtttagaaacttcatagggaaaaataatatatacagataaacacatatagcatatctatatgcacacatacctacaaaaaaaaagatagacatatacattatacctaaga

SEQ ID NO: 8440 - DNA, 600 bp, Chicken  19866894203198_1
cgtgcagcagctaagtaccggtcagcatgtctgttgtttctcagcatttaaagcaatctttactatcatttttatttgaaccctaaacacctgcataactgctacgtcatactggacattttctgaaagtaaaattagaagagactatttttttatttttgagaaacatgctagtaggaaataatgtgctctgtgtatgaccctaaaaatgatagataataactttggatatatgccttaaaacccatcaatacagataataaataatgatatttgtctggacttaaagaattactccartttaaagctgctatgtgaacacacatagttttatagcatttctctgtagtcctcacattgcccatcggttatctagcacttgctgagatctgctgctttgaaacaaaaacatgtaataactcatgaagtttgggtttcttaatttttctgtcccctcaactgcatgatgtactaacattaagaaacccagtctcagtcaagaatccttatcttctgagattaatatggacatctgggttgctgctgagtgtgttgcttgagtactgtcagaaaaaaatccttcatacatacctcagtatc

SEQ ID NO: 8441 - DNA, 599 bp, Chicken  19866894203204_1
  misc_feature (1)..(20): n is any nucleotide
nnnnnnnnnnnnnnnnnnnntcattttgtcagtcaagagacattgctgggaattgaggttgttgcataggatccctgtttttttcctggtccccagcaaaaagtagctgaaagggggacctgtgacacttccccagtgtcatttctcccccacgtacaaccaacatgcatgcacatgctcatttactacctagccaggaaactcagagacagatacttgccaaagatgtctttgtaagctcccagtctggcattacattcagactggctttggaaatagtggaaattcacaccctgagaygctattccatggttctgcagtgcaaacacacatggaaccacaggaatcccttgcctctcaaagatctccatgctcatcctgatcatcacctcycaaaagcagccagcrgtgaggctgcaggcaaagcaaaaagcagcagccagagcctyggattcttcatagaacagggacagtggctgcagggtctgagccaagcacaccaagcagctgtcccttgctctttattcaacagcaaaaccatggcgagacctgggcckgcctcacagcctgcctggatgattcctgtggatgcaggcaca

SEQ ID NO: 8442 - DNA, 600 bp, Chicken  19866894203204_2
cagcaaaaagtagctgaaagggggacctgtgacacttccccagtgtcatttctcccccacgtacaaccaacatgcatgcacatgctcatttactacctagccaggaaactcagagacagatacttgccaaagatgtctttgtaagctcccagtctggcattacattcagactggctttggaaatagtggaaattcacaccctgagaygctattccatggttctgcagtgcaaacacacatggaaccacaggaatcccttgcctctcaaagatctccatgctcatcctgatcatcacctcycaaaagcagccagcrgtgaggctgcaggcaaagcaaaaagcagcagccagagcctyggattcttcatagaacagggacagtggctgcagggtctgagccaagcacaccaagcagctgtcccttgctctttattcaacagcaaaaccatggcgagacctgggcckgcctcacagcctgcctggatgattcctgtggatgcaggcacatttatgcttacagcttcacagaccaccttttacgagctctttgaagaaatgggttcttcttcccactttggtgtcaggtttaaatatagatgca

SEQ ID NO: 8443 - DNA, 600 bp, Chicken  19866894203204_3
gaaagggggacctgtgacacttccccagtgtcatttctcccccacgtacaaccaacatgcatgcacatgctcatttactacctagccaggaaactcagagacagatacttgccaaagatgtctttgtaagctcccagtctggcattacattcagactggctttggaaatagtggaaattcacaccctgagaygctattccatggttctgcagtgcaaacacacatggaaccacaggaatcccttgcctctcaaagatctccatgctcatcctgatcatcacctcycaaaagcagccagcrgtgaggctgcaggcaaagcaaaaagcagcagccagagcctyggattcttcatagaacagggacagtggctgcagggtctgagccaagcacaccaagcagctgtcccttgctctttattcaacagcaaaaccatggcgagacctgggcckgcctcacagcctgcctggatgattcctgtggatgcaggcacatttatgcttacagcttcacagaccaccttttacgagctctttgaagaaatgggttcttcttcccactttggtgtcaggtttaaatatagatgcacggacayggagatgt

SEQ ID NO: 8444 - DNA, 600 bp, Chicken  19866894203204_4
ccacgtacaaccaacatgcatgcacatgctcatttactacctagccaggaaactcagagacagatacttgccaaagatgtctttgtaagctcccagtctggcattacattcagactggctttggaaatagtggaaattcacaccctgagaygctattccatggttctgcagtgcaaacacacatggaaccacaggaatcccttgcctctcaaagatctccatgctcatcctgatcatcacctcycaaaagcagccagcrgtgaggctgcaggcaaagcaaaaagcagcagccagagcctyggattcttcatagaacagggacagtggctgcagggtctgagccaagcacaccaagcagctgtcccttgctctttattcaacagcaaaaccatggcgagacctgggcckgcctcacagcctgcctggatgattcctgtggatgcaggcacatttatgcttacagcttcacagaccaccttttacgagctctttgaagaaatgggttcttcttcccactttggtgtcaggtttaaatatagatgcacggacayggagatgttttcagtccatgcatcccagagagctgaatgcatgttggcc

SEQ ID NO: 8445 - DNA, 600 bp, Chicken  19866894203204_5
ttcagactggctttggaaatagtggaaattcacaccctgagaygctattccatggttctgcagtgcaaacacacatggaaccacaggaatcccttgcctctcaaagatctccatgctcatcctgatcatcacctcycaaaagcagccagcrgtgaggctgcaggcaaagcaaaaagcagcagccagagcctyggattcttcatagaacagggacagtggctgcagggtctgagccaagcacaccaagcagctgtcccttgctctttattcaacagcaaaaccatggcgagacctgggcckgcctcacagcctgcctggatgattcctgtggatgcaggcacatttatgcttacagcttcacagaccaccttttacgagctctttgaagaaatgggttcttcttcccactttggtgtcaggtttaaatatagatgcacggacayggagatgttttcagtccatgcatcccagagagctgaatgcatgttggccaggcaagtctagcaggtgctgtgcttggcaaaaccactgatttcagtgacagctaattgaaatgctgtggcttccattagaaatcctgattagctgtcaagtcccagt

SEQ ID NO: 8446 - DNA, 600 bp, Chicken  19866894203204_6
agccagcrgtgaggctgcaggcaaagcaaaaagcagcagccagagcctyggattcttcatagaacagggacagtggctgcagggtctgagccaagcacaccaagcagctgtcccttgctctttattcaacagcaaaaccatggcgagacctgggcckgcctcacagcctgcctggatgattcctgtggatgcaggcacatttatgcttacagcttcacagaccaccttttacgagctctttgaagaaatgggttcttcttcccactttggtgtcaggtttaaatatagatgcacggacayggagatgttttcagtccatgcatcccagagagctgaatgcatgttggccaggcaagtctagcaggtgctgtgcttggcaaaaccactgatttcagtgacagctaattgaaatgctgtggcttccattagaaatcctgattagctgtcaagtcccagtgaacgtgaggaatcctcgcccctttgmagaagccagaaggaaagctygtgtctgatagaacatggccaaaccctgcatggcatgttaaaaaacaagcaaggaaaaaaccccacacaagcaaaagaaaaagcatgttaacaagt

SEQ ID NO: 8447 - DNA, 600 bp, Chicken  19866894203204_7
gtggatgcaggcacatttatgcttacagcttcacagaccaccttttacgagctctttgaagaaatgggttcttcttcccactttggtgtcaggtttaaatatagatgcacggacayggagatgttttcagtccatgcatcccagagagctgaatgcatgttggccaggcaagtctagcaggtgctgtgcttggcaaaaccactgatttcagtgacagctaattgaaatgctgtggcttccattagaaatcctgattagctgtcaagtcccagtgaacgtgaggaatcctcgcccctttgmagaagccagaaggaaagctygtgtctgatagaacatggccaaaccctgcatggcatgttaaaaaacaagcaaggaaaaaaccccacacaagcaaaagaaaaagcatgttaacaagttaaacaatgctcttgagtcttccacgaatccttgtgatgtaggtcatttcagctttctaattaagagcatgtcaagatcatgcatactgtaaaggaagcatgcgtacatgtagttaaggaaactacacaaatatatgaggaaataagaaatccttgtcttaagttatttaaagcaaaaggagaa

SEQ ID NO: 8448 - DNA, 600 bp, Chicken  19866894203204_8
gcttacagcttcacagaccaccttttacgagctctttgaagaaatgggttcttcttcccactttggtgtcaggtttaaatatagatgcacggacayggagatgttttcagtccatgcatcccagagagctgaatgcatgttggccaggcaagtctagcaggtgctgtgcttggcaaaaccactgatttcagtgacagctaattgaaatgctgtggcttccattagaaatcctgattagctgtcaagtcccagtgaacgtgaggaatcctcgcccctttgmagaagccagaaggaaagctygtgtctgatagaacatggccaaaccctgcatggcatgttaaaaaacaagcaaggaaaaaaccccacacaagcaaaagaaaaagcatgttaacaagttaaacaatgctcttgagtcttccacgaatccttgtgatgtaggtcatttcagctttctaattaagagcatgtcaagatcatgcatactgtaaaggaagcatgcgtacatgtagttaaggaaactacacaaatatatgaggaaataagaaatccttgtcttaagttatttaaagcaaaaggagaaaagcatgaatggcatcagcc

SEQ ID NO: 8449 - DNA, 600 bp, Chicken  19866894203205_1
gattttacttataactgtcccatatgattacaagtcataaatattttaactgtgagtttcagcaataaatacattgtccatttccttaacagttgtagtggagacgcagagatgtttacttcctagccaagagggttctgagaatagaaagctaaacagtgtaagtattactgatgaacaaggactgctgtggtttaacccagcagcaactcagcaccacacagctgctcgctcattcacccacagtggggcaggtggggagaactggagaaaagttaaaacttgtgggttgagatacaygatttaattggatgggaaagaaagggaaagtaataataataatgataaaagaatatataaataagtgatgcacagtgcaactgctcgccacacactgacgcccacaagtagcatctattcctccccacaagccaactccccccacttttattgttcagcataatgtcacatggtatggcatatgggatatccacctggccaggctgggtcagctgtcctgctgctgtcccctcccagctccttgctggcagggcaccatgagaagctgaaacatccttgaactctgtgtcatcactgctc

SEQ ID NO: 8450 - DNA, 600 bp, Chicken  19866894203205_2
tagaagtcaagcatcaagccagaactaccagcgatctaaacaacttcccagactctgctgtcattactgttaacgcaggacaggtcaggaactccccctctcacagatccttcagttgctgaagagcaagtattgtcatgccttaatactgtattagagctgccactgtgctttcacgctccacagcacaaaaggaagaaaagtactataaaatagaaccctgcatcagaaaaatttaattctgattttatccttatgtaataaatcagcagaagaaaaccttagctttgttgctgtcaraaagaacttttaattatatacagcttcgcaagtctctgggtagaaagaataacgcatcagtaggttttatgaaagtatctgagggaagttaagaggattttggaaattaagactttttaaattgaagattagcaactttttcaagtattaaaaaaactctttaaaaagcctcgaattttctgtaaaaatatagagagtaattaattatataaatactcatgattcacaaccatagaagttttctattactgacctcaggaaaaaagagactgtaaacaggatgtgttatctttgacttgg

SEQ ID NO: 8451 - DNA, 600 bp, Chicken  19866894203208_1
gaaatcctctaatatgtactatattttgcttattgtaagataatcttacaaataatcagcgtaaaactgatagttactaaaaaccaagagatgaaactgcatagagaatactagcatttactaggtagacaggaaaaataacacaactacagaaacagtattccttaggtaagtatggatggctcaccatgtctcctaagtgacaggaaagctgaacagatagttggccctccccaggctaatgacctgaaactaatttccaggtaacgactgataccgaggggctacagtaagacagarcatcaagtctgctgggccccacctgtgctagaagcagcaaaactcctatgagagcagaaatggagactgcatgagataactggtcaccagtgacagccacgtacaaacctttggtgacttggactttgaaagatatacagcagctcagtatttcctgtgaacacatctcccactggtgatgaaagagccacatgttttccgaggtcttctaaaactgagatgacagmagataaggcagctagaatagaaagctgtaattttgtactagagtgacccatcatcagtggttatttggaaagg

SEQ ID NO: 8452 - DNA, 600 bp, Chicken  19866894203208_10
tttaaaaatattggaatatttagagcattaaccaagtctttaaaagatgtctactaacagcagagccacagtttgaaatggccatcacagaatgttcttcagatcacattaaagatctgagccttgaacttctggagcacctcccaggctgggtgggataacagacgggatcaatgagagccacacactgatatttcasccagatgcaatgagtttatatttactgtctggttcacgctgtatttgaaagaacatccactatcaagacacaaataaacgtacaaatgaaacagaaacacracccgtaaaaataaatgcacattctcaagctgtttctacactgatttgtcaggtgtagccctgctagctgtatcacagcagcagcattatcaaacgataggatgagaaatggttctagcaacgagagcagcctagaggctctcgcttggtgaggaagtataactctggatcattcttaattcaaagttaaatttcacaagtataaaccagaatatttttgtagtgtagaaacgattatttttagtcttctgtaacagctctcccatgcattcatttcttgaatttaaaaaattgctgcct

SEQ ID NO: 8453 - DNA, 600 bp, Chicken  19866894203208_2
ccctccccaggctaatgacctgaaactaatttccaggtaacgactgataccgaggggctacagtaagacagarcatcaagtctgctgggccccacctgtgctagaagcagcaaaactcctatgagagcagaaatggagactgcatgagataactggtcaccagtgacagccacgtacaaacctttggtgacttggactttgaaagatatacagcagctcagtatttcctgtgaacacatctcccactggtgatgaaagagccacatgttttccgaggtcttctaaaactgagatgacagmagataaggcagctagaatagaaagctgtaattttgtactagagtgacccatcatcagtggttatttggaaaggagtgaaaactgattcgaagaggtgaataatggttatgtatttcctaagtgcttctgattttttagagcacttttagaaacggctagcatcttcctttcattacccagcagaagtggaacacaaaatatgactagctgaggtggaattcaaagcccacccaaatcaaaaatatgaaggcctatgagattaatttatttggaaaagcatggtctctagttaagctgcat

SEQ ID NO: 8454 - DNA, 600 bp, Chicken  19866894203208_3
gtgacccatcatcagtggttatttggaaaggagtgaaaactgattcgaagaggtgaataatggttatgtatttcctaagtgcttctgattttttagagcacttttagaaacggctagcatcttcctttcattacccagcagaagtggaacacaaaatatgactagctgaggtggaattcaaagcccacccaaatcaaaaatatgaaggcctatgagattaatttatttggaaaagcatggtctctagttaagctgcattagaaaaacattatgactcaaatatcaccattttctaggggmaaaaaaaaggtaaaaaacatgcagaatacagtctaaattatattggctgaattaggatagatttattaagtatggtgtacatatttcacaggatctcaaatagcaatcagtgaaaatttgagcttgcaaayaggaaccaaaatatttctttacatatctgttttagaaacagttggagatggggtttgtacattacgaaatgcttggctgggtgctacaacccgctatccaatayctacgtgtggctgcaaagtgtttccagttggagcatttagagtctcagcttccactcttggctaa

SEQ ID NO: 8455 - DNA, 600 bp, Chicken  19866894203208_4
tacccagcagaagtggaacacaaaatatgactagctgaggtggaattcaaagcccacccaaatcaaaaatatgaaggcctatgagattaatttatttggaaaagcatggtctctagttaagctgcattagaaaaacattatgactcaaatatcaccattttctaggggaaaaaaaaaggtaaaaaacatgcagaatacagtctaaattatattggctgaattaggatagatttattaagtatggtgtacatatttcacaggatctcaaatagcaatcagtgaaaatttgagcttgcaaayaggaaccaaaatatttctttacatatctgttttagaaacagttggagatggggtttgtacattacgaaatgcttggctgggtgctacaacccgctatccaatayctacgtgtggctgcaaagtgtttccagttggagcatttagagtctcagcttccactcttggctaatgtttccactctgccaaaagtttcatccacaacagggcaagtccttttatttaaaggcagtgaattatatcatataaacaagactaacataaaacaaacaataaaacaccacccatacccccttcaaacat

SEQ ID NO: 8456 - DNA, 600 bp, Chicken  19866894203208_5
catggtctctagttaagctgcattagaaaaacattatgactcaaatatcaccattttctaggggaaaaaaaaaggtaaaaaacatgcagaatacagtctaaattatattggctgaattaggatagatttattaagtatggtgtacatatttcacaggatctcaaatagcaatcagtgaaaatttgagcttgcaaayaggaaccaaaatatttctttacatatctgttttagaaacagttggagatggggtttgtacattacgaaatgcttggctgggtgctacaacccgctatccaatayctacgtgtggctgcaaagtgtttccagttggagcatttagagtctcagcttccactcttggctaatgtttccactctgccaaaagtttcatccacaacagggcaagtccttttatttaaaggcagtgaattatatcatataaacaagactaacataaaacaaacaataaaacaccacccatacccccttcaaacatctcagcaccaacaagaaccaaagtcaaaagcgttgcactacgtggtgccgcaggctgcctgcccatctcttacagcctgtctagcaaatgcatacactcttctg

SEQ ID NO: 8457 - DNA, 600 bp, Chicken  19866894203208_6
gcaggctgcctgcccatctcttacagcctgtctagcaaatgcatacactcttctgcagaaagaaatcaagcagagcagtaaagacttcctgctacactgaaatttgctagctgtgttcatccttgcatcactgtgcatgttctcatgttcttctattctgtgctatgctctcacggcaaaagatttcacaacatttttgcttcaatccaccagatcaacattaggattgctgaataaatacagctctatggcaacaaggatgggctaattaaaagtacttgcagcacagaagattcagaytaacaagcattttttaatcaccagttacagaaattcygcataaaaagctacacgcagcacgaattcagtgtccttaattccccaaagccaaagtacatcagcagcacccaacctgtggtattgctcacacacagccctgtccctgcccagaacctsaacctccatccctcactggctcttctgcaatatttggtaccaaagctgtggctaaatttaaaggcagcatctgaaaagaaaccctggacacatgttcctttgttgttagcattgcatcaactactatgtttcaacccagccagc

SEQ ID NO: 8458 - DNA, 600 bp, Chicken  19866894203208_7
aatgcatacactcttctgcagaaagaaatcaagcagagcagtaaagacttcctgctacactgaaatttgctagctgtgttcatccttgcatcactgtgcatgttctcatgttcttctattctgtgctatgctctcacggcaaaagatttcacaacatttttgcttcaatccaccagatcaacattaggattgctgaataaatacagctctatggcaacaaggatgggctaattaaaagtacttgcagcacagaagattcagaytaacaagcattttttaatcaccagttacagaaattcygcataaaaagctacacgcagcacgaattcagtgtccttaattccccaaagccaaagtacatcagcagcacccaacctgtggtattgctcacacacagccctgtccctgcccagaacctsaacctccatccctcactggctcttctgcaatatttggtaccaaagctgtggctaaatttaaaggcagcatctgaaaagaaaccctggacacatgttcctttgttgttagcattgcatcaactactatgtttcaacccagccagcaacagtgcccagtgtgtgtgctcaaagacaaacattc

SEQ ID NO: 8459 - DNA, 600 bp, Chicken  19866894203208_8
tctgtgctatgctctcacggcaaaagatttcacaacatttttgcttcaatccaccagatcaacattaggattgctgaataaatacagctctatggcaacaaggatgggctaattaaaagtacttgcagcacagaagattcagaytaacaagcattttttaatcaccagttacagaaattcygcataaaaagctacacgcagcacgaattcagtgtccttaattccccaaagccaaagtacatcagcagcacccaacctgtggtattgctcacacacagccctgtccctgcccagaacctsaacctccatccctcactggctcttctgcaatatttggtaccaaagctgtggctaaatttaaaggcagcatctgaaaagaaaccctggacacatgttcctttgttgttagcattgcatcaactactatgtttcaacccagccagcaacagtgcccagtgtgtgtgctcaaagacaaacattcctctacctctaataactctaggtttgttattgactttaaaaatattggaatatttagagcattaaccaagtctttaaaagatgtctactaacagcagagccacagtttgaaatggccat

SEQ ID NO: 8460 - DNA, 600 bp, Chicken  19866894203208_9
catcaactactatgtttcaacccagccagcaacagtgcccagtgtgtgtgctcaaagacaaacattcctctacctctaataactctaggtttgttattgactttaaaaatattggaatatttagagcattaaccaagtctttaaaagatgtctactaacagcagagccacagtttgaaatggccatcacagaatgttcttcagatcacattaaagatctgagccttgaacttctggagcacctcccaggctgggtgggataacagacgggatcaatgagagccacacactgatatttcasccagatgcaatgagtttatatttactgtctggttcacgctgtatttgaaagaacatccactatcaagacacaaataaacgtacaaatgaaacagaaacacracccgtaaaaataaatgcacattctcaagctgtttctacactgatttgtcaggtgtagccctgctagctgtatcacagcagcagcattatcaaacgataggatgagaaatggttctagcaacgagagcagcctagaggctctcgcttggtgaggaagtataactctggatcattcttaattcaaagttaaatttcacaa

SEQ ID NO: 8461 - DNA, 600 bp, Chicken  19866894203209_1
cctttctgtgactctctttttgatgctcagagctgttttatgtcctgcaggaaaaacatgcagaggaacaaacaggtggcaatgggcaggaagaagttcaacatggatcccaagaaggtactgggggctggcagcaggctctgcagggtgtgctgcacaccatggtccgggtgctgagctgagcagagccaggagcagggaatggaatgggggttggaagcatgacccgaagcggcacctcttgctccattccagggcattcagttcctgattgagaacgacttgctgaagaacacgtgygaggatatcgctcagttcctctacaagggagagggcctcaacaaaacagccattggggactacctgggcgagaggtatgcaaggcccggagcagctcggtccctgtgcaggaggagatggtgcagcccttgcagggtgctgctgggctgggctggctccagggcccccagcaggacatcaggctccgggcctgcaagtggctgcgccagccccttgctgagcaccagggtctgtggcttttggaggggctgctgtgtgcaaaccgggctagtaaggcggcccatagccaccagttcccta

SEQ ID NO: 8462 - DNA, 600 bp, Chicken  19866894203210_1
tctagagatatgtctgaattgtaaagaattagctacaattttgatggaacaatttataaggaagtttctatggtttgtattatgcaggggataaaatcagataataatcttttctgtctttaacatcaacagtgtctttcttgatgtgcctgaattttgatgattggtagtatcaagcagttatttgatttcgagttgccctgatacattctttccactatggtaaacacactaattaatactaaaatccattaaatatttttcttaacatcagatttatcatctactctgtttttcttycccatctgcatttcccctgttctttccataatctgaatgaaagaacatcagttcttccatagctattcacagtactttgttccctatgtaacgctactctagctttatagtttaattctgtgaaattctgtatttaatattagcttcttaaatgtttagatttaccactttctggttcttttctagttttataaaatgtgaatcatttggcaagtctgaatcacgtatgttctgccaaaaagccaaggagctaattgaaatactctgagtatttcattttcaatctgtgggccaaattca

SEQ ID NO: 8463 - DNA, 600 bp, Chicken  19866894203212_1
ttctttccttgcctttcttctcactgaatagtggctttagctcagcgacagttttgtttccttctttttgggttttattggctctgtatctgtgacagtgcaagtgcaatcaatacaatttcagttttaacagctgcaggcagctcaatacttcgaacttcttttttaatgttctttgtgttttcggtactatcatagcagagacatttgaggtaaagaggaaagatgggtggcctgagtatatgcattttttccttgtactttctgttattgcatgaaaatattataatgtttaagagyttgcactgaatatctaacgcagttcctttaaaaactgacaagtgcaaattgaaaagcaatgtcccactaatagagagttggaaagtgtcactgtaccattattaaatctggaatgctctgggtcttgcataaattcaaacagtaccaatgagaaccttagaaagtaataagccaattaaaatatacctatttgacttttattttctttgcagaccacagatgacatcctggtggcctcggctgaatgtcccagcgatgacgaggacattgatccctgtgagccgagctcaggtgggttag

SEQ ID NO: 8464 - DNA, 600 bp, Chicken  19866894203219_1
aagttcctctttctttccccttcttctttttcttttaaaacacaaagaaacaaaacattctccagatgttttgtgatctaatcccttattaactttggaaagatcctttctaccacagggatcagattcattaatctatggcttcctgactcctctcctacagtatttccaggaatgcagatacctattttggcatggaatctgtattccatgagcacaaaccttcaaatatatctatttaccacacctctgactgtatccgtttctcaatcggataatttaatttccagtcaaagcagscacacaaattaggcagccatttaatcagtgattaaccaaataatctccttttaccataaatttgtagtgtctggagaccttgtagacttcttggaaaaggtggcctgtctgcattacaagtaattttacagtgggtgtcaagaacagtgacgcattcttttcccatgtagttcagttccaccactgggaaactcagctcagactgagaaatatccatagggtgaaggtctctctgggagctccagctgcacgtgatgagtttgtggaatggagtttgtggaatttagactgtgcctctca

SEQ ID NO: 8465 - DNA, 600 bp, Chicken  19866894203224_1
aaaaaaagattaaattgtaagagctaataatcaaagacacttttatgagtcccagcgctccagtctctccatgttctgtaacaacaacagaaactcacttagagaataatgatgttctcaatattttttttcctgttgctgccatttacacagtcctaagggtgctgtctgggaaaataacaagagctactacagaacagcttgttgtcgacattgaacatcagcctaagtgaaacagaaatcaacatgaagtgcactttacaaagcctatctgcagacctcagttacatgcttgatggyrgaaattcttcaaacagccggagatattaccacctcccttctcctggctgcttgtccctgctcccacactacccccttctctctgcgaactggattgagccarcaactatttaagcacgtgctgtatctcagcagataactcttcctcgactcttcattctgcgatatggaaaatagagaagcatttttagggactacaggactagcgaaacaagtggatggcgtcttctctgcttaagagcttctcacgtgaatggcaggtgatcactaccttgggctagatgagtcagacaacttcaa

SEQ ID NO: 8466 - DNA, 600 bp, Chicken  19866894203224_2
aaaaaagattaaattgtaagagctaataatcaaagacacttttatgagtcccagcgctccagtctctccatgttctgtaacaacaacagaaactcacttagagaataatgatgttctcaatattttttttcctgttgctgccatttacacagtcctaagggtgctgtctgggaaaataacaagagctactacagaacagcttgttgtcgacattgaacatcagcctaagtgaaacagaaatcaacatgaagtgcactttacaaagcctatctgcagacctcagttacatgcttgatggyrgaaattcttcaaacagccggagatattaccacctcccttctcctggctgcttgtccctgctcccacactacccccttctctctgcgaactggattgagccarcaactatttaagcacgtgctgtatctcagcagataactcttcctcgactcttcattctgcgatatggaaaatagagaagcatttttagggactacaggactagcgaaacaagtggatggcgtcttctctgcttaagagcttctcacgtgaatggcaggtgatcactaccttgggctagatgagtcagacaacttcaag

SEQ ID NO: 8467 - DNA, 600 bp, Chicken  19866894203224_3
gaataatgatgttctcaatattttttttcctgttgctgccatttacacagtcctaagggtgctgtctgggaaaataacaagagctactacagaacagcttgttgtcgacattgaacatcagcctaagtgaaacagaaatcaacatgaagtgcactttacaaagcctatctgcagacctcagttacatgcttgatggyrgaaattcttcaaacagccggagatattaccacctcccttctcctggctgcttgtccctgctcccacactacccccttctctctgcgaactggattgagccarcaactatttaagcacgtgctgtatctcagcagataactcttcctcgactcttcattctgcgatatggaaaatagagaagcatttttagggactacaggactagcgaaacaagtggatggcgtcttctctgcttaagagcttctcacgtgaatggcaggtgatcactaccttgggctagatgagtcagacaacttcaagttgcatgaaataattactatgtaggaaaaagttattttgttgggcacatcatgaaatacccaygtgtcaaatgatactagcggcactggcttgctactcctc

SEQ ID NO: 8468 - DNA, 600 bp, Chicken  19866894203224_4
cacactacccccttctctctgcgaactggattgagccarcaactatttaagcacgtgctgtatctcagcagataactcttcctcgactcttcattctgcgatatggaaaatagagaagcatttttagggactacaggactagcgaaacaagtggatggcgtcttctctgcttaagagcttctcacgtgaatggcaggtgatcactaccttgggctagatgagtcagacaacttcaagttgcatgaaataattactatgtaggaaaaagttattttgttgggcacatcatgaaatacccaygtgtcaaatgatactagcggcactggcttgctactcctcttattcagaagaatcattcaagtatatgcaaacagtagaaccgcaccactgtaaaaatgatatatctgagaggagaaagactcattgtaggccgcagttgacccgttaaccacatgtagttaatagccactattttacatgtggtttgctctcttttttcctttttcccactgaatgatgcattgccctgtaatgaacatcactcctcagttttcaggcctgtggctcttttgaaaataggtgaaaggagctgcttactat

SEQ ID NO: 8469 - DNA, 599 bp, Chicken  19866894203225_1
  misc_feature (1)..(25): n is any nucleotide
nnnnnnnnnnnnnnnnnnnnnnnnncgccgccttgctgccccccacacggccgcagcacagctgccgggagaggaagcagctgtacgaatgcactcgcagtgacccgcagagcgtgggttggctaccccggggaaatccgaaacagaaattttaaaagggaaaaaagtattccagtctccagacacaacgtctctcagcgccagcaacccgtgctcctgggcacagaggtgtcccgcagacgtccccattgccgttccgctggccgtagtgatacacaccatcacttcaggagtgacttyggccgctcggacccttcccacttcggatttagcttcctaagggcgcctgaagatctgactaaagctccgttataccactccttgccacggctgcaaccgagagcccgcagctcacgcctatcacaagcccccgcagcccgccgggcgctcccctcagccccgaggcagcaggtgcccacccgagcacygagtgccacctgactgacagccagcgaggcaccgagctgccttccgctacgarcaccatcaatcgttatcccgctatcccaaacggaagagattttgctgtcctttcacag

SEQ ID NO: 8470 - DNA, 600 bp, Chicken  19866894203225_2
cgtctctcagcgccagcaacccgtgctcctgggcacagaggtgtcccgcagacgtccccattgccgttccgctggccgtagtgatacacaccatcacttcaggagtgacttyggccgctcggacccttcccacttcggatttagcttcctaagggcgcctgaagatctgactaaagctccgttataccactccttgccacggctgcaaccgagagcccgcagctcacgcctatcacaagcccccgcagcccgccgggcgctcccctcagccccgaggcagcaggtgcccacccgagcacygagtgccacctgactgacagccagcgaggcaccgagctgccttccgctacgarcaccatcaatcgttatcccgctatcccaaacggaagagattttgctgtcctttcacagtcgtttccaaagtttaccacgattttacgttccagctttttaagcaactcctcggctgtaggaacagatgctccaagccagccgggtgcccagccagccccagctgaagcgagctgagcggcagccagggccctgcgaggagggggtgctgcggcccgacgcggctccaggtgagccccgtgcccgtag

SEQ ID NO: 8471 - DNA, 560 bp, Chicken  19866894203225_3
gtccccattgccgttccgctggccgtagtgatacacaccatcacttcaggagtgacttyggccgctcggacccttcccacttcggatttagcttcctaagggcgcctgaagatctgactaaagctccgttataccactccttgccacggctgcaaccgagagcccgcagctcacgcctatcacaagcccccgcagcccgccgggcgctcccctcagccccgaggcagcaggtgcccacccgagcacygagtgccacctgactgacagccagcgaggcaccgagctgccttccgctacgarcaccatcaatcgttatcccgctatcccaaacggaagagattttgctgtcctttcacagtcgtttccaaagtttaccacgattttacgttccagctttttaagcaactcctcggctgtaggaacagatgctccaagccagccgggtgcccagccagccccagctgaagcgagctgagcggcagccagggccctgcgaggagggggtgctgcggcccgacgcggctccaggtgagccccgtgcccgtaggctgccaactcag

SEQ ID NO: 8472 - DNA, 599 bp, Chicken  19866894203229_1
  misc_feature (1)..(101): n is any nucleotide
nnnnnnnnnnnnnnnnnnnnnnnnnnnnnnnnnnnnnnnnnnnnnnnnnnnnnnnnnnnnnnnnnnnnnnnnnnnnnnnnnnnnnnnnnnnnnnnnnnnnnctccaacatcatatccctcagctgctgctgtatgccaagcaattgtttatgtgcacacagaacctatttgcaaagcatttaaattaggctggcatatatttgaagatctttccacaatcatgcagggaagcgatttttctagtcgtgttcctggttcttaaatgctaggccataattaactatcttatggataaaaagyggaggtcacaaatacttctgtctggagatagaaactgaagagaytgacaggaaattgagaggagaggtaaacctaaccagacgaagaacagcgtttacataagtaacacacattatcctgcagcatttattttcattccagaggaaggaaagtcataggaaaaagaaacattttgtttggatcttcttccccggtacaataaacagaatgaggcaggtaactcagctagccagacccagcaatacaagaacaacgtggcagtcaaaagttgggttyccaatatttctgaatgcttcctt

SEQ ID NO: 8473 - DNA, 599 bp, Chicken  19866894203229_2
  misc_feature (1)..(57): n is any nucleotide
nnnnnnnnnnnnnnnnnnnnnnnnnnnnnnnnnnnnnnnnnnnnnnnnnnnnnnnnnctccaacatcatatccctcagctgctgctgtatgccaagcaattgtttatgtgcacacagaacctatttgcaaagcatttaaattaggctggcatatatttgaagatctttccacaatcatgcagggaagcgatttttctagtcgtgttcctggttcttaaatgctaggccataattaactatcttatggataaaaagyggaggtcacaaatacttctgtctggagatagaaactgaagagaytgacaggaaattgagaggagaggtaaacctaaccagacgaagaacagcgtttacataagtaacacacattatcctgcagcatttattttcattccagaggaaggaaagtcataggaaaaagaaacattttgtttggatcttcttccccggtacaataaacagaatgaggcaggtaactcagctagccagacccagcaatacaagaacaacgtggcagtcaaaagttgggttyccaatatttctgaatgcttccttaacrtgcagattcacataccccgtgtatttgagygtgacagctg

SEQ ID NO: 8474 - DNA, 600 bp, Chicken  19866894203229_3
ttaactatcttatggataaaaagyggaggtcacaaatacttctgtctggagatagaaactgaagagaytgacaggaaattgagaggagaggtaaacctaaccagacgaagaacagcgtttacataagtaacacacattatcctgcagcatttattttcattccagaggaaggaaagtcataggaaaaagaaacattttgtttggatcttcttccccggtacaataaacagaatgaggcaggtaactcagctagccagacccagcaatacaagaacaacgtggcagtcaaaagttgggttyccaatatttctgaatgcttccttaacrtgcagattcacataccccgtgtatttgagygtgacagctgagctcatcacagcttcaggcaggagaaaagcctataaatacaggcgttgatgacagcaccagtgaactgagtgaacagactggcctgagactatgrtgcacgtcagctgtcatggtgtcatcccagtgttcatttcactctggatttttacacattaagaaaagttacagaagattttttaactctagagactatgaaattcaaaagtagctatccattaactgcttgtaatt

SEQ ID NO: 8475 - DNA, 600 bp, Chicken  19866894203229_4
ggtcacaaatacttctgtctggagatagaaactgaagagaytgacaggaaattgagaggagaggtaaacctaaccagacgaagaacagcgtttacataagtaacacacattatcctgcagcatttattttcattccagaggaaggaaagtcataggaaaaagaaacattttgtttggatcttcttccccggtacaataaacagaatgaggcaggtaactcagctagccagacccagcaatacaagaacaacgtggcagtcaaaagttgggttyccaatatttctgaatgcttccttaacrtgcagattcacataccccgtgtatttgagygtgacagctgagctcatcacagcttcaggcaggagaaaagcctataaatacaggcgttgatgacagcaccagtgaactgagtgaacagactggcctgagactatgrtgcacgtcagctgtcatggtgtcatcccagtgttcatttcactctggatttttacacattaagaaaagttacagaagattttttaactctagagactatgaaattcaaaagtagctatccattaactgcttgtaattgtgatcttctttccattccagaaagag

SEQ ID NO: 8476 - DNA, 600 bp, Chicken  19866894203229_5
actgaagagaytgacaggaaattgagaggagaggtaaacctaaccagacgaagaacagcgtttacataagtaacacacattatcctgcagcatttattttcattccagaggaaggaaagtcataggaaaaagaaacattttgtttggatcttcttccccggtacaataaacagaatgaggcaggtaactcagctagccagacccagcaatacaagaacaacgtggcagtcaaaagttgggttyccaatatttctgaatgcttccttaacrtgcagattcacataccccgtgtatttgagygtgacagctgagctcatcacagcttcaggcaggagaaaagcctataaatacaggcgttgatgacagcaccagtgaactgagtgaacagactggcctgagactatgrtgcacgtcagctgtcatggtgtcatcccagtgttcatttcactctggatttttacacattaagaaaagttacagaagattttttaactctagagactatgaaattcaaaagtagctatccattaactgcttgtaattgtgatcttctttccattccagaaagagcaaagacaaaaaatcgtctgaagtgtagat

SEQ ID NO: 8477 - DNA, 600 bp, Chicken  19866894203229_6
agaggaaggaaagtcataggaaaaagaaacattttgtttggatcttcttccccggtacaataaacagaatgaggcaggtaactcagctagccagacccagcaatacaagaacaacgtggcagtcaaaagttgggttyccaatatttctgaatgcttccttaacrtgcagattcacataccccgtgtatttgagygtgacagctgagctcatcacagcttcaggcaggagaaaagcctataaatacaggcgttgatgacagcaccagtgaactgagtgaacagactggcctgagactatgrtgcacgtcagctgtcatggtgtcatcccagtgttcatttcactctggatttttacacattaagaaaagttacagaagattttttaactctagagactatgaaattcaaaagtagctatccattaactgcttgtaattgtgatcttctttccattccagaaagagcaaagacaaaaaatcgtctgaagtgtagatttgtgcactgccttgggatggtaagaaagaacagcttcaacagacagccctaacaacatccaggaaaaccgacactgtgaacactgataacaacatttgtacaact

SEQ ID NO: 8478 - DNA, 599 bp, Chicken  19866894203231_1
  misc_feature (1)..(62): n is any nucleotide
nnnnnnnnnnnnnnnnnnnnnnnnnnnnnnnnnnnnnnnnnnnnnnnnnnnnnnnnnnnnnntcagaagccagagccaagccatgctaggaagcagcccagaggagttgggctttgaatccctcttgttttatggataggtcaagacctccaaggtcaccagggtcatcaaagcaattagagaacatacttaataaaagcctgtgaacattcattatcagacagatcactgctatgtgtacaatggtacaacacagaggcaaccagatggcactgacctgtacaaacatccttactgtgygcatggcttctggggtttcccctccagttttccagtcattaccaataccaccactcagctgccttcagtccttcccaagaagccaggatcttcttttaccacaggtgtcatttaggatatcgcacwcttctctttcrtctgatgatgattccaactaaagttagcagagaccatcggtcctgaagttctagaagcatctgaaagactcatcagacttccagcccaagcatcctagcttgcmttggagagctgtgtgatgcaacatcttcccaagagggcacctgctctccaaaaattgc

SEQ ID NO: 8479 - DNA, 600 bp, Chicken  19866894203231_2
gttttatggataggtcaagacctccaaggtcaccagggtcatcaaagcaattagagaacatacttaataaaagcctgtgaacattcattatcagacagatcactgctatgtgtacaatggtacaacacagaggcaaccagatggcactgacctgtacaaacatccttactgtgygcatggcttctggggtttcccctccagttttccagtcattaccaataccaccactcagctgccttcagtccttcccaagaagccaggatcttcttttaccacaggtgtcatttaggatatcgcacwcttctctttcrtctgatgatgattccaactaaagttagcagagaccatcggtcctgaagttctagaagcatctgaaagactcatcagacttccagcccaagcatcctagcttgcmttggagagctgtgtgatgcaacatcttcccaagagggcacctgctctccaaaaattgcatctccccttggtatttctgaacacgatgctgtcccttgctgagcaaacagcaagaaagcaaaatggaaacaagggaaaatatgacaccctctgctaataaatgcaaaacgatggaaaacaattttg

SEQ ID NO: 8480 - DNA, 600 bp, Chicken  19866894203231_3
aggtcaagacctccaaggtcaccagggtcatcaaagcaattagagaacatacttaataaaagcctgtgaacattcattatcagacagatcactgctatgtgtacaatggtacaacacagaggcaaccagatggcactgacctgtacaaacatccttactgtgygcatggcttctggggtttcccctccagttttccagtcattaccaataccaccactcagctgccttcagtccttcccaagaagccaggatcttcttttaccacaggtgtcatttaggatatcgcacwcttctctttcrtctgatgatgattccaactaaagttagcagagaccatcggtcctgaagttctagaagcatctgaaagactcatcagacttccagcccaagcatcctagcttgcmttggagagctgtgtgatgcaacatcttcccaagagggcacctgctctccaaaaattgcatctccccttggtatttctgaacacgatgctgtcccttgctgagcaaacagcaagaaagcaaaatggaaacaagggaaaatatgacaccctctgctaataaatgcaaaacgatggaaaacaattttgccaactaggca

SEQ ID NO: 8481 - DNA, 600 bp, Chicken  19866894203231_4
aatggtacaacacagaggcaaccagatggcactgacctgtacaaacatccttactgtgygcatggcttctggggtttcccctccagttttccagtcattaccaataccaccactcagctgccttcagtccttcccaagaagccaggatcttcttttaccacaggtgtcatttaggatatcgcacwcttctctttcrtctgatgatgattccaactaaagttagcagagaccatcggtcctgaagttctagaagcatctgaaagactcatcagacttccagcccaagcatcctagcttgcmttggagagctgtgtgatgcaacatcttcccaagagggcacctgctctccaaaaattgcatctccccttggtatttctgaacacgatgctgtcccttgctgagcaaacagcaagaaagcaaaatggaaacaagggaaaatatgacaccctctgctaataaatgcaaaacgatggaaaacaattttgccaactaggcaactcaaattagacttatctctccgaggaatatggtcgatttgtagctcttattacagtgtaatgctatttccctaaaagtttgtgtgtgcattttaatgaattc

SEQ ID NO: 8482 - DNA, 600 bp, Chicken  19866894203236_1
tgtgatagcctgtgtggtattcagaccacaagaaagcagaacagtggtggatagatcacatccatctgaagaagtaagacagcataaatgagcagatggtgcaaagaggttgaaaggactgggattgttcaactctgaatagaagtaaatagcagagaacagggaagaagtatgggcaaagaatctagagaaggagaattacaatattctgttttctcagtttcatagcctgagaactatgagatatacagtgtagttcaatagtaatcaaaggaaaatcttcatgtgatgtgaacaacrctttcttcccttgaatactgctaagggtgcttcgaatgcttcaaagagaaatgggcactgaaatggatggggaaaatatccagaacttagttgttaattctaacactcagggagtgacaaaagctgccttcttcatggtctgaagcaagctctgaacactgtgactagaatgagagcttcaaagcagggctaaacttcacagcatcatctaataaagtatttcttacactttcattttaaatatatagtccaggaccctggcaaaacgcctaagtttgatatgctttggccatgcctgtt

SEQ ID NO: 8483 - DNA, 395 bp, Chicken  19866894203237_1
tcattcatcacattcatgcaatctcagttactctcaaatgggtgaaaaaagaaacaatgtcctttagatggaaagctcagagtgctcagtcattgtaaacaatactgtaggcatttaggagaataaatatttgtattatgaattggggatgggggtttaacagacaaatacctgtttgtgtattgcgtgaaatcaggaaagttcgacatgacaaattggagacaggaggagaaagaatttcccacacagaacaaaaaattctttttgcttttttcagcaattttgctttaaaaagaaaaraaaaaaaaaaaaagtagccttttccagtgaaacagaaaaaactgtagttgtctcttttaagcttaggagaaaacaatatttactgttacagcgca

SEQ ID NO: 8484 - DNA, 600 bp, Chicken  19866894203243_1
taagatgctttaacttttaattagctctgtagtggtcaggagctgagctagaggatctttgaagttccctcccagctgaatggtcctgctctatttttttttaaaatatgttcgaaatgtgagtatcatgaagtcttctgctaagcaaagagctcaagagtttgtaccaaaagaattctgcagatctgagagattcctgagtatggtttgtagctttcattaatattgaagtcactgttaaaggtatctttgcacctaattctgtgtattgacgattagaatgcttgtggtgttctactrattgacatatgaacttatctggtctagaaatacaaagtcagatagaggaactgttttggagagacttctacttgcctttcttcaactgtagatttgtgtgaatcttgctggaattcactgtctgctttattttgttcattaccttgttctgtgctacacagtgagagagcagcaagttatcagacatagggacagaaggggaagatgaagatagccttcttgttccataagaagtgggaggtgatgcgggaaagaagacagaaaagctgattcgggaagataacacagcagtttacaaca

SEQ ID NO: 8485 - DNA, 600 bp, Chicken  19866894203243_2
aacatgccatgttgtttccatgatagcactgtctaggaaaccatttacagtggtaagaagagaatacaatatctgacaacttcttgctttgttttaagaggtacacattaaaaatacatctaacgtataggacataaagaatctaaataattttattaaacttctggtagatgtgaatctccagggaattttacatatgcttttgaagaaaactgaaaaacattaggttttgcatttccaggcttaattcatcactttattttgtttttaaaaagaaatctatgcaaaattaagttactraaaaaaaaaaaaaaaaaaaagccccaaaatagaagcctgagcttcataaacattttacatatttgtgtttaatttgttgaaaatagtttaaaatctgctcacatttggcattccaaatacaaatattaggaacctaattccccaatgcagtataattttttaacagtgggatttaagagtcttccaagagatgttacacatactttcattttaggatatggaattttattttcatacagaaaaaaatattgcgtatactttttgtaccttatgaagataagctgaactactgtgtattat

SEQ ID NO: 8486 - DNA, 600 bp, Chicken  19866894203243_3
acatgccatgttgtttccatgatagcactgtctaggaaaccatttacagtggtaagaagagaatacaatatctgacaacttcttgctttgttttaagaggtacacattaaaaatacatctaacgtataggacataaagaatctaaataattttattaaacttctggtagatgtgaatctccagggaattttacatatgcttttgaagaaaactgaaaaacattaggttttgcatttccaggcttaattcatcactttattttgtttttaaaaagaaatctatgcaaaattaagttactaraaaaaaaaaaaaaaaaaaagccccaaaatagaagcctgagcttcataaacattttacatatttgtgtttaatttgttgaaaatagtttaaaatctgctcacatttggcattccaaatacaaatattaggaacctaattccccaatgcagtataattttttaacagtgggatttaagagtcttccaagagatgttacacatactttcattttaggatatggaattttattttcatacagaaaaaaatattgcgtatactttttgtaccttatgaagataagctgaactactgtgtattatt

SEQ ID NO: 8487 - DNA, 599 bp, Chicken  19866894203248_1
  misc_feature (1)..(149): n is any nucleotide
nnnnnnnnnnnnnnnnnnnnnnnnnnnnnnnnnnnnnnnnnnnnnnnnnnnnnnnnnnnnnnnnnnnnnnnnnnnnnnnnnnnnnnnnnnnnnnnnnnnnnnnnnnnnnnnnnnnnnnnnnnnnnnnnnnnnnnnnnnnnnnnnnnnnnctcagtatccacacagctttcacgaggcattatacccagttgtgtaccagcaattactcaagagatcagctgttttcagctccacagttcaggacacaaacctgcaaccacctgaaaacgctgtccatttatccaagcttgtccatttccygcatctttataatatccacaaatgcgtaccccttgaagacaaataaataacaataaacagataaacaaagcaaggggcccagctgcaagggttgacctgagctttgcatttcttccacacaagggctcctgcgcactgcctttccccacggctctgatacctggccaagctggcagccccagccctgagcgggtggatccgcagccgcctggcacgagtggctgggcagaaggagaggaaaacctccaccctgcggcacagctttttcaatcaccagtcagcatcaagrcttctgaaaa

SEQ ID NO: 8488 - DNA, 600 bp, Chicken  19866894203248_2
gtccatttccygcatctttataatatccacaaatgcgtaccccttgaagacaaataaataacaataaacagataaacaaagcaaggggcccagctgcaagggttgacctgagctttgcatttcttccacacaagggctcctgcgcactgcctttccccacggctctgatacctggccaagctggcagccccagccctgagcgggtggatccgcagccgcctggcacgagtggctgggcagaaggagaggaaaacctccaccctgcggcacagctttttcaatcaccagtcagcatcaagrcttctgaaaacaagactaagacaatgaaagatctcagcgatatgactggagccaatactgcctgatttttctttcttttttctttctttttttttttttatttcctycatgaaaatgaatcaaaagttcctgtctgataatatcttccagcacacaagtcccagccagtggcacatgccaggctggggtggagaactacaaacatccccggctctggctgcaagggcagacacagtgcttgtcaggatcaggctctcagctcccagcttccactctactaatggctagtgcaggatgagg

SEQ ID NO: 8489 - DNA, 600 bp, Chicken  19866894203248_3
gcccagctgcaagggttgacctgagctttgcatttcttccacacaagggctcctgcgcactgcctttccccacggctctgatacctggccaagctggcagccccagccctgagcgggtggatccgcagccgcctggcacgagtggctgggcagaaggagaggaaaacctccaccctgcggcacagctttttcaatcaccagtcagcatcaagrcttctgaaaacaagactaagacaatgaaagatctcagcgatatgactggagccaatactgcctgatttttctttcttttttctttcrttttttttttttatttcctycatgaaaatgaatcaaaagttcctgtctgataatatcttccagcacacaagtcccagccagtggcacatgccaggctggggtggagaactacaaacatccccggctctggctgcaagggcagacacagtgcttgtcaggatcaggctctcagctcccagcttccactctactaatggctagtgcaggatgagggggaaaaatctgttcagtatttacgtatgaaaataggatttatggcttaaaaaaaaaatagaaaaaaagaaaatctaatcagcattt

SEQ ID NO: 8490 - DNA, 600 bp, Chicken  19866894203248_4; identical to SEQ ID NO: 8489

SEQ ID NO: 8491 - DNA, 600 bp, Chicken  19866894203248_5
ctgagctttgcatttcttccacacaagggctcctgcgcactgcctttccccacggctctgatacctggccaagctggcagccccagccctgagcgggtggatccgcagccgcctggcacgagtggctgggcagaaggagaggaaaacctccaccctgcggcacagctttttcaatcaccagtcagcatcaagrcttctgaaaacaagactaagacaatgaaagatctcagcgatatgactggagccaatactgcctgatttttctttcttttttctttctttttttttttttatttcctycatgaaaatgaatcaaaagttcctgtctgataatatcttccagcacacaagtcccagccagtggcacatgccaggctggggtggagaactacaaacatccccggctctggctgcaagggcagacacagtgcttgtcaggatcaggctctcagctcccagcttccactctactaatggctagtgcaggatgagggggaaaaatctgttcagtatttacgtatgaaaataggatttatggcttaaaaaaaaaatagaaaaaaagaaaatctaatcagcattttgagatcttttcttttcttg

SEQ ID NO: 8492 - DNA, 600 bp, Chicken  19866894203251_1
cgagtgccagttaatcaggttttcttactgtccaaatatctgatggaggttttgtttctatatgatgttctgcttatgtgctctcattcatagttttgcagttattcaagataggaaacaaacatgcttaattctgcttctacagcacctatgtctgagggcagtataaagctgttacctctgcatagctgagaggcaggtgtgcctcaggtaacccaatcatttggtgcactgggtttgttgatatcaaataaaacagtatttgctttggtgccaaaactacataaagcagttaggaarggcagagctaaacacatcaccaaacaacccgaggatttccagggtgcctagaggatgcaattgcctgctgctctgccccttcatcagcatggatggagctcttgctgtgcaggacaacctgtaagctagcagtggtgttagtcaaccctgcacacttggtttttaatagctaattatctctgtgctgagatccccagcacctcgaaggagcaaagctgcaataagtctaggcacagtagtgatctttgtggggttgcagccttcaaacgtgcagctgacaggaaagggaaaacacgtctc

SEQ ID NO: 8493 - DNA, 599 bp, Chicken  19866894203252_1
  misc_feature (1)..(145): n is any nucleotide
nnnnnnnnnnnnnnnnnnnnnnnnnnnnnnnnnnnnnnnnnnnnnnnnnnnnnnnnnnnnnnnnnnnnnnnnnnnnnnnnnnnnnnnnnnnnnnnnnnnnnnnnnnnnnnnnnnnnnnnnnnnnnnnnnnnnnnnnnnnnnnnnngcagttagcaggcagtggcaagctgtcagcaggcaggtacagcccccagccagagctgctgtcctgctgagacagcaaacccagagcccagactgccactggtgcagccaccaaagggtgggtgatggcggattttggtctaattttagcccagrgaagccttgctgaayggagcggctcacagctcagcagagcgaktgatggaaactttgtcttgtctcgggagctcgcgttgcttttaggcccrcgagggaagagtttgatgcctcccagcacagtttaaatgcagcacaggaaaaagaaaagccaccaaagaaaacaaaaccccccaccccgtttggtaaaattcgggtgaaaaggtaccgacagatcctcggggttttccccatggtgctgtaccttcaaaacacccataaaaggtcagggttgatgagccctgttttgcacatgtgaa

SEQ ID NO: 8494 - DNA, 599 bp, Chicken  19866894203252_2
  misc_feature (1)..(130): n is any nucleotide
nnnnnnnnnnnnnnnnnnnnnnnnnnnnnnnnnnnnnnnnnnnnnnnnnnnnnnnnnnnnnnnnnnnnnnnnnnnnnnnnnnnnnnnnnnnnnnnnnnnnnnnnnnnnnnnnnnnnnnnnnnnnnnnnnngcagttagcaggcagtggcaagctgtcagcaggcaggtacagcccccagccagagctgctgtcctgctgagacagcaaacccagagcccagactgccactggtgcagccaccaaagggtgggtgatggcggattttggtctaattttagcccagrgaagccttgctgaayggagcggctcacagctcagcagagcgaktgatggaaactttgtcttgtctcgggagctcgcgttgcttttaggcccrcgagggaagagtttgatgcctcccagcacagtttaaatgcagcacaggaaaaagaaaagccaccaaagaaaacaaaaccccccaccccgtttggtaaaattcgggtgaaaaggtaccgacagatcctcggggttttccccatggtgctgtaccttcaaaacacccataaaaggtcagggttgatgagccctgttttgcacatgtgaaacagatggggagctg

SEQ ID NO: 8495 - DNA, 599 bp, Chicken  19866894203252_3
  misc_feature (1)..(102): n is any nucleotide
nnnnnnnnnnnnnnnnnnnnnnnnnnnnnnnnnnnnnnnnnnnnnnnnnnnnnnnnnnnnnnnnnnnnnnnnnnnnnnnnnnnnnnnnnnnnnnnnnnnnnngcagttagcaggcagtggcaagctgtcagcaggcaggtacagcccccagccagagctgctgtcctgctgagacagcaaacccagagcccagactgccactggtgcagccaccaaagggtgggtgatggcggattttggtctaattttagcccagrgaagccttgctgaayggagcggctcacagctcagcagagcgaktgatggaaactttgtcttgtctcgggagctcgcgttgcttttaggcccrcgagggaagagtttgatgcctcccagcacagtttaaatgcagcacaggaaaaagaaaagccaccaaagaaaacaaaaccccccaccccgtttggtaaaattcgggtgaaaaggtaccgacagatcctcggggttttccccatggtgctgtaccttcaaaacacccataaaaggtcagggttgatgagccctgttttgcacatgtgaaacagatggggagctgagctctcggtgcagagggaggagcagag

SEQ ID NO: 8496 - DNA, 599 bp, Chicken  19866894203252_4
  misc_feature (1)..(53): n is any nucleotide
nnnnnnnnnnnnnnnnnnnnnnnnnnnnnnnnnnnnnnnnnnnnnnnnnnnnngcagttagcaggcagtggcaagctgtcagcaggcaggtacagcccccagccagagctgctgtcctgctgagacagcaaacccagagcccagactgccactggtgcagccaccaaagggtgggtgatggcggattttggtctaattttagcccagrgaagccttgctgaayggagcggctcacagctcagcagagcgaktgatggaaactttgtcttgtctcgggagctcgcgttgcttttaggcccrcgagggaagagtttgatgcctcccagcacagtttaaatgcagcacaggaaaaagaaaagccaccaaagaaaacaaaaccccccaccccgtttggtaaaattcgggtgaaaaggtaccgacagatcctcggggttttccccatggtgctgtaccttcaaaacacccataaaaggtcagggttgatgagccctgttttgcacatgtgaaacagatggggagctgagctctcggtgcagagggaggagcagagtggggacactgagccgtggcctctgagccccccgtgctgtcctggctgc

SEQ ID NO: 8497 - DNA, 600 bp, Chicken  19866894203254_1
acacaaagaatgtataatcactgatcagtgagatcagcatcctctcaggagaaagttattgaatatagtaaaaatggaagttgcttcataaaacagattaataacatgaaatttagataaacttaattaaggcatcccaagcaaatagactagacaacctcctaattacttaaaacagtaacttgtgaagagaagcatgttataagcctttactacagatgcttaagaattaactagctgaaggactaatggcatagtgtatttgtgcattcagttattcaggaatgtttttcctaactwcagtgatataaagaaaaaatgaaaggtgataatcttcaggtgctgtcatatttctatatacattttctatacattttgcttagaaatgtctaccagtaagctttttcaagaaaaaaaaaatatataaatatatatatttcatgtatctcactgtattttactgtgagattgcttcagttaaaaaggcagtgcagtagttatttttgcacttatattaatagagatgtttagtttgccaacaggggaaccctgctactaactgcacccgacagcagccaatcatgccatattcatagtgca

SEQ ID NO: 8498 - DNA, 600 bp, Chicken  19866894203255_1
acacccaccctagaggagataagcgtggttttgtttcataaactgttatctccgtttgccacctcaagacttcgttatcagttcttgcactttactactgctgttacactttgaccttatttcagtttggccctgcccccacaccctattcctcatccctctgcccaccactccagcacagagaaatgcaattgcctcctgcaccacagcagggcagccccagaaccacccacctccaaagagtgcacaccagctgccatccctctgcactgggggacagggcagcagctccaggaggayggccaccctcatgcagctcagcccttgcttgcagaagagtctgagccccactgtattttcaagccctttaggtggccctgctagagcagggggtaggaccacatgaactccccgcacgtgtccagaaagactggcaactccctgctcttccccagaggctcagctaaggaccaagtttaggcaaagagccataaactcgtgggctcagctgttctttcagacccacggatctaaactgcactccaagtccttctgaaataagtaagcaggcagctcagctgctaaacaccattaacttcc

SEQ ID NO: 8499 - DNA, 600 bp, Chicken  19866894203256_1
aactgataacaaagtcttgaggtggcaaacggagataacagtttatgaaacaaaaccacgcttatctcctctagggtggtgttgttgatggttttgcagggagataaaaataaggatttgcagaggactttggtcataactggcctcaagctaccaagagcaggaaaggggcagagggggcattccccaccggcaggagtctctctctgcccagaagtgtgagcaataacacctacctgcttcttccacctctgttgcagtctattccagagtgcatccatattaaccgtgatgaccacwggaatttactccatagttcaacgatgctgtgttgtctggcccttagattactttacagggggttcatggtttactattctttgccgattgtttggcttggctctgtttgcytgtacttgtttgaagtggatcgtgcctcttgagctggattttgctactgtagttaaaattacttgggtttcatttttgcctgttttgtttgacagaaagtgaaacgaccgacagcgttccaagcgatgaagaaaatgcagaggtaagtgtgttctggatttgcaatgctttggagcaagatttcaaagt

SEQ ID NO: 8500 - DNA, 600 bp, Chicken  19866894203256_2
aaggatttgcagaggactttggtcataactggcctcaagctaccaagagcaggaaaggggcagagggggcattccccaccggcaggagtctctctctgcccagaagtgtgagcaataacacctacctgcttcttccacctctgttgcagtctattccagagtgcatccatattaaccgtgatgaccacwggaatttactccatagttcaacgatgctgtgttgtctggcccttagattactttacagggggttcatggtttactattctttgccgattgtttggcttggctctgtttgcytgtacttgtttgaagtggatcgtgcctcttgagctggattttgctactgtagttaaaattacttgggtttcatttttgcctgttttgtttgacagaaagtgaaacgaccgacagcgttccaagcgatgaagaaaatgcagaggtaagtgtgttctggatttgcaatgctttggagcaagatttcaaagtagtgtcctgagggattctttccacttcttcatttgcaactgtctgctagcggagcatttgtgtttcatagctgtgagagaaagaaaaggtaggaagcttcagaggagacaa

SEQ ID NO: 8501 - DNA, 599 bp, Chicken  19866894203258_1
  misc_feature (1)..(110): n is any nucleotide
nnnnnnnnnnnnnnnnnnnnnnnnnnnnnnnnnnnnnnnnnnnnnnnnnnnnnnnnnnnnnnnnnnnnnnnnnnnnnnnnnnnnnnnnnnnnnnnnnnnnnnnnnnnnnnataacggataagaggtgggattttgaaagctttattttgcttacagcaaagtaacagaataatccatttcagttgcctggaaaaaggacaataaaataattactttgctaattttaggtgatggagcgaatggctcaaacctgaagtacagacaaccattttttatccaataggttgatctcatgaatgragatgaaccaaaccartgcttttactcctccattagctaggggattrtggctttttaccaagtttggccaatgcakrtttctatatatcgagaccctggcatggagtcctgccccagaatgggcaccttgtttcattgcgccatgtgtggggaatgagcagggctgcaaaccagcaggagttgtggggagtggatgggaagcactgagggcttattttacagctggtgcacatttgatgggcataattcacgtgactggatacgatgctatctttgtatctccagaacttactgtaatg

SEQ ID NO: 8502 - DNA, 599 bp, Chicken  19866894203258_2
  misc_feature (1)..(94): n is any nucleotide
nnnnnnnnnnnnnnnnnnnnnnnnnnnnnnnnnnnnnnnnnnnnnnnnnnnnnnnnnnnnnnnnnnnnnnnnnnnnnnnnnnnnnnnnnnnnnnataacggataagaggtgggattttgaaagctttattttgcttacagcaaagtaacagaataatccatttcagttgcctggaaaaaggacaataaaataattactttgctaattttaggtgatggagcgaatggctcaaacctgaagtacagacaaccattttttatccaataggttgatctcatgaatgragatgaaccaaaccartgcttttactcctccattagctaggggattrtggctttttaccaagtttggccaatgcakrtttctatatatcgagaccctggcatggagtcctgccccagaatgggcaccttgtttcattgcgccatgtgtggggaatgagcagggctgcaaaccagcaggagttgtggggagtggatgggaagcactgagggcttattttacagctggtgcacatttgatgggcataattcacgtgactggatacgatgctatctttgtatctccagaacttactgtaatgccacagagtcttcagt

SEQ ID NO: 8503 - DNA, 599 bp, Chicken  19866894203258_3
  misc_feature (1)..(63): n is any nucleotide
nnnnnnnnnnnnnnnnnnnnnnnnnnnnnnnnnnnnnnnnnnnnnnnnnnnnnnnnnnnnnnnataacggataagaggtgggattttgaaagctttattttgcttacagcaaagtaacagaataatccatttcagttgcctggaaaaaggacaataaaataattactttgctaattttaggtgatggagcgaatggctcaaacctgaagtacagacaaccattttttatccaataggttgatctcatgaatgragatgaaccaaaccartgcttttactcctccattagctaggggattrtggctttttaccaagtttggccaatgcakrtttctatatatcgagaccctggcatggagtcctgccccagaatgggcaccttgtttcattgcgccatgtgtggggaatgagcagggctgcaaaccagcaggagttgtggggagtggatgggaagcactgagggcttattttacagctggtgcacatttgatgggcataattcacgtgactggatacgatgctatctttgtatctccagaacttactgtaatgccacagagtcttcagtatgaccaagaacaagaatgccatgcaagcaa

SEQ ID NO: 8504 - DNA, 599 bp, Chicken  19866894203258_4
  misc_feature (1)..(34): n is any nucleotide
nnnnnnnnnnnnnnnnnnnnnnnnnnnnnnnnnnataacggataagaggtgggattttgaaagctttattttgcttacagcaaagtaacagaataatccatttcagttgcctggaaaaaggacaataaaataattactttgctaattttaggtgatggagcgaatggctcaaacctgaagtacagacaaccattttttatccaataggttgatctcatgaatgragatgaaccaaaccartgcttttactcctccattagctaggggattrtggctttttaccaagtttggccaatgcakrtttctatatatcgagaccctggcatggagtcctgccccagaatgggcaccttgtttcattgcgccatgtgtggggaatgagcagggctgcaaaccagcaggagttgtggggagtggatgggaagcactgagggcttattttacagctggtgcacatttgatgggcataattcacgtgactggatacgatgctatctttgtatctccagaacttactgtaatgccacagagtcttcagtatgaccaagaacaagaatgccatgcaagcaacattcagatatcactgtctccacaaaata

SEQ ID NO: 8505 - DNA, 599 bp, Chicken  19866894203258_5
  misc_feature (1)..(33): n is any nucleotide
nnnnnnnnnnnnnnnnnnnnnnnnnnnnnnnnnataacggataagaggtgggattttgaaagctttattttgcttacagcaaagtaacagaataatccatttcagttgcctggaaaaaggacaataaaataattactttgctaattttaggtgatggagcgaatggctcaaacctgaagtacagacaaccattttttatccaataggttgatctcatgaatgragatgaaccaaaccartgcttttactcctccattagctaggggattrtggctttttaccaagtttggccaatgcakrtttctatatatcgagaccctggcatggagtcctgccccagaatgggcaccttgtttcattgcgccatgtgtggggaatgagcagggctgcaaaccagcaggagttgtggggagtggatgggaagcactgagggcttattttacagctggtgcacatttgatgggcataattcacgtgactggatacgatgctatctttgtatctccagaacttactgtaatgccacagagtcttcagtatgaccaagaacaagaatgccatgcaagcaacattcagatatcactgtctccacaaaatat

SEQ ID NO: 8506 - DNA, 600 bp, Chicken  19866894203260_1
tgggccgggtgcagctggctgctgcaggatgtgctcctcctttgctgagtgtgaaagcccctgtgcagcccagccctgctctgtgtggccactatcagggtgtagcttcacctgctgctgctcctgggacaggctctcctctcctcgtgccgccggggctattacagtaaattgccagatgcaattgcttggccatctcatagatttgtatctcaagtgtcctttggaaagggagccctcaggtgatgctgggaatgttaaaacgataaatccacttcttcccattgcccttctgcagarcagtgttagctattgtaccggtgtgtgggcagctctgtgccttctgcagggcaggagcagagagcagctgggccttgttcttgtctgctccctcagctgcaccccatagcactgtgctcagacccctcacagctctgctgcccgtccctggacacactgcagggcctcactgccttccttgtgatgagggacccagcaccaaacacagcactcgaggtgcagccagatgtgacaaaataggggttaactcccccagcagtatggaagacctcraaatatttagagcagatagaaaaagag

SEQ ID NO: 8507 - DNA, 504 bp, Chicken  19866894203260_2
acttcttcccattgcccttctgcagarcagtgttagctattgtaccggtgtgtgggcagctctgtgccttctgcagggcaggagcagagagcagctgggccttgttcttgtctgctccctcagctgcaccccatagcactgtgctcagacccctcacagctctgctgcccgtccctggacacactgcagggcctcactgccttccttgtgatgagggacccagcaccaaacacagcactcgaggtgcagccagatgtgacaaaataggggttaactcccccagcagtatggaagacctcraaatatttagagcagatagaaaaagagacgcttcagcgtgccctgggttggcaccatagcatcccatcctgcttcacccactgccacgtgccaccgatggccgaatgggcactgccctcattcacaggtgctgcaattacaccggtgacatcacgtcaaaactggccagcagcagcaatatgcacacggggctgggagggggta

SEQ ID NO: 8508 - DNA, 600 bp, Chicken  19866894203264_1
tgaatgcatcaatcctctgagtaataaataacaaaatcattgctacagagggttattttagaaggcaggttcttattgtcatctatcctggcaataaatactcttccttccttgtctcctatagaatagcagtgttttcagtgagtgtgctgcacgatgaaaggatagttattgttgctgagcaaaggccggattccacagaggaagacagttttcagtggatgagcagagtcctgcaggtaatgcttttaatgtatgtttggaagctgcttttcctatttcttttttttcaattgaacrtttagaccttcacagtaacctgacatttgtgtttgagcgattgtgagcacagcttcagtcacacttccacctccctgctaagcacgaaatgagcttcttctgggtgacarttcctgtccagaccacatatgtccagtgtgtaaaacataactaaagtgctgtaagaaagcagggatgaattgaagcaagtaatagcaaaaagacagtagcatgtagtcatgagaatatagtaattcattactacaaaaatgtaatgaatgaatgcatgtatacttactttttaaagctaacaaactctta

SEQ ID NO: 8509 - DNA, 600 bp, Chicken  19866894203264_2
cttgtctcctatagaatagcagtgttttcagtgagtgtgctgcacgatgaaaggatagttattgttgctgagcaaaggccggattccacagaggaagacagttttcagtggatgagcagagtcctgcaggtaatgcttttaatgtatgtttggaagctgcttttcctatttcttttttttcaattgaacrtttagaccttcacagtaacctgacatttgtgtttgagcgattgtgagcacagcttcagtcacacttccacctccctgctaagcacgaaatgagcttcttctgggtgacarttcctgtccagaccacatatgtccagtgtgtaaaacataactaaagtgctgtaagaaagcagggatgaattgaagcaagtaatagcaaaaagacagtagcatgtagtcatgagaatatagtaattcattactacaaaaatgtaatgaatgaatgcatgtatacttactttttaaagctaacaaactcttactaaacaaagtttggcactgttacggagttgaccttatcaaaagtatatatacgtaactgaactagatcttcagatttgtttttaataaatggaaaagaattatgtgttt

SEQ ID NO: 8510 - DNA, 600 bp, Chicken  19866894203271_1
atctgaccagggctcagaggataaatgccttacctcattaagtttgaatgttctatctcaatctggtttagaactgagcagcagctgagagctgccaatctgctgtacgagcaagagaacagaaatactgctacaggccgggatatggacacatttagtatttggctctcttttactgtcccctgctcctagctcacttgcttccaaggatcatcacttcacccagtatgactacatgtcagctccaattgagatgatccctcttctcaacagacagcgtttctgtgcctgaagtgcaaygttatttatacattacagaccacattcctcctgcctaactcatgctggtggctcccactgtcaccactgaagagcagcagccaaggcggcagcttgcctatccgagttaacctctcagggatgagtcacgcacacttcatttgactctaaaataggtggaagtcctggtctgggtaaaggggagtcagatagctggcctcaaatcaaaggcagctttgctccaataggaagaggctgacaagagctggttttaaaacgaggcagaagccccatgaggagcccaggacaaggtacacaaca

SEQ ID NO: 8511 - DNA, 600 bp, Chicken  19866894203278_1
tttccatcaattttgtgtaagcaaaaatggaagaaggaaaagcatatcatgacttagagttcctaaaaagtcattgcccagaagaaagtctcttctatgtttacttttaaaatgatgcaaacaaatacagtttttggaaaaaaatgagcaacaaaataattgagctacacttgcctggaagctgtgatagcaagtgccatgagattcggttttgcaaatgctcatcagttctacatattattaagctcatttttttgtttattttttctgacaattgatgttcaggtcctaattgctgcyattggagctaatattaaatctcctattaatgctcacatgggtcgcacatgggccttccaggagccctcttagtacatggttagcgcttccaattcctgctgcttatgtgagaggggcatccaggcagagaaaaattcactcccttcagaaaattgcagtggaggtagcagagccagagacaccttgctgaaggccctgctgtaggtctagagtatcagtactcggtgcttaacaagcagccttaatgggattgagcattaattgatgcttttgaggaaggtaccctcaaatgagtggcca

SEQ ID NO: 8512 - DNA, 600 bp, Chicken  19866894203283_1
cagttattaacacataatgaaaaagaagctcagctgccagcagggtggaggagctgaacattggttaaagctttggcccattatcactgggtttctatgaagccagtgtgaaaaggagggggacaaaagcaaagacatccaccagcagaatgctgataatgaaacattcatttattaattcatttttttattctttacaaagtatcctaggccaaacttcccccctaacactccttattctttgacattaaacaacttttcttgggaaaacaagaccttaaatgtcaacctaaattgtcytcatgacacaagcatctctcktgaacttatttttcctagcataataccttcaagatagagcacagctaatgtctcaacctcttcagtcactctttcgaactactagatcacctcctaatatctggatggacaagagccctaactttaagtgtaaccttctaaaataaattcatgatataaccataaatgatccacaaccagaagctcttactgatgactcagatcttctgacagtcttacctagatccccagcagtgtacctggatacgcatcccaaaatgccagcatctggaaaaggta

SEQ ID NO: 8513 - DNA, 600 bp, Chicken  19866894203283_2
aaagaagctcagctgccagcagggtggaggagctgaacattggttaaagctttggcccattatcactgggtttctatgaagccagtgtgaaaaggagggggacaaaagcaaagacatccaccagcagaatgctgataatgaaacattcatttattaattcatttttttattctttacaaagtatcctaggccaaacttcccccctaacactccttattctttgacattaaacaacttttcttgggaaaacaagaccttaaatgtcaacctaaattgtcytcatgacacaagcatctctcktgaacttatttttcctagcataataccttcaagatagagcacagctaatgtctcaacctcttcagtcactctttcgaactactagatcacctcctaatatctggatggacaagagccctaactttaagtgtaaccttctaaaataaattcatgatataaccataaatgatccacaaccagaagctcttactgatgactcagatcttctgacagtcttacctagatccccagcagtgtacctggatacgcatcccaaaatgccagcatctggaaaaggtaggctaagcccagtcacattca

SEQ ID NO: 8514 - DNA, 599 bp, Chicken  19866894203289_1
  misc_feature (1)..(120): n is any nucleotide
nnnnnnnnnnnnnnnnnnnnnnnnnnnnnnnnnnnnnnnnnnnnnnnnnnnnnnnnnnnnnnnnnnnnnnnnnnnnnnnnnnnnnnnnnnnnnnnnnnnnnnnnnnnnnnnnnnnnnnnnctgctttaaaagcattctatagcataaaagtccttaagcttgttttttaaactggattccttaattacactgaaaaattagtaggaataaccacgtatggttattttactctgagcaagaaacttttttaatgaacagatctggctgtaaactgaactcctagcaattaatgaaagctcrtattcccatcaaggatgctactgaggtgtttcccamgcagctctctaaaacacgtcttctgaccatttaaatagttctaaggactaaaaccaragctaaatttgcacattttgcagaaacatttccctcctcactccacaagcactcagggtttgggttcacagggattttcagttgattggtgktttttttcygtgtgtgttggttacttagggattttctttttgtttatctcacagtagagactaaagaatgcacttgacctgattttatccagagatatgataagaagttttgaa

SEQ ID NO: 8515 - DNA, 599 bp, Chicken  19866894203289_2
  misc_feature (1)..(84): n is any nucleotide
nnnnnnnnnnnnnnnnnnnnnnnnnnnnnnnnnnnnnnnnnnnnnnnnnnnnnnnnnnnnnnnnnnnnnnnnnnnnnnnnnnnnctgctttaaaagcattctatagcataaaagtccttaagcttgttttttaaactggattccttaattacactgaaaaattagtaggaataaccacgtatggttattttactctgagcaagaaacttttttaatgaacagatctggctgtaaactgaactcctagcaattaatgaaagctcrtattcccatcaaggatgctactgaggtgtttcccamgcagctctctaaaacacgtcttctgaccatttaaatagttctaaggactaaaaccaragctaaatttgcacattttgcagaaacatttccctcctcactccacaagcactcagggtttgggttcacagggattttcagttgattggtgktttttttcygtgtgtgttggttacttagggattttctttttgtttatctcacagtagagactaaagaatgcacttgacctgattttatccagagatatgataagaagttttgaaaatattttcaacttgcatcacaaatgaagtgtattg

SEQ ID NO: 8516 - DNA, 599 bp, Chicken  19866894203289_3
  misc_feature (1)..(27): n is any nucleotide
nnnnnnnnnnnnnnnnnnnnnnnnnnnctgctttaaaagcattctatagcataaaagtccttaagcttgttttttaaactggattccttaattacactgaaaaattagtaggaataaccacgtatggttattttactctgagcaagaaacttttttaatgaacagatctggctgtaaactgaactcctagcaattaatgaaagctcrtattcccatcaaggatgctactgaggtgtttcccamgcagctctctaaaacacgtcttctgaccatttaaatagttctaaggactaaaaccaragctaaatttgcacattttgcagaaacatttccctcctcactccacaagcactcagggtttgggttcacagggattttcagttgattggtgktttttttcygtgtgtgttggttacttagggattttctttttgtttatctcacagtagagactaaagaatgcacttgacctgattttatccagagatatgataagaagttttgaaaatattttcaacttgcatcacaaatgaagtgtattgtgggtacactgtactagaagcagcaaagactctttatagaactattttgcaaactaa

SEQ ID NO: 8517 - DNA, 600 bp, Chicken  19866894203289_4
tacactgaaaaattagtaggaataaccacgtatggttattttactctgagcaagaaacttttttaatgaacagatctggctgtaaactgaactcctagcaattaatgaaagctcrtattcccatcaaggatgctactgaggtgtttcccamgcagctctctaaaacacgtcttctgaccatttaaatagttctaaggactaaaaccaragctaaatttgcacattttgcagaaacatttccctcctcactccacaagcactcagggtttgggttcacagggattttcagttgattggtgktttttttcygtgtgtgttggttacttagggattttctttttgtttatctcacagtagagactaaagaatgcacttgacctgattttatccagagatatgataagaagttttgaaaatattttcaacttgcatcacaaatgaagtgtattgtgggtacactgtactagaagcagcaaagactctttatagaactattttgcaaactaaaaatagtagactgtgacaygtaagttataagaaattaaagcataatcctatttaagatgtggccacaatcagaaggtgacagaaggaaacata

SEQ ID NO: 8518 - DNA, 600 bp, Chicken  19866894203289_5
aaaattagtaggaataaccacgtatggttattttactctgagcaagaaacttttttaatgaacagatctggctgtaaactgaactcctagcaattaatgaaagctcrtattcccatcaaggatgctactgaggtgtttcccamgcagctctctaaaacacgtcttctgaccatttaaatagttctaaggactaaaaccaragctaaatttgcacattttgcagaaacatttccctcctcactccacaagcactcagggtttgggttcacagggattttcagttgattggtgktttttttkygtgtgtgttggttacttagggattttctttttgtttatctcacagtagagactaaagaatgcacttgacctgattttatccagagatatgataagaagttttgaaaatattttcaacttgcatcacaaatgaagtgtattgtgggtacactgtactagaagcagcaaagactctttatagaactattttgcaaactaaaaatagtagactgtgacaygtaagttataagaaattaaagcataatcctatttaagatgtggccacaatcagaaggtgacagaaggaaacataagttctgt

SEQ ID NO: 8519 - DNA, 600 bp, Chicken  19866894203289_6
aaattagtaggaataaccacgtatggttattttactctgagcaagaaacttttttaatgaacagatctggctgtaaactgaactcctagcaattaatgaaagctcrtattcccatcaaggatgctactgaggtgtttcccamgcagctctctaaaacacgtcttctgaccatttaaatagttctaaggactaaaaccaragctaaatttgcacattttgcagaaacatttccctcctcactccacaagcactcagggtttgggttcacagggattttcagttgattggtgktttttttcygtgtgtgttggttacttagggattttctttttgtttatctcacagtagagactaaagaatgcacttgacctgattttatccagagatatgataagaagttttgaaaatattttcaacttgcatcacaaatgaagtgtattgtgggtacactgtactagaagcagcaaagactctttatagaactattttgcaaactaaaaatagtagactgtgacaygtaagttataagaaattaaagcataatcctatttaagatgtggccacaatcagaaggtgacagaaggaaacataagttctgtt

SEQ ID NO: 8520 - DNA, 600 bp, Chicken  19866894203289_7
tgcagaaacatttccctcctcactccacaagcactcagggtttgggttcacagggattttcagttgattggtgktttttttcygtgtgtgttggttacttagggattttctttttgtttatctcacagtagagactaaagaatgcacttgacctgattttatccagagatatgataagaagttttgaaaatattttcaacttgcatcacaaatgaagtgtattgtgggtacactgtactagaagcagcaaagactctttatagaactattttgcaaactaaaaatagtagactgtgacaygtaagttataagaaattaaagcataatcctatttaagatgtggccacaatcagaaggtgacagaaggaaacataagttctgttttctccatgctttcctcctgccttatgcagaacataagaagaatgttaagagaattagtttattgtaacctcgacagctctgcatggaggcagttgccatttcctcctgcaaatacctggaggaaggtacagaatacttatagtgcagaacgttttcttcatgctttacttgagaattaagtcttatatctttttttggtccttctagaataatcaa

SEQ ID NO: 8521 - DNA, 600 bp, Chicken  19866894203294_1
agagctggaagcatggagggcagcacagatatgcatggagttcagcaggaatgggatggcttacgtatgtcagtgggctggcaagaagaaagcacgtagtctgtgagcttgcaggagtctcctgaattaatcttagatatagctcattttgtggcaagttcattttaattaaaaatatatattacatcataagattgttttttttaacttgtgtgtgtgtgtgtgtgtgtgtgtttgcttttggggaccttaccttctcttattgcaaagctgagaccaaagaagttgctttgtttttaraagtggctagatcttaggatcaaattgcttaatgtatcaaactgtagcagagtattcatttttcccatccaccttcccttttatgcagttgcactctgtgtttttgcagaactcagcctgctacctgcatcggtcaccatgccctctgcagaagttggtatcaaataatgaatactcaagttgctgtcttcagctcaagtgatttgaccttgccatcagtgcaatattgaatgcaggcaggtctgagcccagttctccaattgccagtggtaggtgtaagctgcctcgtgacttggatgc

SEQ ID NO: 8522 - DNA, 599 bp, Chicken  19866894203295_1
  misc_feature (1)..(140): n is any nucleotide
nnnnnnnnnnnnnnnnnnnnnnnnnnnnnnnnnnnnnnnnnnnnnnnnnnnnnnnnnnnnnnnnnnnnnnnnnnnnnnnnnnnnnnnnnnnnnnnnnnnnnnnnnnnnnnnnnnnnnnnnnnnnnnnnnnnnnnnnnnnnctcctctactccttcattttcctctgttctgtcagcctccagcctcttttcattccactgcatcccagcccttgctttaagagctctgtaaggtctagatcctgccacaacatttttccaagaggagtagatgatgctgcagtttgaacatatgtcgatktctgtaacaggcagtagagtgatttagtctgtttgcctatagtttgcaagacttacattagcatacgttgtatagcataatgctttgctgaagggctacaaccaggcagcagggagaaggggcagyttcctcctttgtckcaggagctgcaacctccctcagacaaaatctttyaggagggatgagttctccttcccagggtgagtaaagcaagagggaacaacaaactagtgagttatagtttgtgttaccaggcgcagttgttgtcacgtggacccttagtgtttgcagataaacat

SEQ ID NO: 8523 - DNA, 599 bp, Chicken  19866894203295_2
  misc_feature (1)..(14): n is any nucleotide
nnnnnnnnnnnnnnctcctctactccttcattttcctctgttctgtcagcctccagcctcttttcattccactgcatcccagcccttgctttaagagctctgtaaggtctagatcctgccacaacatttttccaagaggagtagatgatgctgcagtttgaacatatgtcgatktctgtaacaggcagtagagtgatttagtctgtttgcctatagtttgcaagacttacattagcatacgttgtatagcataatgctttgctgaagggctacaaccaggcagcagggagaaggggcagyttcctcctttgtckcaggagctgcaacctccctcagacaaaatctttyaggagggatgagttctccttcccagggtgagtaaagcaagagggaacaacaaactagtgagttatagtttgtgttaccaggcgcagttgttgtcacgtggacccttagtgtttgcagataaacatgtgatacccaaagtagatgcataggctggggcagctccaactccttaacaactgacagtamgggataatggtttcgcacattgcaaccaaaccctcctacagatrgataacacgggtcctgggact

SEQ ID NO: 8524 - DNA, 600 bp, Chicken  19866894203295_3
ctcctctactccttcattttcctctgttctgtcagcctccagcctcttttcattccactgcatcccagcccttgctttaagagctctgtaaggtctagatcctgccacaacatttttccaagaggagtagatgatgctgcagtttgaacatatgtcgatktctgtaacaggcagtagagtgatttagtctgtttgcctatagtttgcaagacttacattagcatacgttgtatagcataatgctttgctgaagggctacaaccaggcagcagggagaaggggcagyttcctcctttgtckcaggagctgcaacctccctcagacaaaatctttyaggagggatgagttctccttcccagggtgagtaaagcaagagggaacaacaaactagtgagttatagtttgtgttaccaggcgcagttgttgtcacgtggacccttagtgtttgcagataaacatgtgatacccaaagtagatgcataggctggggcagctccaactccttaacaactgacagtamgggataatggtttcgcacattgcaaccaaaccctcctacagatrgataacacgggtcctgggactatttacagcaacttt

SEQ ID NO: 8525 - DNA, 600 bp, Chicken  19866894203295_4
gcctccagcctcttttcattccactgcatcccagcccttgctttaagagctctgtaaggtctagatcctgccacaacatttttccaagaggagtagatgatgctgcagtttgaacatatgtcgatktctgtaacaggcagtagagtgatttagtctgtttgcctatagtttgcaagacttacattagcatacgttgtatagcataatgctttgctgaagggctacaaccaggcagcagggagaaggggcagyttcctcctttgtckcaggagctgcaacctccctcagacaaaatctttyaggagggatgagttctccttcccagggtgagtaaagcaagagggaacaacaaactagtgagttatagtttgtgttaccaggcgcagttgttgtcacgtggacccttagtgtttgcagataaacatgtgatacccaaagtagatgcataggctggggcagctccaactccttaacaactgacagtamgggataatggtttcgcacattgcaaccaaaccctcctacagatrgataacacgggtcctgggactatttacagcaactttgacacctgcaactgctctgtaggcggacaagcgc

SEQ ID NO: 8526 - DNA, 600 bp, Chicken  19866894203295_5
gcatacgttgtatagcataatgctttgctgaagggctacaaccaggcagcagggagaaggggcagyttcctcctttgtckcaggagctgcaacctccctcagacaaaatctttyaggagggatgagttctccttcccagggtgagtaaagcaagagggaacaacaaactagtgagttatagtttgtgttaccaggcgcagttgttgtcacgtggacccttagtgtttgcagataaacatgtgatacccaaagtagatgcataggctggggcagctccaactccttaacaactgacagtamgggataatggtttcgcacattgcaaccaaaccctcctacagatrgataacacgggtcctgggactatttacagcaactttgacacctgcaactgctctgtaggcggacaagcgcaaggctccatgccaactctgtgcccaagtatcaaatccctctgcagaatttgaatactttgaatacctctgcctaaagtgcacagagaaacaaatcctttcattattgtacctgaggacagcagagttcctaccaaagcaagttttcattgtgaaaatatttaaagcatatacattcattaagtat

SEQ ID NO: 8527 - DNA, 600 bp, Chicken  19866894203295_6
ggcagcagggagaaggggcagyttcctcctttgtckcaggagctgcaacctccctcagacaaaatctttyaggagggatgagttctccttcccagggtgagtaaagcaagagggaacaacaaactagtgagttatagtttgtgttaccaggcgcagttgttgtcacgtggacccttagtgtttgcagataaacatgtgatacccaaagtagatgcataggctggggcagctccaactccttaacaactgacagtamgggataatggtttcgcacattgcaaccaaaccctcctacagatrgataacacgggtcctgggactatttacagcaactttgacacctgcaactgctctgtaggcggacaagcgcaaggctccatgccaactctgtgcccaagtatcaaatccctctgcagaatttgaatactttgaatacctctgcctaaagtgcacagagaaacaaatcctttcattattgtacctgaggacagcagagttcctaccaaagcaagttttcattgtgaaaatatttaaagcatatacattcattaagtattaatgctgctgacctgatccatcatcccattggcgttactgcct

SEQ ID NO: 8528 - DNA, 600 bp, Chicken  19866894203295_7
ggctccatgccaactctgtgcccaagtatcaaatccctctgcagaatttgaatactttgaatacctctgcctaaagtgcacagagaaacaaatcctttcattattgtacctgaggacagcagagttcctaccaaagcaagttttcattgtgaaaatatttaaagcatatacattcattaagtattaatgctgctgacctgatccatcatcccattggcgttactgcctgaaggctggcatctgttactcattaggctgtggtttcacattcctgcaccaatatcagcacgtctgatttargaggttcacacctcctcctctcagggagttactgtcctatcagttgcacccattcactgggytgtggtctagatctgagccctgaacttattggggtgacgctgtgaagattaaaatgctttaattcacagacccattttgtgggacacttgagccagcacaagcaaggggggagggaggtaatctcctgagtgggaagatgaaaggaggtggggaagaggcagcaggatgccttgaaaccaagggttgaagaacgacatctagctgtagtcatattcttagagcaaaatgcaaaacttt

SEQ ID NO: 8529 - DNA, 600 bp, Chicken  19866894203295_8
acctctgcctaaagtgcacagagaaacaaatcctttcattattgtacctgaggacagcagagttcctaccaaagcaagttttcattgtgaaaatatttaaagcatatacattcattaagtattaatgctgctgacctgatccatcatcccattggcgttactgcctgaaggctggcatctgttactcattaggctgtggtttcacattcctgcaccaatatcagcacgtctgatttargaggttcacacctcctcctctcagggagttactgtcctatcagttgcacccattcactgggytgtggtctagatctgagccctgaacttattggggtgacgctgtgaagattaaaatgctttaattcacagacccattttgtgggacacttgagccagcacaagcaaggggggagggaggtaatctcctgagtgggaagatgaaaggaggtggggaagaggcagcaggatgccttgaaaccaagggttgaagaacgacatctagctgtagtcatattcttagagcaaaatgcaaaacttttgttgaacaaccaaagcttgtacttaaaggaaagctgatattttagagaaagcgtcagttgc

SEQ ID NO: 8530 - DNA, 531 bp, Chicken  19866894203300_1
cagaaaggaggggagattacagattttatttcagttggtacatggattagcttaaatggatttacggctgtttgcaattatggagccaactgtatcgatgtccatgtctctgatttagtggtacctattgccaaaccacaccacgaagagctctggtaaagcttcagacgtctgagcagactgtgctcactgctggcagccttcgcctccgagcgctggaaccaatgcacagcttcaccttctggctctctggaagctggcaacttcatgctatgatttcgccctatcttcttcatacawggaaataaaatcacagctgttattatgcccgagacttgtacatctactgctgagctggagcataattcttatttcttacacatgctactgcgcctagttctgattgcttctttttcaactacattgctaaaaataactttattttctgattcagatgcaagggcgagtgatggtcgtgaaatattcctggagaacaaaagatgaaatctgaacgcagccagcaggatataa

SEQ ID NO: 8531 - DNA, 600 bp, Chicken  19866894203307_1
cagggcagaagaaaacagactctgcttgctgttctggaagcctgtggctgtacagatttgttcctgtttccattgaagttctgacttcagtgggagcaggacagttttgtgaggataaggcctggatccaagcaagcagtgaagtgagcatgaagtaaaaacaatttaaaattttgcttaatgaatttctgtctttaaatactcctgctgtgtgtggtgccctttcatacctagttgtttttctcagtgtaaagtagtttggggtgaaggtacacaagagggaaagggaaggagatggakgataaatggttattaaagggttatttttcatttggaaaataatttcaatagatagaacttgtttcatgacagctgtgctattctcactgtattccaaacctatacttaaatttccctggcatggccttgcccatttgtatttctacaggaataacttcagtcttgtttgctttccagtgtttcacaaagctttattgtaggaacacaaattacagagatgagatattctgactgccttctgttgaaggatgccagaggcaatcaaagggctactcggcataaggagagatgacagcatcc

SEQ ID NO: 8532 - DNA, 600 bp, Chicken  19866894203308_1
tcaaatgagcaaccttgtcagctgtgaacttgtcagagaattcgtgcctaacacccctcatattgattccgtgaaaatcaaactgattttcataactatatattgccaattttttaaaatgtttttatacatacagcattgcttttctattgcattgcctcctgaagggacttggcaggtgttcagctcatgcaaatcagaaacatgactggaagcataaagcacatggtactgctcctgtggtggcagtaaatgttctgtgtgaggctgggcaaactgagtcagcgccagctttggagyaaagatttcttgcatttttttggtttttgtgttttgttgttttgttttctgggagggaaaatttctcacagtaatcagtggaccggacagattgttctgataggtcacccatcagctgagtaattctcttcagaggagaaggtaaagtactttaagtcttttaaacactatcttcccttccctgcttttccttaggcctgtcctgttgttaccatgcgaaggacaatctaatgtgccgggatgtctgtgaacaggtaagcttacattattatccgttttatctctcagagttaaaataat

SEQ ID NO: 8533 - DNA, 599 bp, Chicken  19866894203309_1
  misc_feature (1)..(47): n is any nucleotide
nnnnnnnnnnnnnnnnnnnnnnnnnnnnnnnnnnnnnnnnnnnnnnngattgccccagagccttctcttctccggctgaacaggcccagccctctcagcctgtcctagtaggagaggtgttccaccatttttatgtccttcatctggatgtgctctaacaggtctacgtctttcctgttctgaagactccacatctggatgtagtactccaggtatggtctcaccagtgcagagaagaggggcaggatcacctcccttgacctgctggccacagttcttttgatgcagcctaggatattktttgctttctgagctgtaaggtcacagtgctggctcacgcccagcttgctatcttccaggaaccccaatcccttttcagcagggttgtactctattcctcactatgcactgatagtgcaggttgccatgattccggtataagaccttgtacttggatttgttgaacctgacaaagttcttctgggcccactgctcaagcctgaatrgcattctgtccctctgaatatcatcatgtccctcaggcatattgactataccacacagcttgatatcatctgcaaactgtctgagtgtgcatt

SEQ ID NO: 8534 - DNA, 600 bp, Chicken  19866894203309_2
ctccaggtatggtctcaccagtgcagagaagaggggcaggatcacctcccttgacctgctggccacagttcttttgatgcagcctaggatattktttgctttctgagctgtaaggtcacagtgctggctcacgcccagcttgctatcttccaggaaccccaatcccttttcagcagggttgtactctattcctcactatgcactgatagtgcaggttgccatgattccggtataagaccttgtacttggatttgttgaacctgacaaagttcttctgggcccactgctcaagcctgaatrgcattctgtccctctgaatatcatcatgtccctcaggcatattgactataccacacagcttgatatcatctgcaaactgtctgagtgtgcatttgtgatcccattgttgatggatttggtgaaaatagtaggagcatgggttccggtacctacccctgaaggacattacttgtcactgatctccagccaggcactgagtcatcaatgaccactctctgggtgcagttttgcaatcagttccttgtccatcaaacagtctacctgccaaatccacatatttccaatttggagagaggatgt

SEQ ID NO: 8535 - DNA, 600 bp, Chicken  19866894203310_1
taatcccacaatgcttgacagaaaatattaaatttacctgaacataaggttagttactcaagatggtctctttttttccctataaaaagatgaatactctgaagatccttgtaacttataacttcagtatgaaaggcagcattctctcagtagtacatagcactgctagtattccttctcagcacagaaaaatgtagtatattctctgtcttcatccctttgttgtaaaggcatagctgaggctaaagatttcgtggctggatgctttattttaagcttgtggacaaggactacctgcaytactaaatttgtactgacatctcagtgaattctcagacaggctcacttcagttcaatcagcgctttctaagagggacttcrgaagtcaggctgattgacacgaagcacaggtgaaagttgtgcttggttgagctgcagagagagcaaaacactgctctgctggcacaacactactagattctcatagcaaagtgatgacagggtagagtttacaggaaatgtgatgtaaattaatttgtatttaatgagcctcaggttctagacaaggcatttggtaccgtgctgcagttccactaggta

SEQ ID NO: 8536 - DNA, 600 bp, Chicken  19866894203310_2
ataaaaagatgaatactctgaagatccttgtaacttataacttcagtatgaaaggcagcattctctcagtagtacatagcactgctagtattccttctcagcacagaaaaatgtagtatattctctgtcttcatccctttgttgtaaaggcatagctgaggctaaagatttcgtggctggatgctttattttaagcttgtggacaaggactacctgcaytactaaatttgtactgacatctcagtgaattctcagacaggctcacttcagttcaatcagcgctttctaagagggacttcrgaagtcaggctgattgacacgaagcacaggtgaaagttgtgcttggttgagctgcagagagagcaaaacactgctctgctggcacaacactactagattctcatagcaaagtgatgacagggtagagtttacaggaaatgtgatgtaaattaatttgtatttaatgagcctcaggttctagacaaggcatttggtaccgtgctgcagttccactaggtactgaagtttcaggtgaatgaattatggtaatgacttcatctccttcccatttgcacaagactgcaagcaacagactcgcac

SEQ ID NO: 8537 - DNA, 486 bp, Chicken  19866894203310_3
gatactgcagtatctgggagccgagcccttcctgagatgtgcagagttccctgcactactggtgaccgccaggagcagccagtgacgcagtggatcccaactcccccacttcacactacaactgaagcacttcagtctcggctcactcactctgttctatttgtggcagagtcttttttctgctaacatcactaattgcctggaaagtatttccctcatttccttatgctgagctgcacttcactcatgctggatgtgtgactatttagagcacgtaccatgtatagtaatgtgtcactktgggagcgtcagtatgagaaatgccgaatgaagaaatgaatgagattgctaacactggcacaactaagctactaaagtgcagttgaaaatgttcaatgatacttacatgttccttcgctttaattccatttacagaagtgtcagccatagacaagacagcagtaatgctggtattacacacaaatc

SEQ ID NO: 8538 - DNA, 600 bp, Chicken  19866894203316_1
ctgctgcgggcggccatggcgggcgggcgtgcggggcgatggtggccggggcccctggctgagccgcagcgcctgatgcgtgccgggctgggcctcatcgtgttgggccacagcaacctggtgctgggggccatcgtgcatggctccgtcctgcggcacgtcgctggggccaagggcgccgtcacccctgagtacgccgtggccaacgtcgtgtctgtggtgtccgggctgctggtgagagccgtgcagtggggatggagcccatgtgttgggtcgtagggggtgggagtctgcaaggcygtggggttgtgctgagtgaggatctcttccctgcagagcatcactgtgggcatcgttgccatcctggtgtcgcgcaacctgacccgggctgccctggtgagtgcggggctgctgggatgagaggtgggggggatggagctgtgcgggggcctcagcgtggctcagtgccctctggggcctgctggcagccgctcctttggaccttggacccggcagctccttccgcctctgctgccgctggggccgtggcatctcctgaggctgcaggtgctggagaagggtgggcagcagcccgggccc

SEQ ID NO: 8539 - DNA, 599 bp, Chicken  19866894203331_1
  misc_feature (1)..(188): n is any nucleotide
nnnnnnnnnnnnnnnnnnnnnnnnnnnnnnnnnnnnnnnnnnnnnnnnnnnnnnnnnnnnnnnnnnnnnnnnnnnnnnnnnnnnnnnnnnnnnnnnnnnnnnnnnnnnnnnnnnnnnnnnnnnnnnnnnnnnnnnnnnnnnnnnnnnnnnnnnnnnnnnnnnnnnnnnnnnnnnnnnnnnnnnnnnnnaatatggcatggtgcactgtacatcttcatctctcacatgttcctgtcccagagagccgtgctgagggactgtggttgagcagaacaggctttggtgatcgctgggttgagygagmtgggtttgagtttctgattctttacattctctggttggaaagatctgggaacgtacctgactgagttcacttctgaacctgcagtgccttcggtttgtgcaggcagtaactaggaagtaaacacatgagattactcatgcagtgaaggaatgcagcagttaggcaaggtggactctgcttcaacttaggaaaaakaaaagaaaaaagagagagaggtggacaataaatattaaacctaaattctggagctgaaggaaattataaaaatctcatcaaaggraagggaaaagtgctg

SEQ ID NO: 8540 - DNA, 599 bp, Chicken  19866894203331_2
  misc_feature (1)..(184): n is any nucleotide
nnnnnnnnnnnnnnnnnnnnnnnnnnnnnnnnnnnnnnnnnnnnnnnnnnnnnnnnnnnnnnnnnnnnnnnnnnnnnnnnnnnnnnnnnnnnnnnnnnnnnnnnnnnnnnnnnnnnnnnnnnnnnnnnnnnnnnnnnnnnnnnnnnnnnnnnnnnnnnnnnnnnnnnnnnnnnnnnnnnnnnnnaatatggcatggtgcactgtacatcttcatctctcacatgttcctgtcccagagagccgtgctgagggactgtggttgagcagaacaggctttggtgatcgctgggttgagygagmtgggtttgagtttctgattctttacattctctggttggaaagatctgggaacgtacctgactgagttcacttctgaacctgcagtgccttcggtttgtgcaggcagtaactaggaagtaaacacatgagattactcatgcagtgaaggaatgcagcagttaggcaaggtggactctgcttcaacttaggaaaaakaaaagaaaaaagagagagaggtggacaataaatattaaacctaaattctggagctgaaggaaattataaaaatctcatcaaaggraagggaaaagtgctgctga

SEQ ID NO: 8541 - DNA, 600 bp, Chicken  19866894203331_3
gtgcactgtacatcttcatctctcacatgttcctgtcccagagagccgtgctgagggactgtggttgagcagaacaggctttggtgatcgctgggttgagygagmtgggtttgagtttctgattctttacattctctggttggaaagatctgggaacgtacctgactgagttcacttctgaacctgcagtgccttcggtttgtgcaggcagtaactaggaagtaaacacatgagattactcatgcagtgaaggaatgcagcagttaggcaaggtggactctgcttcaacttaggaaaaakaaaagaaaaaagagagagaggtggacaataaatattaaacctaaattctggagctgaaggaaattataaaaatctcatcaaaggraagggaaaagtgctgctgaaaaygtaatgcaatgtagcaccattgatttactgtataaggaaacagtgaatcagccaagagtcaacagattgattaaatgtacaattccagatgaaaagagaggacttaaagtgtacaacaaagcctctgaayggtttcacagatctcttccctatcagaagtctttactatcttgactaaagcaagaaaggtct

SEQ ID NO: 8542 - DNA, 600 bp, Chicken  19866894203331_4
gatcgctgggttgagygagmtgggtttgagtttctgattctttacattctctggttggaaagatctgggaacgtacctgactgagttcacttctgaacctgcagtgccttcggtttgtgcaggcagtaactaggaagtaaacacatgagattactcatgcagtgaaggaatgcagcagttaggcaaggtggactctgcttcaacttaggaaaaakaaaagaaaaaagagagagaggtggacaataaatattaaacctaaattctggagctgaaggaaattataaaaatctcatcaaaggraagggaaaagtgctgctgaaaaygtaatgcaatgtagcaccattgatttactgtataaggaaacagtgaatcagccaagagtcaacagattgattaaatgtacaattccagatgaaaagagaggacttaaagtgtacaacaaagcctctgaayggtttcacagatctcttccctatcagaagtctttactatcttgactaaagcaagaaaggtctttaaaaacaagttagcaggattggctgagcaagaacaaattaagagatgatgatggtttgaacttgatttgaaatctgttcttta

SEQ ID NO: 8543 - DNA, 600 bp, Chicken  19866894203331_5
gtttgagtttctgattctttacattctctggttggaaagatctgggaacgtacctgactgagttcacttctgaacctgcagtgccttcggtttgtgcaggcagtaactaggaagtaaacacatgagattactcatgcagtgaaggaatgcagcagttaggcaaggtggactctgcttcaacttaggaaaaakaaaagaaaaaagagagagaggtggacaataaatattaaacctaaattctggagctgaaggaaattataaaaatctcatcaaaggraagggaaaagtgctgctgaaaaygtaatgcaatgtagcaccattgatttactgtataaggaaacagtgaatcagccaagagtcaacagattgattaaatgtacaattccagatgaaaagagaggacttaaagtgtacaacaaagcctctgaayggtttcacagatctcttccctatcagaagtctttactatcttgactaaagcaagaaaggtctttaaaaacaagttagcaggattggctgagcaagaacaaattaagagatgatgatggtttgaacttgatttgaaatctgttctttacagcttgtatggggccatgtctt

SEQ ID NO: 8544 - DNA, 521 bp, Chicken  19866894203331_6
ctcatgcagtgaaggaatgcagcagttaggcaaggtggactctgcttcaacttaggaaaaakaaaagaaaaaagagagagaggtggacaataaatattaaacctaaattctggagctgaaggaaattataaaaatctcatcaaaggraagggaaaagtgctgctgaaaaygtaatgcaatgtagcaccattgatttactgtataaggaaacagtgaatcagccaagagtcaacagattgattaaatgtacaattccagatgaaaagagaggacttaaagtgtacaacaaagcctctgaayggtttcacagatctcttccctatcagaagtctttactatcttgactaaagcaagaaaggtctttaaaaacaagttagcaggattggctgagcaagaacaaattaagagatgatgatggtttgaacttgatttgaaatctgttctttacagcttgtatggggccatgtctttagcctggggcagagtattcattgttaaagccagtcatagagtcatagaat

SEQ ID NO: 8545 - DNA, 599 bp, Chicken  19866894203333_1
  misc_feature (1)..(3): n is any nucleotide
nnnaagatttctagctgttgttttatatatgttaatctccggtgattcttttgtgctggaaaactagtgaagtacaatcaggtttgcacattctgacacaatttctggataaaatggattatttgtagttaaaaagcaaagaatgaaataagaaaattcaaggaaagaggatatctggaatgtaattaaccttgggcagaaaagctagcttagaataaaagctgtgtttttttttttttctcttaaaaatgctttgtggtgcagtctttagtgctggaggcagcttgggttgctgggacyttgcagctcagcttgtttcctctgcctttattttgttacctcaagcaggcctcctgcatcgttttcactttgctagtggggtatctttcaagttgctgattctagcttatgcatgaaagggcacggatatatgacccgctcagatttttatgttgacctcaaagtgtactcagagcactgggaattaaacagaatagcagagcttgttaaagttgtccactgcttcatttgttccatggcagtcctctgcaaagccaacccaggagcagcagagaagtgggatatggttaagcatcgat

SEQ ID NO: 8546 - DNA, 599 bp, Chicken  19866894203334_1
  misc_feature (1)..(108): n is any nucleotide
nnnnnnnnnnnnnnnnnnnnnnnnnnnnnnnnnnnnnnnnnnnnnnnnnnnnnnnnnnnnnnnnnnnnnnnnnnnnnnnnnnnnnnnnnnnnnnnnnnnnnnnnnnnncgaccttcctttggtgaatccatgccagctgtcttggatcacccacttatccctcatgtgccttagcatctcttccaggaggatctgttccatggtcttcccaggcacagaggtgaagttcaccagcctgtacttccctgggtcctccttcctccctttcttataaatgggagtgatatctcccttcttccrgtccccagggactttgcatgacagccatgacttttcaaatatgattgagagtggctcagcaacaacatcagccagctcccttaggactctgggatgcatgttgtctggctycatagacttgtacagactcagtttcatgaggcagtctcatacttgctctgtccttacagtggggggagctttctcccccagttcccaccataagtttcagggatgtgaggttcagggacgtaagaaatatgagtccttgttgtcaatgaagactgagacaaagaactcattgagtacctcagccttcc

SEQ ID NO: 8547 - DNA, 600 bp, Chicken  19866894203334_2
ccttcctttggtgaatccatgccagctgtcttggatcacccacttatccctcatgtgccttagcatctcttccaggaggatctgttccatggtcttcccaggcacagaggtgaagttcaccagcctgtacttccctgggtcctccttcctccctttcttataaatgggagtgatatctcccttcttccrgtccccagggactttgcatgacagccatgacttttcaaatatgattgagagtggctcagcaacaacatcagccagctcccttaggactctgggatgcatgttgtctggctycatagacttgtacagactcagtttcatgaggcagtctcatacttgctctgtccttacagtggggggagctttctcccccagttcccaccataagtttcagggatgtgaggttcagggacgtaagaaatatgagtccttgttgtcaatgaagactgagacaaagaactcattgagtacctcagccttccccatatctgttgtaaccagttcttctccctcatttatctgaggagatacgctctctctggcctatctcttctgaccaatgtacctgtagaattccttctggttgtttttaac

SEQ ID NO: 8548 - DNA, 599 bp, Chicken  19866894203337_1
  misc_feature (1)..(53): n is any nucleotide
nnnnnnnnnnnnnnnnnnnnnnnnnnnnnnnnnnnnnnnnnnnnnnnnnnnnnaattttttaaaaagaaaatttttataactttggaatctgtgtatcctcaaggttgaaggctgccacttctggtaaaaaggatcaaccaaatctgcactgaaatgactgttaaatgtccttactgagtcctgcgtcaatctcagtgagtcaccctttaatactcagaactctttggtttagaacctaagaataggattgataaagctctgtgatttccttcaaaagctcttccagttttcctggtacraggttagagcctactacaagatattgcaaccttttttgactccttctttcacacacttctgcttcagagccaattatgatttttttttttaatttaatatttgccatacggtagtcagtgtagattataatacttgtgtttcttcataactatgatctgacataattctgagccaaaaaaaaaaaaaacaaaaaaaaccctgtagctcttacatcaactactgaagaggatggtttcaaaatcagatattaaagaatagagggagccaagattcataactgaaagataatgacagaggc

SEQ ID NO: 8549 - DNA, 600 bp, Chicken  19866894203337_2
atctcagtgagtcaccctttaatactcagaactctttggtttagaacctaagaataggattgataaagctctgtgatttccttcaaaagctcttccagttttcctggtacraggttagagcctactacaagatattgcaaccttttttgactccttctttcacacacttctgcttcagagccaattatgatttttttttttaatttaatatttgccatacggtagtcagtgtagattataatacttgtgtttcttcataactatgatctgacataattctgagccaaaaaaaaaaaaaaraaaaaaaaccctgtagctcttacatcaactactgaagaggatggtttcaaaatcagatattaaagaatagagggagccaagattcataactgaaagataatgacagaggcattcatctgtgaagtgtatgcgtgttttcaattagttgcaaatgttctttatacagctcagtatatgagacacattagtttgtaaaacccacacagcctttcagtcaacagacactctttaggacaacctagagtatttgaaactgaggaaaatacatgaagaaatagaagtgagaagaggaaaacccag

SEQ ID NO: 8550 - DNA, 594 bp, Chicken  19866894203338_1
tgttggttacttttgtttgttatgtgctgcacatttccttttctcccctttcttctgttttgagaaagagacaaccgggttgtccactgcctcttgcagcagaaaagccctttgcccttttcttcctgttatcttttaaaatggaagacatcaaggctgtgcatatcaatattgcaagcccgggccccatggattgtgcctacaccaccacccaaaggtataacactggcctgagcagaccaaccaaggttagctccatgctcagggagggaagcggtgtttctaggacagctcaaccayggcaaatcttaaccgtcaccaaaggttgtctgaacccagcaaggacaggagtgtagccctgactaaacggttctatgtaaaatgacactgagctgtttttgagctcctctgcatgtgattgatctcctgtaacaggacacgtgcaattaaccggcagctttgctattaataaatatctctgagtatatggataaaatgaattggggtctctgcggattattacctttctccatctgacactcctttagatgaatgacacgaatgacatgatgaatcctaacagtatataattga

SEQ ID NO: 8551 - DNA, 600 bp, Chicken  19866894203354_1
gtgctaagtgttttattccactgaaattgtactgcctttcaagcacctgtaaatatcagccaacactactgaattacttagaagtatttaatttaatcttacccagttttgcagccttaaaaatcttttaaatttttttagagctctcatctctctacatcttcttccctgtaataactgacctcatcatccataggacaattaaaagactcttttgtctctctgtagattccaaagcaaccctaaactactctgacctattttactaccgtatcacactatcagagagatttgacagawgtcttagatgattcattattccctcaaggaatctgacctctcctagaataaaaaaaagattgcagaggaagcactgaattctgaattcagagacaatgaattttctggacagcttcaatcagagctttgaaaattaatttatatccatactgatgcatctaggcttagaatctggctaaagatctattctcatactaaaggttttgccagctggtcactaacctggatgctaaaatgagaccctgtatattaagcttttatgcccttaaacagtttctcgctcaggttaggcaccagata

SEQ ID NO: 8552 - DNA, 600 bp, Chicken  19866894203356_1
aactgaaaccaccaagcaccacatagattgatgaagggcactgctctgccaggtgccaacgtgtctttgtaagtcactctttcagatcaacagaaccaagcaaaaagacactcagtactcaccaagatccagtttctaacaacaaataaaagaatgttttctgctacatgttttgattagaagaataatttcaaaaaaaaaacattctcaggcagtgaaattaataaaattaccaaagaaccaacatttttccacatcatagtgaatgcaaagcaagcagctgagcaagcagataacacragtcgtgttaatttggaattacagyagcattggatagcaaggcaatggctgaagttctatcagattttccactatgtcaccataaaaatcaactgagaacagatatttgttatgtattttctgagcctcrgagtcattctaaaatttrcatttgattaaatagtttccactgaaaataaatcagttgttattacagccttctagataaaaattcaacttaagttcagcagaactatgtttatttgggcttttattacctaacaaactttggtccttgacattaattgcaatatttatttt

SEQ ID NO: 8553 - DNA, 600 bp, Chicken  19866894203356_2
gattgatgaagggcactgctctgccaggtgccaacgtgtctttgtaagtcactctttcagatcaacagaaccaagcaaaaagacactcagtactcaccaagatccagtttctaacaacaaataaaagaatgttttctgctacatgttttgattagaagaataatttcaaaaaaaaaacattctcaggcagtgaaattaataaaattaccaaagaaccaacatttttccacatcatagtgaatgcaaagcaagcagctgagcaagcagataacacragtcgtgttaatttggaattacagyagcattggatagcaaggcaatggctgaagttctatcagattttccactatgtcaccataaaaatcaactgagaacagatatttgttatgtattttctgagcctcrgagtcattctaaaatttrcatttgattaaatagtttccactgaaaataaatcagttgttattacagccttctagataaaaattcaacttaagttcagcagaactatgtttatttgggcttttattacctaacaaactttggtccttgacattaattgcaatatttatttttccatatttacaaaaagcttcttta

SEQ ID NO: 8554 - DNA, 600 bp, Chicken  19866894203356_3
agtttctaacaacaaataaaagaatgttttctgctacatgttttgattagaagaataatttcaaaaaaaaaacattctcaggcagtgaaattaataaaattaccaaagaaccaacatttttccacatcatagtgaatgcaaagcaagcagctgagcaagcagataacacragtcgtgttaatttggaattacagyagcattggatagcaaggcaatggctgaagttctatcagattttccactatgtcaccataaaaatcaactgagaacagatatttgttatgtattttctgagcctcrgagtcattctaaaatttrcatttgattaaatagtttccactgaaaataaatcagttgttattacagccttctagataaaaattcaacttaagttcagcagaactatgtttatttgggcttttattacctaacaaactttggtccttgacattaattgcaatatttatttttccatatttacaaaaagcttctttatttaaaaaataagctgcaaagaagtgaagtgctcattctttgtgaccatgtgctgagtgttcctgaggtagatacatacggctaacaattagctggtagtgcttc

SEQ ID NO: 8555 - DNA, 600 bp, Chicken  19866894203356_4
aaagaatgttttctgctacatgttttgattagaagaataatttcaaaaaaaaaacattctcaggcagtgaaattaataaaattaccaaagaaccaacatttttccacatcatagtgaatgcaaagcaagcagctgagcaagcagataacacragtcgtgttaatttggaattacagyagcattggatagcaaggcaatggctgaagttctatcagattttccactatgtcaccataaaaatcaactgagaacagatatttgttatgtattttctgagcctcrgagtcattctaaaatttrcatttgattaaatagtttccactgaaaataaatcagttgttattacagccttctagataaaaattcaacttaagttcagcagaactatgtttatttgggcttttattacctaacaaactttggtccttgacattaattgcaatatttatttttccatatttacaaaaagcttctttatttaaaaaataagctgcaaagaagtgaagtgctcattctttgtgaccatgtgctgagtgttcctgaggtagatacatacggctaacaattagctggtagtgcttcaagtatatgctagaaatg

SEQ ID NO: 8556 - DNA, 600 bp, Chicken  19866894203356_5
cccaacagacttagctgtaggccaactgcatatgcctgtgggaatcaaagagggaggttttggacaagcaagcctaccaacttttttctcctctcctattgaattgagctgtaggtattcataaacaacagcagtcatatccaaaataaaaatcccactttcaacagcatccattcaaactacactttgacagcaattttgtttttttttcccccgtgtggtccattctacctatagaaatagcagaataatagcacttctagccaatgaaaatgctacaccacactttgattaaccacrcaggtggtttgaatacttacaccctgagtgaaatgtagagaagtgactgcataagccttgctcccctcggccctcctcttcacgttgtatctgtcagtcctggtgcttcaacctcattccatacattattcctaagaggcccatttttagtgtaaaatagctatatgtcaaggaaaaactgctacataacgtggcattctgaaacttactttatattttcttcctaaaaagagatgttacagcccttcgtatattggcaatcttctttgagagttttctccagctcagtcactaaccaaa

SEQ ID NO: 8557 - DNA, 600 bp, Chicken  19866894203359_1
cgacggtcatttgcaagtaaaatattaccaaacaatataacattggattaactgtttcatgtatttattgtggaggaatatatagaactttacatgagaaactcgcggtacaagcaagaaacaaagcagccttttgaacagccgccttttaacttcggagctcctgtgcatgcagcacaagggctgctcccaccgaagcagcagctctgattgagttcaggattgggccccatggttttaaactttcctcctgcaacgtcccttttggtaacattgcaagccccccagcctaggtacgtygatgtgctttagacaggaacgtgtgagatggcaaaaaggcagcaaagatgcactgtggggctgatgctgaagactgcaagaaaaggagaaaagaaagaaaaggaggagaggataaagggaaagcaacacgcagggagtccaatcctgcaccagtgagaagcaaagcactgagcctgcagcacggcagtgcgctgggtgcactggacatgacctgcccccatttctgccctttgttacggtgtgctgggaatgctggagtgcagggtgtgctgctcggggccacaytgyactccttggagc

SEQ ID NO: 8558 - DNA, 462 bp, Chicken  19866894203359_2
cagcctaggtacgtygatgtgctttagacaggaacgtgtgagatggcaaaaaggcagcaaagatgcactgtggggctgatgctgaagactgcaagaaaaggagaaaagaaagaaaaggaggagaggataaagggaaagcaacacgcagggagtccaatcctgcaccagtgagaagcaaagcactgagcctgcagcacggcagtgcgctgggtgcactggacatgacctgcccccatttctgccctttgttacggtgtgctgggaatgctggagtgcagggtgtgctgctcggggccacaytgyactccttggagctgtggggttccaaacattggggcggctctacgctctgcctttatacattttctcccttctggcgttgtctgaaatgctcacataactcctgcgaattgctatgtgaatttgtggctacttcacgactttttcgtaagctcagcaaca

SEQ ID NO: 8559 - DNA, 459 bp, Chicken  19866894203359_3
cctaggtacgtygatgtgctttagacaggaacgtgtgagatggcaaaaaggcagcaaagatgcactgtggggctgatgctgaagactgcaagaaaaggagaaaagaaagaaaaggaggagaggataaagggaaagcaacacgcagggagtccaatcctgcaccagtgagaagcaaagcactgagcctgcagcacggcagtgcgctgggtgcactggacatgacctgcccccatttctgccctttgttacggtgtgctgggaatgctggagtgcagggtgtgctgctcggggccacaytgyactccttggagctgtggggttccaaacattggggcggctctacgctctgcctttatacattttctcccttctggcgttgtctgaaatgctcacataactcctgcgaattgctatgtgaatttgtggctacttcacgactttttcgtaagctcagcaaca

SEQ ID NO: 8560 - DNA, 600 bp, Chicken  19866894203363_1
atattttagaggatgcaggctgtacctttcatatagtcattatacgaagcaatgttttagtctgattatttaatcagataacccacttttatgagataattaagtattatgtgatgtaaaaaatatctaatggcaggtgatctgtcagtgcattgaaagcacactttttatgcttatgagtctgtctttgagagagaatataatttgcatttgagacattagactgggactgatgaaactctgatacagttcttggtcgtatgtgaccttgtccacatttctgcactaggtcttccactygtagatggtataaataagagatgtttcctcccatgctttgcattcttcacttaagactgtgagccctttgaagcacatattgtcatacgcaactgttggtgactacagaatcactgccccagcagagctttgatattgggaacatcaaggtcttaaaacaatttctaattccaaaccaaycaatcaaaaaactgtgaaatttttctcgtcttggtagtttttcttgttttgcatcttttagctagattctgattctacttactccatcttatacyagatttaacatatctaagctatact

SEQ ID NO: 8561 - DNA, 600 bp, Chicken  19866894203363_2
tctgtctttgagagagaatataatttgcatttgagacattagactgggactgatgaaactctgatacagttcttggtcgtatgtgaccttgtccacatttctgcactaggtcttccactygtagatggtataaataagagatgtttcctcccatgctttgcattcttcacttaagactgtgagccctttgaagcacatattgtcatacgcaactgttggtgactacagaatcactgccccagcagagctttgatattgggaacatcaaggtcttaaaacaatttctaattccaaaccaaycaatcaaaaaactgtgaaatttttctcgtcttggtagtttttcttgttttgcatcttttagctagattctgattctacttactccatcttatacyagatttaacatatctaagctatacttgtgttactcaaatttaaggaaaatttaaaatatatcccttagatttctttgcttcttatgatgatatgttatgaaggaatggacagaaaaatttctggactaaatcaaaggaaattccactagccaatatatatgatgacaaatttggctacaagacatcaggattgaaccagtctctg

SEQ ID NO: 8562 - DNA, 600 bp, Chicken  19866894203363_3
catttctgcactaggtcttccactygtagatggtataaataagagatgtttcctcccatgctttgcattcttcacttaagactgtgagccctttgaagcacatattgtcatacgcaactgttggtgactacagaatcactgccccagcagagctttgatattgggaacatcaaggtcttaaaacaatttctaattccaaaccaaycaatcaaaaaactgtgaaatttttctcgtcttggtagtttttcttgttttgcatcttttagctagattctgattctacttactccatcttatacyagatttaacatatctaagctatacttgtgttactcaaatttaaggaaaatttaaaatatatcccttagatttctttgcttcttatgatgatatgttatgaaggaatggacagaaaaatttctggactaaatcaaaggaaattccactagccaatatatatgatgacaaatttggctacaagacatcaggattgaaccagtctctggtgactgctcagggttaacgctggagatgtagttcactgcttacttctgtgtcccagctgtcctaatgataagatggtttgttgttgttgttttt

SEQ ID NO: 8563 - DNA, 600 bp, Chicken  19866894203363_4
tcctaatgataagatggtttgttgttgttgttttttttttttttttttgtatttgtttgtttgtgtatgtaattaacttgttgtagctaatttgtaacaacacagatgaaactgacttgtcttttgggcagactctgccctattctctggaatttctctcaggacttggtttcagatagtgttcctcatttgcttctcttgtgaggagaccatggtacacaatgggagatgttggactgtagactccaattcagattcttttaggctaatttttctatacttggaaaacgttttgttttskttttttacacaacgagttttaaaatcctggggtaactggtgtgtttggtgtaaaartaagcatacatactatccagtcctttaaaaattgcaactagttcttctgatcatagcaaagtgatcatcctaagttattttgtctattgatttgtaggcttccaggggtgttttcattttggtaactttgatgtagatgagtcaggaaatgggacagttaatagaaaagaagtgctgaaatcaaaggggaaatgaaacctccgtatttcactctggctggcttgctgctcacaaagccataca

SEQ ID NO: 8564 - DNA, 600 bp, Chicken  19866894203363_5
cctaatgataagatggtttgttgttgttgttttttttttttttttttgtatttgtttgtttgtgtatgtaattaacttgttgtagctaatttgtaacaacacagatgaaactgacttgtcttttgggcagactctgccctattctctggaatttctctcaggacttggtttcagatagtgttcctcatttgcttctcttgtgaggagaccatggtacacaatgggagatgttggactgtagactccaattcagattcttttaggctaatttttctatacttggaaaacgttttgttttskttttttacacaacgagttttaaaatcctggggtaactggtgtgtttggtgtaaaartaagcatacatactatccagtcctttaaaaattgcaactagttcttctgatcatagcaaagtgatcatcctaagttattttgtctattgatttgtaggcttccaggggtgttttcattttggtaactttgatgtagatgagtcaggaaatgggacagttaatagaaaagaagtgctgaaatcaaaggggaaatgaaacctccgtatttcactctggctggcttgctgctcacaaagccatacaa

SEQ ID NO: 8565 - DNA, 600 bp, Chicken  19866894203363_6
tgtttgtgtatgtaattaacttgttgtagctaatttgtaacaacacagatgaaactgacttgtcttttgggcagactctgccctattctctggaatttctctcaggacttggtttcagatagtgttcctcatttgcttctcttgtgaggagaccatggtacacaatgggagatgttggactgtagactccaattcagattcttttaggctaatttttctatacttggaaaacgttttgttttskttttttacacaacgagttttaaaatcctggggtaactggtgtgtttggtgtaaaartaagcatacatactatccagtcctttaaaaattgcaactagttcttctgatcatagcaaagtgatcatcctaagttattttgtctattgatttgtaggcttccaggggtgttttcattttggtaactttgatgtagatgagtcaggaaatgggacagttaatagaaaagaagtgctgaaatcaaaggggaaatgaaacctccgtatttcactctggctggcttgctgctcacaaagccatacaaatcaaaacaggtggattttggaaacttttataatgcaacttcctgccaaaaaggtc

SEQ ID NO: 8566 - DNA, 600 bp, Chicken  19866894203381_1
catcatagcaggaagttgtcccctgtgggatggatatagaacaaggaaaactgtccagttttaattaatgatttcatgtatttttttttcattcacatagctaacaaaccaacctgcctaacctcattggtttcttctagaatccagtatgtagatttttaatataaatacttatatctgaaaaatgaatctgaaactgacactttgtaataaggaatgtaaataagccacttagtgaattctgaaatcttcaggggctgcacaattaataatgaggtgaatttcatcttaatagttttmatcagtttaaaatgcaaaacatgttcagagttttccttacatatttagaaacttcagtgaaattgtgtcagtttactaaagttatttcctgcattttaactgtgtttgaattttgctaaaatataccctaaaagcaaattactcaagtagaaattaatgtgttcactatatatttttatcaggcttagttactaaatgtatttgcactttaccattaatagcagtgttttcaatccagattcctactgcacaaatctgcagtttcaggcatcttcacaaatcagcagaaactagagcaca

SEQ ID NO: 8567 - DNA, 600 bp, Chicken  19866894203381_2
ttactaaagttatttcctgcattttaactgtgtttgaattttgctaaaatataccctaaaagcaaattactcaagtagaaattaatgtgttcactatatatttttatcaggcttagttactaaatgtatttgcactttaccattaatagcagtgttttcaatccagattcctactgcacaaatctgcagtttcaggcatcttcacaaatcagcagaaactagagcacagaaggaataagtgtgtaccagaatccagttaagaagggggatctgaagcagatagtttacccagactgcatwcttccaagtaagtgacagctttatgacatttggagcttatttagagctaatgttcctttctgcaggaagtttcatttcaggaagatgaagacagccctgcatgttcagctttcagtggactccaggcttgcctggcagtcatagacacaagtccttatttgtgttaaccaaggctgcagcctgcccaatctcacaagataaatcctgtgaatggtgtattaacccttacttctaaaaatcaccactgttggtaaccactggaatcctcagtgtctgcaaagaaatgagattttttccacc

SEQ ID NO: 8568 - DNA, 465 bp, Chicken  19866894203381_3
ggatacaaattcaagcactgtgaacgccccagaaagtgtacccaccacacaggaaacctgcctgctgcctcaacaaatgtgttacaaagctgctcttaaatacaggtatgtcttagaagcacctgtactgcaagtgatagaacattggaaaggtgaacagaggagtacgtatttgtcctggttttactgtgggcgtttgctaatggtggaagattgtgtagctggagtggtctttcatccgatttggcacagccacttgaataggcttccttaaagtatctgttcctaacttgtgcacaraaaccaccagccattccacatgtattttcaccaaataatgtgcaactgagatggcatccggcaacttgcgtgaagcagcctgaaactagagttttcattaagatctctgagacccctgtttccccaagtcgttagcgacagtcaggacgctttctgtacgcagag

SEQ ID NO: 8569 - DNA, 600 bp, Chicken  19866894203389_1
tgccacagcactcaacacattcttctcaaactgttctcaccttcctcttgtggttctttgcaaaattttcattccagctaaacagcagaattttccttcccatctcttgcagtactgctcaatgtcttctgcagaatccaaacactgtagctgtacttcactgaacatgccataggcatcctggacaaggaggcacaacctgtaaaacattcctctgttactcatttattcttgttcataacaaaatgaacaaacttatcctctacagtatctgaagaaatcctaccaaataatgaataygagtactagtatcagtaaacaaaaccagcatcatcaaaggttttctcatatatatctgcaggtggtaatagggccataaaaaagagaagttttactgaaatttagaacaaggtgcttccattcaggattagagaaacgaactgctaaacaatctatgctttgtgttatctatagtcacatttttacctaccttgaggtgaatttttcagtgcagacaaatcaatgatgcaaacgtatgtatgtatataaatgtaaaaatatctacttggaaataaacgaagcaacatatgtcacaagtaa

SEQ ID NO: 8570 - DNA, 600 bp, Chicken  19866894203392_1
ttatttagcttcttaccacatgcaagcactttgctcacaaagtgactggaatgctcaaagctaagaatcaagcaccactgacatccatgacagcagtgcgcacaaggggacatgcaggagccaggctgctggccctgagtcagaccaggggacacagagtctgtctatctgtctgtcaacccccccacccagggcccgcacccagccccttatgcccaagcactctgcttgcagtgcactgccatgatgcaggctaaacctggcaggcatgctgccaaggcctgggccatcaggcagagragggcacagtgattttcttgtgaggtggttgtttggtgaggaaatcatgccattggargaaaaaataataataataataatttctgtcactgtagggctctcttcctgcaaattttaaaggcctgctgtgaataatggtgtcagagctttcaagcctcaagaatactttatagcggaaagtgttagacaactaaaataaatagaagtttccaccattacaaaagtgaggtttattgttctttgtgctgtactttaaaactcatgctaaatgacatatttttagagacacagcactatrtg

SEQ ID NO: 8571 - DNA, 600 bp, Chicken  19866894203392_2
agctaagaatcaagcaccactgacatccatgacagcagtgcgcacaaggggacatgcaggagccaggctgctggccctgagtcagaccaggggacacagagtctgtctatctgtctgtcaacccccccacccagggcccgcacccagccccttatgcccaagcactctgcttgcagtgcactgccatgatgcaggctaaacctggcaggcatgctgccaaggcctgggccatcaggcagagragggcacagtgattttcttgtgaggtggttgtttggtgaggaaatcatgccattggargaaaaaataataataataataatttctgtcactgtagggctctcttcctgcaaattttaaaggcctgctgtgaataatggtgtcagagctttcaagcctcaagaatactttatagcggaaagtgttagacaactaaaataaatagaagtttccaccattacaaaagtgaggtttattgttctttgtgctgtactttaaaactcatgctaaatgacatatttttagagacacagcactatrtgtcaaagggttactttttcatagagagaccatctcggtttgtcctagactatttacatc

SEQ ID NO: 8572 - DNA, 559 bp, Chicken  19866894203392_3
gragggcacagtgattttcttgtgaggtggttgtttggtgaggaaatcatgccattggargaaaaaataataataataataatttctgtcactgtagggctctcttcctgcaaattttaaaggcctgctgtgaataatggtgtcagagctttcaagcctcaagaatactttatagcggaaagtgttagacaactaaaataaatagaagtttccaccattacaaaagtgaggtttattgttctttgtgctgtactttaaaactcatgctaaatgacatatttttagagacacagcactatrtgtcaaagggttactttttcatagagagaccatctcggtttgtcctagactatttacatcaaaatgagaaataatttaagacagaagaacacaaaaaccttctttatcaggaaaaatgtaacaggaattcatcttcaagaaggaccaagtgaaatctttacatgtgagtgctgccagtccctgggatgttcaaaatatatactcctactttacggctcagacgcatttctcctcacaagttttgttaatattctcacaa

SEQ ID NO: 8573 - DNA, 597 bp, Chicken  19866894203393_1
atatttataacacggacaaaatactccttggatgttgatggactttgccaagacagaagaatttgtccccgagttaattaagctaatgcttcatagtgggtagcaacagtgcttaacataaaatgagcaacaacaatctgttcttccagacagtctgctctgtcttctatcctacttcttcctaatcttccagcttggttcagattctttgtaccacccatgcacagttaccatcagcctgaaggccacagggctgacaagccatgggggaggtcagtaccctgtttgcagatacagagwgcagttggaagccctccagtggctcytctctgatactattcagggacagaaccaagacatcttccctggataggcagagctcatctcaacaggattaagagtcatgtgtagaaaggcagactgtaatctccccactctcctttctcttccatcaacgaaacaggacttgaagagactttactccatcttccagctgaattcttgtactgaaccaacttcctgaggcaaaactgtgccacatttttgccaaaaggggcaccttttggtgagagatgcaatccaaaaaagcggatgttt

SEQ ID NO: 8574 - DNA, 571 bp, Chicken  19866894203393_2
cttggatgttgatggactttgccaagacagaagaatttgtccccgagttaattaagctaatgcttcatagtgggtagcaacagtgcttaacataaaatgagcaacaacaatctgttcttccagacagtctgctctgtcttctatcctacttcttcctaatcttccagcttggttcagattctttgtaccacccatgcacagttaccatcagcctgaaggccacagggctgacaagccatgggggaggtcagtaccctgtttgcagatacagagwgcagttggaagccctccagtggctcytctctgatactattcagggacagaaccaagacatcttccctggataggcagagctcatctcaacaggattaagagtcatgtgtagaaaggcagactgtaatctccccactctcctttctcttccatcaacgaaacaggacttgaagagactttactccatcttccagctgaattcttgtactgaaccaacttcctgaggcaaaactgtgccacatttttgccaaaaggggcaccttttggtgagagatgcaatccaaaaaagcggatgttt

SEQ ID NO: 8575 - DNA, 600 bp, Chicken  19866894203394_1
ttctcattctgtttaccctgtgctccattcccttgcttttattactctttcagcttgtttctttcccagtttaggtcactttgaccgacttcccagccctggcatcacagtccatcatttcccagtgaaatctgtagctgggcagcttggccatgtgaaacgaatcattgaatcgtggagtcatagaatggtttgggtaggaagggaccttaaagatcatccagttccaaccccctgccatgggctggttgcccctatcagctcaggctgcccagggccccatccaacctggccttgaayacctccagggatggggcacccacagctctgggcagcagtgccagcacctcactgccctctgaataaagaatttcttcctaatgtctcacctaaatctcctctcttttagcttaagatcatttccccttgtcctattactagtagaccacataaaaagttaggctctctccttctaagtcctcatggccgaaacaccactgagatcgaggtgccagatagtggagcagatcacgcaaccagagtgattcactcaaattgattgattcaactcgaaaataaaagcttccatccacttgagca

SEQ ID NO: 8576 - DNA, 600 bp, Chicken  19866894203394_2
cttgagcaagcaatcagagaacactgcctagcatccttgaacctgccttttttctcccagattttccagaggagcgaggcatatcccttcctttttccccctggatctcttggggcaggatggacgtggatcagacctgcagggagctgcacacaagcagagcccgagctgcaatacgtcctcgtaagatgagcgtgtgaatgattgctttatagaccatttgcagtggggcagaggggaaagaagtttacattcagtgctcgtttcccagtaaatcattcgctttcagtgtggctgaaracctgatttcttggaacgccgtctctccaccgcagctttccagagagaacacatgttttgccacgctctccccttgcccttgcacgcgagctgggacagagctggtgatatctgatctccccgccatgccccaggttctcctgcagtaatggaaaaaagctgctcgctcagagttgctctgatttattcggtaataatctcccctacagggagtcctgacctccmcayggaggctccattaagctcagcctggtagcggggcagggacgggtcgctattgtctcccratgccttgctctg

SEQ ID NO: 8577 - DNA, 600 bp, Chicken  19866894203394_3
gtggggcagaggggaaagaagtttacattcagtgctcgtttcccagtaaatcattcgctttcagtgtggctgaaracctgatttcttggaacgccgtctctccaccgcagctttccagagagaacacatgttttgccacgctctccccttgcccttgcacgcgagctgggacagagctggtgatatctgatctccccgccatgccccaggttctcctgcagtaatggaaaaaagctgctcgctcagagttgctctgatttattcggtaataatctcccctacagggagtcctgacctccmcayggaggctccattaagctcagcctggtagcggggcagggacgggtcgctattgtctcccratgccttgctctgtgcgcagagcaacaggtaccaactgcactctgtcaagtgccatttctgcacatcgtcttcatgttaaatccaaagcagccattgggatggaaacttattagcttcttcaagggagatctgatccagagcccgtcatttgctttagctcaagccccacgcatcaatgctggcagaactgtgcgtgtgtttaatgtggggagcacagggtgtcccatggctccagtt

SEQ ID NO: 8578 - DNA, 600 bp, Chicken  19866894203394_4
gggcagaggggaaagaagtttacattcagtgctcgtttcccagtaaatcattcgctttcagtgtggctgaaracctgatttcttggaacgccgtctctccaccgcagctttccagagagaacacatgttttgccacgctctccccttgcccttgcacgcgagctgggacagagctggtgatatctgatctccccgccatgccccaggttctcctgcagtaatggaaaaaagctgctcgctcagagttgctctgatttattcggtaataatctcccctacagggagtcctgacctccmcayggaggctccattaagctcagcctggtagcggggcagggacgggtcgctattgtctcccratgccttgctctgtgcgcagagcaacaggtaccaactgcactctgtcaagtgccatttctgcacatcgtcttcatgttaaatccaaagcagccattgggatggaaacttattagcttcttcaagggagatctgatccagagcccgtcatttgctttagctcaagccccacgcatcaatgctggcagaactgtgcgtgtgtttaatgtggggagcacagggtgtcccatggctccagttgag

SEQ ID NO: 8579 - DNA, 600 bp, Chicken  19866894203394_5
agtgtggctgaaracctgatttcttggaacgccgtctctccaccgcagctttccagagagaacacatgttttgccacgctctccccttgcccttgcacgcgagctgggacagagctggtgatatctgatctccccgccatgccccaggttctcctgcagtaatggaaaaaagctgctcgctcagagttgctctgatttattcggtaataatctcccctacagggagtcctgacctccmcayggaggctccattaagctcagcctggtagcggggcagggacgggtcgctattgtctcccratgccttgctctgtgcgcagagcaacaggtaccaactgcactctgtcaagtgccatttctgcacatcgtcttcatgttaaatccaaagcagccattgggatggaaacttattagcttcttcaagggagatctgatccagagcccgtcatttgctttagctcaagccccacgcatcaatgctggcagaactgtgcgtgtgtttaatgtggggagcacagggtgtcccatggctccagttgagcttgcacagagctgctggaggagcaggatgtcaaaagcactttgactgcagctaagtct

SEQ ID NO: 8580 - DNA, 600 bp, Chicken  19866894203395_1
gatctcttccttttagaaacagtgcagtaagcaaaatcaatttcgtttcccatctgaaaacaaaaagccctctatatagctgtctgcttctgataaaacctggttatggatctgtggtgctttccaaactgaggagcagaaatacgaatgcaaatatctttgcaattaagatgttcatgaatccaggctgtcctctccacggacctcagtagtatgtagtgctactgtgctactgcacagtgatgccagatgagaccgtgtcatcaaagagcagggattaggccagctagcaaggaagcrcccaaacaaacagaagttctttgggcaactgcttctgcaaagaacctggttgactgcttgtcatgctaggtctgctcagacattctggttgatgccagaaccaaggttggatattttagcccttttacttgaaggaagaaacaaacactggaggcaaggaaatattcttgtctctaaggctgtcatgaactcgcactgaatccttatatgcgatggttgtcttctggctctaattggaaggtttaataatttcttctgagaacatgtgtaatgtgagctccagatggacatgccattaat

SEQ ID NO: 8581 - DNA, 599 bp, Chicken  19866894203398_1
  misc_feature (1)..(185): n is any nucleotide
nnnnnnnnnnnnnnnnnnnnnnnnnnnnnnnnnnnnnnnnnnnnnnnnnnnnnnnnnnnnnnnnnnnnnnnnnnnnnnnnnnnnnnnnnnnnnnnnnnnnnnnnnnnnnnnnnnnnnnnnnnnnnnnnnnnnnnnnnnnnnnnnnnnnnnnnnnnnnnnnnnnnnnnnnnnnnnnnnnnnnnnnnctttcctaaagacagcagtttaatggagttgatagcccactgctccatactctctagctctgtttctagcctgcagccatcctttagcactaacctcttgcttctctcctccttygraaggactctcgtttctgttgacaaacgtcttctgatacagtgtcactgggagtgtcatgtccccacttacagcagggtgtgtagttctttagcttcctacaaatagtgagatatgattgcaaatccaaatgtgctaaaggaatgggaactttttttttttccctcagccatatcatcttcaatgtgtttccttctcaggcttcttcatctscccatcagcttccccacagcccctgctgcaatcgaaagggtgtttttccttggagatctcttagcaaatgttactattatgtgagc

SEQ ID NO: 8582 - DNA, 599 bp, Chicken  19866894203398_2
  misc_feature (1)..(183): n is any nucleotide
nnnnnnnnnnnnnnnnnnnnnnnnnnnnnnnnnnnnnnnnnnnnnnnnnnnnnnnnnnnnnnnnnnnnnnnnnnnnnnnnnnnnnnnnnnnnnnnnnnnnnnnnnnnnnnnnnnnnnnnnnnnnnnnnnnnnnnnnnnnnnnnnnnnnnnnnnnnnnnnnnnnnnnnnnnnnnnnnnnnnnnnctttcctaaagacagcagtttaatggagttgatagcccactgctccatactctctagctctgtttctagcctgcagccatcctttagcactaacctcttgcttctctcctccttygraaggactctcgtttctgttgacaaacgtcttctgatacagtgtcactgggagtgtcatgtccccacttacagcagggtgtgtagttctttagcttcctacaaatagtgagatatgattgcaaatccaaatgtgctaaaggaatgggaactttttttttttccctcagccatatcatcttcaatgtgtttccttctcaggcttcttcatctscccatcagcttccccacagcccctgctgcaatcgaaagggtgtttttccttggagatctcttagcaaatgttactattatgtgagctc

SEQ ID NO: 8583 - DNA, 599 bp, Chicken  19866894203398_3
  misc_feature (1)..(33): n is any nucleotide
nnnnnnnnnnnnnnnnnnnnnnnnnnnnnnnnnctttcctaaagacagcagtttaatggagttgatagcccactgctccatactctctagctctgtttctagcctgcagccatcctttagcactaacctcttgcttctctcctccttygraaggactctcgtttctgttgacaaacgtcttctgatacagtgtcactgggagtgtcatgtccccacttacagcagggtgtgtagttctttagcttcctacaaatagtgagatatgattgcaaatccaaatgtgctaaaggaatgggaacrttttttttttccctcagccatatcatcttcaatgtgtttccttctcaggcttcttcatctscccatcagcttccccacagcccctgctgcaatcgaaagggtgtttttccttggagatctcttagcaaatgttactattatgtgagctctgagatgaacactgctcttaagcaccaatgtaaacagcacagctttgctcagcctcataaatttggctcagtgtttgcaattaaragagagctaatgaaattggaaagaaaaaaatacagttatcctgaatgagattctcacagtagagc

SEQ ID NO: 8584 - DNA, 599 bp, Chicken  19866894203398_4; identical to SEQ ID NO: 8583
  misc_feature (1)..(33): n is any nucleotide

SEQ ID NO: 8585 - DNA, 600 bp, Chicken  19866894203398_5
ttgatagcccactgctccatactctctagctctgtttctagcctgcagccatcctttagcactaacctcttgcttctctcctccttygraaggactctcgtttctgttgacaaacgtcttctgatacagtgtcactgggagtgtcatgtccccacttacagcagggtgtgtagttctttagcttcctacaaatagtgagatatgattgcaaatccaaatgtgctaaaggaatgggaactttttttttttccctcagccatatcatcttcaatgtgtttccttctcaggcttcttcatctscccatcagcttccccacagcccctgctgcaatcgaaagggtgtttttccttggagatctcttagcaaatgttactattatgtgagctctgagatgaacactgctcttaagcaccaatgtaaacagcacagctttgctcagcctcataaatttggctcagtgtttgcaattaaragagagctaatgaaattggaaagaaaaaaatacagttatcctgaatgagattctcacagtagagcactgagttcagaaatgacatttcaagtcagtattttccatcgatttttctgtaaatagagct

SEQ ID NO: 8586 - DNA, 597 bp, Chicken  19866894203398_6
ttctttagcttcctacaaatagtgagatatgattgcaaatccaaatgtgctaaaggaatgggaactttttttttttccctcagccatatcatcttcaatgtgtttccttctcaggcttcttcatctscccatcagcttccccacagcccctgctgcaatcgaaagggtgtttttccttggagatctcttagcaaatgttactattatgtgagctctgagatgaacactgctcttaagcaccaatgtaaacagcacagctttgctcagcctcataaatttggctcagtgtttgcaattaaragagagctaatgaaattggaaagaaaaaaatacagttatcctgaatgagattctcacagtagagcactgagttcagaaatgacatttcaagtcagtattttccatcgatttttctgtaaatagagctgaccaaatccagctcctgaaaatagaaaatgtaagtgttctttcattcttccttctcttgtaattcacatagacaaatgtcaaaacctaggatatttgtaggrggttgacttcatacatatggtgacttcagacacagcttctgtagctgattgcatgcaaaagactggg

SEQ ID NO: 8587 - DNA, 367 bp, Chicken  19866894203398_7
tcttaagcaccaatgtaaacagcacagctttgctcagcctcataaatttggctcagtgtttgcaattaaragagagctaatgaaattggaaagaaaaaaatacagttatcctgaatgagattctcacagtagagcactgagttcagaaatgacatttcaagtcagtattttccatcgatttttctgtaaatagagctgaccaaatccagctcctgaaaatagaaaatgtaagtgttctttcattcttccttctcttgtaattcacatagacaaatgtcaaaacctaggatatttgtaggrggttgacttcatacatatggtgacttcagacacagcttctgtagctgattgcatgcaaaagactggg

SEQ ID NO: 8588 - DNA, 600 bp, Chicken  19866894203401_1
catgaagctgtagatctcactcacggggaggctgcctgttttgctgttcttcagtgccattgcaattaagcaactaaaggacagagaaacgtttaacaacaggttgcatatgcaacaggttgcgtacatcatgttgtcttctagcaacctcagagccatctcccttcagatacaaacacctggctgaccacgggattcccctagtactctgttttgccctaaggatctatagccagtgagttttcaagtgctcagaagacaccctctgatcctgcagattttacctccctgtgctgtttwtctacctttgtgctgatggccaggaactagtttgcttgttcattcctgctaccccccagaggcagtttccacagaactcttgggtgggtgaatggatttgcgttcccttcaaaaggaatcaaatgttcttgtgctgtcacacctatagtgaagtcagcccaaagcaggctctgagtaacacgctgtgctggtatctactcacctgtacgaatagatgggcttggggtaatgttttggatgcagttcttgggcagagtgaggagccaggcgtggctgaggataatgtggctgagtggcata

SEQ ID NO: 8589 - DNA, 600 bp, Chicken  19866894203405_1
ttgaaggattaggggatagggactgcaaatcctttcccattgtttgacaagagaataattccagttcgtgtaattccagcagccatgcttctgactcatacttcaagtggattccccgggaaatacaggcagctaagacattcttggtacacgtctcctggaaactaattccagcttctccgtgtatgggggttgtatgctacaaatctaagcaaatcccttaatatgagttggctgctcatttggtcatgagctcctcagccagcatttatttcacttcatagttacaaaacatatacrccattgtgaacacaagctccaccttttgaccttttctttgtatcaaaaaatgtacttttttttaggaagatgctttcaattatcttaatagatcgtaaatatttaagattgtagaatgttctttagcttggaaggaggaagtaatcacaaatgyagtgatacagtgcttctcacatataaaaccatggcaccattctcaagagattgcaacctaagtctttgtacaaaagcaggatgcaaagaagtatacattaatctgtgctcagaattactttagttcacacaaatatgcaacctgcc

SEQ ID NO: 8590 - DNA, 600 bp, Chicken  19866894203405_2
ctcctggaaactaattccagcttctccgtgtatgggggttgtatgctacaaatctaagcaaatcccttaatatgagttggctgctcatttggtcatgagctcctcagccagcatttatttcacttcatagttacaaaacatatacrccattgtgaacacaagctccaccttttgaccttttctttgtatcaaaaaatgtacttttttttaggaagatgctttcaattatcttaatagatcgtaaatatttaagattgtagaatgttctttagcttggaaggaggaagtaatcacaaatgyagtgatacagtgcttctcacatataaaaccatggcaccattctcaagagattgcaacctaagtctttgtacaaaagcaggatgcaaagaagtatacattaatctgtgctcagaattactttagttcacacaaatatgcaacctgcctaagggtgcaacaactaatgcatctacaaacattggtggcaccatgtatcctgtacagaacaagtatggttctggtttgttaaccaaatgttctggcacatcatggcactggagacaaaacccatagtactgggcttaaggattttatgttcat

SEQ ID NO: 8591 - DNA, 600 bp, Chicken  19866894203411_1
ctgagttttatctggagtaaacaccagcacagcccatgggctgccactggccaacaccagctgcagttattcacccacagctctgctttgagccctttcccacaagcagaaataactccttccacccagaaaataccaaactcctgcaccagctccatgaggacctgaaggagaaagaatgcagccctagatatggtgtcaagcattacccatacaacacttcctattcctcccttttccaagctctgcatttcattctgcaaagtctgctgggatcaggaaaaacttccttccgcattwcagtcatcaggcagagcattcccaaggcagtccagaagastttccaaatgcagcaagactggaaagaggctgcacagacctccagagaacacacaggacggattttcacctccaacagatgcccagaggacttgcttctgacaaagcctcttggtgaaggtgccaggggatttggtgctctgcaaagcagccttccaactttcctcccttcccactgcaatgcagccaaagcagagagctggtgacctggcaggcagagagaggccagcaggacacaggggaggcacgtgccttaatatt

SEQ ID NO: 8592 - DNA, 600 bp, Chicken  19866894203411_2
ctgccactggccaacaccagctgcagttattcacccacagctctgctttgagccctttcccacaagcagaaataactccttccacccagaaaataccaaactcctgcaccagctccatgaggacctgaaggagaaagaatgcagccctagatatggtgtcaagcattacccatacaacacttcctattcctcccttttccaagctctgcatttcattctgcaaagtctgctgggatcaggaaaaacttccttccgcattwcagtcatcaggcagagcattcccaaggcagtccagaagastttccaaatgcagcaagactggaaagaggctgcacagacctccagagaacacacaggacggattttcacctccaacagatgcccagaggacttgcttctgacaaagcctcttggtgaaggtgccaggggatttggtgctctgcaaagcagccttccaactttcctcccttcccactgcaatgcagccaaagcagagagctggtgacctggcaggcagagagaggccagcaggacacaggggaggcacgtgccttaatattgtgaaactggagaaacctttgctcactagagccctacagt

SEQ ID NO: 8593 - DNA, 600 bp, Chicken  19866894203416_1
caaaactgtctgtccgaaccgcttgtgagcacctccacagtcaacctgataacaagcagggatatcattccccacaggaatgccgaggttaaccactgaatgcacatttcttggcagtatgttccttgggagaggatgcggggatgcacttttctatataaagaggagcaccaggcggaggtgaaatgccagcactaacagcgcgtccccagagcctccagcctggatctctgcttccctgtgtgcatcacagagatgttgttcctttaattattaatccttgcattgacgtattcaagwgtgcataggcttctaaagggtgctctgatgtagaaatgaaaaatacatttccttctctcccttaaaacttgtctccattccatgaccaattttattgccgttccgctctaattttaaatataacgagaaacattaaggctttcaattaaaagatcccttccgtgatatagtgggacgtagcctgcagtatgggccacgagtgccgtgttgtgtgctgaagtgggatgctgcctgctacctgattcccacttctgctgtgcggcacagggctctccacggccctgccatgcactgagtgct

SEQ ID NO: 8594 - DNA, 600 bp, Chicken  19866894203416_2
cttctctcccttaaaacttgtctccattccatgaccaattttattgccgttccgctctaattttaaatataacgagaaacattaaggctttcaattaaaagatcccttccgtgatatagtgggacgtagcctgcagtatgggccacgagtgccgtgttgtgtgctgaagtgggatgctgcctgctacctgattcccacttctgctgtgcggcacagggctctccacggccctgccatgcactgagtgctgcatgtaggagctcctcatcagatgcagtccccagtgaagggcaaatagasctcagcgtgatgcaatccaggacttggagatcatcttggcatttggtcctgaatttttcatttcttcccttttctttctgaagggctgagccacagctatggcacagatggtctcgctctgcaatggagaaggaaaatccagaaattgcccgtagagtcactctcattgacaactttgaggagagccctcactgatcagaatttaagtgttgggttctttggaaatcattaggtgtgaagtttggtctaccacaggttttatcatttctgcttttctccaacatcccgaaccttgcactc

SEQ ID NO: 8595 - DNA, 599 bp, Chicken  19866894203429_1
  misc_feature (1)..(207): n is any nucleotide
nnnnnnnnnnnnnnnnnnnnnnnnnnnnnnnnnnnnnnnnnnnnnnnnnnnnnnnnnnnnnnnnnnnnnnnnnnnnnnnnnnnnnnnnnnnnnnnnnnnnnnnnnnnnnnnnnnnnnnnnnnnnnnnnnnnnnnnnnnnnnnnnnnnnnnnnnnnnnnnnnnnnnnnnnnnnnnnnnnnnnnnnnnnnnnnnnnnnnnnnnnnnnnntctccgtgccttctctggtccctgcactactgttttcttctctttttgtagaacagtgcaaaagcttgctgattttatccctaacagagtcarttcactgtgatgtgacgtggttgtagctataatacactttccctctagcgggcagcatcaacactgactggggctccttccttttgtatggcttctaggttaaaatgaagaaggaataccagcagaaaaagatggaaaagggcatcagcccacgaaaacccagcatcaccctcagtgcctaccagagcaagtgcatccaaaccgttctgaaagaagagtaagttcaagcttggatcctcctgtagcatgtacataggctgtccttttcaaatttctcgagtaaatttcmcctctctgca

SEQ ID NO: 8596 - DNA, 600 bp, Chicken  19866894203429_2
aacagagtcarttcactgtgatgtgacgtggttgtagctataatacactttccctctagcgggcagcatcaacactgactggggctccttccttttgtatggcttctaggttaaaatgaagaaggaataccagcagaaaaagatggaaaagggcatcagcccacgaaaacccagcatcaccctcagtgcctaccagagcaagtgcatccaaaccgttctgaaagaagagtaagttcaagcttggatcctcctgtagcatgtacataggctgtccttttcaaatttctcgagtaaatttcmcctctctgcatcatgtggttgactgatgcaccacctggagctcgtagagrtggtctaaagcatagaatgtgccagcttgttagagtagtactggtcatattatgctactactactgaatctrctttcaggtctcctttttgcccgaggatcttttggcagtctgtatgaagtctgtaattaacagaatcacttaaaacaatattcccattctctgctgtygtatgaattgtttttcttattgactgtcaccaaacaaaaatggcttgcagcttactgatttgaatttatttttcttgaag

SEQ ID NO: 8597 - DNA, 600 bp, Chicken  19866894203429_3
tccctctagcgggcagcatcaacactgactggggctccttccttttgtatggcttctaggttaaaatgaagaaggaataccagcagaaaaagatggaaaagggcatcagcccacgaaaacccagcatcaccctcagtgcctaccagagcaagtgcatccaaaccgttctgaaagaagagtaagttcaagcttggatcctcctgtagcatgtacataggctgtccttttcaaatttctcgagtaaatttcmcctctctgcatcatgtggttgactgatgcaccacctggagctcgtagagrtggtctaaagcatagaatgtgccagcttgttagagtagtactggtcatattatgctactactactgaatctrctttcaggtctcctttttgcccgaggatcttttggcagtctgtatgaagtctgtaattaacagaatcacttaaaacaatattcccattctctgctgtygtatgaattgtttttcttattgactgtcaccaaacaaaaatggcttgcagcttactgatttgaatttatttttcttgaaggggagaacgcataagggaaatggtaaagcagatcaatgacatcagaggcc

SEQ ID NO: 8598 - DNA, 600 bp, Chicken  19866894203429_4
aggaataccagcagaaaaagatggaaaagggcatcagcccacgaaaacccagcatcaccctcagtgcctaccagagcaagtgcatccaaaccgttctgaaagaagagtaagttcaagcttggatcctcctgtagcatgtacataggctgtccttttcaaatttctcgagtaaatttcmcctctctgcatcatgtggttgactgatgcaccacctggagctcgtagagrtggtctaaagcatagaatgtgccagcttgttagagtagtactggtcatattatgctactactactgaatctrctttcaggtctcctttttgcccgaggatcttttggcagtctgtatgaagtctgtaattaacagaatcacttaaaacaatattcccattctctgctgtygtatgaattgtttttcttattgactgtcaccaaacaaaaatggcttgcagcttactgatttgaatttatttttcttgaaggggagaacgcataagggaaatggtaaagcagatcaatgacatcagaggccatgtgaacttctaacatctccatgaggataaacctacaataaaaggctggataaattttcattatgccctgg

SEQ ID NO: 8599 - DNA, 552 bp, Chicken  19866894203429_5
aaagaagagtaagttcaagcttggatcctcctgtagcatgtacataggctgtccttttcaaatttctcgagtaaatttcmcctctctgcatcatgtggttgactgatgcaccacctggagctcgtagagrtggtctaaagcatagaatgtgccagcttgttagagtagtactggtcatattatgctactactactgaatctrctttcaggtctcctttttgcccgaggatcttttggcagtctgtatgaagtctgtaattaacagaatcacttaaaacaatattcccattctctgctgtygtatgaattgtttttcttattgactgtcaccaaacaaaaatggcttgcagcttactgatttgaatttatttttcttgaaggggagaacgcataagggaaatggtaaagcagatcaatgacatcagaggccatgtgaacttctaacatctccatgaggataaacctacaataaaaggctggataaattttcattatgccctggtaattcttcttatatatttaacattcatacactgaacaatatgccctttt

SEQ ID NO: 8600 - DNA, 600 bp, Chicken  19866894203437_1
ggatgcctctacagaaaatttactgaaataacagctgctaatagtcgttatgaaaatggaagacaaggatcctgaatgtgcaagagccctacaaagaagcgtaacaaagtccattatgtggaattactgatttttattgttaagaagaaatacagaaagcgggggaaaaaagagtgagtgatttcaattttcttaatttgttaaagagagactagaatggcacctagttctggtctagaagtcttttgattccatttgccacatatctgctctatttcttcttcccccagtcctcattcmcgctcagttgcctgcaggagattttagtgacttgatggatgaacaatgcatttcctcagtaaaaatatgaaaccactccctcctgcaagtggaactgaagtgtcactgtgttcatttctactttaggattggcatcatactcatgcaataagttagtgagctgagcctatcagtcaaggggactctcaggaaatctctgtaacatttcaggatgtgggtgcatcatgcttagttagaagtgattcatcatttccaaccaacatcaacacttgctcagtttgtttctcatcctgcagcctg

SEQ ID NO: 8601 - DNA, 600 bp, Chicken  19866894203443_1
ttaaaagatctagaaatgaggaaaagtgcattgtctaactcttaaacacctggatcattagtgaaaatgtgatctacaacccagaagccattcagctatagactgagtcttctgtgccatttccataccagtttttgctgtgctcgtgttggggctgaggtgccaagccaccacctcttgggtctcatggttaaccataatgctgctgttcacatcttcagatacgctccagtgcacctgaaaatctactgggcttttgcatctgagttgtttgctttcaaaagtgtaaccccaaattgyatctctgcctaaaattggcagaatgaaaatgcaatcacattrggcacatgtgtaaacataacagctctgtcttcttgggtggtcttcatcaatcacttaaattctcccaacacctgctgtccaggatgaattatttatcaagcccacagaattttgtcagcaaattgttatagtcatcagctgagctctctgagcccttacttaaaatccaatgaccaaacactggctgtgcgtccatacgctgagctttattcaccactgtctttgtgccactggttgtagtaatgcagagtacctgta

SEQ ID NO: 8602 - DNA, 564 bp, Chicken  19866894203443_2
taaacacctggatcattagtgaaaatgtgatctacaacccagaagccattcagctatagactgagtcttctgtgccatttccataccagtttttgctgtgctcgtgttggggctgaggtgccaagccaccacctcttgggtctcatggttaaccataatgctgctgttcacatcttcagatacgctccagtgcacctgaaaatctactgggcttttgcatctgagttgtttgctttcaaaagtgtaaccccaaattgyatctctgcctaaaattggcagaatgaaaatgcaatcacattrggcacatgtgtaaacataacagctctgtcttcttgggtggtcttcatcaatcacttaaattctcccaacacctgctgtccaggatgaattatttatcaagcccacagaattttgtcagcaaattgttatagtcatcagctgagctctctgagcccttacttaaaatccaatgaccaaacactggctgtgcgtccatacgctgagctttattcaccactgtctttgtgccactggttgtagtaatgcagagtacctgtatcatag

SEQ ID NO: 8603 - DNA, 600 bp, Chicken  19866894203446_1
acttgttctgatttttttttctgtgtttctgactcctttcttttgacttccttatttctagctatatatttagcaaatcaagcaaacaagctcaatggaccagcctttatgtagctgaaggggtaaccatgtgctcagctaagcagcaaggattttaaatattgggatgcaggctgaaagctttgtttcacttggaatgatgaacagaagaaaacgcagcagaagaacatgattcctgaccacccagtgaggttccagtcatcaagtggacaaagagtcttcaagggtgctatcacgatrgttgtgattttggtcatccaaatcacatgtttattttctgccttaayagatgggctataatctgttctctctttttaaagtctcatacctgacctcttcagctggggtaatgttacagtgcatgctccaaatgtattgyggcagaagtaaactgaaccagcagctctgcaaaaaaaaaacattatgggaaaatgcactcaaatgatcgttggttctgaggaagatggtgctggttcccctctggggtctcaaacctcaggaaaagaagtgttaaatagagctattctctaactacccgtc

SEQ ID NO: 8604 - DNA, 600 bp, Chicken  19866894203446_2
ttccttatttctagctatatatttagcaaatcaagcaaacaagctcaatggaccagcctttatgtagctgaaggggtaaccatgtgctcagctaagcagcaaggattttaaatattgggatgcaggctgaaagctttgtttcacttggaatgatgaacagaagaaaacgcagcagaagaacatgattcctgaccacccagtgaggttccagtcatcaagtggacaaagagtcttcaagggtgctatcacgatrgttgtgattttggtcatccaaatcacatgtttattttctgccttaayagatgggctataatctgttctctctttttaaagtctcatacctgacctcttcagctggggtaatgttacagtgcatgctccaaatgtattgyggcagaagtaaactgaaccagcagctctgcaaaaaaaaaacattatgggaaaatgcactcaaatgatcgttggttctgaggaagatggtgctggttcccctctggggtctcaaacctcaggaaaagaagtgttaaatagagctattctctaactacccgtcaagcccactaccaaatacttttgaattcagaagaatggaagtcacca

SEQ ID NO: 8605 - DNA, 584 bp, Chicken  19866894203446_3
taagcagcaaggattttaaatattgggatgcaggctgaaagctttgtttcacttggaatgatgaacagaagaaaacgcagcagaagaacatgattcctgaccacccagtgaggttccagtcatcaagtggacaaagagtcttcaagggtgctatcacgatrgttgtgattttggtcatccaaatcacatgtttattttctgccttaayagatgggctataatctgttctctctttttaaagtctcatacctgacctcttcagctggggtaatgttacagtgcatgctccaaatgtattgyggcagaagtaaactgaaccagcagctctgcaaaaaaaaaacattatgggaaaatgcactcaaatgatcgttggttctgaggaagatggtgctggttcccctctggggtctcaaacctcaggaaaagaagtgttaaatagagctattctctaactacccgtcaagcccactaccaaatacttttgaattcagaagaatggaagtcaccacagcttgaatccataatgcatcaaattcaaatgctggacttactggaactagagataattcaggggaagagatttg

SEQ ID NO: 8606 - DNA, 600 bp, Chicken  19866894203451_1
taaataatttcatcctaatatctaacctgaatttcccctctttttgtttaaaactattcacccttgtcctattgctttcagatcacgtaagaagtcagtctccctcctgtttataagtgctccccaagtactgaaatgctctcctggagccttttcttctccagcctagctccctccacctttcttcgtaggaggggtgctccagccctttgattgtattcatggctctcctctggacccactccaacagctccacatctttcttgtgctgggggccccaggcctggacacaattcttcrgagggacaatcccctcccttgccccgttggtcacccctcttttgatgcagcccagggtataattgaccttccaggctgcaagcgcacactgctggctcatgtccatcatttcatccatgacgatgcccaactccttctctgcagagctgctttcagtgagttcttctcgtctgtacacatatctgggattgctccaacccaagtgcaacaccttgcacttgaccttgttgaatctcattaggttcacataagcccacttttcaagcttatccaggtccttttgggtggcatcccttcctt

SEQ ID NO: 8607 - DNA, 491 bp, Chicken  19866894203452_1
gcttagtctgtagcagttcgtttctgttgcttctgttcctcatgctttcaccctgctccaatatgagcccaacccaccggctgtactccttgaggaaaagtctgttctgacattggctcctctgtgggctgcagaggggataccttctccggcatggtgtcttccaagtactgtaggggaacttctgctctgacacctggagcaccttctccctctcctcctttgctgaccttgctgcttgtgctgctgtttctcactggtttttctcctacatctcagcttgtgtggtgtttttgcccwttcttaggtacatttccacagaggcagcaccagtttgtctgctggactcagctgcaccctgtggtggggctgcagtggagctggctaaaaccgacctgtcctcacacaggcctgtaagcctgtgtaaacttctaccacagaagaagtttgaaaatacttaagaatgtgtattattttgattgtaaggctgt

SEQ ID NO: 8608 - DNA, 600 bp, Chicken  19866894203459_1
tctgccactgaagacttagaactgtcatttcagaggatggaagaaaatggtaaaacaaacaaacaaacaaacaaacaaacaaagaaaaaacaaccctggggatctaattttcaccttggttcttcaagagtcatatttttattgctttccttggacctgactaattatgcttttctaaattctcattgttggtccagccaccattcagtttgaatggaagatgatcactcttaattcaatgaattctacatcctgaaagtgtctgatgaatccctcactaagagtgcccagaaacaccaktggaggcaatctaaaatactcgtagctgacttgttaaatgttctttctttataaaggagaagctcacttttaaaatatgatatgcgatatggtttataaactatatgaagaatccttctggcttccaaatattcaagctcatatatgtgtatatgtatttgttgtacacataacctggaaagataagrgttgggaaatcctacataggtatctaaaaaatacggtaagatgtacagaaatagatcttttgtgtttgtctaactctgaaagaaacagcaacaaaggaagaacagcctggac

SEQ ID NO: 8609 - DNA, 600 bp, Chicken  19866894203459_2
ttggtccagccaccattcagtttgaatggaagatgatcactcttaattcaatgaattctacatcctgaaagtgtctgatgaatccctcactaagagtgcccagaaacaccaktggaggcaatctaaaatactcgtagctgacttgttaaatgttctttctttataaaggagaagctcacttttaaaatatgatatgcgatatggtttataaactatatgaagaatccttctggcttccaaatattcaagctcatatatgtgtatatgtatttgttgtacacataacctggaaagataagrgttgggaaatcctacataggtatctaaaaaatacggtaagatgtacagaaatagatcttttgtgtttgtctaactctgaaagaaacagcaacaaaggaagaacagcctggacagagtatcatgccagatgttttacagattactctgtatttcatcactcaatctttatttaatcttagaggactgtggtaattctaatactggaataacccggtggactatgtatttgtttgcagcttccagccatgtctgttcccagctggccaattatttattatattgtaaagaaaaatatcctct

SEQ ID NO: 8610 - DNA, 600 bp, Chicken  19866894203472_1
gagatggaggaccactgctaacctcactgcgtcctcttttttcctccaccaaattcttagagtttcagcacgaggatctcagtgatttcagaaggattggaatctgttgctcttgtgacctgtagtactttttgtatataaagttctgtaagaccaatcaccaagttacaactctttgaattcacagccagtgttttgcaattagaaagactgcaggaccccttcagacagctgtctaaccctgaaactgcacaagtgctatttttttgagtgttcagttcatagcattgagttgcctgkctctctctcaatgccacagcgtgctcatgctgtgaggcctctgtaagacacatacaagcttgcagccttcaaagcaaatactaaccctggctggtacgtggtgatacacactaccaataccaagcctctttttttcttccacaggtggctggttgtggaggtgctgatcaccacaggtgtgtacatactgctaggggttactgagctgtcccacaggttaaccacagagaatcccaaaatcacggggctacttctatgcgaagctttgcagtaaatgaattctggaagctgtcctgtagt

SEQ ID NO: 8611 - DNA, 600 bp, Chicken  19866894203472_2
gcagtgagtcacagctgcagagtctccatgcagtagtaaacagaagcctaaggagatgtgctgtcatcccatcagtatctttgaagtgagaataatcctgaactttgtcactgctcatctatttgtccactgaacctgtcttaactagtggtggctgtatttgcatcagtgcaaatgcaagtgctgcagagcatgaaaaccctgtaccttgggtgtggactggcttctctcaatggaattttcatggactgactcaaactgaattcatgacaagttgcaaaaaggatggtagtataacgwtcatgggctgaaatgtgatgtttatataactggtcctgatgtgtgcgcgaagctgcagaaaacttgtaatgaaggcacaggagaatgagtccagctgtggttctacagagtcattaaaatgtctctgttgctagctgaaagggagctaactggagcaattagaacagtaatgaacatctctgaagtctgtgtctgcacacaaaataatgtgttatctgttcagaactctgggcagcctgatgttatgctcgggattgcagagagctaagtagatatcttttcatattaaaatagatggtt

SEQ ID NO: 8612 - DNA, 599 bp, Chicken  19866894203480_1
  misc_feature (1)..(2): n is any nucleotide
nnagcaaaagcagagaatttgggaaggataatttggctttccaacaaaaagtcaggagatgctcatatgcttggcaggtcccagggacaaggctccacagaggtcagtggaaaggccagatctgatgccagatctgtcccaggcggctggacactgttaggagatggatgtgaaggaggaatgaggcaaaaacccaacttttagagtggcaatggcatgtgttggaacagacatactgcagtagctcctggaggccctgctctgagtcaaccaggctaggctagacacagacacagagtmatagaaccgtctgagttggaagggaccactgaaggccatccatacagggtggtaataaaagatgccaaagtcagaaacctcaacaagagtccaacatgcatgggatgacattgacattagcagagagactgtctcctcgctgtgctgagcctctgtcctccctgtacagaccatgccctagggggccaatcttcctccactacagggatctgcacaaagtccagatgggctcagactgctcagtgttggatttacttcagcaaaaacaacygcatatccaagccaacgtgtgggcagcc

SEQ ID NO: 8613 - DNA, 476 bp, Chicken  19866894203480_2
caggctaggctagacacagacacagagtmatagaaccgtctgagttggaagggaccactgaaggccatccatacagggtggtaataaaagatgccaaagtcagaaacctcaacaagagtccaacatgcatgggatgacattgacattagcagagagactgtctcctcgctgtgctgagcctctgtcctccctgtacagaccatgccctagggggccaatcttcctccactacagggatctgcacaaagtccagatgggctcagactgctcagtgttggatttacttcagcaaaaacaacygcatatccaagccaacgtgtgggcagcctggttctgaagcaaccctggtctgctgagaaaggaagagccagaactcagaggctgggatttagcaagcacttgttcaactcttgacttgccttccttgagtttctgcaagccagacatgcctgagaagaaactacagccatacactg

SEQ ID NO: 8614 - DNA, 600 bp, Chicken  19866894203482_1
catgtttgtttttcagaaaccattgcagtcagtccacaccaagacaaaaacaaaatgtggaatgcatcatctgatgcccacaggatttttaaaagggctggatgcagagctgcccaacaagggccaatgtgctactggaaacaagaacttcatgttgatggccctccacaaaggtctggctctaacagacttttacactgcaaaatgttgaatctgttgcataataatgataaagtgatgggttttttccataagccaaaacaatgagatcattccaaaatcaaaatggagcccggtggygttactgaaatgtattctgccttgctcatggtgaaaactcattgccagtggcttttgtgtttgtcagactggcattttctgaaggaagaatagcccactgggaactatctaaccaattgtagagctaatatgagaacctgtagcaggctgcctgtttgttgcttctctgtttggtattttcattctcattcttcaagaaccccttctgtacttcccaagccagtggacgtttctcttgaaaacgtggctgcagagagagaggctcttcacaccaaaaccccccctccccagctggcagtg

SEQ ID NO: 8615 - DNA, 600 bp, Chicken  19866894203484_1
attttagaaaatgatgcaaatttgttatctactttgttagaactgtagcttagtaatatataatctgtcttctcaattacatatactgtttttacattttgtcccagatgtctaaagacaactagcaattgtagcatagagattgatagttgtggacgggggaaaggattggggtgggagttaaggtttggcttggttacattttattcaaatttgtttatctcataagatgataatgtgagaacatatcacagtccccctgaggtaaaatgttccaaaaatgggaaatcagcatctttyagaggttgatggaaaccagccattctgcatatttacataaattctgggctcagtcctttagcagtggcaataaaacacttggtgttcttggtagcagtagaagttaaatgtctgactttattagtaaaaattaatcttattacatcactgtacagctcaaaagataattagattctgaagatgtaattctacagaaaaggactatatcaacatcctcttttttttattatgtatttaaatgtggagtaattcaggagatattcattctgtaaatctgtttagctgaaataaaagtcagaa

SEQ ID NO: 8616 - DNA, 600 bp, Chicken  19866894203489_1
ctcttgttgatttgctgtggcaaaggagaaagaggcagagggaaaatctcctttgttttcctcctcttctgcttgcacgaacttataagtgttaaactggaccttcagcaggaccttcagtcccatggtaccaatggagcagggccagatgaacacttgaggagatctggagccaggaggcactacggctcatcttccccttctccagacagagccaagcccacaggcatcctcatcagcttttcagggtgaaagcaccccaccaagcaaagctcacccacctgatgttctttcctacarctcaggacaggccatgggtgctcagatatcagacagcaacttctcctttggcacagctccagctggggtcccagggctggcccggtgcattgcaaataggtgttaaaaggccaaggagaaaagcagcagctggcgtgaggctgggaatgaattatggatgtgccagcctccctggagagcttgtggtggggagcagaggggctgcagggcacctcctgctgcagagatgatggcttttgcttagcagaccttgcagaaacacgtcgtgggacaacatccagcagtgcacacctggatggc

SEQ ID NO: 8617 - DNA, 599 bp, Chicken  19866894203493_1
  misc_feature (1)..(126): n is any nucleotide
nnnnnnnnnnnnnnnnnnnnnnnnnnnnnnnnnnnnnnnnnnnnnnnnnnnnnnnnnnnnnnnnnnnnnnnnnnnnnnnnnnnnnnnnnnnnnnnnnnnnnnnnnnnnnnnnnnnnnnnnnnnnnntgacctttctctgagtaatccttggtgcatataaataacctctaaatacaaactgaattgcttggcccagataagttcaaggcagactcaacattaaagcaacatactgtctccagcgggtttttgtttgcattaggacagaagtgacaagactctctgttaagtgaaacacamaaaaaaaaactttatttggtttaaaaaagacaagttcataaagacaagaactatacacatattgcctggacaaaacatgatagtaagctccaggacagaaaaaggagcttggtgaacataccagtctttcctgaagctgcagaactgagtatgtttyaaggacgcagatgamaacctatttaggtgtgagaactatgttttaagtaaaaatagaaagcctgtaaacaatatttcccgttcctcaaaactttctctcatttttggatgcttttgaaagtagcagtcctacaggtaaccta

SEQ ID NO: 8618 - DNA, 600 bp, Chicken  19866894203493_2
taaataacctctaaatacaaactgaattgcttggcccagataagttcaaggcagactcaacattaaagcaacatactgtctccagcgggtttttgtttgcattaggacagaagtgacaagactctctgttaagtgaaacacamaaaaaaaaactttatttggtttaaaaaagacaagttcataaagacaagaactatacacatattgcctggacaaaacatgatagtaagctccaggacagaaaaaggagcttggtgaacataccagtctttcctgaagctgcagaactgagtatgtttyaaggacgcagatgamaacctatttaggtgtgagaactatgttttaagtaaaaatagaaagcctgtaaacaatatttcccgttcctcaaaactttctctcatttttggatgcttttgaaagtagcagtcctacaggtaacctaagaattcaactgttaccttgaaatagggcactcagtctagttcagcatggcaagcaatagttgccagctggttgcaactgctggagaggaacctcctccctgaaagctttccaaagaaaaatcaaacctgtaacaagactgaaagaatactctacagt

SEQ ID NO: 8619 - DNA, 600 bp, Chicken  19866894203493_3
tacaaactgaattgcttggcccagataagttcaaggcagactcaacattaaagcaacatactgtctccagcgggtttttgtttgcattaggacagaagtgacaagactctctgttaagtgaaacacamaaaaaaaaactttatttggtttaaaaaagacaagttcataaagacaagaactatacacatattgcctggacaaaacatgatagtaagctccaggacagaaaaaggagcttggtgaacataccagtctttcctgaagctgcagaactgagtatgtttyaaggacgcagatgamaacctatttaggtgtgagaactatgttttaagtaaaaatagaaagcctgtaaacaatatttcccgttcctcaaaactttctctcatttttggatgcttttgaaagtagcagtcctacaggtaacctaagaattcaactgttaccttgaaatagggcactcagtctagttcagcatggcaagcaatagttgccagctggttgcaactgctggagaggaacctcctccctgaaagctttccaaagaaaaatcaaacctgtaacaagactgaaagaatactctacagtgggtatctgaaacaa

SEQ ID NO: 8620 - DNA, 599 bp, Chicken  19866894203499_1
  misc_feature (1)..(53): n is any nucleotide
nnnnnnnnnnnnnnnnnnnnnnnnnnnnnnnnnnnnnnnnnnnnnnnnnnnnncaatggctttggaggaagaggtgtttagcatttcagtttgttgtggtttattaccttactgaataaataatatattatagacttcagatttcatagttgaattcattcagttaatgatgatgccaggtgaacatcactgtcagatctgtgaagcttttttctcactcagcaattggagcatgaaatgtacacacgaaatgacttttcaatggaaaaaaattgtttcccattatataaaaaagtgcaygtgaaagctgagcatttttccctctgctctctcttttctgtgcacttacttttgtattttaatcttatagtaatggttctttacaaaaatgtaagtagccaacagttcaggaacatgagatgttgtcaattttgggattataataagccgcagaaagctgaggaattgttgcatgcaaatgaaaaacattggagatctgccagtatgcaggtgaactaactgggaatcaacgctagatgaaagctaaaattcagcttcccaaaaccttctatttcatgagttttggatgtacttttaaa

SEQ ID NO: 8621 - DNA, 600 bp, Chicken  19866894203506_1
ccttcatcacaatagaataaggaaggcagaaaatggctcattttatcaattttatcatatccttgttgtttttgtttctgtgatagtatcttactttaaactgaagaagaaaatccctagtttaccaaatggattgatcagcatctgacaaagctcttaagctattcttcaagatttggagtgtaactggttttgaatttgggaatatatagaattgagtacttaaatacattgtgacaatacaataacaacctacattcctttcctgaaaagttatttcagaaaaaggattcacaccgratttgcagttcttgcataatattgcttacatggtgcaagtgtttggaaggtgtttggaatagttcttcttatagcacttccctggtagataaatgtcagtaattaaacacattatactgcttctacactccttacctgggcaaaattcttactgaaattattatttctaaggaagttatactcaatattttagttgctgttagcatgtaaagataaagggactgaacattgcttctaggtagaagaaaaggattttgtttgtaatgaccccaccttctgaacagcatatggttcaggttt

SEQ ID NO: 8622 - DNA, 427 bp, Chicken  19866894203507_1
aaggatttgcttcctggcttgctttgaagttgggagttggaagcataaatgctgctgtgactctggacctctagcattttgcttcacttttgctgctgtgagcactgcagttctttgctctacttctgtagacatctggaagacctggagtcgatgctccatgtccctgactttgccagcacccatccatggggacaggtatccccacagcatcctcgggtggctctgctggattttcccagtggttttccagcttctgtttggaaagccaaaatgtgaaactaccagcaaagcccaaawagtttgttttggtgatggatcaaaacatctttattttgcttttggagtttattttgggtaagagtcttaatgaaattaaatacggtttcaagataagaacaaacacgtccaacctaataagacagat

SEQ ID NO: 8623 - DNA, 600 bp, Chicken  19866894203510_1
tcaggaaccataaataaataaataatgaagggggagatggaaatgttgacttgccaaggtgacagggcttcatttacttggtacatctagggctgttatcccctaaaacgaagatcgctcctgtgaaacataacagcccttcagatctcaagcatcacatccagaaagaatggatgaaaatggagactgcagagatagagctcttctgtacagtctgttctccagtgctttgaacactgatcctggcttaaagtggaagcaaaatctctgagaaagggctcacagccctggccatggccrgtaagaaacagggcaccaaaaastgcagagcaggatgtcattcatggttcgatgcttgctacccatggccaacgtcaatggagtgtctgaacttccaactgcgcctttgacaatctctgtcaaaatgtgtggttggatggtgcttgaagagaaggcccattcagtaaggacattgtagcagaaatgctgagtcatggtctgaagcagtgatggagcacctggtgggaaggcagggccaacccaggggagctcaggtgtatgcaatgcacctgagtgattgggagggctggagccaggatc

SEQ ID NO: 8624 - DNA, 600 bp, Chicken  19866894203510_2
aatgaagggggagatggaaatgttgacttgccaaggtgacagggcttcatttacttggtacatctagggctgttatcccctaaaacgaagatcgctcctgtgaaacataacagcccttcagatctcaagcatcacatccagaaagaatggatgaaaatggagactgcagagatagagctcttctgtacagtctgttctccagtgctttgaacactgatcctggcttaaagtggaagcaaaatctctgagaaagggctcacagccctggccatggccrgtaagaaacagggcaccaaaaastgcagagcaggatgtcattcatggttcgatgcttgctacccatggccaacgtcaatggagtgtctgaacttccaactgcgcctttgacaatctctgtcaaaatgtgtggttggatggtgcttgaagagaaggcccattcagtaaggacattgtagcagaaatgctgagtcatggtctgaagcagtgatggagcacctggtgggaaggcagggccaacccaggggagctcaggtgtatgcaatgcacctgagtgattgggagggctggagccaggatccaccccttcccagacctcattta

SEQ ID NO: 8625 - DNA, 599 bp, Chicken  19866894203514_1
  misc_feature (1)..(199): n is any nucleotide
nnnnnnnnnnnnnnnnnnnnnnnnnnnnnnnnnnnnnnnnnnnnnnnnnnnnnnnnnnnnnnnnnnnnnnnnnnnnnnnnnnnnnnnnnnnnnnnnnnnnnnnnnnnnnnnnnnnnnnnnnnnnnnnnnnnnnnnnnnnnnnnnnnnnnnnnnnnnnnnnnnnnnnnnnnnnnnnnnnnnnnnnnnnnnnnnnnnnnnnaacacatgccagcccagatattatcacattgcatttgttacagcctcactacccactcagaagatgatgagcatctttttgtgtaccatagccaaatcctyctttcctcctcctcttcatggagacacatccccccacaatctctgcttcttgtggtccagcttttttccaccaycagctcctagagacgtttgcatccccaagcagcaagagacacagccaccagggcaccagatctcttcctctacactcacaccaccacatcatcttttagagcaattaagctcagcattcagggggatcactgcactgaarctcactgtctcctgggcatttctttgcagttatgtttgtctgagagccaagcccagaagagtcccttgaacccagctatcaccca

SEQ ID NO: 8626 - DNA, 599 bp, Chicken  19866894203514_2
  misc_feature (1)..(125): n is any nucleotide
nnnnnnnnnnnnnnnnnnnnnnnnnnnnnnnnnnnnnnnnnnnnnnnnnnnnnnnnnnnnnnnnnnnnnnnnnnnnnnnnnnnnnnnnnnnnnnnnnnnnnnnnnnnnnnnnnnnnnnnnnnnnnaacacatgccagcccagatattatcacattgcatttgttacagcctcactacccactcagaagatgatgagcatctttttgtgtaccatagccaaatcctyctttcctcctcctcttcatggagacacatccccccacaatctctgcttcttgtggtccagcttttttccaccaycagctcctagagacgtttgcatccccaagcagcaagagacacagccaccagggcaccagatctcttcctctacactcacaccaccacatcatcttttagagcaattaagctcagcattcagggggatcactgcactgaarctcactgtctcctgggcatttctttgcagttatgtttgtctgagagccaagcccagaagagtcccttgaacccagctatcacccacacatctgctccatagatgagacctctgctgggagcraagctgaggaagcccctttgctcagatacaggtgatg

SEQ ID NO: 8627 - DNA, 600 bp, Chicken  19866894203514_3
agatattatcacattgcatttgttacagcctcactacccactcagaagatgatgagcatctttttgtgtaccatagccaaatcctyctttcctcctcctcttcatggagacacatccccccacaatctctgcttcttgtggtccagcttttttccaccaycagctcctagagacgtttgcatccccaagcagcaagagacacagccaccagggcaccagatctcttcctctacactcacaccaccacatcatcttttagagcaattaagctcagcattcagggggatcactgcactgaarctcactgtctcctgggcatttctttgcagttatgtttgtctgagagccaagcccagaagagtcccttgaacccagctatcacccacacatctgctccatagatgagacctctgctgggagcraagctgaggaagcccctttgctcagatacaggtgatgagaggtcttggtttctttgtgcccacacagctcctatgcctcagtttgcaaatcaagcctcagaaagaagcttaaatatttcccctctcaagtgaaggacagccttcacccaccttggagtcaaggagatttaactcaagc

SEQ ID NO: 8628 - DNA, 600 bp, Chicken  19866894203514_4
caatctctgcttcttgtggtccagcttttttccaccaycagctcctagagacgtttgcatccccaagcagcaagagacacagccaccagggcaccagatctcttcctctacactcacaccaccacatcatcttttagagcaattaagctcagcattcagggggatcactgcactgaarctcactgtctcctgggcatttctttgcagttatgtttgtctgagagccaagcccagaagagtcccttgaacccagctatcacccacacatctgctccatagatgagacctctgctgggagcraagctgaggaagcccctttgctcagatacaggtgatgagaggtcttggtttctttgtgcccacacagctcctatgcctcagtttgcaaatcaagcctcagaaagaagcttaaatatttcccctctcaagtgaaggacagccttcacccaccttggagtcaaggagatttaactcaagcccagatgatcccaactcacttcactccctgtagtcaaggacattttttgctccgtaggagctgcgtctcaggtgcacttgagcacagttcccacagctcttctctgtgagaagctcatgagt

SEQ ID NO: 8629 - DNA, 600 bp, Chicken  19866894203516_1
taccttcaatatcttccagttctctgaatttaccatgtagacactttcacataaataaaaccttctcaggactccatatgaaatctgtattgctggcatactcaaaaaatcagcatcaggtcttctctaaagatattaaatacaccctatatcttgcaccatgacagatgtcagttagtcccagatggtttgcaaccatattgctagtatgcagtcataaaaccttcatggacatacagctaaccaattaagttgattttcaagcagctgtttggaagctgggctctcctagcaaagctrtaaaagcaaaagacagtctttacctcagagctcccatttaatcactggcaagacagaaaatttagctccatacagaagacagatgaatcactaattgagataaactagaaaagttgcaaggcacaagccctgagaagactcaagcttttctaggctttgcagggattatttaattcaaataaagaatctcaggttttctgctgctcatctccacaaatgccctcatcaacaaacaacataagaaaactcctcagtggcttaggatggggttgaaaaagtgtcagtgtacaaaatggaggg

SEQ ID NO: 8630 - DNA, 600 bp, Chicken  19866894203528_1
agtggtggttgtaggctgtatgtggggctttctatagcagcaaatggcttaagtttcaaaaggcaacctctaaagctgattgtagccatcttccaggtcacacagcaggcttggcacgatggaatgcttcatttccaagtctggagtgtgtgggacgtgatgctggaaacacatgccattcagtttaggctgtgttcatcaaaacagggcattttaactggaaggtcagaatgactgctgtgttggaagaggtgtttgcaccagccgtacatggggggccttcaggtgtccatgatgttygtgtgcccaggaggtcctgcaggggctgcagctggagtggggagttcagctgtgctgggtctcatctgtagcagtgcatcgtctgcactgacatcgctaaaggaaggtaagaaatggcctttccagtaacaaaaatagaggaaaataatcctaggagttgcagaacaactgttttcgtttccacatctctcaggtttccacaagagtagtttgactcccaaatcttctttgaagtttcctctctgttctcattctccccctccagttctcccatctcttctctgttctgctctcaccctt

SEQ ID NO: 8631 - DNA, 474 bp, Chicken  19866894203530_1
tttccctgcctctgtgcatgaggaagagcagtgggacccaggtggctgtgagcacaatgcctgggcagagggtttgtggcagcagtgcgtcccagcacttatttacaccagggggtgtaaataagggctgggggaggtgctgagcaacagccatcccctccttaatattccttggaaagggaaggtgaggaggaggctccatcccagtgttattcactccatccctttcctctgctgtccccttccctatgctctgggttgcagccaggtctgtaagcgagccctgcagcgtgggcagcycrgagtgctgagctcagtgtatgtcacacacccagagcacaaaacatctcatccagcaccagctcccactgctgtctgtgcctgttaaggtccctgttagcttcccagcactgctgaacttaatggggccgagttagctgcaggccatgcactgctgctgctctgcagcctgag

SEQ ID NO: 8632 - DNA, 472 bp, Chicken  19866894203530_2
tccctgcctctgtgcatgaggaagagcagtgggacccaggtggctgtgagcacaatgcctgggcagagggtttgtggcagcagtgcgtcccagcacttatttacaccagggggtgtaaataagggctgggggaggtgctgagcaacagccatcccctccttaatattccttggaaagggaaggtgaggaggaggctccatcccagtgttattcactccatccctttcctctgctgtccccttccctatgctctgggttgcagccaggtctgtaagcgagccctgcagcgtgggcagcycrgagtgctgagctcagtgtatgtcacacacccagagcacaaaacatctcatccagcaccagctcccactgctgtctgtgcctgttaaggtccctgttagcttcccagcactgctgaacttaatggggccgagttagctgcaggccatgcactgctgctgctctgcagcctgag

SEQ ID NO: 8633 - DNA, 600 bp, Chicken  19866894203531_1
tgaaggctaggtttatcaaatagctggaaacacatattttgttaatgccatatttaatgtatgtccggattcccaaaagtacataggaaacctctcctaagtgcagtcttgtggggattcacctgatgtagctgaaatgtcaccaccagggccacctggaaaatgagatgttaaggaaaagctaatgtaaaacttggttaaaataaaagaaaaaagaggaaggctgaacacatctcatttggtagaggctttccaatggataaaaatgtatattttaaagggaaaatagcatactcacargaattatttcagaattattttgagcaacactggagctttttctttatgtcagggattgtctgtgtttgcacaacgcctaccttttctcctctcttctggcccagccactgtggtaataatgagaataacaacagcagcagccgtgccatgtatgttaatgaccgtgtactcaaacaagagtgggcaacatattgctgggaaagatggagagaaaaaaacagcacagtttagatatgagaggaccatttaatgataactctatgaacagtagaaaacaggctgaagccttggtgaagaagc

SEQ ID NO: 8634 - DNA, 600 bp, Chicken  19866894203536_1
ccatcaaatgtattggttctgggtcatctttgatccgtatttcacatcataacatttaccagtagtgtgagtatggccaccttgacctacatctcatctgacagtaactatttcagaactgactttttggcagcatgtacattggtacgtgaccctcataggggcaggattttaatgaattgtttatagagaaaataatataattttagagtgttgaataggcttgcatcatgtatcaggctgttacaggaacacttgtttcagaagagtttgggaaataagctgttatttctagcagawtgtgaatttgccaattgtttgtgaactccggtgtcttaagcttgtttgcattttaaaatcatcacatggactgtttattttctttttcagtgtctcagttgatttggcctattcttaaattagattcttgagtagtagaattattgacccaggctatttgaggatattaaaggaatgtggatgagttgtccctaacattaaatgggttactacgtcagtgttcaattcttagtattgtctctaatctattacatgaatttgtatatattatttccttgctgttaacatagaggatacatg

SEQ ID NO: 8635 - DNA, 499 bp, Chicken  19866894203537_1
gtaaaccaccagaggtcctggttatgtactggtaatgcattctaccttcttttttctcctctattttattgttaagttccttgcattccatttctgtccttgaaatcagtggcatttaggaatggggactggtagcctgtcttcagggctgaggagtcagttcttgatggggaatgtcaagaagataaaggcagctgtcacttctctaaggatgtgtgatggtagtgaatatcacttgtatttgtcaagagcataaagggcatctactgacagttgagtctgcttcagatgatacttctrttgatggtataaaagcttctccttaacataggttttgggcagtttcttatcaatttcttaaagaaaaggaraggcaacgtataggcctacttatttcctacattacaatgcatggaaataagtgggatagtccttttgtctcagtagtttcagaactctgaattcttgtgtgtgaaaacaatttatggggcaaagaaac

SEQ ID NO: 8636 - DNA, 428 bp, Chicken  19866894203537_2
ttaagttccttgcattccatttctgtccttgaaatcagtggcatttaggaatggggactggtagcctgtcttcagggctgaggagtcagttcttgatggggaatgtcaagaagataaaggcagctgtcacttctctaaggatgtgtgatggtagtgaatatcacttgtatttgtcaagagcataaagggcatctactgacagttgagtctgcttcagatgatacttctrttgatggtataaaagcttctccttaacataggttttgggcagtttcttatcaatttcttaaagaaaaggaraggcaacgtataggcctacttatttcctacattacaatgcatggaaataagtgggatagtccttttgtctcagtagtttcagaactctgaattcttgtgtgtgaaaacaatttatggggcaaagaaac

SEQ ID NO: 8637 - DNA, 600 bp, Chicken  19866894203541_1
caacaatgttgtgtctgtgctgcataattacacaggaacttgagcacttgggtgcattaagataaaagctgttgatgaatagttgaatcactgccttcctaacctaacctgttctgctttccatatattccttcttgaaagacttctagattttggggttagttacagaggtccaacaagagaagtgaattctctacagctgcatacagtgaccgtggagcagtctatacaagagcttcacagttcactttgtctaaaatcaactgttcagtaatgtgagatttgtcgagttgcaaatcwggcaactgcacttaaatccaggaaacagttcggtgaggatgtggagttcctaaaacttttattcaaacagagaaatccttggaaatgtcgccttgttgtcatgactgtgtgagatactgcaagacrttcrgtgtgccatccgttcatgctgctgtgactgctgctatgtagtattaaagtcactcttaggagattcgtaactcaaatatggattaattttgtccgtgtgtattttccttgtgtaggatgcagaaatcttaagcagtcacatagatgtttttcctccactcgcttctgtca

SEQ ID NO: 8638 - DNA, 484 bp, Chicken  19866894203541_2
attccttcttgaaagacttctagattttggggttagttacagaggtccaacaagagaagtgaattctctacagctgcatacagtgaccgtggagcagtctatacaagagcttcacagttcactttgtctaaaatcaactgttcagtaatgtgagatttgtcgagttgcaaatcwggcaactgcacttaaatccaggaaacagttcggtgaggatgtggagttcctaaaacttttattcaaacagagaaatccttggaaatgtcgccttgttgtcatgactgtgtgagatactgcaagacrttcrgtgtgccatccgttcatgctgctgtgactgctgctatgtagtattaaagtcactcttaggagattcgtaactcaaatatggattaattttgtccgtgtgtattttccttgtgtaggatgcagaaatcttaagcagtcacatagatgtttttcctccactcgcttctgtcagcacagtcag

SEQ ID NO: 8639 - DNA, 480 bp, Chicken  19866894203541_3
cttcttgaaagacttctagattttggggttagttacagaggtccaacaagagaagtgaattctctacagctgcatacagtgaccgtggagcagtctatacaagagcttcacagttcactttgtctaaaatcaactgttcagtaatgtgagatttgtcgagttgcaaatcwggcaactgcacttaaatccaggaaacagttcggtgaggatgtggagttcctaaaacttttattcaaacagagaaatccttggaaatgtcgccttgttgtcatgactgtgtgagatactgcaagacrttcrgtgtgccatccgttcatgctgctgtgactgctgctatgtagtattaaagtcactcttaggagattcgtaactcaaatatggattaattttgtccgtgtgtattttccttgtgtaggatgcagaaatcttaagcagtcacatagatgtttttcctccactcgcttctgtcagcacagtcag

SEQ ID NO: 8640 - DNA, 600 bp, Chicken  19866894203548_1
ctcagttttaaatgggctaaatgcaggcagagcagtcctttgtattcctgctatggagtacagccctgggcatcaggaaactgtgctccaatcccacttccagcagagatttcctttatgaactcagccagctcactcccattctttctgcctcagcttcccgcagctatttgccacggctaatacaaaggagtgtcatgggatttaaaccacagctctcagtggagtgctttgagaagctgtaagaaaaaaaaaaatgaactacaaactaatcattatatcttgttttactgaaattgygtttaattttacccaaagttcactgaagagaaaaaaagaaacagaacaaccaagcattcacataatcctgaacttgtaaattaaactttgtttttaatatgaagcttatcactcgtcaatgttacaaatgaaagaattaacgcttttcaaggacctgttctgatgccacaaacagcagagttctgaaatgtttccatttcccaacaagctccccttatctcgcatttaaatctaatcatgtttagaaccaatctgtgccaagcccaggtctgttctgagggcagctcatggctgtacttt

SEQ ID NO: 8641 - DNA, 600 bp, Chicken  19866894203551_1
gtcatacagtatttattatgattttctgtatatagatgaacttgtgccctatgattgttgttatcatgtgagctgtagttcacaaacttcttgaatacttttgttcagcaccctagtactactttcttctcttttattaagagtgatctcacaatggtgtactatgaagacttgttagcataagtttgggctcaataagcattactaaaatctatcccaaaacaatcaggaaaatgaacaaatgtatgaactacacctcttgtttgaaagcttgcaatggaaaaagttccagatccaacragtgtctcacaacaatttgccctaagtagaagctatcaacagaagagtctgaaagccaggacagacagaaaaaggattctgcagggatgcttatgttaccatgatgcttttggtctgtgagcagagagttctggactcccagtcagacaaagctgctttttcccctcttcacaagtttctgataataaatatactttgaacagaagtaccattttccacatgacactgttttcctacttggaatggggttttattttataaatgttttccatgttggaagtgcagactgtctacattcat

SEQ ID NO: 8642 - DNA, 600 bp, Chicken  19866894203556_1
tgggctgtgtaacctgggtttgttcacatttcaacctaggccccatttgccctccctaagcctgcagcgcaggccaggctgggtcaggcctcagtgtggccccggcaccacagcagcgtgcagtgcccatctcagggcctgggcaccagagatcccttcacagacagccccaggatcaggaggccaacctgattgttgttattattattcttttcccctcttcaggcaaataaacaggcacaaaccggtctgactccaactggatttggcacaaaggaactggagaaacaggttgatatraggcagccccccccgtcccacacagccccagctggcacaacacccccagagcagtggtggtggaactcccaggaaggacctgggggggtgtgaggtcggtctataggagcaaccacacatcccaggctccaggctaggagatcactcccctccttaagcagggctggcagccccaagggatmcgcactgctgtaccccagtaatgaggtggccagcgcatggggggtacagggcaacagaacccacgtgtcacacgctgctgtggggyctggaggtaacacccagtgcaatgagatgggg

SEQ ID NO: 8643 - DNA, 600 bp, Chicken  19866894203556_2
gccaacctgattgttgttattattattcttttcccctcttcaggcaaataaacaggcacaaaccggtctgactccaactggatttggcacaaaggaactggagaaacaggttgatatraggcagccccccccgtcccacacagccccagctggcacaacacccccagagcagtggtggtggaactcccaggaaggacctgggggggtgtgaggtcggtctataggagcaaccacacatcccaggctccaggctaggagatcactcccctccttaagcagggctggcagccccaagggatmcgcactgctgtaccccagtaatgaggtggccagcgcatggggggtacagggcaacagaacccacgtgtcacacgctgctgtggggyctggaggtaacacccagtgcaatgagatggggcctcacccagaacccacactctgctgttacccaacaaaatgaggtgtgcaaatgggtcctaattaggcacacaagacattccccagctcagtgcttaaaaccacatggccatggattgcaaagggcagagccgaagctcagcatcccaggtgcagtaagcccactgggtgcccagcttctga

SEQ ID NO: 8644 - DNA, 600 bp, Chicken  19866894203556_3
gcacaaaggaactggagaaacaggttgatatraggcagccccccccgtcccacacagccccagctggcacaacacccccagagcagtggtggtggaactcccaggaaggacctgggggggtgtgaggtcggtctataggagcaaccacacatcccaggctccaggctaggagatcactcccctccttaagcagggctggcagccccaagggatmcgcactgctgtaccccagtaatgaggtggccagcgcatggggggtacagggcaacagaacccacgtgtcacacgctgctgtggggyctggaggtaacacccagtgcaatgagatggggcctcacccagaacccacactctgctgttacccaacaaaatgaggtgtgcaaatgggtcctaattaggcacacaagacattccccagctcagtgcttaaaaccacatggccatggattgcaaagggcagagccgaagctcagcatcccaggtgcagtaagcccactgggtgcccagcttctgagcgtgctccattcccagccgaacacttccatggtgctttttaattcagaagctgcttagcactcacccagcctctgccataaaagt

SEQ ID NO: 8645 - DNA, 600 bp, Chicken  19866894203557_1
taacccttttttagcaggaaaaagaaaaattatttattcataaggttaaaaaaaaaaagggggtgacaacaaaaggcacgctgctgttgtttaattaataattaatcatcagtaacaactgcaggctttctctgtttctctgctttcctttttgaaatcaaggggcagaaaattaaatggcacaacatgacccacgctggtctgaaacaaaaaaggatgggaacaaaactgacgcagctgaaataaatcacctgcctcggtgccacatcatctgcatatcgttctcggtcttggttggcrctctctgctttagaaaccatcctgcagaaaacatgaagcacagagcatgatttctgccagcgaaattctttgatcgctctcagataaaatagaaggtatttaaaatgcagaggaatgaagactgaagattgattcaacgattcttctggtatctattattcatgtactctccgtctcaacccagaatatcagtttcatgaaaatctgggattgtatgattttgccaagttcatcctccatagaattatggttcctcctgaaaactctggaatatggctgtgaatgtaacagatgcagtca

SEQ ID NO: 8646 - DNA, 600 bp, Chicken  19866894203563_1
aaataagggaccagcacgttttagaaacacctgatacgtctgctgagtgctgcaagcactgtggcgtctggctgtaggaaaaacaggcattggcatttgaaggaataaatttaatggtaaaaaaaaaacgtttgcaggcaatatccaatgcttacataatactgacatgtgctgctcgtcagatgaatggggcacactgtgctccaagagctctctgccattacctaaccatgaactgtagtaaccagccccattgcttctatctgtaaacaggagctctgggatgaagtcacctcattytgctgtatccgactcagtttgatgtggtgtgctgatttaagtaagacgggagcccagggcagaaggcagagaggcagcactgaggagctctgtatgcgcttccaatggggcgcacacagccatctgacatccagcttttcaggaaggaaagtcctgttcacaacaatactgaacttctgctcaaaggaatgtctgactgccagccccactaattctgaaaccaagcagacagaagtgcttcaggatcagccagcagctcaagctgaagagcatttcattttctcttcctcctaacctctc

SEQ ID NO: 8647 - DNA, 543 bp, Chicken  19866894203563_2
cctgttcacaacaatactgaacttctgctcaaaggaatgtctgactgccagccccactaattctgaaaccaagcagacagaagtgcttcaggatcagccagcagctcaagctgaagagcatttcattttctcttcctcctaacctctccccttgcacagcataacacttgcgtgcagtttgacctcttctctcaaggtgcccatttgcactcctgaaatagtcccttccagaactgctggagacgcagcattccttgctgagagaataacaaaagatctataatctgtaactgctgattkgtccttagcaccttttaactcttcacaacrcagaatcgtgcaaaattaaatctgtgcaaaactgcttttctgttcagccatcttagaaatagccatcactgcttcatgtaatactttgtgtctcttcagatgagtttctctcctgttatccaaaagaaaacactgataaatctttgcctttttatccatagccactggaaatgcagttacacaggaaagttaatcacagttttccaaaggcag

SEQ ID NO: 8648 - DNA, 513 bp, Chicken  19866894203563_3
aaaggaatgtctgactgccagccccactaattctgaaaccaagcagacagaagtgcttcaggatcagccagcagctcaagctgaagagcatttcattttctcttcctcctaacctctccccttgcacagcataacacttgcgtgcagtttgacctcttctctcaaggtgcccatttgcactcctgaaatagtcccttccagaactgctggagacgcagcattccttgctgagagaataacaaaagatctataatctgtaactgctgattkgtccttagcaccttttaactcttcacaacrcagaatcgtgcaaaattaaatctgtgcaaaactgcttttctgttcagccatcttagaaatagccatcactgcttcatgtaatactttgtgtctcttcagatgagtttctctcctgttatccaaaagaaaacactgataaatctttgcctttttatccatagccactggaaatgcagttacacaggaaagttaatcacagttttccaaaggcag

SEQ ID NO: 8649 - DNA, 600 bp, Chicken  19866894203565_1
gtctggcatatcttattgtacatcccaccagaccccgattatgttgtgaagctggtattcattggcttttaatagttcttgccaacttcctcaaagcaaatgattaacagtaataataaaagggatattttccaagcatagatttgatagagggataagaaatgttaacgtttcattcctctatcagtcattcagggaaaatataattagactgcttcaccatgccaacatttttccaaacttaatacctaattaaataacaaaattattgtcacagatacatgggaaacaaaacatttyggtttttatttcttcataggaatttcttctgttttgtagtaattaatttcctagtttagagtcatgataatgtattgtacaagcaactatgttttttgatgttttttaatggtccccacttaaactattgtctatttcatttgcttttttctcactccagtttcagtcattatatcaggaggactgaagtacttccagagctgtttaaagcaattcagaaacaaaacttgtgaaaaataatcatttgagtttcttagcagtagtaacagtagatgttattacttttctttttttagtctt

SEQ ID NO: 8650 - DNA, 600 bp, Chicken  19866894203566_1
cactaccagcaccctgcacacagctggtaatgctacagcacacctacaggggggagactgcgactccacggccaccccagtgctggcactgctgaaaggctgagcttcctatgctgtcaaagcatccggcagcaatgctgacagcctgaaagcatggatgtaattataccacatgaagacccttaatgcaggattacggtagagagggaacaaattaacgcactaataataaccactaaatcaaatgtacactttatcagcaccactgtgcaccttattttgtgattcacttcctcaaayggctgccataactgaaggcagacagaacaacagatgcacaagctgctatctggctcagcacagcccragccaaggcacacagtgacggcarttgtgtgcagatcaggcagtgctctgcctgcatgctcttgcatgctccaatttcaaaaaaatcaagtccttcrtctcaactaacaaaagtaacagcttaattacgtaaaggtttatcagcttcccctgcaagtttcatcaggagcccaatgccaccagacatcagctgacagctgaggctctgcagcccctcatccgtgatcctgctaa

SEQ ID NO: 8651 - DNA, 600 bp, Chicken  19866894203566_2
acggccaccccagtgctggcactgctgaaaggctgagcttcctatgctgtcaaagcatccggcagcaatgctgacagcctgaaagcatggatgtaattataccacatgaagacccttaatgcaggattacggtagagagggaacaaattaacgcactaataataaccactaaatcaaatgtacactttatcagcaccactgtgcaccttattttgtgattcacttcctcaaayggctgccataactgaaggcagacagaacaacagatgcacaagctgctatctggctcagcacagcccragccaaggcacacagtgacggcarttgtgtgcagatcaggcagtgctctgcctgcatgctcttgcatgctccaatttcaaaaaaatcaagtccttcrtctcaactaacaaaagtaacagcttaattacgtaaaggtttatcagcttcccctgcaagtttcatcaggagcccaatgccaccagacatcagctgacagctgaggctctgcagcccctcatccgtgatcctgctaaaaggggatgcaacgtgacaactgtcaggmttaagacttcagcaygtcttcccctgcacgcaggcatc

SEQ ID NO: 8652 - DNA, 600 bp, Chicken  19866894203566_3
ctgaaaggctgagcttcctatgctgtcaaagcatccggcagcaatgctgacagcctgaaagcatggatgtaattataccacatgaagacccttaatgcaggattacggtagagagggaacaaattaacgcactaataataaccactaaatcaaatgtacactttatcagcaccactgtgcaccttattttgtgattcacttcctcaaayggctgccataactgaaggcagacagaacaacagatgcacaagctgctatctggctcagcacagcccragccaaggcacacagtgacggcarttgtgtgcagatcaggcagtgctctgcctgcatgctcttgcatgctccaatttcaaaaaaatcaagtccttcrtctcaactaacaaaagtaacagcttaattacgtaaaggtttatcagcttcccctgcaagtttcatcaggagcccaatgccaccagacatcagctgacagctgaggctctgcagcccctcatccgtgatcctgctaaaaggggatgcaacgtgacaactgtcaggmttaagacttcagcaygtcttcccctgcacgcaggcatcagaaagctgatcttccacatgtgt

SEQ ID NO: 8653 - DNA, 600 bp, Chicken  19866894203566_4
tataccacatgaagacccttaatgcaggattacggtagagagggaacaaattaacgcactaataataaccactaaatcaaatgtacactttatcagcaccactgtgcaccttattttgtgattcacttcctcaaayggctgccataactgaaggcagacagaacaacagatgcacaagctgctatctggctcagcacagcccragccaaggcacacagtgacggcarttgtgtgcagatcaggcagtgctctgcctgcatgctcttgcatgctccaatttcaaaaaaatcaagtccttcrtctcaactaacaaaagtaacagcttaattacgtaaaggtttatcagcttcccctgcaagtttcatcaggagcccaatgccaccagacatcagctgacagctgaggctctgcagcccctcatccgtgatcctgctaaaaggggatgcaacgtgacaactgtcaggmttaagacttcagcaygtcttcccctgcacgcaggcatcagaaagctgatcttccacatgtgtgaacaaaggaaatgtgaacccttcatttacataacatcacactttgtcacaaaccctaagaaacactatttga

SEQ ID NO: 8654 - DNA, 600 bp, Chicken  19866894203566_5
acagatgcacaagctgctatctggctcagcacagcccragccaaggcacacagtgacggcarttgtgtgcagatcaggcagtgctctgcctgcatgctcttgcatgctccaatttcaaaaaaatcaagtccttcrtctcaactaacaaaagtaacagcttaattacgtaaaggtttatcagcttcccctgcaagtttcatcaggagcccaatgccaccagacatcagctgacagctgaggctctgcagcccctcatccgtgatcctgctaaaaggggatgcaacgtgacaactgtcaggmttaagacttcagcaygtcttcccctgcacgcaggcatcagaaagctgatcttccacatgtgtgaacaaaggaaatgtgaacccttcatttacataacatcacactttgtcacaaaccctaagaaacactatttgaaaggttaaaagttcccatttcctatacaaaccaaaatgacttctgcagtcacacgtgttgttccagatctcctccrgacacagatactgctggggacagatcagtatgtccccagaaacatcacaccaaccttctgtacgttctgactgcacttcaatccggggc

SEQ ID NO: 8655 - DNA, 600 bp, Chicken  19866894203566_6
gctatctggctcagcacagcccragccaaggcacacagtgacggcarttgtgtgcagatcaggcagtgctctgcctgcatgctcttgcatgctccaatttcaaaaaaatcaagtccttcrtctcaactaacaaaagtaacagcttaattacgtaaaggtttatcagcttcccctgcaagtttcatcaggagcccaatgccaccagacatcagctgacagctgaggctctgcagcccctcatccgtgatcctgctaaaaggggatgcaacgtgacaactgtcaggmttaagacttcagcaygtcttcccctgcacgcaggcatcagaaagctgatcttccacatgtgtgaacaaaggaaatgtgaacccttcatttacataacatcacactttgtcacaaaccctaagaaacactatttgaaaggttaaaagttcccatttcctatacaaaccaaaatgacttctgcagtcacacgtgttgttccagatctcctccrgacacagatactgctggggacagatcagtatgtccccagaaacatcacaccaaccttctgtacgttctgactgcacttcaatccggggcagccatccccacgct

SEQ ID NO: 8656 - DNA, 600 bp, Chicken  19866894203566_7
tgccaccagacatcagctgacagctgaggctctgcagcccctcatccgtgatcctgctaaaaggggatgcaacgtgacaactgtcaggmttaagacttcagcaygtcttcccctgcacgcaggcatcagaaagctgatcttccacatgtgtgaacaaaggaaatgtgaacccttcatttacataacatcacactttgtcacaaaccctaagaaacactatttgaaaggttaaaagttcccatttcctatacaaaccaaaatgacttctgcagtcacacgtgttgttccagatctcctccrgacacagatactgctggggacagatcagtatgtccccagaaacatcacaccaaccttctgtacgttctgactgcacttcaatccggggcagccatccccacgctgcaccttccacaccatttggacacccagtgctcacagacatttcctcccccccgcccccagcacacccacctgacgggcgtaygccatctccacgctgtccagagagctgcggcctggagggcccgactcactgacgtagctgggctgtggaacagcaagcagaaaggttgtcacacgtttggttattttttcctt

SEQ ID NO: 8657 - DNA, 444 bp, Chicken  19866894203566_8
tcacactttgtcacaaaccctaagaaacactatttgaaaggttaaaagttcccatttcctatacaaaccaaaatgacttctgcagtcacacgtgttgttccagatctcctccrgacacagatactgctggggacagatcagtatgtccccagaaacatcacaccaaccttctgtacgttctgactgcacttcaatccggggcagccatccccacgctgcaccttccacaccatttggacacccagtgctcacagacatttcctcccccccgcccccagcacacccacctgacgggcgtaygccatctccacgctgtccagagagctgcggcctggagggcccgactcactgacgtagctgggctgtggaacagcaagcagaaaggttgtcacacgtttggttattttttccttccccagttcagtcaaacttgttggtctgcac

SEQ ID NO: 8658 - DNA, 599 bp, Chicken  19866894203571_1
  misc_feature (1)..(212): n is any nucleotide
nnnnnnnnnnnnnnnnnnnnnnnnnnnnnnnnnnnnnnnnnnnnnnnnnnnnnnnnnnnnnnnnnnnnnnnnnnnnnnnnnnnnnnnnnnnnnnnnnnnnnnnnnnnnnnnnnnnnnnnnnnnnnnnnnnnnnnnnnnnnnnnnnnnnnnnnnnnnnnnnnnnnnnnnnnnnnnnnnnnnnnnnnnnnnnnnnnnnnnnnnnnnnnnnnnnnttcctatgttttgcctcccttcctgcctagcttcagttcttggcatcagtctgcctcaacaaggttgttcactagatgcaacttgagyrgtrtacatgtggcatggggtgatacagaggcatgagcagctggcactgggtgcagcacatctgtgttactgcagaacgactctaggcttcttggcaggtgtgttatgccagtcatggcattgtacttgcatgtttgtatgttcttcagtgccagagcaagctctggcaagtcaacatagaataacatgctgcagtgaaggcttaaactggaattctcaagaggtgttcatctaatgcctttcaagagcagtcagccatgttcastttagttgcagagaaaaggaagttatcttgaaat

SEQ ID NO: 8659 - DNA, 599 bp, Chicken  19866894203571_2
  misc_feature (1)..(211): n is any nucleotide
nnnnnnnnnnnnnnnnnnnnnnnnnnnnnnnnnnnnnnnnnnnnnnnnnnnnnnnnnnnnnnnnnnnnnnnnnnnnnnnnnnnnnnnnnnnnnnnnnnnnnnnnnnnnnnnnnnnnnnnnnnnnnnnnnnnnnnnnnnnnnnnnnnnnnnnnnnnnnnnnnnnnnnnnnnnnnnnnnnnnnnnnnnnnnnnnnnnnnnnnnnnnnnnnnnnttcctatgttttgcctcccttcctgcctagcttcagttcttggcatcagtctgcctcaacaaggttgttcactagatgcaacttgagyrgtrtacatgtggcatggggtgatacagaggcatgagcagctggcactgggtgcagcacatctgtgttactgcagaacgactctaggcttcttggcaggtgtgttatgccagtcatggcattgtacttgcatgtttgtatgttcttcagtgccagagcaagctctggcaagtcaacatagaataacatgctgcagtgaaggcttaaactggaattctcaagaggtgttcatctaatgcctttcaagagcagtcagccatgttcastttagttgcagagaaaaggaagttatcttgaaata

SEQ ID NO: 8660 - DNA, 599 bp, Chicken  19866894203571_3
  misc_feature (1)..(208): n is any nucleotide
nnnnnnnnnnnnnnnnnnnnnnnnnnnnnnnnnnnnnnnnnnnnnnnnnnnnnnnnnnnnnnnnnnnnnnnnnnnnnnnnnnnnnnnnnnnnnnnnnnnnnnnnnnnnnnnnnnnnnnnnnnnnnnnnnnnnnnnnnnnnnnnnnnnnnnnnnnnnnnnnnnnnnnnnnnnnnnnnnnnnnnnnnnnnnnnnnnnnnnnnnnnnnnnnttcctatgttttgcctcccttcctgcctagcttcagttcttggcatcagtctgcctcaacaaggttgttcactagatgcaacttgagyrgtrtacatgtggcatggggtgatacagaggcatgagcagctggcactgggtgcagcacatctgtgttactgcagaacgactctaggcttcttggcaggtgtgttatgccagtcatggcattgtacttgcatgtttgtatgttcttcagtgccagagcaagctctggcaagtcaacatagaataacatgctgcagtgaaggcttaaactggaattctcaagaggtgttcatctaatgcctttcaagagcagtcagccatgttcastttagttgcagagaaaaggaagttatcttgaaatatgt

SEQ ID NO: 8661 - DNA, 600 bp, Chicken  19866894203571_4
cctcaacaaggttgttcactagatgcaacttgagyrgtrtacatgtggcatggggtgatacagaggcatgagcagctggcactgggtgcagcacatctgtgttactgcagaacgactctaggcttcttggcaggtgtgttatgccagtcatggcattgtacttgcatgtttgtatgttcttcagtgccagagcaagctctggcaagtcaacatagaataacatgctgcagtgaaggcttaaactggaattctcaagaggtgttcatctaatgcctttcaagagcagtcagccatgttcastttagttgcagagaaaaggaagttatcttgaaatatgtctttgctgttttgtaagtttgattttmactcagctcagrttctgccttgtaggtacaatttacaggaatatcatgagcagcttgatcttttttattactttacccctgaacatctgtaattgcattctctgattaacataatggactgtagttctgccatttttacccccaaagactgtactcttttagattgcacattttgcttttattygctttttaaagtaaattgcgatggaaatttctttgtaacctgtatgtggtt

SEQ ID NO: 8662 - DNA, 600 bp, Chicken  19866894203571_5
gcatgagcagctggcactgggtgcagcacatctgtgttactgcagaacgactctaggcttcttggcaggtgtgttatgccagtcatggcattgtacttgcatgtttgtatgttcttcagtgccagagcaagctctggcaagtcaacatagaataacatgctgcagtgaaggcttaaactggaattctcaagaggtgttcatctaatgcctttcaagagcagtcagccatgttcastttagttgcagagaaaaggaagttatcttgaaatatgtctttgctgttttgtaagtttgattttmactcagctcagrttctgccttgtaggtacaatttacaggaatatcatgagcagcttgatcttttttattactttacccctgaacatctgtaattgcattctctgattaacataatggactgtagttctgccatttttacccccaaagactgtactcttttagattgcacattttgcttttattygctttttaaagtaaattgcgatggaaatttctttgtaacctgtatgtggttttaaaactgtctctggagatatctgtaccagaataaagtcccaaactgctactaaaattaatgca

SEQ ID NO: 8663 - DNA, 597 bp, Chicken  19866894203571_6
ggcactgggtgcagcacatctgtgttactgcagaacgactctaggcttcttggcaggtgtgttatgccagtcatggcattgtacttgcatgtttgtatgttcttcagtgccagagcaagctctggcaagtcaacatagaataacatgctgcagtgaaggcttaaactggaattctcaagaggtgttcatctaatgcctttcaagagcagtcagccatgttcastttagttgcagagaaaaggaagttatcttgaaatatgtctttgctgttttgtaagtttgattttmactcagctcagrttctgccttgtaggtacaatttacaggaatatcatgagcagcttgatcttttttattactttacccctgaacatctgtaattgcattctctgattaacataatggactgtagttctgccatttttacccccaaagactgtactcttttagattgcacattttgcttttattygctttttaaagtaaattgcgatggaaatttctttgtaacctgtatgtggttttaaaactgtctctggagatatctgtaccagaataaagtcccaaactgctactaaaattaatgcataagagaac

SEQ ID NO: 8664 - DNA, 425 bp, Chicken  19866894203571_7
tctcaagaggtgttcatctaatgcctttcaagagcagtcagccatgttcastttagttgcagagaaaaggaagttatcttgaaatatgtctttgctgttttgtaagtttgattttmactcagctcagrttctgccttgtaggtacaatttacaggaatatcatgagcagcttgatcttttttattactttacccctgaacatctgtaattgcattctctgattaacataatggactgtagttctgccatttttacccccaaagactgtactcttttagattgcacattttgcttttattygctttttaaagtaaattgcgatggaaatttctttgtaacctgtatgtggttttaaaactgtctctggagatatctgtaccagaataaagtcccaaactgctactaaaattaatgcataagagaac

SEQ ID NO: 8665 - DNA, 600 bp, Chicken  19866894203573_1
ttatacactgaaatccagctgaaggatactccgttacagaaactgcaaaacacttacatactatttaatcgttatacattcaggaaaacaaacaaacaaacaaacagacaaacatacaaaacaacatgtgcagtatgtggaaaacatttttgcgtcattttgaaaaggaatgatatttattaatttcacctcacattaagtttgaggtcttacaaaggataattacatgtaatgttgctgcagtctatcagtgagtgtactcctactcacctctcttgaggaaaaaaaaaaaaaaaaaamaaacatttagactacagcaactgcatcctgttttaatttaaattatcctaatagctcaaaagattaaaataattaacaaaattcacccacacctccccaaagtaacctattttctgcagttcctggtactatatgtaagacagaaaccagctttcatagacttattctttgtgtttcagagctttctgaataacacagaagagttgctgaagaattatctcagttttttttacagcagtccaactaaggtagataaagttaggatgttttttttacttaaaaaaaaaaaaaaaaagtgat

SEQ ID NO: 8666 - DNA, 600 bp, Chicken  19866894203576_1
agaagtcgacattattggactgtgaaaaagttctaaaaggcttccaggacctccaatgcaaggtagatcgctgctgggtggatacaacccctgctgaaggtggagggaggctcccaggcacacacagagcaccacccaaagccttcttgaaatcttggggttacagaacaagagctcttttttataccttttttacacgatatttttacactattgatatcaatgaaaaatctcatgcatttttttccccaaagcgtggccagagcacgtccaaccgcagcgtgcccaaggtgggatggratggagctgccatcctggcctgaaaaacattggcgttctgctgtcttccagctcactcagttgctgtgcgggtgggaaggaggatgttaggagcactttcaagctcagccattaatgacagtgcatgacttggaccagctggagtgagtccagcgaggagcaggaggaggatgcaatgcaaatgcctccycatagcttagggacatcacctctacctattgcagaggtttctcatgtttgggtgcagaagaaccaccttgcagagcattttaattgcacagcattattaaaattaaagac

SEQ ID NO: 8667 - DNA, 560 bp, Chicken  19866894203576_2
ttttacacgatatttttacactattgatatcaatgaaaaatctcatgcatttttttccccaaagcgtggccagagcacgtccaaccgcagcgtgcccaaggtgggatggratggagctgccatcctggcctgaaaaacattggcgttctgctgtcttccagctcactcagttgctgtgcgggtgggaaggaggatgttaggagcactttcaagctcagccattaatgacagtgcatgacttggaccagctggagtgagtccagcgaggagcaggaggaggatgcaatgcaaatgcctccycatagcttagggacatcacctctacctattgcagaggtttctcatgtttgggtgcagaagaaccaccttgcagagcattttaattgcacagcattattaaaattaaagacctaagaacaaaagctctgcaacccccctgctgcaaagagcagggcagcccacagctgggaaggtgctggggaatacgatggcttctggtaccttttgctggtaacaaacagcaccaactaattttgtccagagcatcctttacacacagg

SEQ ID NO: 8668 - DNA, 599 bp, Chicken  19866894203580_1
  misc_feature (1)..(54): n is any nucleotide
nnnnnnnnnnnnnnnnnnnnnnnnnnnnnnnnnnnnnnnnnnnnnnnnnnnnnnttacttatgtatttaaccttattgtgacattcttgtagcagtacatttataatctcaggcaggtggttgatgtcccaactaagcctgtcaagtgtttaaggggcaattggacaacatccacattgaggtgctttaacttttggttagccctgaagaggaaaggcagctgatacttggtcccttccaactgaactaccctattctatctgctttctctgcccccctctacttcttaaggacttgtawatgaagtgacaaaaaataccttcaagttcatccaatccaggtatctccaattttcagtcagaatagaagtctcgtgagcaaatgcacccatggaacccaaatactcaccaacattgttttaacaatgtggagaacagtatcacagtatgtctttctacactaytacagactggaaggaactttaaaattgtaatatatttttagcttcagcctattgcattgaaatgctacactgcttttagttctccgcagtatgcttcattagaagattataaagttgaaattctatgtgcatcgtg

SEQ ID NO: 8669 - DNA, 600 bp, Chicken  19866894203580_2
gacaacatccacattgaggtgctttaacttttggttagccctgaagaggaaaggcagctgatacttggtcccttccaactgaactaccctattctatctgctttctctgcccccctctacttcttaaggacttgtawatgaagtgacaaaaaataccttcaagttcatccaatccaggtatctccaattttcagtcagaatagaagtctcgtgagcaaatgcacccatggaacccaaatactcaccaacattgttttaacaatgtggagaacagtatcacagtatgtctttctacactaytacagactggaaggaactttaaaattgtaatatatttttagcttcagcctattgcattgaaatgctacactgcttttagttctccgcagtatgcttcattagaagattataaagttgaaattctatgtgcatcgtgcagcagaatcctgcaatataagtcacctgaatcagtagtttcctatcctcctctatatttttgtgtgtagtttcttgctcctgcttctgttcagttttcattggcacattgatgttcacccttaattttttgctgcaaagaaaaacagaagttaatcaaataaa

SEQ ID NO: 8670 - DNA, 599 bp, Chicken  19866894203582_1
  misc_feature (1)..(9): n is any nucleotide
nnnnnnnnnaataaatcagcagggaaaatgctgagacaaagatcacttttagcaagcatccttatttctgttcaagagatattttgcttgcatgttaattgggcctctaattgttctctctgtgctgctgtgtctgccttttgaattctgcagagcactgcctgccaatgccttccctctgtaagctcttcttttagcagaagatggaaagggatgaagagctccatacatccagcagggctgtgctgggttccagcagctggctgctcctcaggcaggtttcaagtccatccttgagcrtcctcctgtcaggtgcttggaaatctcattctccgtcayctgccacagtgtttgtgtagaagaagaaaagaatcagacactttggtgtggcacaagggttycccatccatcttcagctatatggtgaagcagcataaagctgggcagcagctcagcctgctcctaattaagattaaaagtggaagcggtccattatggggaaagcaactcctaatgaaaatttaggagtttggattcgraggcagaggagcattttgagtaaagaagtggaagtgcagtgtgcccccagtgacgcatcc

SEQ ID NO: 8671 - DNA, 600 bp, Chicken  19866894203582_2
agatcacttttagcaagcatccttatttctgttcaagagatattttgcttgcatgttaattgggcctctaattgttctctctgtgctgctgtgtctgccttttgaattctgcagagcactgcctgccaatgccttccctctgtaagctcttcttttagcagaagatggaaagggatgaagagctccatacatccagcagggctgtgctgggttccagcagctggctgctcctcaggcaggtttcaagtccatccttgagcrtcctcctgtcaggtgcttggaaatctcattctccgtcayctgccacagtgtttgtgtagaagaagaaaagaatcagacactttggtgtggcacaagggttycccatccatcttcagctatatggtgaagcagcataaagctgggcagcagctcagcctgctcctaattaagattaaaagtggaagcggtccattatggggaaagcaactcctaatgaaaatttaggagtttggattcgraggcagaggagcattttgagtaaagaagtggaagtgcagtgtgcccccagtgacgcatcccttttccatgtgatgtctgtgactcattggaaacgagacc

SEQ ID NO: 8672 - DNA, 600 bp, Chicken  19866894203582_3
ggcctctaattgttctctctgtgctgctgtgtctgccttttgaattctgcagagcactgcctgccaatgccttccctctgtaagctcttcttttagcagaagatggaaagggatgaagagctccatacatccagcagggctgtgctgggttccagcagctggctgctcctcaggcaggtttcaagtccatccttgagcrtcctcctgtcaggtgcttggaaatctcattctccgtcayctgccacagtgtttgtgtagaagaagaaaagaatcagacactttggtgtggcacaagggttycccatccatcttcagctatatggtgaagcagcataaagctgggcagcagctcagcctgctcctaattaagattaaaagtggaagcggtccattatggggaaagcaactcctaatgaaaatttaggagtttggattcgraggcagaggagcattttgagtaaagaagtggaagtgcagtgtgcccccagtgacgcatcccttttccatgtgatgtctgtgactcattggaaacgagacccagtgcgacaggactgcctgtcactgcacggcctgcagtctgggatggcagctttgtgtgtt

SEQ ID NO: 8673 - DNA, 600 bp, Chicken  19866894203582_4
gctgtgctgggttccagcagctggctgctcctcaggcaggtttcaagtccatccttgagcrtcctcctgtcaggtgcttggaaatctcattctccgtcayctgccacagtgtttgtgtagaagaagaaaagaatcagacactttggtgtggcacaagggttycccatccatcttcagctatatggtgaagcagcataaagctgggcagcagctcagcctgctcctaattaagattaaaagtggaagcggtccattatggggaaagcaactcctaatgaaaatttaggagtttggattcgraggcagaggagcattttgagtaaagaagtggaagtgcagtgtgcccccagtgacgcatcccttttccatgtgatgtctgtgactcattggaaacgagacccagtgcgacaggactgcctgtcactgcacggcctgcagtctgggatggcagctttgtgtgttcttcggctctggttatccagagattctcacagcaaactcaaggtgttgattttgggcttggtgggaagcagagcagcagacttagcaaaaggtcgtgtgattcatctcacagaaaaaatcaaaccgcatatggagttt

SEQ ID NO: 8674 - DNA, 600 bp, Chicken  19866894203583_1
aagtttccctataaagatagttttacagacacgtctcatgagttttgatattccacagcagtgatgactccctgtttagtgacatttttcttgccttttacttcaacaagatgaaatttcacggtatattttcaatctatattctccactcccaatacaatggagttggttgataaacatctttaaacatattgggtggataaatattttaatgcacataacaaagcattaaaaatatgtttttagatagtataaatgaatctcagaaatcccactcataggttatgcagtgctaggcaytacttttgtcctgaggcatctaaaattgaagaaggttagcattctctgaatatttaccacaatatgttacagagaaaaccattaacaagtctctatacctacttttttcaaactatgaagagtatttatattctcatccaccagtttctgcagctgaaaacatctgcattgaaagcaagacagacagcattatcttaaatctgattgacaggacgttgaaatcatgcaaaatcactgaaacgtatatttagatgcccataccttctcacagctgtatgcacacaaagctttacaaaaaaa

SEQ ID NO: 8675 - DNA, 599 bp, Chicken  19866894203585_1
  misc_feature (1)..(119): n is any nucleotide
nnnnnnnnnnnnnnnnnnnnnnnnnnnnnnnnnnnnnnnnnnnnnnnnnnnnnnnnnnnnnnnnnnnnnnnnnnnnnnnnnnnnnnnnnnnnnnnnnnnnnnnnnnnnnnnnnnnnnnncttgagtttgtcttttctgtgcccaaacacagctggtgttgtcaaagcagacgatttcagccatccagcatacgttgatcgccgtgatgttcccctgccagaagtggcctttgtaaaggaactctctgctcagcagaaggctctgaaagaaaaggaaaaggcatcttggaccgctttgtcygttgatgagaaagttgaatgtaagcctctgagtaaccttacagctagcaataatgagacctaatctgttgcgtgttcattactgatgacttactagaaagacattcaaagaaggtggctctaagctgctgctaagccctgctttacttagtggctctgtgggcagagacttgaaccatgagagagctctgttaattatggtggagcacaagtggagatcagtgatttgtgtggcttgtgttcttactgctattacaaaaagttagataygccttttggtctctgttatgtgcctgaggt

SEQ ID NO: 8676 - DNA, 600 bp, Chicken  19866894203585_10
gactgaatagatgtaagcaggtaggaagcgtaagttttcaggaagttgrcttgtggagaaggtaaagttactggagagagttttggaagaaagggagrggaaagaatagcagcgttgatgatcccagagctttccctctctgtgcaacctgctgttgcaaaagcttgctgccttcttggtcataaacatttgggtttctgccacgcttggcttccttcccagctaaagatcctacctcgagggagccctccagctgccacgaggcaaagygtgcagctgaatgagctgctctccatcttsaggtttcatctacttgcggtggaagctcagagagagctgtttscttggctgatgagcaaaactagtagagaatcagaatctgctgagctgaatgcttcaaaaacttgatttggggagcttaggyttgaamaggtgatggtgcacatatgatcagcactgtttgcttcagggggaaaggctttctggtcatgaaacttgtacctctgtttctgagctgttaacttagtgttgtggtgtaattctgttctgttctcaattgcagtgtacggccctattccgcacaccttctctgatgagtgg

SEQ ID NO: 8677 - DNA, 600 bp, Chicken  19866894203585_11
agttgrcttgtggagaaggtaaagttactggagagagttttggaagaaagggagrggaaagaatagcagcgttgatgatcccagagctttccctctctgtgcaacctgctgttgcaaaagcttgctgccttcttggtcataaacatttgggtttctgccacgcttggcttccttcccagctaaagatcctacctcgagggagccctccagctgccacgaggcaaagygtgcagctgaatgagctgctctccatcttsaggtttcatctacttgcggtggaagctcagagagagctgtttscttggctgatgagcaaaactagtagagaatcagaatctgctgagctgaatgcttcaaaaacttgatttggggagcttaggyttgaamaggtgatggtgcacatatgatcagcactgtttgcttcagggggaaaggctttctggtcatgaaacttgtacctctgtttctgagctgttaacttagtgttgtggtgtaattctgttctgttctcaattgcagtgtacggccctattccgcacaccttctctgatgagtggctgtcaatgcagacaaagagaatgttggacatgcgaattaatc

SEQ ID NO: 8678 - DNA, 600 bp, Chicken  19866894203585_12
cagagctttccctctctgtgcaacctgctgttgcaaaagcttgctgccttcttggtcataaacatttgggtttctgccacgcttggcttccttcccagctaaagatcctacctcgagggagccctccagctgccacgaggcaaagygtgcagctgaatgagctgctctccatcttsaggtttcatctacttgcggtggaagctcagagagagctgtttscttggctgatgagcaaaactagtagagaatcagaatctgctgagctgaatgcttcaaaaacttgatttggggagcttaggyttgaamaggtgatggtgcacatatgatcagcactgtttgcttcagggggaaaggctttctggtcatgaaacttgtacctctgtttctgagctgttaacttagtgttgtggtgtaattctgttctgttctcaattgcagtgtacggccctattccgcacaccttctctgatgagtggctgtcaatgcagacaaagagaatgttggacatgcgaattaatcccgtggagggcatctctgcccagtgggattatgagaagaacgagtggaagaaatgaagcaactcagtggaacctgccctgc

SEQ ID NO: 8679 - DNA, 600 bp, Chicken  19866894203585_13
tttccctctctgtgcaacctgctgttgcaaaagcttgctgccttcttggtcataaacatttgggtttctgccacgcttggcttccttcccagctaaagatcctacctcgagggagccctccagctgccacgaggcaaagygtgcagctgaatgagctgctctccatcttsaggtttcatctacttgcggtggaagctcagagagagctgtttscttggctgatgagcaaaactagtagagaatcagaatctgctgagctgaatgcttcaaaaacttgatttggggagcttaggyttgaamaggtgatggtgcacatatgatcagcactgtttgcttcagggggaaaggctttctggtcatgaaacttgtacctctgtttctgagctgttaacttagtgttgtggtgtaattctgttctgttctcaattgcagtgtacggccctattccgcacaccttctctgatgagtggctgtcaatgcagacaaagagaatgttggacatgcgaattaatcccgtggagggcatctctgcccagtgggattatgagaagaacgagtggaagaaatgaagcaactcagtggaacctgccctgcttgaat

SEQ ID NO: 8680 - DNA, 410 bp, Chicken  19866894203585_14
ttgcagtgtacggccctattccgcacaccttctctgatgagtggctgtcaatgcagacaaagagaatgttggacatgcgaattaatcccgtggagggcatctctgcccagtgggattatgagaagaacgagtggaagaaatgaagcaactcagtggaacctgccctgcttgaatacgaaatgattccatcacctgtatgtgacctcgttgctttatgtactggaacaatctctccacctaaatagatgaaaataaacatctggttaacttgaaagcttcgttttattggtcttcagatgygtttgttgygatggtaatttgtagggtaggttgacgggcagggttttctccatacatccttgtaatgattgttatatagacagcattaatcagttaaggggtatgaaatg

SEQ ID NO: 8681 - DNA, 401 bp, Chicken  19866894203585_15
acggccctattccgcacaccttctctgatgagtggctgtcaatgcagacaaagagaatgttggacatgcgaattaatcccgtggagggcatctctgcccagtgggattatgagaagaacgagtggaagaaatgaagcaactcagtggaacctgccctgcttgaatacgaaatgattccatcacctgtatgtgacctcgttgctttatgtactggaacaatctctccacctaaatagatgaaaataaacatctggttaacttgaaagcttcgttttattggtcttcagatgygtttgttgygatggtaatttgtagggtaggttgacgggcagggttttctccatacatccttgtaatgattgttatatagacagcattaatcagttaaggggtatgaaatg

SEQ ID NO: 8682 - DNA, 600 bp, Chicken  19866894203585_2
aaaggaaaaggcatcttggaccgctttgtcygttgatgagaaagttgaatgtaagcctctgagtaaccttacagctagcaataatgagacctaatctgttgcgtgttcattactgatgacttactagaaagacattcaaagaaggtggctctaagctgctgctaagccctgctttacttagtggctctgtgggcagagacttgaaccatgagagagctctgttaattatggtggagcacaagtggagatcagtgatttgtgtggcttgtgttcttactgctattacaaaaagttagataygccttttggtctctgttatgtgcctgaggtcatgcagtgcattggacagaaggtatttagttaactgtgggtcaggcttagcaaagagcctgtcttctctgagaaaagccagttataaccagtattctgaattagaatcaacagtatttaattagtcaagctgagtaaattgagccctatatatttagctgttattgaccttggcatccccaaatttcagctgcttaaagtgccgagcaggtgttttgacttgcagataactgtcatctttctaacagtcatcacattgtgcaagtgaga

SEQ ID NO: 8683 - DNA, 600 bp, Chicken  19866894203585_3
accagtattctgaattagaatcaacagtatttaattagtcaagctgagtaaattgagccctatatatttagctgttattgaccttggcatccccaaatttcagctgcttaaagtgccgagcaggtgttttgacttgcagataactgtcatctttctaacagtcatcacattgtgcaagtgagaacctgttttatgggatctgctaagagcacagtgtccaccagtgtcgaagcaggaagatgtaaagccctctcaaatattcataagcactttccaaatcaaatgctgctttgagcttcrtgagatgygggtcttgttggcaaagctgtgagaagccttttaaatataagcattcccattcaaaccctttgtgttaaggagctttatggtaaatagtaatactgggaattggagggagggaaggaaagctccattacttcttctctcagttgtattatgcaacctttgcacaactttacagtcgcatataaaatggagaataatgttgtctttgctcatgaggggaaggtgaaatgcaattcatttcctttggcacaaatgcattggtcttggcgtggaggaggccagctaatttggaag

SEQ ID NO: 8684 - DNA, 600 bp, Chicken  19866894203585_4
tctgaattagaatcaacagtatttaattagtcaagctgagtaaattgagccctatatatttagctgttattgaccttggcatccccaaatttcagctgcttaaagtgccgagcaggtgttttgacttgcagataactgtcatctttctaacagtcatcacattgtgcaagtgagaacctgttttatgggatctgctaagagcacagtgtccaccagtgtcgaagcaggaagatgtaaagccctctcaaatattcataagcactttccaaatcaaatgctgctttgagcttcrtgagatgygggtcttgttggcaaagctgtgagaagccttttaaatataagcattcccattcaaaccctttgtgttaaggagctttatggtaaatagtaatactgggaattggagggagggaaggaaagctccattacttcttctctcagttgtattatgcaacctttgcacaactttacagtcgcatataaaatggagaataatgttgtctttgctcatgaggggaaggtgaaatgcaattcatttcctttggcacaaatgcattggtcttggcgtggaggaggccagctaatttggaagatatttta

SEQ ID NO: 8685 - DNA, 600 bp, Chicken  19866894203585_5
tataagcattcccattcaaaccctttgtgttaaggagctttatggtaaatagtaatactgggaattggagggagggaaggaaagctccattacttcttctctcagttgtattatgcaacctttgcacaactttacagtcgcatataaaatggagaataatgttgtctttgctcatgaggggaaggtgaaatgcaattcatttcctttggcacaaatgcattggtcttggcgtggaggaggccagctaatttggaagatattttaacatctcttccatttcatgcagcttttaagctttgstttgcctctagcaagtgatgtsttgcctgcaagttgaatgaaaagtggaaaagaaactatttgatgcttaatgtttcctttctttcagtgtaccgtatcaaattcaatgagagctatgcagaaatgaacaaagggacaaatgagtggaagactgtccttggtggagtgctcttctttcttggcgtatctggcctcatcctcatttggcagaaaatgtatagtaagtaaacgctgaatggtgttcccccccgaatctgagaggtcagttgagatctgatgtgaaatcaggaagttctcccc

SEQ ID NO: 8686 - DNA, 600 bp, Chicken  19866894203585_6
ctttgtgttaaggagctttatggtaaatagtaatactgggaattggagggagggaaggaaagctccattacttcttctctcagttgtattatgcaacctttgcacaactttacagtcgcatataaaatggagaataatgttgtctttgctcatgaggggaaggtgaaatgcaattcatttcctttggcacaaatgcattggtcttggcgtggaggaggccagctaatttggaagatattttaacatctcttccatttcatgcagcttttaagctttgstttgcctctagcaagtgatgtsttgcctgcaagttgaatgaaaagtggaaaagaaactatttgatgcttaatgtttcctttctttcagtgtaccgtatcaaattcaatgagagctatgcagaaatgaacaaagggacaaatgagtggaagactgtccttggtggagtgctcttctttcttggcgtatctggcctcatcctcatttggcagaaaatgtatagtaagtaaacgctgaatggtgttcccccccgaatctgagaggtcagttgagatctgatgtgaaatcaggaagttctccccagattgctccacttcaaaatgc

SEQ ID NO: 8687 - DNA, 600 bp, Chicken  19866894203585_7
gaagactgtccttggtggagtgctcttctttcttggcgtatctggcctcatcctcatttggcagaaaatgtatagtaagtaaacgctgaatggtgttcccccccgaatctgagaggtcagttgagatctgatgtgaaatcaggaagttctccccagattgctccacttcaaaatgctgtgtggaacagccatcctggggaccacgtggcagttgctgtttttagctgctgaaaactccattctggagttgagactgaatagatgtaagcaggtaggaagcgtaagttttcaggaagttgrcttgtggagaaggtaaagttactggagagagttttggaagaaagggagrggaaagaatagcagcgttgatgatcccagagctttccctctctgtgcaacctgctgttgcaaaagcttgctgccttcttggtcataaacatttgggtttctgccacgcttggcttccttcccagctaaagatcctacctcgagggagccctccagctgccacgaggcaaagygtgcagctgaatgagctgctctccatcttsaggtttcatctacttgcggtggaagctcagagagagctgtttscttggc

SEQ ID NO: 8688 - DNA, 600 bp, Chicken  19866894203585_8
atcctcatttggcagaaaatgtatagtaagtaaacgctgaatggtgttcccccccgaatctgagaggtcagttgagatctgatgtgaaatcaggaagttctccccagattgctccacttcaaaatgctgtgtggaacagccatcctggggaccacgtggcagttgctgtttttagctgctgaaaactccattctggagttgagactgaatagatgtaagcaggtaggaagcgtaagttttcaggaagttgrcttgtggagaaggtaaagttactggagagagttttggaagaaagggagrggaaagaatagcagcgttgatgatcccagagctttccctctctgtgcaacctgctgttgcaaaagcttgctgccttcttggtcataaacatttgggtttctgccacgcttggcttccttcccagctaaagatcctacctcgagggagccctccagctgccacgaggcaaagygtgcagctgaatgagctgctctccatcttsaggtttcatctacttgcggtggaagctcagagagagctgtttscttggctgatgagcaaaactagtagagaatcagaatctgctgagctgaatgcttc

SEQ ID NO: 8689 - DNA, 600 bp, Chicken  19866894203585_9
tagctgctgaaaactccattctggagttgagactgaatagatgtaagcaggtaggaagcgtaagttttcaggaagttgrcttgtggagaaggtaaagttactggagagagttttggaagaaagggagrggaaagaatagcagcgttgatgatcccagagctttccctctctgtgcaacctgctgttgcaaaagcttgctgccttcttggtcataaacatttgggtttctgccacgcttggcttccttcccagctaaagatcctacctcgagggagccctccagctgccacgaggcaaagygtgcagctgaatgagctgctctccatcttsaggtttcatctacttgcggtggaagctcagagagagctgtttscttggctgatgagcaaaactagtagagaatcagaatctgctgagctgaatgcttcaaaaacttgatttggggagcttaggyttgaamaggtgatggtgcacatatgatcagcactgtttgcttcagggggaaaggctttctggtcatgaaacttgtacctctgtttctgagctgttaacttagtgttgtggtgtaattctgttctgttctcaattgcagtgtacggc

SEQ ID NO: 8690 - DNA, 599 bp, Chicken  19866894203591_1
  misc_feature (1)..(183): n is any nucleotide
nnnnnnnnnnnnnnnnnnnnnnnnnnnnnnnnnnnnnnnnnnnnnnnnnnnnnnnnnnnnnnnnnnnnnnnnnnnnnnnnnnnnnnnnnnnnnnnnnnnnnnnnnnnnnnnnnnnnnnnnnnnnnnnnnnnnnnnnnnnnnnnnnnnnnnnnnnnnnnnnnnnnnnnnnnnnnnnnnnnnnnngtggaagatgcccacaggaatcatcaagtccaactcctggctgcacacaggaccacctaaaaaacaaaccctgtgcctgggagcagcgtccagacactccctgaactccagcactcrgggccgtgcccacagccctgtgcatcccgttccatgcccaccgccctgtggtgcagcccctttccctmacccccagctgcccctctcctgacagctccatgccgttccctcgggccctgtcactgtcacacagagcagagctcagcgctgcccctccgctccctgtgaggagctgcagccgccattaggcctcccctcagctcctctgctgagcactgagcacaccgagagacctcagctgctctcatatatcttgctgtccggacccttcaccatcttcatagctctgcttttgacac

SEQ ID NO: 8691 - DNA, 599 bp, Chicken  19866894203591_2
  misc_feature (1)..(115): n is any nucleotide
nnnnnnnnnnnnnnnnnnnnnnnnnnnnnnnnnnnnnnnnnnnnnnnnnnnnnnnnnnnnnnnnnnnnnnnnnnnnnnnnnnnnnnnnnnnnnnnnnnnnnnnnnnnnnnnnnnngtggaagatgcccacaggaatcatcaagtccaactcctggctgcacacaggaccacctaaaaaacaaaccctgtgcctgggagcagcgtccagacactccctgaactccagcactcrgggccgtgcccacagccctgtgcatcccgttccatgcccaccgccctgtggtgcagcccctttccctmacccccagctgcccctctcctgacagctccatgccgttccctcgggccctgtcactgtcacacagagcagagctcagcgctgcccctccgctccctgtgaggagctgcagccgccattaggcctcccctcagctcctctgctgagcactgagcacaccgagagacctcagctgctctcatatatcttgctgtccggacccttcaccatcttcatagctctgcttttgacactctctaatagttttatgtctatattctcatactgtggtccccaaacctgcacccagtgctcagcacag

SEQ ID NO: 8692 - DNA, 600 bp, Chicken  19866894203607_1
gtagataaacataacagcaacaacaaaaaagaaaagaagcagccctgacttagcaagacttattgtattagaaggttgaaccctaccatgagatatgcagaaagaagtaaatgactataacagatggaaacacagcatatagaaacatctattcttatttctatatcttgtatacataacttgatcactttggatcacataagactaaaaaaaaaacaaataaaaccacagatcttctatagtattttcttggtttcacagactcgtgaaaccagaaaatttactgcatcaataagaggycacrtcgaagtgctgctctccctccatgtctgcttgaactacgcttcatccttgagagtgctaacatgtaaaattgccatacttactactccccaccacagggcatctgcgtagctgccaaactccgtttctccagaatcatttacagcatctttttcagccaggtacacaaaataagaggaaaagatcaggcccaaaaatccaatgtagagtgtagttatcagttcctgcaaacagaatgagattaacattgactcagtgctgttgagacacttaagttacacatcactgtcgttctct

SEQ ID NO: 8693 - DNA, 600 bp, Chicken  19866894203607_2
ataaacataacagcaacaacaaaaaagaaaagaagcagccctgacttagcaagacttattgtattagaaggttgaaccctaccatgagatatgcagaaagaagtaaatgactataacagatggaaacacagcatatagaaacatctattcttatttctatatcttgtatacataacttgatcactttggatcacataagactaaaaaaaaaacaaataaaaccacagatcttctatagtattttcttggtttcacagactcgtgaaaccagaaaatttactgcatcaataagaggycacrtcgaagtgctgctctccctccatgtctgcttgaactacgcttcatccttgagagtgctaacatgtaaaattgccatacttactactccccaccacagggcatctgcgtagctgccaaactccgtttctccagaatcatttacagcatctttttcagccaggtacacaaaataagaggaaaagatcaggcccaaaaatccaatgtagagtgtagttatcagttcctgcaaacagaatgagattaacattgactcagtgctgttgagacacttaagttacacatcactgtcgttctctaaaa

SEQ ID NO: 8694 - DNA, 600 bp, Chicken  19866894203608_1
gcttgaaaaagaatttcagaagttggcaattcaaagcaggaggctgcatactgataacgggaaatatctcagcgcagcttcagatcacaggaacccactaagcaaaggagccaatttttctttctacttttgaagaaaatacccctggttagaatgctagtctgaaatcaaagcacatgcacgcttgttttgcaagagagactccataaaaatggattgaaagagctgcagcttcttaggtatctcacaattatttactgtgaaaagctaccaagtccttccttttctaattacctctcrtttattgtgtacagacaggagatgtgatgctgggcattttaaaaactgactgaaggtgaactttctgctggctgtcaaagcatttgatattctgggcctaagagcaccagaggyaggcagaccttctctccatggggcatcagagcaggaaaagcttctctctgtgacgagttttcacccacaaacatctcctgggccacaacagcccatgatttccttggcagcaatttcaagattgtttccacactcactcagtagttggacatttggagtttggcagaattgcagaaaaatctgcaa

SEQ ID NO: 8695 - DNA, 600 bp, Chicken  19866894203608_2
tttttctttctacttttgaagaaaatacccctggttagaatgctagtctgaaatcaaagcacatgcacgcttgttttgcaagagagactccataaaaatggattgaaagagctgcagcttcttaggtatctcacaattatttactgtgaaaagctaccaagtccttccttttctaattacctctcrtttattgtgtacagacaggagatgtgatgctgggcattttaaaaactgactgaaggtgaactttctgctggctgtcaaagcatttgatattctgggcctaagagcaccagaggyaggcagaccttctctccatggggcatcagagcaggaaaagcttctctctgtgacgagttttcacccacaaacatctcctgggccacaacagcccatgatttccttggcagcaatttcaagattgtttccacactcactcagtagttggacatttggagtttggcagaattgcagaaaaatctgcaagggaatttgaggttcagaaagtcacattcacattatcagcattctaatttgccctaaactcagacttaacccagaaggaaccattaaatgcygcaatttttgcagatcacagag

SEQ ID NO: 8696 - DNA, 600 bp, Chicken  19866894203608_3
tgggcctaagagcaccagaggyaggcagaccttctctccatggggcatcagagcaggaaaagcttctctctgtgacgagttttcacccacaaacatctcctgggccacaacagcccatgatttccttggcagcaatttcaagattgtttccacactcactcagtagttggacatttggagtttggcagaattgcagaaaaatctgcaagggaatttgaggttcagaaagtcacattcacattatcagcattctaatttgccctaaactcagacttaacccagaaggaaccattaaatgcygcaatttttgcagatcacagagcgctgactttcatagagttgccctttgtggaggacccataaacgtttgtttgattacttattttgtccgcatgagatttgaytgttgatttgaagacatccaggcatggaaagtcctccgcttctcttcgtagcttatttcagtggctaatcactctcacttgctcctcaattaaatcttcctgattctggcttccagccatccattcccactatgcatttctcattaagtaagacagctaagagcaagtcagggtcagttactggcaaactacatcc

SEQ ID NO: 8697 - DNA, 600 bp, Chicken  19866894203608_4
ccacaacagcccatgatttccttggcagcaatttcaagattgtttccacactcactcagtagttggacatttggagtttggcagaattgcagaaaaatctgcaagggaatttgaggttcagaaagtcacattcacattatcagcattctaatttgccctaaactcagacttaacccagaaggaaccattaaatgcygcaatttttgcagatcacagagcgctgactttcatagagttgccctttgtggaggacccataaacgtttgtttgattacttattttgtccgcatgagatttgaytgttgatttgaagacatccaggcatggaaagtcctccgcttctcttcgtagcttatttcagtggctaatcactctcacttgctcctcaattaaatcttcctgattctggcttccagccatccattcccactatgcatttctcattaagtaagacagctaagagcaagtcagggtcagttactggcaaactacatcctctctgcaagaatgtatgtcagcatttttttattatgaactctttgtacatttatttaaatgaattcaaaataaaacaaaacaaaaaccgaccgacaccaccac

SEQ ID NO: 8698 - DNA, 600 bp, Chicken  19866894203610_1
atttagcattaaaaagtgctaattactgtgactgcaaacatcatgcacatttccagatatactgaacaaaatgcccagaagttttcatgtcaagccttcttgattccagacctagtttgatagaaaacacggtattatgaattaccaagcttttccttctcttatgaacaggaggaatgccaggaaacagatcagaaatttgacttcaggtagaagctgatgctatcacagcagtaattgtaacaaatatgcatgaaaatcttaaaatacctcaagagggaaggttctgatccacaagaygaataaacagcacatttatgtctgcataaatagaagcggatccaccaagatctgactttaagtttcagaattacatggaagggttttatgcaaacggtcatagaagacaggtaaatcacttgttcaaaaataatgccataaaatgcctacttaattccctgatctctatgtgttctacatattatgttcagcaaattatatttacatttccttgcctttggtattatgaacacaaaccaaatacaatgaaggtttaagctggtattgtacatatagtctttccattcctattgttacctt

SEQ ID NO: 8699 - DNA, 599 bp, Chicken  19866894203617_1
  misc_feature (1)..(59): n is any nucleotide
nnnnnnnnnnnnnnnnnnnnnnnnnnnnnnnnnnnnnnnnnnnnnnnnnnnnnnnnnnnaagctgcggctgatgactgaagcacgtgatgaagctcagaactgctgcctcaaaccaaaacaaatggtcggcgaggcccaagtcaaggccaatcaattgaacctgcatgctgatggacttagaaggagaatagaggaacttcagcaggtaatttcatctggattgggtggggggggaggaggggaaggaggaggggcagaacaaattgcagaagttgtttggttaattgtggatttgtctktatgtgtcaggacctgaacagtaaggaacaggaaaaagtgacagaagtaaataaagtgaaagtggaattacaggagcagattggacacctacaggctgaacgtacggcacaggaagggctgagagagaagattgcagccctggagagacagctgaaaggtgatggatccttccatgcttttcaaatagtaatgtgtagtagcctacactgggccttaatctgagctgtgcttacaggtagcgacagaggtgcttcctacctttgaatacaaatctaccctccatcccactgttttttgc

SEQ ID NO: 8700 - DNA, 600 bp, Chicken  19866894203620_1
gcatcaagacaatggggcagacaaaaccctacacagcacttccttctatctgcatcatacataaccttactgcactcttctaaatcctgctaggaaagcaagattattggtttcctcacacccagtactgcatacctctgcaagcttcacagacacacacatttctcttcatcaatctgctgtcacataagagcagtcccagatttatttaaggggagaactgatgccccaagctctggatcaaaagaacgatttaatttttgatgtttcagaataagcacaaagcatttcattttttcycagagtttttatcagtcctcagcacaactctcaytgactttggttgcagcaataagtgatgcactcactgagttcttcccctctccagggcactaaggaggaagtcatcctgctctcttctccttcctcctgacactctttgggaagaaatcatctccaggggagtccagctggatccatgcagctccagcaaaagcagagctcycagaatctgggaataagttagctgctcaatttaaaggaattgtattggctgcaaggagacctgagagcagtgcttatagcgggggctgtaagaag

SEQ ID NO: 8701 - DNA, 600 bp, Chicken  19866894203620_2
agcacttccttctatctgcatcatacataaccttactgcactcttctaaatcctgctaggaaagcaagattattggtttcctcacacccagtactgcatacctctgcaagcttcacagacacacacatttctcttcatcaatctgctgtcacataagagcagtcccagatttatttaaggggagaactgatgccccaagctctggatcaaaagaacgatttaatttttgatgtttcagaataagcacaaagcatttcattttttcycagagtttttatcagtcctcagcacaactctcaytgactttggttgcagcaataagtgatgcactcactgagttcttcccctctccagggcactaaggaggaagtcatcctgctctcttctccttcctcctgacactctttgggaagaaatcatctccaggggagtccagctggatccatgcagctccagcaaaagcagagctcycagaatctgggaataagttagctgctcaatttaaaggaattgtattggctgcaaggagacctgagagcagtgcttatagcgggggctgtaagaaggaaggggacacacaccttgtcaaggtctgtggtg

SEQ ID NO: 8702 - DNA, 554 bp, Chicken  19866894203620_3
tatttaaggggagaactgatgccccaagctctggatcaaaagaacgatttaatttttgatgtttcagaataagcacaaagcatttcattttttcycagagtttttatcagtcctcagcacaactctcaytgactttggttgcagcaataagtgatgcactcactgagttcttcccctctccagggcactaaggaggaagtcatcctgctctcttctccttcctcctgacactctttgggaagaaatcatctccaggggagtccagctggatccatgcagctccagcaaaagcagagctcycagaatctgggaataagttagctgctcaatttaaaggaattgtattggctgcaaggagacctgagagcagtgcttatagcgggggctgtaagaaggaaggggacacacaccttgtcaaggtctgtggtgataggagaattttctaaaatggtttgttgtttttgctgaaaatgtaagagattctcatagcacatttccagctggagaaatatgagccatgcatcaacattttcacagaatcatagaatcattaa

SEQ ID NO: 8703 - DNA, 600 bp, Chicken  19866894203623_1
tcctggtaccttcccagcccatatttgtgccttcaagatgatggcaaaatgagccaagcaggcaaatgaaaccctaagtttggtctagctgagctctagaggcattgcttttggcttttggtttttgccactttaacaaagcgcatgggagaagttttagtacatggttgtgctctcagagagcattcagaacgttctgccttgccatgactgaaacaaacctgttgaacttcagaaaaagcgtggaaatgtgtcagcatccttttgtacagattcaacccagtaaaggaaaggtacttmattcccggatacatatctcatgtgctgcacactctcacagctgcaatctctggtttggaagacctcattcccctgcatcagcacacaggaggccctgacttccataaggatcccccatgtacacacagcacatcatgtacattgctgtgtctttcaaggcttcagaagtgaagtagctgttttatggggttctgtctgcaaccctgggaattgtagtgagttgttcgtggtcccagggtgtcactgccattagggaaagctcatcagtgctgcagttggggggagacaggagactttgaa

SEQ ID NO: 8704 - DNA, 600 bp, Chicken  19866894203624_1
cacatgagcaagcaggaaaacatcttcgtattgctattccttgtgacgatatatttttatacctaattccagtgctcacaaacatcagagaatggtaactggctgcaacagacacgtctgtctatctagtagtactgtaacttatctgcctccatcgattctctgtagtgttttcattaattagtttgttccttatactgtaatgtgaactagaagagaatggtagagtggaactttctagcagactgtcataactgtataataaaaattcctcaaaaatttatgtggtagaaaaatttmttttgtgaatattttctgtgtattacaatgactactcaaagctgattatttttttagtggtggggtaaacttagcatcagtgctgaactgacccgcaactaaagctgttcagactaaatgcagatgttctggtgaagtcaagtcttcacctccagaatagacgaacctctgttagtcactgccacaatatctcccatctgctctcacactctgcagctgaattcctatcccagaagagcaggtgaaagcagtatattttgcttcccaaaccaaacactgaatttcagtttccccataatc

SEQ ID NO: 8705 - DNA, 419 bp, Chicken  19866894203624_2
actcaaagctgattatttttttagtggtggggtaaacttagcatcagtgctgaactgacccgcaactaaagctgttcagactaaatgcagatgttctggtgaagtcaagtcttcacctccagaatagacgaacctctgttagtcactgccacaatatctcccatctgctctcacactctgcagctgaattcctatcccagaagagcaggtgaaagcagtatattttgcttcccaaaccaaacactgaatttcagtttccccataatcacacatcatgttttcaaggcttccaaattaatktyatcttaactcagtgtaaggtaggattgcactacaaagcaaatttcaaaccattaatattttaatctagaaatagcaaacaaaatctgttcattatatatatatttaacaacaataaa

SEQ ID NO: 8706 - DNA, 417 bp, Chicken  19866894203624_3
tcaaagctgattatttttttagtggtggggtaaacttagcatcagtgctgaactgacccgcaactaaagctgttcagactaaatgcagatgttctggtgaagtcaagtcttcacctccagaatagacgaacctctgttagtcactgccacaatatctcccatctgctctcacactctgcagctgaattcctatcccagaagagcaggtgaaagcagtatattttgcttcccaaaccaaacactgaatttcagtttccccataatcacacatcatgttttcaaggcttccaaattaatktyatcttaactcagtgtaaggtaggattgcactacaaagcaaatttcaaaccattaatattttaatctagaaatagcaaacaaaatctgttcattatatatatatttaacaacaataaa

SEQ ID NO: 8707 - DNA, 600 bp, Chicken  19866894203625_1
atgtgaccctgccaaggcatttcacagctgcaagctcgacctcagatttaatatcaccgctgccctttggtaccctcaggacaactggtttccacccataaagtccctgtttttgcagcacatacagcactatctgtaattaggttgcagcataaaaacaatcccaaagcaatctgtaccctcaagggtccttgttgcttattgccaaagcctgtagcatcagcacttagaggctatgctaaagaacactacaaaaggaaaaggttgccaactatatctcagcaattcctgacttaaccyactgcagataggataggatctctggtttccttccttatgctgcagttgccttgtacttgggctgcacagaagctgtttcaaggcagccatagcccaaaagtttgtgttagactgacagcaccgggcctcccaaaccaacttacagagtcaagggtcttagaaatgaagtctgaaatacaagctttgtttcactgttcctggttcaacaccccttgcgaaacaaaatttctcatttgaacaatggattaagttcacaatgtttgawttttttttttttttttttttggtattaagaaagga

SEQ ID NO: 8708 - DNA, 600 bp, Chicken  19866894203625_2
tgccaactatatctcagcaattcctgacttaaccyactgcagataggataggatctctggtttccttccttatgctgcagttgccttgtacttgggctgcacagaagctgtttcaaggcagccatagcccaaaagtttgtgttagactgacagcaccgggcctcccaaaccaacttacagagtcaagggtcttagaaatgaagtctgaaatacaagctttgtttcactgttcctggttcaacaccccttgcgaaacaaaatttctcatttgaacaatggattaagttcacaatgtttgawttttttttttttttttttttggtattaagaaaggatcataatttaagtcctactctgtatctggaggagatgaggcgttttaactgatgaggtgcttcagaagttttaacacttacactgcattctgaagtatatttttggcagcagcctatcttttcagagtaccttttttaaaatgaggaatttctagcagctttggacttttcctcactttctcagacactgtgtagaaacacagtatgaggccttttcaggatctcccagctagacaccagagggaactgctgaggagtttaaggc

SEQ ID NO: 8709 - DNA, 600 bp, Chicken  19866894203626_1
atttaaagttgctttgtaaacaaaattttaagaagaggtcatttagacctatgttttacaaaagcttcatatcacaaaactaagttgggtctaaaatcagcagtatccttctaataatcatcctactgtctattcttgtaaactcctagcgtcttaccttaatgattttaaacagcagtaatataacctcatgatattaacaaagcaaaacaaaacaaaaatctaaaataaatattctttggttttgattataaaaaaagacttttcccctgcagactgccattttccaagaaaaacagrtagtatttattatatgtaattgtatcctctctagaacacataggctattcctgatttcttgtctctaagattactttcaaagtaatttcacttaaaatcaaagatagaaatgrttccactgctgatgtcttcctctaaccacccagagctcccagtgatatcaggtgaaattaygtgtgtatttggagtcagactgcagctttttatgagcttccagttggctcctttaacacacagactgataacatcagctttctcgtgcacggcatttttaccttagagaaayaggtgagttcctat

SEQ ID NO: 8710 - DNA, 600 bp, Chicken  19866894203626_2
ataatcatcctactgtctattcttgtaaactcctagcgtcttaccttaatgattttaaacagcagtaatataacctcatgatattaacaaagcaaaacaaaacaaaaatctaaaataaatattctttggttttgattataaaaaaagacttttcccctgcagactgccattttccaagaaaaacagrtagtatttattatatgtaattgtatcctctctagaacacataggctattcctgatttcttgtctctaagattactttcaaagtaatttcacttaaaatcaaagatagaaatgrttccactgctgatgtcttcctctaaccacccagagctcccagtgatatcaggtgaaattaygtgtgtatttggagtcagactgcagctttttatgagcttccagttggctcctttaacacacagactgataacatcagctttctcgtgcacggcatttttaccttagagaaayaggtgagttcctatcagcttgttgcaaaccttccatatctttaagtttagacccttggaccacatggcatcattaggaactggtgatcccaataccatatgcacatgggcttggtctctctgcagaa

SEQ ID NO: 8711 - DNA, 600 bp, Chicken  19866894203626_3
gcagtaatataacctcatgatattaacaaagcaaaacaaaacaaaaatctaaaataaatattctttggttttgattataaaaaaagacttttcccctgcagactgccattttccaagaaaaacagrtagtatttattatatgtaattgtatcctctctagaacacataggctattcctgatttcttgtctctaagattactttcaaagtaatttcacttaaaatcaaagatagaaatgrttccactgctgatgtcttcctctaaccacccagagctcccagtgatatcaggtgaaattaygtgtgtatttggagtcagactgcagctttttatgagcttccagttggctcctttaacacacagactgataacatcagctttctcgtgcacggcatttttaccttagagaaayaggtgagttcctatcagcttgttgcaaaccttccatatctttaagtttagacccttggaccacatggcatcattaggaactggtgatcccaataccatatgcacatgggcttggtctctctgcagaagctctagcttctagcaccgcttccctcttcccctcctcagtgttcaccaagtcatgtactg

SEQ ID NO: 8712 - DNA, 600 bp, Chicken  19866894203626_4
ccaagaaaaacagrtagtatttattatatgtaattgtatcctctctagaacacataggctattcctgatttcttgtctctaagattactttcaaagtaatttcacttaaaatcaaagatagaaatgrttccactgctgatgtcttcctctaaccacccagagctcccagtgatatcaggtgaaattaygtgtgtatttggagtcagactgcagctttttatgagcttccagttggctcctttaacacacagactgataacatcagctttctcgtgcacggcatttttaccttagagaaayaggtgagttcctatcagcttgttgcaaaccttccatatctttaagtttagacccttggaccacatggcatcattaggaactggtgatcccaataccatatgcacatgggcttggtctctctgcagaagctctagcttctagcaccgcttccctcttcccctcctcagtgttcaccaagtcatgtactgaaggatttcctggctgcataagaatgttatttacaggaattcctctgaaagttcattgaagagggtacgacaattggctgttaatgctgtgtaagttttctggacatggcag

SEQ ID NO: 8713 - DNA, 600 bp, Chicken  19866894203626_5
caggaatcatgatgatgatggagaaacacgtaaggactacaaaattgatttttccaaggcaatgtagtcaactggtggcaaggttgatgttatcacaagggctcttggctccctatctcaggccatgagaacatttacactagctctctgagtatattttccatttgatttattcttcttattcaaggatggattacatattgagaaaaccagatttgaatgccttttttgcatggctatttttattgttttctaaggacttttccagatccataaggaattcgcaggacagaaaaaaarggtcatgacacaggaggagagctcctgaattctgtatttttcattcttaagaaaaaccctttaaagtagcaggtttacattccatagtgagtgctcccgtgcagatcagctggtcttcaagtgtcattcctccctgaggaatcccagcaaatatctgattggatatggagagacagaacatttctgtgtaaattggatgttcctttctctcctggagactcagtatgctcatgtttcacaatccctgtgcctataaagtatgtccgttgcctgaagctggaagtgttcactttgtaacat

SEQ ID NO: 8714 - DNA, 600 bp, Chicken  19866894203640_1
acaaccattcattttcattaggagatgaacctacgtcggtaaacatagaaatctacaatctgaactcttgggagtgctagacaagccaaaaaatctatcccctgaagctgttatttcagtaacttttttattcagagtatttacttcttgttgaatgttttcgttcttttctgcacgctagttggcttgttgcttctttactgtcctcagcagttctgctatactttttcttcactacagaactagaaatgtcatcagcttctgtgaagtggggagattttcacagtcttaagatcaatyttggctcaggacaagtttaatttagaacaggtaatgggtctgactcacacaatgctgatcgtgtcattcatctccgatttggaacaagcttactaatttacttatgacctgaaaacgtctgaaatcaaattatatatagcattttaaaaatatttatattgttaaggatggttataaacatcaccaaagtccctcaagatgaaattctgttgcacaagttcacaatggatacatctttttctgaaacctaccctgaacacctacttcacaacatctggaatgcctcacacaatacattca

SEQ ID NO: 8715 - DNA, 600 bp, Chicken  19866894203643_1
gtttgcaagtggagcagctgggcaccctggggtgggcactctcagcaaaacaccaggttgtacgtaggtgttaacatttaggtggaacaaggccctgaacaccattaccacctcgctcagtaatggcggggctgggttccaagaaaccatgcaaaccactctgcactctgcctgtgtatctagaaagagagcccccatggcaattgcctgggtgactgcccagccacacggccatttacaagtcctccactacattggccactatttgcaacaaagcagttgtttgtggcatggggaccyggctcctcagcacaatgggacatctccaggcagcattccttgccagaattttaaggcctccttagcagtcaccaagtgcttcctgttgcacaaactctcagaacagtctttgttttttgaaggctggcccctgagccagcctaaagatgagttttcccacctgcttggccactgagtttaaaaaacagcttgcagcgtggccagtgtctggagcatatgtgccaaaccatgtctgaaattttaggtgtgtaacaagtggccaagatgcagagcacatgatgcctgcagtcactctgaagg

SEQ ID NO: 8716 - DNA, 600 bp, Chicken  19866894203648_1
gctccaaagccgttctgcatttcaccctttcaggtagaatgagcaactgtcagatgtcagagaggagaacaaaaccaagtgggagaaagaacacctattctggacatcagtttttactacctcctaaatttatcaagaaggcacacaactgttaagccaaaatacaaagcagacaaaagaactaaagatacagattaatgacacctaaaatgctatgatcctttttatttttattttttcttaattttagataagatcaagttccatttaaatcataacaaagcatttgtacgggcacarccagattcacatcattttccacatgcaggcaggaatgaaacaaacgaaaaaagaaaaacaaccacagaaattacttgctaccaagccttcctggtttagcttgaatactctggagaaagtgatggaagagtgctaacaatggcacttagaagtccacttctcttaaataatactgaaaataaaaactagctcctatttcttcttaagagacacaacagaaagcatcgccagcrgagtgtgcatcatttagctgaatgtgacatttcagatagatagtacactgcccacatgtactgtttg

SEQ ID NO: 8717 - DNA, 600 bp, Chicken  19866894203648_2
ttttttcttaattttagataagatcaagttccatttaaatcataacaaagcatttgtacgggcacarccagattcacatcattttccacatgcaggcaggaatgaaacaaacgaaaaaagaaaaacaaccacagaaattacttgctaccaagccttcctggtttagcttgaatactctggagaaagtgatggaagagtgctaacaatggcacttagaagtccacttctcttaaataatactgaaaataaaaactagctcctatttcttcttaagagacacaacagaaagcatcgccagcrgagtgtgcatcatttagctgaatgtgacatttcagatagatagtacactgcccacatgtactgtttggcatagaactggatgaatcagtttttcatgaatgtagttgctayggagattattagaagtagcccagttgactacagggattattgttatactcaaaacataactatcacgtatttaatcaagaatattttctacagccaatataacttgtyrttcattagggggtcagggcaacacaatccaaaccaaagtcacataaagaaaaacacaagcaactcctcactatttgggtg

SEQ ID NO: 8718 - DNA, 600 bp, Chicken  19866894203648_3
cgaaaaaagaaaaacaaccacagaaattacttgctaccaagccttcctggtttagcttgaatactctggagaaagtgatggaagagtgctaacaatggcacttagaagtccacttctcttaaataatactgaaaataaaaactagctcctatttcttcttaagagacacaacagaaagcatcgccagcrgagtgtgcatcatttagctgaatgtgacatttcagatagatagtacactgcccacatgtactgtttggcatagaactggatgaatcagtttttcatgaatgtagttgctayggagattattagaagtagcccagttgactacagggattattgttatactcaaaacataactatcacgtatttaatcaagaatattttctacagccaatataacttgtyrttcattagggggtcagggcaacacaatccaaaccaaagtcacataaagaaaaacacaagcaactcctcactatttgggtgtgcaactactctggtaatttgctagctttaccacagaaacacctacagactcagagaagggacacgtcccatttgacagaggtgcaaacaaactgatcagattagttgctg

SEQ ID NO: 8719 - DNA, 600 bp, Chicken  19866894203648_4
tccacttctcttaaataatactgaaaataaaaactagctcctatttcttcttaagagacacaacagaaagcatcgccagcrgagtgtgcatcatttagctgaatgtgacatttcagatagatagtacactgcccacatgtactgtttggcatagaactggatgaatcagtttttcatgaatgtagttgctayggagattattagaagtagcccagttgactacagggattattgttatactcaaaacataactatcacgtatttaatcaagaatattttctacagccaatataacttgtyrttcattagggggtcagggcaacacaatccaaaccaaagtcacataaagaaaaacacaagcaactcctcactatttgggtgtgcaactactctggtaatttgctagctttaccacagaaacacctacagactcagagaagggacacgtcccatttgacagaggtgcaaacaaactgatcagattagttgctgtactttctcatttctaacttttgtgagcaaaaacataatttaatattttcaggattgcatgagagagttgttatactgtgcaccattgtaatatcagaagccatcaaa

SEQ ID NO: 8720 - DNA, 600 bp, Chicken  19866894203648_5
ccacttctcttaaataatactgaaaataaaaactagctcctatttcttcttaagagacacaacagaaagcatcgccagcrgagtgtgcatcatttagctgaatgtgacatttcagatagatagtacactgcccacatgtactgtttggcatagaactggatgaatcagtttttcatgaatgtagttgctayggagattattagaagtagcccagttgactacagggattattgttatactcaaaacataactatcacgtatttaatcaagaatattttctacagccaatataacttgtyrttcattagggggtcagggcaacacaatccaaaccaaagtcacataaagaaaaacacaagcaactcctcactatttgggtgtgcaactactctggtaatttgctagctttaccacagaaacacctacagactcagagaagggacacgtcccatttgacagaggtgcaaacaaactgatcagattagttgctgtactttctcatttctaacttttgtgagcaaaaacataatttaatattttcaggattgcatgagagagttgttatactgtgcaccattgtaatatcagaagccatcaaac

SEQ ID NO: 8721 - DNA, 600 bp, Chicken  19866894203658_1
tgaaagaaactcagcagtgcagctaaactgtggtctcctttctctacttaaagcctcttttagttattgtcatagatttaaaagtttcttttcttagttgtaattccattggagaaggctctttacttcttgctgttccagtagcttgttttagggagaaaagagaagggggaaatatgtattatacttttacaaaatagaagtgtgtactgaaaatgacttagtgttcattcatttgtaagaattaccccaaaaggtctttattgtatggtcaagtttaccactttggtaaagtacagygatggctttaattgagagacctttgctaaatacctctgtatttaagttaactttcaatgaacccaagattaatttgagtatttggcagagagaagaagtagttgcctgttattttggaacgtgccagttgttccaatgatggccagaaaaaaaggcttgtagaaaaaaggctaaaagctgaggcctttcagcatccaaaaggcagactttttcaatatcaaataaggaaaaactgcttttccagggaagaaccttaaggtgaattatagccggatatcagatggaaaattgtgcattccc

SEQ ID NO: 8722 - DNA, 600 bp, Chicken  19866894203658_2
tggaaaattgtgcattcccctggtgtccttgcaattttattgcagaatctagagtgatgtctaatttgaagtaagttgtctatttttttccatgacttctcagaaacatttttttcctttgacttaagcctcatattttcaagcagaccaattttgctgttcatacaatttgaggagagggagcaaaggaggggctaaaaatagagcttataatggaacctgggtatgttcttaacagtggcgagacacttatctgtccattatgttgttgactaatgttaacttctgtgctgcctttgkaatgtattacattaagccaaatgaagctattgtgtgatgtatcaagatacagtcacgtagggttgcctggctatttgctcttgttagtattgtatgtgatggactttaatagctgtgcggggctcctggagttacttagatcaacagtgcacrtttttgtgcctcagcctggatccgcctgcgtgccagactggcatcagctccactggaagttgcacaagtgtgtaagaatgtatgtatgtgagtgagggatctgtggactagtgcttctgtggctgctcggctggctgcaggcagggt

SEQ ID NO: 8723 - DNA, 600 bp, Chicken  19866894203658_3
ttgctgttcatacaatttgaggagagggagcaaaggaggggctaaaaatagagcttataatggaacctgggtatgttcttaacagtggcgagacacttatctgtccattatgttgttgactaatgttaacttctgtgctgcctttgkaatgtattacattaagccaaatgaagctattgtgtgatgtatcaagatacagtcacgtagggttgcctggctatttgctcttgttagtattgtatgtgatggactttaatagctgtgcggggctcctggagttacttagatcaacagtgcacrtttttgtgcctcagcctggatccgcctgcgtgccagactggcatcagctccactggaagttgcacaagtgtgtaagaatgtatgtatgtgagtgagggatctgtggactagtgcttctgtggctgctcggctggctgcaggcagggtctgcatgcagaggaggtagcagtgctctgccatctcagaaccccttccacttgtattcagaccgagtaacgcccaatggctcttgctgcgttaacgtgaagcagcagtaataccctgggccttgactttaaaaagtgctggaaggtgttttta

SEQ ID NO: 8724 - DNA, 600 bp, Chicken  19866894203659_1
aacagttaggaaaagtgaacctaatgagagctcttttaactcccagtttaagcactacttgagaaggcaaaagtagtacaaaaatgcctccattcacattctttggcagtaacatgcaagccagtggggatatccagaaggaaataaactcacaaattgtcaaggcagcagctgcattcatcagcttaaagaagatttactcacagaaagactccaaccttcagactaagctatgatttttcaactggaatgctatttccaccttaggatactctaagaaagcttgaaatctaccaaagrtgatgacaggtgtctaattgctttgaaagcaaatgcctcaggagaatactataggtattaaaacagaatgaatttacagtaagtgctgggatctgtcaaggacttcatcaactcctgatctacagaagatagccagaaaaggagagaggaataaaaacaaattaagccagggcaagcctgcctttgggcagctgtaggaatagccaagagggaccagcccaaagaatccctgtattgaggataatggggacaaaataaaggacagatttaccagaacagaggacaggstgtgatttgctc

SEQ ID NO: 8725 - DNA, 600 bp, Chicken  19866894203659_2
atctaccaaagrtgatgacaggtgtctaattgctttgaaagcaaatgcctcaggagaatactataggtattaaaacagaatgaatttacagtaagtgctgggatctgtcaaggacttcatcaactcctgatctacagaagatagccagaaaaggagagaggaataaaaacaaattaagccagggcaagcctgcctttgggcagctgtaggaatagccaagagggaccagcccaaagaatccctgtattgaggataatggggacaaaataaaggacagatttaccagaacagaggacaggstgtgatttgctctggattgaatgggacaacgaagcattgcttatgccttagctgaggactgctgacctggcagggatgtcctcagacacatcacctttaaaaatctcacttataaaagagacttgcttcttctggcagaaagtcatagcatcccttcagccaatccagaacatactacaatatttataagacggatctgttgcagggagagatagttcaaaatgccagtaataactaagctgaaggcaaggttttttttctttttttttttaattttatccatcagtctgcaggcatctg

SEQ ID NO: 8726 - DNA, 600 bp, Chicken  19866894203664_1
aaatagtttaggtacatatcagagcacttactcattttgagtaatcccattggaaagagttacatgtttaaaaacctgcttgcaaattcttacaaggaataagaaattcatacctcagaatttctgagctacatatattattttcaattaatcttaataatgaaggaactatatccaaataatgttgattatacatggaaatttctgaacttttagcttagcaggttagtagaatgcataagataaaaaaagttgaatttagcctttttgtatacgcctggtgatattttcattttaaawaaataaargtaggaggacaaatgaaaataaatgaacaaacaaataaataggtaaatggataagtaaataaataaatttgagtttggaaaaagttgaaaagagaagatatttcaaagaaaaaaatyrtctgtgtttccaaagaaactagaaagtaaacaaatgaatagtagtatgttttaatggtaaagaactatattcttaaaatcttaaaaaaaaaaaaaaatgatacacaagatgtggcttaaaatttaagatcttttgcttattaagttacctgggatctgttgattattgtctttg

SEQ ID NO: 8727 - DNA, 600 bp, Chicken  19866894203664_2
taggtacatatcagagcacttactcattttgagtaatcccattggaaagagttacatgtttaaaaacctgcttgcaaattcttacaaggaataagaaattcatacctcagaatttctgagctacatatattattttcaattaatcttaataatgaaggaactatatccaaataatgttgattatacatggaaatttctgaacttttagcttagcaggttagtagaatgcataagataaaaaaagttgaatttagcctttttgtatacgcctggtgatattttcattttaaawaaataaargtaggaggacaaatgaaaataaatgaacaaacaaataaataggtaaatggataagtaaataaataaatttgagtttggaaaaagttgaaaagagaagatatttcaaagaaaaaaatyrtctgtgtttccaaagaaactagaaagtaaacaaatgaatagtagtatgttttaatggtaaagaactatattcttaaaatcttaaaaaaaaaaaaaaatgatacacaagatgtggcttaaaatttaagatcttttgcttattaagttacctgggatctgttgattattgtctttgaaaaagca

SEQ ID NO: 8728 - DNA, 600 bp, Chicken  19866894203664_3
gagctacatatattattttcaattaatcttaataatgaaggaactatatccaaataatgttgattatacatggaaatttctgaacttttagcttagcaggttagtagaatgcataagataaaaaaagttgaatttagcctttttgtatacgcctggtgatattttcattttaaawaaataaargtaggaggacaaatgaaaataaatgaacaaacaaataaataggtaaatggataagtaaataaataaatttgagtttggaaaaagttgaaaagagaagatatttcaaagaaaaaaatyrtctgtgtttccaaagaaactagaaagtaaacaaatgaatagtagtatgttttaatggtaaagaactatattcttaaaatcttaaaaaaaaaaaaaaatgatacacaagatgtggcttaaaatttaagatcttttgcttattaagttacctgggatctgttgattattgtctttgaaaaagcataccttatttccgttcttatttaaacactgcattaaataaattatcagagaactatgtattcaagtagttaaaatgtatagtcagctgctttcagagatattttaattattttatca

SEQ ID NO: 8729 - DNA, 600 bp, Chicken  19866894203664_4
agctacatatattattttcaattaatcttaataatgaaggaactatatccaaataatgttgattatacatggaaatttctgaacttttagcttagcaggttagtagaatgcataagataaaaaaagttgaatttagcctttttgtatacgcctggtgatattttcattttaaawaaataaargtaggaggacaaatgaaaataaatgaacaaacaaataaataggtaaatggataagtaaataaataaatttgagtttggaaaaagttgaaaagagaagatatttcaaagaaaaaaatyrtctgtgtttccaaagaaactagaaagtaaacaaatgaatagtagtatgttttaatggtaaagaactatattcttaaaatcttaaaaaaaaaaaaaaatgatacacaagatgtggcttaaaatttaagatcttttgcttattaagttacctgggatctgttgattattgtctttgaaaaagcataccttatttccgttcttatttaaacactgcattaaataaattatcagagaactatgtattcaagtagttaaaatgtatagtcagctgctttcagagatattttaattattttatcaa

SEQ ID NO: 8730 - DNA, 599 bp, Chicken  19866894203665_1
  misc_feature (1)..(83): n is any nucleotide
nnnnnnnnnnnnnnnnnnnnnnnnnnnnnnnnnnnnnnnnnnnnnnnnnnnnnnnnnnnnnnnnnnnnnnnnnnnnnnnnnnnccataggcacggcgtgcagatccgccggctcggggccgggagcggagcccgcacccacgggtaccgtagccatggccgcgcagctctcgcaacttcccccggcgcggccctttcgcttcccgcctcgccccgcctcctggctgcgcgccgcccggctctgcgcccgcctcgccgtctgtcagggggagcgccccgagcgcttcgtgcgggacggcgrtgtggggcagctcggcctgcgggggatgaggctcctgctccgtgccagcagaaacggagctgggacgcggcacggcgctgaggccggtgtccgctgtgcccccacagcaccccaccaacgaacggtgtgtggtttgggttggaaggagcctcgaagcccacccagccccaaccctgctcgggctgcccggggccccatccagcctggccctgagcgcctccagggatggggcacccacagatctctgggcagcggtgccagggcctcacagcccttccaatgaagagtttcctcctagc

SEQ ID NO: 8731 - DNA, 600 bp, Chicken  19866894203666_1
tttgaggtggaaacttgaaaaaaatataaataaaaagcttcatatgggggggaaatcctggtactgtgttaaataatcatggaacaaagaaagccaaacccactagacaaaaataaaggtctgtatttgttctaaataagtcagttttgctcaggacaagcagtttcttccacgtttgatatcatctttaactcattgtttctcatcaaatgacgagtggtgataagaatttcctgagataataggattctatttctaagctgtaaaaataagtattatcagatgctacttggcattcamatttccaagaatggaagaaaattcctccacccaaatatcaaacacactcattttggccacagttacattatccaaagagcaagcagctttccagtgctgcccagtcacygtccagacctgcagacaggcagcgctctgcaacagggatgccaagcactgaaacaattcaatttgatggcatcatgtgatttgatacatctgatgtatcacagtgcctaagaactggctatttcctacacagtaccatgctaacaaaatactaaggtgggaaacaagagactgccagaattcagctccctc

SEQ ID NO: 8732 - DNA, 600 bp, Chicken  19866894203666_2
aaaataaaggtctgtatttgttctaaataagtcagttttgctcaggacaagcagtttcttccacgtttgatatcatctttaactcattgtttctcatcaaatgacgagtggtgataagaatttcctgagataataggattctatttctaagctgtaaaaataagtattatcagatgctacttggcattcamatttccaagaatggaagaaaattcctccacccaaatatcaaacacactcattttggccacagttacattatccaaagagcaagcagctttccagtgctgcccagtcacygtccagacctgcagacaggcagcgctctgcaacagggatgccaagcactgaaacaattcaatttgatggcatcatgtgatttgatacatctgatgtatcacagtgcctaagaactggctatttcctacacagtaccatgctaacaaaatactaaggtgggaaacaagagactgccagaattcagctccctcgtacaacttttgttttgactacctggtagtttttaattgcgttttagaaactgtgcttccacaggaaaagctcctctatttttcagcccgaatggattgcacctcctga

SEQ ID NO: 8733 - DNA, 600 bp, Chicken  19866894203675_1
tttttggttttaaatacagagaagtttggcctatgggctgcaaagtaaacaacagctgataaaagtaaacaacaactgatacagctggctaacatgtagagatctcatcactctcactccctgccaagtaatggtaatgtgctccacaacaaaccttgccaagactcagcagggggctgtcataaatgtgggctaaagtagagggaaagcagaactctgctccggctgtagcaggtcaaggagcaggagaagacagaggtacatggggagagcagcagaggtacgtgtgtccttggttgyaggactcccatctctrtagcataattcaagaaccaaaaggcagtcactagcagctgtgaagccactctgaagcaactcccaccacttcgggtctctaacatcatcactcatcaaaaggccttaccaactaagagagcttctcgttctgatttcacagggctattgctcagtgtcttctcaactggacactccttctcctggctgcatgcacaaactctgggcatactgctctcctgcagaaaaaaatacacagggcctgttccacacacccacagcacaggaggcacacttacaccaagc

SEQ ID NO: 8734 - DNA, 600 bp, Chicken  19866894203675_2
cagagaagtttggcctatgggctgcaaagtaaacaacagctgataaaagtaaacaacaactgatacagctggctaacatgtagagatctcatcactctcactccctgccaagtaatggtaatgtgctccacaacaaaccttgccaagactcagcagggggctgtcataaatgtgggctaaagtagagggaaagcagaactctgctccggctgtagcaggtcaaggagcaggagaagacagaggtacatggggagagcagcagaggtacgtgtgtccttggttgyaggactcccatctctrtagcataattcaagaaccaaaaggcagtcactagcagctgtgaagccactctgaagcaactcccaccacttcgggtctctaacatcatcactcatcaaaaggccttaccaactaagagagcttctcgttctgatttcacagggctattgctcagtgtcttctcaactggacactccttctcctggctgcatgcacaaactctgggcatactgctctcctgcagaaaaaaatacacagggcctgttccacacacccacagcacaggaggcacacttacaccaagcagcagctcggtaagac

SEQ ID NO: 8735 - DNA, 600 bp, Chicken  19866894203677_1
gtcagttagggaattggtctcaattatactttttttctgaatgtgagaacacagtgtgaactacaaaatatgactattggtgttgtgtgagctgtcttatgggatctccccttttcccattccatcctccttggagtgcttttgttatggtaccataccttaggattgctgtttatctacagtctcctctaaagagaagaactgggaacaaaatgggggaagggaaagaggaaaagaaatctcaggtttgtggccatccctgtgtgcttatggccatatgtattttccccttctgctgcrttctgctaaccaaatttttaaagcatattcaatgtctgctattgtactgaaatgtctcaaacagctcatcaatctatcacaactaatactaattttaatcttaaaataaaggataatatttttgctctgtcttttattacatacacacagcctctaaaaatgcttccaaattcacttacaagtatctgtacttgctgtaacattgtctagagaactccagaaggtatgtgtagatataggatcatactaggttggggatgagttggggatgtgtgtgggggggggggggtgcagggctgt

SEQ ID NO: 8736 - DNA, 600 bp, Chicken  19866894203687_1
ctcctctcttcctcaatgagacaatcaaagaagaatctctgttagaagttaatgaaattaaagagttgattttttttttttttttttttaaactttaaaactccaggagctctagcaaagggctaaaacaatgagccaaggtttagtgggcttttctccctttgtgaatctcagctcccatccccaactcctgtgctcattctggacatctgcgttattagatgcaaactacgtgggaggagaattggccttgattttcagtgtttaccacaaccttcttacatgtgtacacttagaacrtttgaaagctttaacatttcttccagttacattttctggttgactgtacacagcgctacctttgtgcaaatgccccagtaaaccattattttcaacacaaacagcagaaagtcaaactatttgggaaaaaaatgcaatttagcccaagaaccatgctaattatatccttggttattttcacacagacaaatatttcaatctgcactctgtgtttatatgctaaagatgtttcttcttgtctgaagtagcaaatatacctcagggagctctatttttggttacgcatttaatgcagaacat

SEQ ID NO: 8737 - DNA, 600 bp, Chicken  19866894203688_1
gattcgaactagccagagcaatgcagtattaatgtatcttaacattcaaaaatgttactgaatactcacacaaaatttggaaatacaaggttttcattatgtgaatatatgcctatgtcacattactccagtctagttgcaaaatttattcccttacaaaacaaactaaaaagcaagttgcagccactgtggacactccttcttcaattgtcatcttgaattttcattcccctgaacagtgaaagccattgctgatttgtggtacaagatgcaacactgagctgtccccactgagacacyatgtgcacataacacttgctgtgtagtgggcaacttcctctcccctttgcttccatcaaagacttgccttgaagaagttcagtctgacccttatccatgaaagggcaagatcttggatgaaaggcattatactgagatgaaatgtatgtgtattgccatgtggtttttcttttcataggacatatgacagaggagatcaaagagataattcttctttctgaattttcaatatctctaagaattgagcaattaaaggtgacagttgaatattttcaggacaagctccataatagcagcaag

SEQ ID NO: 8738 - DNA, 600 bp, Chicken  19866894203689_1
aaataaatcatatctagctacaagtgtccttctattttggatattttggcacagctggtgaatgtactgatttaatggttattgctagtcagaagattcagtatagaaataactatattctctgaccactgctatgtagaaatactcatttaatagtgtatttttctacttcagattgtgccacttctttgtcaagagtcaaacactagagctaattcctgataagccatctgtacctatataatgctctacaacaattagcacgtgcagattttactccctcctaacttctccccagawttacaagtaactgtaaaataaagtagaagagattaatgatcaacgatatccagcattacctttcaaataattaagtaagcaccaactatgccatgcatcttgaatagtaattaattaacaaaaaagaagcagcttgctactgcttttagatgtgtcaacttcagccaacgagttctacttgtgtatgaactttcctgtgaagaatgacatgcaactaggtctgcattgatcgtgtaatgcctatcttcaaagcagctaaattcctttatggcgctacaactttcctaggggaactatttt

SEQ ID NO: 8739 - DNA, 600 bp, Chicken  19866894203691_1
gagtagggtcaaagtgcagaacgagctacctatgatgtcctcagctggaggagagtttgtctgaaggctcgagattgaagcgtccatcctgcagtctaacgagcaggaggtgctgccaggcacaaggggtaccctggactggtgggatggctataagagatctcacgtaccggaccaagtaaggtatggcttagtacattttaacacgttctggccgctcgtgaacctgccctcagccgcagagcttgagttgagtttgggaggatggggtgcaaggtttggctgtcccatgcttttgcygagagaaaactcttaaaaataaggagatccaccaggtagaggcaaaaagtaaaggaagcagtcaccgggcctgatgccacaaatacgtgcagtcagcacttgtaaaggtaaacatttatttatggaggatttcctgccatgaggaccctgtggcggggtttagtcctctgctctgtgcttacatccaccagccaaaggaaaagctgcgtgctgaacccctgggttggagtttggagagggctgcagcaaggagagggcacgagctgctgctccggagctgcccatgccttgggcagggac

SEQ ID NO: 8740 - DNA, 600 bp, Chicken  19866894203697_1
ccataagctctcaggaaccaagacaatcaggatttaatctgcaagattgtgtaggtgaaagcttcaacaacagttacgattgcacattctggttttcttttgttcatttgtaactgattagcatttgttatattgaagacaaacctgtttgtacagttcctaatcagtcaaataaaatggtggtagaaatatgtaagccctcctatgatataacagagaagccattctcagggaataaagaggtgagttctgcacatactttgacaaatgaccaattgtttcattttaaacagtggtatraatatctctggctctgtatttccatgtcagcatttcctatgagaatcctgtagaaacactgctggaacatctacaggacatgatgtaccacccccaaaaccagaccacttccccagaacagtgccaaaaaatcagagcagcacgctaagagcaccagtaccaaaattcccctgttagctcctgatagaacccattgtatgtgttgagaatctctgaaaatacaaccacaccattgttcattccagtacagtttgcttggagctagctagtgtacttccaccttttccttcactggaggta

SEQ ID NO: 8741 - DNA, 600 bp, Chicken  19866894203700_1
taggcacagaggtaaggctcactggcctgtagttccccaggtcttcctttctcactttcttaacaatgggagtaatgtttcccttttttcagtcaccagggtcttcactagacagccatgatttttcaaatatgatggagagtggctcggtaaccacatcagccatctctttcagaatcccaggatggatatcatcccaccccatggagttatatacattcagtttcatgaggaggtctcggacttgttccactgttacagcgggatggaatccgcttctctcacctagagcttcagggwcctggcaggcatggggaggaacctgaccatcagtgaagaccgaggcaaagcacttattgagcacctcagcttttgccatgtctgaggaagccagttctccgtcctcatttatcatagggggaacactttccttgatcygtctcctcctgcttatgtacccgaagaaycccctcttgttatctttcacatccctcatcaagttcagttccatctgcgccttggctttccttatcttattyctacacatgtggacaacattcctgtatttttcccaggctacacaaccctgcttccacttcc

SEQ ID NO: 8742 - DNA, 600 bp, Chicken  19866894203700_2
agagtggctcggtaaccacatcagccatctctttcagaatcccaggatggatatcatcccaccccatggagttatatacattcagtttcatgaggaggtctcggacttgttccactgttacagcgggatggaatccgcttctctcacctagagcttcagggwcctggcaggcatggggaggaacctgaccatcagtgaagaccgaggcaaagcacttattgagcacctcagcttttgccatgtctgaggaagccagttctccgtcctcatttatcatagggggaacactttccttgatcygtctcctcctgcttatgtacccgaagaaycccctcttgttatctttcacatccctcatcaagttcagttccatctgcgccttggctttccttatcttattyctacacatgtggacaacattcctgtatttttcccaggctacacaaccctgcttccacttcctgtatatttccctcttttccctcagtttaagctgtgggtccttgcacagccatgccagtcacccgtctactctgctcaatttcttctgctgggggattgagaactcttgcgctctcagaagggtgtccctcgtgagct

SEQ ID NO: 8743 - DNA, 600 bp, Chicken  19866894203700_3
tctttcagaatcccaggatggatatcatcccaccccatggagttatatacattcagtttcatgaggaggtctcggacttgttccactgttacagcgggatggaatccgcttctctcacctagagcttcagggwcctggcaggcatggggaggaacctgaccatcagtgaagaccgaggcaaagcacttattgagcacctcagcttttgccatgtctgaggaagccagttctccgtcctcatttatcatagggggaacactttccttgatcygtctcctcctgcttatgtacccgaagaaycccctcttgttatctttcacatccctcatcaagttcagttccatctgcgccttggctttccttatcttattyctacacatgtggacaacattcctgtatttttcccaggctacacaaccctgcttccacttcctgtatatttccctcttttccctcagtttaagctgtgggtccttgcacagccatgccagtcacccgtctactctgctcaatttcttctgctgggggattgagaactcttgcgctctcagaagggtgtccctcgtgagctgccctcaaggaccctttctcaggagatcc

SEQ ID NO: 8744 - DNA, 600 bp, Chicken  19866894203700_4
cggacttgttccactgttacagcgggatggaatccgcttctctcacctagagcttcagggwcctggcaggcatggggaggaacctgaccatcagtgaagaccgaggcaaagcacttattgagcacctcagcttttgccatgtctgaggaagccagttctccgtcctcatttatcatagggggaacactttccttgatcygtctcctcctgcttatgtacccgaagaaycccctcttgttatctttcacatccctcatcaagttcagttccatctgcgccttggctttccttatcttattyctacacatgtggacaacattcctgtatttttcccaggctacacaaccctgcttccacttcctgtatatttccctcttttccctcagtttaagctgtgggtccttgcacagccatgccagtcacccgtctactctgctcaatttcttctgctgggggattgagaactcttgcgctctcagaagggtgtccctcgtgagctgccctcaaggaccctttctcaggagatcccactcagcagttccttaagtagccagaatttcactctcctgaagttcagggtcctgactctactttttgcca

SEQ ID NO: 8745 - DNA, 600 bp, Chicken  19866894203704_1
ttatgtgttatctatgattttgtgtgcgaagtattacattggataatattgcatttagtatctgaaacgagcttgattgacaactgacaacttttggggaaaagacatatttagcaaaacggttttcccaatgttttaaaaaattcccccaaaagtgagcacataaaataaaatgaaatgaacatggaataaaagtgaatcaattccaaacagacatatctggaaaaagattcacaccttaaataatagaggtctgaacttgcagtaatgacacagacaaataggttgtctaatgcactscttactgtggtgttggaccgggagcatgataaagtaagcagaaaagggactgcataagctttatcgccataacaaccaagaaaagaatgattacaaaagagcatggaaacccacctttagaaaacaggttttaacctttgagcaatgagagcagcatagcacagtactaaatgtctaaataagaaaagacacagtcatggctcaaaacttttgcatctcaccaaatttgatgctccagctgaaataacagaattgtaaaactatccaatacagcagtcatatggaacaacaaaaactttt

SEQ ID NO: 8746 - DNA, 600 bp, Chicken  19866894203706_1
tatgacacacatcattttacttatgaaatgtttgtgggaaaccatacctctccttgatagtgatgggtcaacctcaacacctctctcataaggagtaccaccatttaatagcagctcatacattctgtgaaggaagagcagcacagtagaacaatgcccagatatgtgaacacagcacaactgctctctgagaaagaaagaaacctgctatctcaaataaaaacctgacagtgctcgaggttatgactggtattttatgtgaaatgactatacctcatcactaagcagccaaacctcagrtgagaaatttaaaacttgtgttatattgggaaaygagttgattatttgaaaagaaattagcagcaatgataccaatattttccttgtatgcaaactatcagctgtctcactcaagtgtttctgaggaatcactgctgaagcatcaaattttagatgcagaagattttaaatgtttaataataatgtaatcacagttctgtcaagagtaagtcagtgtcgaagtaaccatgtgctttcactctgcagagactgcatttgactcaatggaacagaaaacagtgctagagaccacatttagaa

SEQ ID NO: 8747 - DNA, 600 bp, Chicken  19866894203706_2
tgggaaaccatacctctccttgatagtgatgggtcaacctcaacacctctctcataaggagtaccaccatttaatagcagctcatacattctgtgaaggaagagcagcacagtagaacaatgcccagatatgtgaacacagcacaactgctctctgagaaagaaagaaacctgctatctcaaataaaaacctgacagtgctcgaggttatgactggtattttatgtgaaatgactatacctcatcactaagcagccaaacctcagrtgagaaatttaaaacttgtgttatattgggaaaygagttgattatttgaaaagaaattagcagcaatgataccaatattttccttgtatgcaaactatcagctgtctcactcaagtgtttctgaggaatcactgctgaagcatcaaattttagatgcagaagattttaaatgtttaataataatgtaatcacagttctgtcaagagtaagtcagtgtcgaagtaaccatgtgctttcactctgcagagactgcatttgactcaatggaacagaaaacagtgctagagaccacatttagaagagttatagaggcttacagaacagtagaagtttc

SEQ ID NO: 8748 - DNA, 556 bp, Chicken  19866894203708_1
ggtgcaagtcacacactccaagctgcaaagaacagtttgcagaaggcaggacttcaaaatgtagtccttgttttccttcactacagtgtgtactctgctcgctatttagatgagctaaataaccaggaaacaaaggacaggctgctcctcagagtaagagacaaaagaaggatgatcaaagtgtttccgttggtgaacattttaatgttttatcttgtggttccttaaaaaatgggaaatgcaatttcaaaacaaggtgctttgaagtgtcttttccaaacgtcacaagaattgcttgaktatattcaacatcttagtctgtaggcatcatgaatgaaatgcttccatcttctgaaaacattccttgtattttctttaaatctaagaatttgtctaaacataaataatttcagagtacccaaaaatttaatttcagtaagatcgactgtttgggaaacataaagctacagaatttgaataaacacacacagactagtctgtgtatgacgttttcatagccaccattctgtccagaatttagcaatttttatcagtg

SEQ ID NO: 8749 - DNA, 600 bp, Chicken  19866894203714_1
tagaggctggtcacaagcagtgtccctcaggggtcggtcttgaaaccggtgctctttaacatcttcatcaatgacacagacgatggcatcgagtgcacccttaacaagtttctgcattacaccaagctgagcggtgcagtcgatatgttggaaggaagggaagccatccagagggacctggacaggctggagaagtgggcccacgagaacccagtgaggttcaataaggccatgtgcagggttggggcaatcccaggtgggatacaaagtgggggaagatctccttgagagcagccctgmggagaaggacttgggggtcctggtggacaagaagctggacatgagccagcagtgtgcgcttgcagcctggaaggcyaactgtgttctgggctgcattaaaaaaggggtggccagcagggagaaggaggtaactgtcccccttgtgaggctccatctggagtactgcatccaggcctggggcccccagtacaggaaggatgtggagctcttggagtgggtccagaggagggccactaagatgattagagggctggagaacctctcctatgaggaaaggttgagggaactgggaatgcttag

SEQ ID NO: 8750 - DNA, 600 bp, Chicken  19866894203714_2
cagacgatggcatcgagtgcacccttaacaagtttctgcattacaccaagctgagcggtgcagtcgatatgttggaaggaagggaagccatccagagggacctggacaggctggagaagtgggcccacgagaacccagtgaggttcaataaggccatgtgcagggttggggcaatcccaggtgggatacaaagtgggggaagatctccttgagagcagccctgmggagaaggacttgggggtcctggtggacaagaagctggacatgagccagcagtgtgcgcttgcagcctggaaggcyaactgtgttctgggctgcattaaaaaaggggtggccagcagggagaaggaggtaactgtcccccttgtgaggctccatctggagtactgcatccaggcctggggcccccagtacaggaaggatgtggagctcttggagtgggtccagaggagggccactaagatgattagagggctggagaacctctcctatgaggaaaggttgagggaactgggaatgcttagtttggagaagagaaagctccagcgagacctcattgtggccttccagtacttgaagggagcatataaacaggaaggg

SEQ ID NO: 8751 - DNA, 600 bp, Chicken  19866894203714_3
tgttctgggctgcattaaaaaaggggtggccagcagggagaaggaggtaactgtcccccttgtgaggctccatctggagtactgcatccaggcctggggcccccagtacaggaaggatgtggagctcttggagtgggtccagaggagggccactaagatgattagagggctggagaacctctcctatgaggaaaggttgagggaactgggaatgcttagtttggagaagagaaagctccagcgagacctcattgtggccttccagtacttgaagggagcatataaacaggaaggggaacrgctgtttacaagggtagatagtgataggacaggacagggrggaatggtcttaaactgagacaggggaggtttaggttggatattaggaagaagtttttcatgcagagagttgtgacgcactagaacaggttgcccaaggaggttgtggatgccccatccctggaggcgttcaaggccaggctggatgtggctctgggcagcctggtctagtggttggcaatcctgcacatagcagggggttgaaactagatgatccttttcaatcaaggccattctatgattctatgatgatatgatcag

SEQ ID NO: 8752 - DNA, 600 bp, Chicken  19866894203714_4
aaggaggtaactgtcccccttgtgaggctccatctggagtactgcatccaggcctggggcccccagtacaggaaggatgtggagctcttggagtgggtccagaggagggccactaagatgattagagggctggagaacctctcctatgaggaaaggttgagggaactgggaatgcttagtttggagaagagaaagctccagcgagacctcattgtggccttccagtacttgaagggagcatataaacaggaaggggaacrgctgtttacaagggtagatagtgataggacaggacagggrggaatggtcttaaactgagacaggggaggtttaggttggatattaggaagaagtttttcatgcagagagttgtgacgcactagaacaggttgcccaaggaggttgtggatgccccatccctggaggcgttcaaggccaggctggatgtggctctgggcagcctggtctagtggttggcaatcctgcacatagcagggggttgaaactagatgatccttttcaatcaaggccattctatgattctatgatgatatgatcagactatgaagatgttttaaatcattaacattgtttcttttt

SEQ ID NO: 8753 - DNA, 600 bp, Chicken  19866894203717_1
aacaagaaatccatctctcctgctagatgcctgttgctagttctcattaaaacacaaacttccacaccaaggatttaatgccatgaaaataaagcatcattagaaagagatttgctgaggacagcaaataccacacttgtgttttccaaggactattatttatatttatcccttggagtacacataatttccttaaggaaaactgacatggtttgatcaacacccgcactcacactgaagttgtgcccactgtgactgtccatacattttccccatttcttttcaaatggatagttcaayrtgtttctgaagtcattctatgaacagccccatgaatagcttagtaagtctaacartcttaacccgagcagcctcaactgctttcttcccagcactgcatcccactaatggcttaagtaaggtaggcaacatgagtcatccacctcaaacactcacccactaaaaaaaacacaagaaaataaagcatgagctaataaaaaggcctctttataatgaaaagggaattcctgaggctgctgaagaattcagggccacagctgtgtgctgctttggagcgttccctgyccaccccagcagaca

SEQ ID NO: 8754 - DNA, 600 bp, Chicken  19866894203717_2
acaagaaatccatctctcctgctagatgcctgttgctagttctcattaaaacacaaacttccacaccaaggatttaatgccatgaaaataaagcatcattagaaagagatttgctgaggacagcaaataccacacttgtgttttccaaggactattatttatatttatcccttggagtacacataatttccttaaggaaaactgacatggtttgatcaacacccgcactcacactgaagttgtgcccactgtgactgtccatacattttccccatttcttttcaaatggatagttcaayrtgtttctgaagtcattctatgaacagccccatgaatagcttagtaagtctaacartcttaacccgagcagcctcaactgctttcttcccagcactgcatcccactaatggcttaagtaaggtaggcaacatgagtcatccacctcaaacactcacccactaaaaaaaacacaagaaaataaagcatgagctaataaaaaggcctctttataatgaaaagggaattcctgaggctgctgaagaattcagggccacagctgtgtgctgctttggagcgttccctgyccaccccagcagacag

SEQ ID NO: 8755 - DNA, 600 bp, Chicken  19866894203717_3
aacttccacaccaaggatttaatgccatgaaaataaagcatcattagaaagagatttgctgaggacagcaaataccacacttgtgttttccaaggactattatttatatttatcccttggagtacacataatttccttaaggaaaactgacatggtttgatcaacacccgcactcacactgaagttgtgcccactgtgactgtccatacattttccccatttcttttcaaatggatagttcaayrtgtttctgaagtcattctatgaacagccccatgaatagcttagtaagtctaacartcttaacccgagcagcctcaactgctttcttcccagcactgcatcccactaatggcttaagtaaggtaggcaacatgagtcatccacctcaaacactcacccactaaaaaaaacacaagaaaataaagcatgagctaataaaaaggcctctttataatgaaaagggaattcctgaggctgctgaagaattcagggccacagctgtgtgctgctttggagcgttccctgyccaccccagcagacagaccagcasaggctgggctgtgtctgaaggaaggctccatccagggctgctcactg

SEQ ID NO: 8756 - DNA, 511 bp, Chicken  19866894203717_4
aatggatagttcaayrtgtttctgaagtcattctatgaacagccccatgaatagcttagtaagtctaacartcttaacccgagcagcctcaactgctttcttcccagcactgcatcccactaatggcttaagtaaggtaggcaacatgagtcatccacctcaaacactcacccactaaaaaaaacacaagaaaataaagcatgagctaataaaaaggcctctttataatgaaaagggaattcctgaggctgctgaagaattcagggccacagctgtgtgctgctttggagcgttccctgyccaccccagcagacagaccagcasaggctgggctgtgtctgaaggaaggctccatccagggctgctcactgcacctgggaacrtgttcactgtgtgttccagatggtcaaaagatgatggctgaaatctatttagataaccagagccattgacctcagtaccttcatgaatctaactctaaatgagcatttaatgtcagctcgatgtgtga

SEQ ID NO: 8757 - DNA, 487 bp, Chicken  19866894203717_5
aagtcattctatgaacagccccatgaatagcttagtaagtctaacartcttaacccgagcagcctcaactgctttcttcccagcactgcatcccactaatggcttaagtaaggtaggcaacatgagtcatccacctcaaacactcacccactaaaaaaaacacaagaaaataaagcatgagctaataaaaaggcctctttataatgaaaagggaattcctgaggctgctgaagaattcagggccacagctgtgtgctgctttggagcgttccctgyccaccccagcagacagaccagcasaggctgggctgtgtctgaaggaaggctccatccagggctgctcactgcacctgggaacrtgttcactgtgtgttccagatggtcaaaagatgatggctgaaatctatttagataaccagagccattgacctcagtaccttcatgaatctaactctaaatgagcatttaatgtcagctcgatgtgtga

SEQ ID NO: 8758 - DNA, 428 bp, Chicken  19866894203717_6
cagcctcaactgctttcttcccagcactgcatcccactaatggcttaagtaaggtaggcaacatgagtcatccacctcaaacactcacccactaaaaaaaacacaagaaaataaagcatgagctaataaaaaggcctctttataatgaaaagggaattcctgaggctgctgaagaattcagggccacagctgtgtgctgctttggagcgttccctgyccaccccagcagacagaccagcasaggctgggctgtgtctgaaggaaggctccatccagggctgctcactgcacctgggaacrtgttcactgtgtgttccagatggtcaaaagatgatggctgaaatctatttagataaccagagccattgacctcagtaccttcatgaatctaactctaaatgagcatttaatgtcagctcgatgtgtga

SEQ ID NO: 8759 - DNA, 599 bp, Chicken  19866894203724_1
  misc_feature (1)..(118): n is any nucleotide
nnnnnnnnnnnnnnnnnnnnnnnnnnnnnnnnnnnnnnnnnnnnnnnnnnnnnnnnnnnnnnnnnnnnnnnnnnnnnnnnnnnnnnnnnnnnnnnnnnnnnnnnnnnnnnnnnnnnnntttacttcagagtagtgtacaccaatgagaaacggtcaataaattctaaattttaatcaaaatacttaatttaaataatggagaaatgtgctttatttaaaaaagtacaatcagcttgaagaatttgcagtctgaagtatgcttttgttcataacaatatagtggaaatttcactgatactraggaataaacctgtggtttactaataactgaaccaaccatctggagtgcccctgtactctccaaagacacccacttcttccctgctgaagggtgagaaaccattgcatacagcaatctctgctctacatgactaggccaccagtaggctgaccattcacggatatggactccttgtttatagtgtggccttctggtcactgctccccctgaggaactcacattctcactggcagcacttaactgctacacatccctgcagcatataattcatttctcctccttaacatgaagctgaagt

SEQ ID NO: 8760 - DNA, 599 bp, Chicken  19866894203734_1
  misc_feature (1)..(122): n is any nucleotide
nnnnnnnnnnnnnnnnnnnnnnnnnnnnnnnnnnnnnnnnnnnnnnnnnnnnnnnnnnnnnnnnnnnnnnnnnnnnnnnnnnnnnnnnnnnnnnnnnnnnnnnnnnnnnnnnnnnnnnnnnnacacttatgttttttcttggaattcattgcttttgtgaaaataacattgtgctgaaatgtggttcaagtgggaaggggaaagtaaagcagttgttccctgtaaaagctttgcctgataggagctcctgctgggcttcggttgattgtgttcagtttttcctccctgtagagctggtastttatcttatttrtgaaaagctaaacttagttatttcagtaggcaacgataaaccatccctggaactctggtcagccattgctrtatgttgctgcgtattgggacttgcaaaaatgaggggaagacwactcaaatgttgttccagcactgaccgtttttggttttgatgtcaaaaaagacagagaaatcttcagagaagtaaagggaagtcagaggtgtatagcacggtcctgtagaaaaggtgcctttgtgagcaagaaaaggagaataaaccccagttcctactagcacagctataa

SEQ ID NO: 8761 - DNA, 599 bp, Chicken  19866894203734_2
  misc_feature (1)..(109): n is any nucleotide
nnnnnnnnnnnnnnnnnnnnnnnnnnnnnnnnnnnnnnnnnnnnnnnnnnnnnnnnnnnnnnnnnnnnnnnnnnnnnnnnnnnnnnnnnnnnnnnnnnnnnnnnnnnnnacacttatgttttttcttggaattcattgcttttgtgaaaataacattgtgctgaaatgtggttcaagtgggaaggggaaagtaaagcagttgttccctgtaaaagctttgcctgataggagctcctgctgggcttcggttgattgtgttcagtttttcctccctgtagagctggtastttatcttatttrtgaaaagctaaacttagttatttcagtaggcaacgataaaccatccctggaactctggtcagccattgctrtatgttgctgcgtattgggacttgcaaaaatgaggggaagacwactcaaatgttgttccagcactgaccgtttttggttttgatgtcaaaaaagacagagaaatcttcagagaagtaaagggaagtcagaggtgtatagcacggtcctgtagaaaaggtgcctttgtgagcaagaaaaggagaataaaccccagttcctactagcacagctataagaaaagtaaaatt

SEQ ID NO: 8762 - DNA, 599 bp, Chicken  19866894203734_3
  misc_feature (1)..(38): n is any nucleotide
nnnnnnnnnnnnnnnnnnnnnnnnnnnnnnnnnnnnnnacacttatgttttttcttggaattcattgcttttgtgaaaataacattgtgctgaaatgtggttcaagtgggaaggggaaagtaaagcagttgttccctgtaaaagctttgcctgataggagctcctgctgggcttcggttgattgtgttcagtttttcctccctgtagagctggtastttatcttatttrtgaaaagctaaacttagttatttcagtaggcaacgataaaccatccctggaactctggtcagccattgctrtatgttgctgcgtattgggacttgcaaaaatgaggggaagacwactcaaatgttgttccagcactgaccgtttttggttttgatgtcaaaaaagacagagaaatcttcagagaagtaaagggaagtcagaggtgtatagcacggtcctgtagaaaaggtgcctttgtgagcaagaaaaggagaataaaccccagttcctactagcacagctataagaaaagtaaaattgatgttcagaggccacaagaaagctttggtgtatcaaaaaccaattttgggataaaatgttaaccggtgga

SEQ ID NO: 8763 - DNA, 600 bp, Chicken  19866894203734_4
tatgttttttcttggaattcattgcttttgtgaaaataacattgtgctgaaatgtggttcaagtgggaaggggaaagtaaagcagttgttccctgtaaaagctttgcctgataggagctcctgctgggcttcggttgattgtgttcagtttttcctccctgtagagctggtastttatcttatttrtgaaaagctaaacttagttatttcagtaggcaacgataaaccatccctggaactctggtcagccattgctrtatgttgctgcgtattgggacttgcaaaaatgaggggaagacwactcaaatgttgttccagcactgaccgtttttggttttgatgtcaaaaaagacagagaaatcttcagagaagtaaagggaagtcagaggtgtatagcacggtcctgtagaaaaggtgcctttgtgagcaagaaaaggagaataaaccccagttcctactagcacagctataagaaaagtaaaattgatgttcagaggccacaagaaagctttggtgtatcaaaaaccaattttgggataaaatgttaaccggtggaaatggaagcagaagatatggttgtatgatttcrtgaaagagagc

SEQ ID NO: 8764 - DNA, 576 bp, Chicken  19866894203734_5
aggggaagacwactcaaatgttgttccagcactgaccgtttttggttttgatgtcaaaaaagacagagaaatcttcagagaagtaaagggaagtcagaggtgtatagcacggtcctgtagaaaaggtgcctttgtgagcaagaaaaggagaataaaccccagttcctactagcacagctataagaaaagtaaaattgatgttcagaggccacaagaaagctttggtgtatcaaaaaccaattttgggataaaatgttaaccggtggaaatggaagcagaagatatggttgtatgatttcrtgaaagagagcttggcctgtggggagaagcaaagtgcctgtgcagctgctggtgctgcagaatgatttacttttatttttaattctattttgattttgttttatgttatgttaccttgctgttttctggtgtaaaaagaaagcttccccttttctcccaagaagagctgcttttcacagagaattacttgcagatttgtggctgtggaacagtggatcaatattggtttgtgaaaagcttcagttaaagtgggacaagtggagattagctagatga

SEQ ID NO: 8765 - DNA, 600 bp, Chicken  19866894203743_1
ataaaagtttattcagtctcaccgttactgtctttaaaaggttgaaaatatagacatgaattatttcaatgttattctgtcacacaatggttacaaaatagttgtgtaacagtaagtagtctatttcactatgagagcaggaaagacgctgatacaggggtcattctcctgtgcttgtcatcatcccagtatatctagtgtttgacatatggaggaaacttaaagaactagagtgatgaaaaatggaagagagtctgttgatgttcagaattgaatgaaacattgactacaggaatgtayttgaatccatgtttgtgcatttgtctgtgcattgaaaaggtcagcatttctacacaagcaagctccacttttgagtgagaaacacagaaaatgctcatgattccttgaaaactatatcaacactgcaaaaaaaacaacaacaaaaaaaaaacatatagatcagtggtgtctgagctagcagagctgtgactgacaagtctatgtggcacagagaggacttttgtgggactcaggtctagaaactgcagcttcttttgaagaaaacacatttgagctaaaacatcgttcctttgaatggaa

SEQ ID NO: 8766 - DNA, 600 bp, Chicken  19866894203748_1
aatcaatccaacctttggtttttaatatggtacagcatatgctccacaccaccatcaggcattctggatttatcccctcaccacaaactccaagtaacacgtccttcattaggagcttctggtcacaaaagcaccaagcccacagcccctgtgggtactgtatgcttcaggaaagctttcagcctgactcaagcacagcagcaacatttattcatcgttgtaaagacagcctgaccaacaggagtgagccaggtaattatgtggcaaagtagaaagcatagggaactcactgggctaagraggagtctgggggctttcagattcctactgcaaaatagacggatgagcagcaagctcagtggcatgaacacaaatgctgctgccctaagccctcaggcaataaaagagttcagtggagagcatcgatataattcagcagtttactcgttaagttgaaggccaggtctgtctctgcaattgagcagattctgcctaagcaagcaactttaacagaagtcgtatattgcctcaaacctgtgtagcaccaagtgttgccaggaagacacaggcagacagtacatccagcaatacttgcagcct

SEQ ID NO: 8767 - DNA, 600 bp, Chicken  19866894203752_1
aaggttagcatcacattctatcaagttaacatctcctgtcctgttctggcatttagaacatttacatcccaaagacagctgtaccttctatcccaacgtaatctatcaatgagcagacccactacagccattgtctttgtgcagcaggagggtgaaggggaagttatttgcattctggaggattttgtcctgtctgattctacctgaactcctcacacacagtatgggccatcccttgccgctggctatcagccagaacagatggcagaaggcagacaagtctgtttcagagtggatcayacaatagaaaccaaactaatctcaagtcctgcattttgacatagtcaaaactcattgatattgctctgatctgtgaggctggacagttttctagggragaaagaggaaggaaaaaacawacaaacaaaaagatgacgatatacttccatttcatttgcctgacacgtggttgttcaacatctaaataacagtcccaaacagctccaggctttgtcacccagtgagtccctctgggaaacatgatgactggagacctcaatgcatggcaagactccaggaacaatcattcctcaggcacgg

SEQ ID NO: 8768 - DNA, 600 bp, Chicken  19866894203752_2
gtaatctatcaatgagcagacccactacagccattgtctttgtgcagcaggagggtgaaggggaagttatttgcattctggaggattttgtcctgtctgattctacctgaactcctcacacacagtatgggccatcccttgccgctggctatcagccagaacagatggcagaaggcagacaagtctgtttcagagtggatcayacaatagaaaccaaactaatctcaagtcctgcattttgacatagtcaaaactcattgatattgctctgatctgtgaggctggacagttttctagggragaaagaggaaggaaaaaacawacaaacaaaaagatgacgatatacttccatttcatttgcctgacacgtggttgttcaacatctaaataacagtcccaaacagctccaggctttgtcacccagtgagtccctctgggaaacatgatgactggagacctcaatgcatggcaagactccaggaacaatcattcctcaggcacggccaytgtggctcttagccagagagaaaacctgtgaccaagtggcagagattttgacacatctctgctatctaagaattccctcagggcaagggattt

SEQ ID NO: 8769 - DNA, 600 bp, Chicken  19866894203752_3
cactacagccattgtctttgtgcagcaggagggtgaaggggaagttatttgcattctggaggattttgtcctgtctgattctacctgaactcctcacacacagtatgggccatcccttgccgctggctatcagccagaacagatggcagaaggcagacaagtctgtttcagagtggatcayacaatagaaaccaaactaatctcaagtcctgcattttgacatagtcaaaactcattgatattgctctgatctgtgaggctggacagttttctagggragaaagaggaaggaaaaaacawacaaacaaaaagatgacgatatacttccatttcatttgcctgacacgtggttgttcaacatctaaataacagtcccaaacagctccaggctttgtcacccagtgagtccctctgggaaacatgatgactggagacctcaatgcatggcaagactccaggaacaatcattcctcaggcacggccaytgtggctcttagccagagagaaaacctgtgaccaagtggcagagattttgacacatctctgctatctaagaattccctcagggcaagggatttcccagatgtctgattgctctct

SEQ ID NO: 8770 - DNA, 600 bp, Chicken  19866894203752_4
tagaaaccaaactaatctcaagtcctgcattttgacatagtcaaaactcattgatattgctctgatctgtgaggctggacagttttctagggragaaagaggaaggaaaaaacawacaaacaaaaagatgacgatatacttccatttcatttgcctgacacgtggttgttcaacatctaaataacagtcccaaacagctccaggctttgtcacccagtgagtccctctgggaaacatgatgactggagacctcaatgcatggcaagactccaggaacaatcattcctcaggcacggccaytgtggctcttagccagagagaaaacctgtgaccaagtggcagagattttgacacatctctgctatctaagaattccctcagggcaagggatttcccagatgtctgattgctctcttttgagaccttcgaggacaaaaaagaaaggggatgccacaattgtggacatgccttctgagggatttttattctgaaaaggtctgtctcactttgcaggattaatgatgtgaatgttaataagcgttgatgtccagccatgcaaaaacttgcacagaaaatggaggggaaaatcttgcctctgca

SEQ ID NO: 8771 - DNA, 600 bp, Chicken  19866894203756_1
gtctccagcctgtgattctaaaggtaacatcagtccatacttaattaaaaagcgatacgatttcaaacttgtaagccagtgttttgggttgggtgagattgcagaaagggtactttccaactaaagatttcttctgctcagcagatttctgtccagaatattttgtctactttgctgtttttatgagaggccactgaactgaaaatatgcttcggacggagtagaagcatttagatatacgagaatggttagaaattggcaaccttataggtggtgacctggtggattccttgacattgyacaggggatctctccatgtacagctcattaactcaggttgataaaaccgaactgcagtaacatggagtgctttagcatccatggcactgccaaggctgtgtcacccacgtctcctagaacacagcaaatctttaaaagttaaagcttccccttcactttgaaagaaaacatatctccatgctagatcaaatgtctttttttcctgatgccactacagaagagtgggggttgttgacaaataaccctaataaagaagagcaaagtaatcggattagttctgcttcttataaactgcaattc

SEQ ID NO: 8772 - DNA, 600 bp, Chicken  19866894203757_1
ccaggctccccagcactgacacacagggaagagaacttcacactaaaattggaaggaaattcttttcttttaagataccaaatctcattatacacaattcacttgcaagcccacagcgtgctctgctcagcctgaaatgctgtcttatttctccatgcttggtcttccagccttcttgttaggctctattttgcaaggtcaaaaggctcttgactctcaagactcctctccatgaacatgttcttaaaatgagcagtaaaatctcctctccaacttccaatgagctaatgaatagagttstctstgccgcatagctcatttcccagcacctgagtcattctcacagcctttctctgagagctctgtaggatcttcacaactctcgctgagaggcggtgctgaaggtgacgcagtcctccagcagccatcagcacctcgaggacagaggatgctccccctgttccacctggtgccttctgttcatgtgcacacagtgctgcccttctgctgcaaaggtaagagctcacattgcttctattaaccacgatggccccaaatccatcccagagacacygtcttccagcttggactctcccgttc

SEQ ID NO: 8773 - DNA, 600 bp, Chicken  19866894203757_2
gctccccagcactgacacacagggaagagaacttcacactaaaattggaaggaaattcttttcttttaagataccaaatctcattatacacaattcacttgcaagcccacagcgtgctctgctcagcctgaaatgctgtcttatttctccatgcttggtcttccagccttcttgttaggctctattttgcaaggtcaaaaggctcttgactctcaagactcctctccatgaacatgttcttaaaatgagcagtaaaatctcctctccaacttccaatgagctaatgaatagagttstctstgccgcatagctcatttcccagcacctgagtcattctcacagcctttctctgagagctctgtaggatcttcacaactctcgctgagaggcggtgctgaaggtgacgcagtcctccagcagccatcagcacctcgaggacagaggatgctccccctgttccacctggtgccttctgttcatgtgcacacagtgctgcccttctgctgcaaaggtaagagctcacattgcttctattaaccacgatggccccaaatccatcccagagacacygtcttccagcttggactctcccgttcagtg

SEQ ID NO: 8774 - DNA, 582 bp, Chicken  19866894203757_3
ttccaatgagctaatgaatagagttstctstgccgcatagctcatttcccagcacctgagtcattctcacagcctttctctgagagctctgtaggatcttcacaactctcgctgagaggcggtgctgaaggtgacgcagtcctccagcagccatcagcacctcgaggacagaggatgctccccctgttccacctggtgccttctgttcatgtgcacacagtgctgcccttctgctgcaaaggtaagagctcacattgcttctattaaccacgatggccccaaatccatcccagagacacygtcttccagcttggactctcccgttcagtgggtccctcctgccattttccttccatcaactgaactctggcagtgttcagccttaaatcacacggtactcgaccacaagttcttggacagtcaccacggagctgagcactgtgaacacttcttcacgacacagtgagcagcaggtaaggaaccaccacggtttaaaggttggattattttggtgaaccagaacaccgcaggtttctataatgtggattgaggcatttcagtgaaatttccatgaaagctgaa

SEQ ID NO: 8775 - DNA, 475 bp, Chicken  19866894203760_1
ttacgtgcttgtaaatgtgccaggtcttatcaggaggatgtgtacttcgtctgtacaggtgtactcatgatcaacaatcaaattttttgaaggtttcggaagaaaatcactgtaagataagattagtgaagcattggaacaggtggctcagaactgaggtggatgccccgtccctggaggcgttcaaggtcaggctagactgggctctgagcaccttatctaggtgtgggtgtctctgttcattgcagggaagtagggctggatggcccttaaaggtctcttccaactcaaatgattctrtgattctaagatacagttacactgggggaaaaaaataaatctacaaatgttctagtgctccaataaatacttagagattcatttgataaacagaacagtaaacaaaagcacattaagtgtctgaattctgtagtaattatggaaaatgaagctgtaaaattttgcttcactttag

SEQ ID NO: 8776 - DNA, 600 bp, Chicken  19866894203763_1
aaataacactgatgcttctgaaatgccattatagtaaatctgaggtgcaacaaaacaacagagaatgtttcaaccatacctgtcaaaagactaaccactgacttcatttgttttaattcatacagttcctaccaccaactaactctgcctttccaagttttttgtttgttggttttaaacagctctatcttgattctagctccacgtggtaatactcccgggagtccagcacagctgaagcattattactctccaactggttcacaccagctacacctctgcctgtatttaatgcacctyacaccaggactattcagaagtctgttagttatgctgccacatagtcaaacgtaatattgttgatgacatttacttagaattcyagattccagagagcatcaaagtttgtctcaggtaaaagcagacacttaacccaatttgctcttgtacagcaccaataaaagttatccccttatctcctctctcaatcctcagtctcagttacaccttaaatttcttcaaaaagaagtcataagcgttctcagtgatgtaaaattgtataaaatagtgtccaagtacatgtgttgatgtgcttattcc

SEQ ID NO: 8777 - DNA, 600 bp, Chicken  19866894203763_2
caaaagactaaccactgacttcatttgttttaattcatacagttcctaccaccaactaactctgcctttccaagttttttgtttgttggttttaaacagctctatcttgattctagctccacgtggtaatactcccgggagtccagcacagctgaagcattattactctccaactggttcacaccagctacacctctgcctgtatttaatgcacctyacaccaggactattcagaagtctgttagttatgctgccacatagtcaaacgtaatattgttgatgacatttacttagaattcyagattccagagagcatcaaagtttgtctcaggtaaaagcagacacttaacccaatttgctcttgtacagcaccaataaaagttatccccttatctcctctctcaatcctcagtctcagttacaccttaaatttcttcaaaaagaagtcataagcgttctcagtgatgtaaaattgtataaaatagtgtccaagtacatgtgttgatgtgcttattccaaaaagatttagaaagtccatttatggaaaaaaaaataaaaaagaaatccaggaaccaaaatggaagaaaccaagggtaagag

SEQ ID NO: 8778 - DNA, 600 bp, Chicken  19866894203764_1
ccccttcctgacctgacaaaatggagatcttgcgtgaaggaggagaggaatttcctgagcagggtggacaagcctcgctctgtggggagagctctccctttatcagagagcccctatggagtgctgggcgcacccttatggggcactgggaaggtgaaaactcaccctactgtctccttatgtgatggtgttggggaagttgggttcgcaatgggtttctcatgtaggaaagggctgggcagcgctgttagggctctgagggctggggacgaggctggagcatccctgtggcacctgtgrggtctgtagggctgctgatgggggctgatggggaagtagagcgttgcaatgctatcataggctgagccaaagtkatggyggtgagctcagsctgaaagcacccagcgctcacgtggggrgcagagatgggagcagggcgtgcactgagcagtccccgtgctctgcaccatgcaggctcatgggggaagcatttcccatctgcgccttggtgcgcacacatggtttgtgtttgcggtgcgcggagggagggggcagggccgtgtgtcccactgcaaacaattataaatgaacaagagcaac

SEQ ID NO: 8779 - DNA, 600 bp, Chicken  19866894203764_2
tcgctctgtggggagagctctccctttatcagagagcccctatggagtgctgggcgcacccttatggggcactgggaaggtgaaaactcaccctactgtctccttatgtgatggtgttggggaagttgggttcgcaatgggtttctcatgtaggaaagggctgggcagcgctgttagggctctgagggctggggacgaggctggagcatccctgtggcacctgtgrggtctgtagggctgctgatgggggctgatggggaagtagagcgttgcaatgctatcataggctgagccaaagtkatggyggtgagctcagsctgaaagcacccagcgctcacgtggggrgcagagatgggagcagggcgtgcactgagcagtccccgtgctctgcaccatgcaggctcatgggggaagcatttcccatctgcgccttggtgcgcacacatggtttgtgtttgcggtgcgcggagggagggggcagggccgtgtgtcccactgcaaacaattataaatgaacaagagcaacaacaacaaacccgaaataaatcaccgagcaaacgctctctgcttctggctgcctctgcatgaagatgaatgtgg

SEQ ID NO: 8780 - DNA, 600 bp, Chicken  19866894203764_3
ctgtggggagagctctccctttatcagagagcccctatggagtgctgggcgcacccttatggggcactgggaaggtgaaaactcaccctactgtctccttatgtgatggtgttggggaagttgggttcgcaatgggtttctcatgtaggaaagggctgggcagcgctgttagggctctgagggctggggacgaggctggagcatccctgtggcacctgtgrggtctgtagggctgctgatgggggctgatggggaagtagagcgttgcaatgctatcataggctgagccaaagtkatggyggtgagctcagsctgaaagcacccagcgctcacgtggggrgcagagatgggagcagggcgtgcactgagcagtccccgtgctctgcaccatgcaggctcatgggggaagcatttcccatctgcgccttggtgcgcacacatggtttgtgtttgcggtgcgcggagggagggggcagggccgtgtgtcccactgcaaacaattataaatgaacaagagcaacaacaacaaacccgaaataaatcaccgagcaaacgctctctgcttctggctgcctctgcatgaagatgaatgtggaaacc

SEQ ID NO: 8781 - DNA, 600 bp, Chicken  19866894203764_4
ctctccctttatcagagagcccctatggagtgctgggcgcacccttatggggcactgggaaggtgaaaactcaccctactgtctccttatgtgatggtgttggggaagttgggttcgcaatgggtttctcatgtaggaaagggctgggcagcgctgttagggctctgagggctggggacgaggctggagcatccctgtggcacctgtgrggtctgtagggctgctgatgggggctgatggggaagtagagcgttgcaatgctatcataggctgagccaaagtkatggyggtgagctcagsctgaaagcacccagcgctcacgtggggrgcagagatgggagcagggcgtgcactgagcagtccccgtgctctgcaccatgcaggctcatgggggaagcatttcccatctgcgccttggtgcgcacacatggtttgtgtttgcggtgcgcggagggagggggcagggccgtgtgtcccactgcaaacaattataaatgaacaagagcaacaacaacaaacccgaaataaatcaccgagcaaacgctctctgcttctggctgcctctgcatgaagatgaatgtggaaacccagccctggtgc

SEQ ID NO: 8782 - DNA, 600 bp, Chicken  19866894203764_5
agtgctgggcgcacccttatggggcactgggaaggtgaaaactcaccctactgtctccttatgtgatggtgttggggaagttgggttcgcaatgggtttctcatgtaggaaagggctgggcagcgctgttagggctctgagggctggggacgaggctggagcatccctgtggcacctgtgrggtctgtagggctgctgatgggggctgatggggaagtagagcgttgcaatgctatcataggctgagccaaagtkatggyggtgagctcagsctgaaagcacccagcgctcacgtggggrgcagagatgggagcagggcgtgcactgagcagtccccgtgctctgcaccatgcaggctcatgggggaagcatttcccatctgcgccttggtgcgcacacatggtttgtgtttgcggtgcgcggagggagggggcagggccgtgtgtcccactgcaaacaattataaatgaacaagagcaacaacaacaaacccgaaataaatcaccgagcaaacgctctctgcttctggctgcctctgcatgaagatgaatgtggaaacccagccctggtgcaaggcaggtccatgtgattgcttcccgt

SEQ ID NO: 8783 - DNA, 599 bp, Chicken  19866894203767_1
  misc_feature (1)..(63): n is any nucleotide
nnnnnnnnnnnnnnnnnnnnnnnnnnnnnnnnnnnnnnnnnnnnnnnnnnnnnnnnnnnnnnngtgagggatgactcgggaaaaagtgtccctccaaagatcccaaaagaaggaatggaggagcccgagggtaagtcccttgtgcccatggtgtgggagataacagtggtatcccggcttgctggctggaggtactgcacccctaaagatttcttctggcccctgagtgcattttctgtagaggtatggctggcttgcttcagtgtgtccagcgggtggtccacctgagatatgtagccyrtttggttcaggacactgtttctctgtcactgatctcctgcccctgtgcttttccttagcggagtggctgaaaccagtcgctgcctacgtgttgcaagctggcatcggccaagctagggcagagatcttccacaagcagattgtccagaatgggggatgtgtacacaaccgtctctgctcggaggtgacgcacgtcattgtagctgaagatatggactgtgatcgggccttccggctcctgaaattagccaagctgcctttcgaggttgcagctggtgaaggcatcctggctcagtgat

SEQ ID NO: 8784 - DNA, 599 bp, Chicken  19866894203767_2
  misc_feature (1)..(62): n is any nucleotide
nnnnnnnnnnnnnnnnnnnnnnnnnnnnnnnnnnnnnnnnnnnnnnnnnnnnnnnnnnnnnngtgagggatgactcgggaaaaagtgtccctccaaagatcccaaaagaaggaatggaggagcccgagggtaagtcccttgtgcccatggtgtgggagataacagtggtatcccggcttgctggctggaggtactgcacccctaaagatttcttctggcccctgagtgcattttctgtagaggtatggctggcttgcttcagtgtgtccagcgggtggtccacctgagatatgtagccyrtttggttcaggacactgtttctctgtcactgatctcctgcccctgtgcttttccttagcggagtggctgaaaccagtcgctgcctacgtgttgcaagctggcatcggccaagctagggcagagatcttccacaagcagattgtccagaatgggggatgtgtacacaaccgtctctgctcggaggtgacgcacgtcattgtagctgaagatatggactgtgatcgggccttccggctcctgaaattagccaagctgcctttcgaggttgcagctggtgaaggcatcctggctcagtgatt

SEQ ID NO: 8785 - DNA, 540 bp, Chicken  19866894203768_1
catgggctatttacagaccaaactttgaaactaaatatcagtgccaagatgccagacccctctgagagaggctggaggcttcccagccacacgttctgcgggaggggagcagaggaagagctgctccggtggctgccggccaggcattatgtgaccagagcgcccagcatcctggttgtccctattttaggaagcccgatgacttcagagccagctgacgtcccctgacctactcgccaccaagtgagcctgctgctggctggcctgcagctcgcccgtgtgctgctgcttcaaactcaragcttccatttgcacatggccgcttacagggcacggacccgctggcacccagcatccaaaacgtcacaaagcgatgctcttaggccagcaggagaaaacaaacctacctctcccacaagccatatgctgctgcttcagaaccacaaacaacaccagcaaccctctgtactgatgccagcgatccggcaccaggcacccatctcagtgcaggagcaggggaagactgcagctgtgggctgc

SEQ ID NO: 8786 - DNA, 600 bp, Chicken  19866894203771_1
gaatgtaaaaatctcatggcataaataatttttagtactggcatatagaagaggggttttctgctttgagaaacgtgtctgtggtcactcagtctggtaggacagcatgcttcttagtcaccttttaatgtaagctgttaaactttgaaaagctttatcagctgtatctcactaacaaaaaactgtggcacttgtaaacttctaaaccaagtgtcaaaagcttcagatatctgagttgtactgatacctaaacactcagctgtggttagaaaatacagtttttgtgctcagaggaaaggwcaagctgtaggcaaacttgcgcagaaaattctgggaagatactgagagctmacagtaaggaaggttgtccagaagtgcaatgttcagtttgtgtgtacagctctcagctttcctttcagaagtaaccactgtctgacattcttgctttgtcctaagaactgatatctcctaatggttccaaagcactggcaattgcagatacggtaccttgatagaagtggtggaacttgtccaagcactgtgtgaacatatcatggctaaaaatgaatatcgaaagtccagagtccttacctggtcaat

SEQ ID NO: 8787 - DNA, 600 bp, Chicken  19866894203771_2
aggggttttctgctttgagaaacgtgtctgtggtcactcagtctggtaggacagcatgcttcttagtcaccttttaatgtaagctgttaaactttgaaaagctttatcagctgtatctcactaacaaaaaactgtggcacttgtaaacttctaaaccaagtgtcaaaagcttcagatatctgagttgtactgatacctaaacactcagctgtggttagaaaatacagtttttgtgctcagaggaaaggwcaagctgtaggcaaacttgcgcagaaaattctgggaagatactgagagctmacagtaaggaaggttgtccagaagtgcaatgttcagtttgtgtgtacagctctcagctttcctttcagaagtaaccactgtctgacattcttgctttgtcctaagaactgatatctcctaatggttccaaagcactggcaattgcagatacggtaccttgatagaagtggtggaacttgtccaagcactgtgtgaacatatcatggctaaaaatgaatatcgaaagtccagagtccttacctggtcaatgcttattatgggtaggaaaacatttaactcatgcttgatgaccatgaaatg

SEQ ID NO: 8788 - DNA, 599 bp, Chicken  19866894203773_1
  misc_feature (1)..(168): n is any nucleotide
nnnnnnnnnnnnnnnnnnnnnnnnnnnnnnnnnnnnnnnnnnnnnnnnnnnnnnnnnnnnnnnnnnnnnnnnnnnnnnnnnnnnnnnnnnnnnnnnnnnnnnnnnnnnnnnnnnnnnnnnnnnnnnnnnnnnnnnnnnnnnnnnnnnnnnnnnnnnnnnnnnnnnnnncagactttccccagttacattgttcccagttctgtattaccttgggaaatggcaggagagctcttctactgtgcatgaattagtggggtgacagtgcagttttaattagcggagggtacttacatatagagyctctatactctggagacatagtctgaatcacaaagcagtccctgtagcagagtttacatattttgattgaagtgaatcttttcctcagaaataggctgtttctcaacygagcacagatacgcagggacaagttacaagctattacaaattcagagagaatacctagccctgcatcacagtttttcttcacagagcatttttaactgcttcttttcaatcaaagctgtcaaagtgatcttgcagagcccacagtaaaagcaaagtgaacaagtggggcttctttactacagtctcattga

SEQ ID NO: 8789 - DNA, 599 bp, Chicken  19866894203773_2
  misc_feature (1)..(60): n is any nucleotide
nnnnnnnnnnnnnnnnnnnnnnnnnnnnnnnnnnnnnnnnnnnnnnnnnnnnnnnnnnnncagactttccccagttacattgttcccagttctgtattaccttgggaaatggcaggagagctcttctactgtgcatgaattagtggggtgacagtgcagttttaattagcggagggtacttacatatagagyctctatactctggagacatagtctgaatcacaaagcagtccctgtagcagagtttacatattttgattgaagtgaatcttttcctcagaaataggctgtttctcaacygagcacagatacgcagggacaagttacaagctattacaaattcagagagaatacctagccctgcatcacagtttttcttcacagagcatttttaactgcttcttttcaatcaaagctgtcaaagtgatcttgcagagcccacagtaaaagcaaagtgaacaagtggggcttctttactacagtctcattgaacagaaagatcaatttctgttttggcagccagtttagctccctgaagccaatggagaaatctcattgctttcagcatggaattggatcagacttatggtgagctctct

SEQ ID NO: 8790 - DNA, 600 bp, Chicken  19866894203777_1
ctgaagctgctgtggctgccaaggcaaaacacagaagggagaattatcctcccagtacctatgcctaagtatatgcagtgtaatgatgctttagctcactttagaagttgtgattccttctacactagtgggataacatatcattgctccatcgtcacaacacagatgctgtgatgtatctgggaagacttcacgttgatgcctataaatcccatgttatgactgcagcagcagaaaacggtgtttagtattaatgctgctttcctggaatacatttaaaaggcattaagagagaacatstctaggagctctccagaatctttgtcaaaacactgtcaagacaaaaaaacatatgtaatgctgaaggaagcgtgtcctatctcagttgcaaagaataccatggatcatcaaagcaggctgttacatccatcaacaattctccttgcattwgggaactcttgatgtatctatytggccaaggaagctactgctgtggttgcgttcactcccctgtgtggccacagcacagtgcactgcttgggatttcagcactgccagtaaacattcagtatacatttgtgtttgcttacaaatttaaga

SEQ ID NO: 8791 - DNA, 600 bp, Chicken  19866894203777_2
atcgtcacaacacagatgctgtgatgtatctgggaagacttcacgttgatgcctataaatcccatgttatgactgcagcagcagaaaacggtgtttagtattaatgctgctttcctggaatacatttaaaaggcattaagagagaacatstctaggagctctccagaatctttgtcaaaacactgtcaagacaaaaaaacatatgtaatgctgaaggaagcgtgtcctatctcagttgcaaagaataccatggatcatcaaagcaggctgttacatccatcaacaattctccttgcattwgggaactcttgatgtatctatytggccaaggaagctactgctgtggttgcgttcactcccctgtgtggccacagcacagtgcactgcttgggatttcagcactgccagtaaacattcagtatacatttgtgtttgcttacaaatttaagaagtaaaatgattttcttcatgtatgcttcccagctgccaaaattctttttaaagtctgcattttggggtaaagctatttcaaaatatctttgaaaatcattataaatgtaatgataaaccaaaacatgcttaaggaaaacaaagctcccc

SEQ ID NO: 8792 - DNA, 600 bp, Chicken  19866894203777_3
gatgtatctgggaagacttcacgttgatgcctataaatcccatgttatgactgcagcagcagaaaacggtgtttagtattaatgctgctttcctggaatacatttaaaaggcattaagagagaacatstctaggagctctccagaatctttgtcaaaacactgtcaagacaaaaaaacatatgtaatgctgaaggaagcgtgtcctatctcagttgcaaagaataccatggatcatcaaagcaggctgttacatccatcaacaattctccttgcattwgggaactcttgatgtatctatytggccaaggaagctactgctgtggttgcgttcactcccctgtgtggccacagcacagtgcactgcttgggatttcagcactgccagtaaacattcagtatacatttgtgtttgcttacaaatttaagaagtaaaatgattttcttcatgtatgcttcccagctgccaaaattctttttaaagtctgcattttggggtaaagctatttcaaaatatctttgaaaatcattataaatgtaatgataaaccaaaacatgcttaaggaaaacaaagctccccctagctaatccacatcaatgct

SEQ ID NO: 8793 - DNA, 600 bp, Chicken  19866894203780_1
ttgccagtagctgctttgagtggaaatcaagtgatgcaaagaaccttaactgaggcaaatcccattccgagtgagggactggtacactgttgctgagtccctgtctaattagctccagcagcctccgtgcccgtgcttcaattagtacacggtaattgtaatttcactctaaccttatttttgatctcacataatgcctcaggttggataaacttttttcctcctgtcagtggggagttggaagcagtgagttagaagggccccccagacctcgccaggcagctgctgttcctgctatgyagaaatgaatgcttcacccttcagctacagctaaattagaaatctttgagctcctaatcatttccgatagtttggcctaattgaatctaagtgcttttgcattcaaactagaatgctcagctgggctgaagctggagagctgtgactctgttgtgcagccctggcagcaccagccctccccagcaccaacaggtgcctccacgtgggtttggggagtgtgactcaggagtcagcagggtgagagctgtgctgaggtcatgacagcactcagccaaagctgcccrggttctcccatctggg

SEQ ID NO: 8794 - DNA, 600 bp, Chicken  19866894203780_2
gctgttcctgctatgyagaaatgaatgcttcacccttcagctacagctaaattagaaatctttgagctcctaatcatttccgatagtttggcctaattgaatctaagtgcttttgcattcaaactagaatgctcagctgggctgaagctggagagctgtgactctgttgtgcagccctggcagcaccagccctccccagcaccaacaggtgcctccacgtgggtttggggagtgtgactcaggagtcagcagggtgagagctgtgctgaggtcatgacagcactcagccaaagctgcccrggttctcccatctgggtctgccggaggagttgctgctgtcttttccctaaatatagcaaagccattggcgaaataccattactttccctaataaatcctcatcttacaggcttctgtagtagggcaacacatgccattcaggattgattcatactcagtcttttttaattattattttttatgaattctgctgttctctctaacgttcaggcaggaagaagcgacgtttgcatcacatctctattcagaagcctcttctaagaacaccacacaactgctgctctgtgtagcatctgctac

SEQ ID NO: 8795 - DNA, 600 bp, Chicken  19866894203782_1
catctttatttactattttatatatttctagagcagtgttcctctctgtaactagagtccagccttatccttgaacaaatgattgtccagaattaagtctttcttaaaatgtaatccaaatgtgtgggaagtttgttttttagtagtcattttagtctttcattagactaagtagataggtcattagattctaatttgagaaaccagactatttgtataaacagtctgaaagtggctgaaacaataaaggtcagttttgtgtaaggtatttagttcatgcatttattagaacaaaataartggtagaaaaatagcatttcagaagaattatttaaagacgaggtggactcctgaagactttccacctttcctcatttgctagtttagacaattcagtcaacactgtcattaatatgaaaatattcagcaactgtcatttttttttcccattgcatttgctaagttttcacaatatctaagcaaaaggagaacttaagtggtttcctagaaattgataggactgtggcttatcttactgaaataaggtgtggttctgaatacaaacttttatttcatattcttaacaaagaagtttgattt

SEQ ID NO: 8796 - DNA, 600 bp, Chicken  19866894203787_1
gagtgatcagattgtcacagagcacctgcagaccagggatattcctctccatgccaagacgaacaagggacagagcacaatccacctggaattaaaaatcctgctcaacaaccatttgccaaaaaataacttcaagtctagtttacattctctttgtgtgcttattttctttcactattctctttgtttaatgggcaattctaagttcctagaatattttgttgcctatatattccaatatggatcgctattctcagctttataaaaccataaaaaatgcttagtcttggtggatgacgkcatagaccttttgcaccacatgtgccctcctgatgcacatgatgtagggaaatactatttttgattcattgctataggttgtacagaattaaggtacctcaactcactccatgggttataaagaattgcttgaaactaaatttatcagttaaatgactgaagttacacgtacatctctaaactggagagacatagatttgaagggtggactattcaatggataaggagttagctggaaggtcacagccagagggttgtggttaatggctctatgtccaggtagaggctggtaatgaacac

SEQ ID NO: 8797 - DNA, 600 bp, Chicken  19866894203797_1
atgttctaccaccgaaaaaaaaaatcagaggaaacagatgttaagctctccagcatcaggaaattatctctttcatgagagtacagttacttcagtgtatttaggtcaaagaaatagcgagagaatcgtgacttctcccccctttctgtttgtgtctccgctgacatttcagcccctcggtgctgctccaaaggaccgactgcaaagcagtgctcacgttcctgcagcacgtacccagatgcaggagcctgctgtgctccgggccctgcctgcccagccccaactgcagcctcaaagacrttcagcatctcctgcgcatgggacaagatacgtgctgtgctgctctcacatggatgggtgccgtggtactacagcttgcattttttatttttttttttttaatagaggtcaaaggagcaaggagaagagagccatctgctaaagggatgtccaaccttccggcactggtctccccgaggagcgctgagcgagtgcctataggaagtgaccatagaatttaaccagcattttacatgctctgcaaaacgtattacgtgggaagttaaactcctcattaggaggcaggaggtgggcaggaga

SEQ ID NO: 8798 - DNA, 600 bp, Chicken  19866894203797_2
ggacagctcctactgaaacaccgagtacctactcagtagcagaagggaatctgcagcaaaggtctcgctctatcactgacgatgacctaccagacaagggagcgctaagcaaacatgctgctttccctgtggcagcatgcaactaccccacgtggctttcactggtttaagccaaagcttttacagtactggaactgcatttgtgtttctgttaattcagtattcaccaggcagacggatggatgcacagagagctccatccctgtattcataaggacagaactcaaaacttcagttcgrgtaaatcagttcactcatgcataatttaaacattacttccttcctatttcagggagctttagagtttgtgcgatggctaaacacaatgaaattagaacaggagactcattttgcccgcagccaagggacagagttgctcaactgcatctgtcagataaactggacttgtgcctgtgctgycagaggtgggaccagtttgctccatgccagttgtgcggaagggatccatgagaattatcaagtctacacaggactacctaaaaattaaactgcgtgcctgaaagcatcgtccaaatgctt

SEQ ID NO: 8799 - DNA, 600 bp, Chicken  19866894203797_3
ttacagtactggaactgcatttgtgtttctgttaattcagtattcaccaggcagacggatggatgcacagagagctccatccctgtattcataaggacagaactcaaaacttcagttcgrgtaaatcagttcactcatgcataatttaaacattacttccttcctatttcagggagctttagagtttgtgcgatggctaaacacaatgaaattagaacaggagactcattttgcccgcagccaagggacagagttgctcaactgcatctgtcagataaactggacttgtgcctgtgctgycagaggtgggaccagtttgctccatgccagttgtgcggaagggatccatgagaattatcaagtctacacaggactacctaaaaattaaactgcgtgcctgaaagcatcgtccaaatgcttcttgaactcaaggcaggcccagtgctgtgcccactgccctggaacaagtcactgttggaaggagctgaacgacatcaagccaccagctgtgtccttcgtgaggatgcagggaggcaatgacctcatgatgctcagcgcatgactgggcattcccaattagtccatttagtagagatccct

SEQ ID NO: 8800 - DNA, 599 bp, Chicken  19866894203798_1
  misc_feature (1)..(108): n is any nucleotide
nnnnnnnnnnnnnnnnnnnnnnnnnnnnnnnnnnnnnnnnnnnnnnnnnnnnnnnnnnnnnnnnnnnnnnnnnnnnnnnnnnnnnnnnnnnnnnnnnnnnnnnnnnnntattcggagttagattgttgcagtagggtgtcagtgtcagaacacttttcttgtttgatgcgttctgtgtcttatgctgtagtgagccacacacataactgagtgcttattacagaaatgcagctttcttgtcctttgatttattgttggaaatctgctgcattagactgaaagttagtatacccttctcarctgagaagctttggctgcagagaacttctgttcaataattttcattttaattcattattgcaggtagcatgccattcttgtatattcagagttttgcgaaaaaatatgtagacttccatggctttggtagctgaatgtattcacattttattctaaaacttgtagaaagtatttgtatgtatatatttcagtatgtctttaattgtggtccagtatttcttaggccaacagtactgtactttcgtggttgatgttttgggagagtctggcagtttgttgaaagatgcactggactagca

SEQ ID NO: 8801 - DNA, 599 bp, Chicken  19866894203799_1
  misc_feature (1)..(114): n is any nucleotide
nnnnnnnnnnnnnnnnnnnnnnnnnnnnnnnnnnnnnnnnnnnnnnnnnnnnnnnnnnnnnnnnnnnnnnnnnnnnnnnnnnnnnnnnnnnnnnnnnnnnnnnnnnnnnnnnnnccttttggtttgtggcctttgtctcctgcatttgcataaagccgtgctggggcccgcttcaaattcctatctgtcagttggtaatgtaagaatgaacatacagcagactaattgaaaacacagaatgaatgttacaggttagctagccaatgtgaatttagcctttctttatatttttatttaaaygatttctccctcctcccatcatccgtttgcacccttaagatcaccaatggcagctgaacgcattggtagaaagagtgcagaataggacatccagaggccactagacacctagtatcatcaagtaacctgatgcccttttgtaggctttaatcacattatgcaactactttttgtgagctgaaatggactctgcaacaccaaacctcataatttacagctagttgcaaaaaagttcacatcaatagatttctacgtatttccaattcccaggaaaaagtgcaatacagaaagaaccacct

SEQ ID NO: 8802 - DNA, 600 bp, Chicken  19866894203799_2
atacctccttttcctttctttatctctgcaaccagtgatcccacttcttccaaaaagccctctaaggccttcacttagcagacatcaaagtatttcaaagatccctaaatgcagctacctccagatttcacaatccccagcatcgactcaggcacacgtctcacatgtatgaattttgaattggacagcaaagcaagtgaagcaatacagcagctacaagaagcaacacctatataggaagcatttgcagctggagacacagacacatgaaactaacactgaggcatgcactaaggagargtgccttctggctgtagcaccatagctgctgtgtgaccttcttttcctacttttagcctatggtaccagttaatgtttaagttagacaaacagagattactgtgagaattaagtcaaacaacacaacgtccaatacctggagaacctcaatggcaggggacatagaatatgaatttccaagtgctgaagaaaggagaggagggaaaacagaggcacaaaaggcaacactctgatagggaggcactgggcagcttgcttagggacggcagaatggaagaaggaatcaatatgctcctgtga

SEQ ID NO: 8803 - DNA, 600 bp, Chicken  19866894203799_3
gttaaaacttcatgaattacctctttgctctgtagtgcactgagctatttcacagttccttgaaagttttaacatctctttaggatgcctcaaaacactgtcacaaccttcaggcacataaacatccataacctcatagaaactggcctatatgaaactcaacatgaacttatagacactaaaagtaatagaataactacttcaaaattgatacattatctactaagttaaattcccatcccccaaccccagcatgaatactttgtgataaataaagacacacaacaaagctggcaacawtgacaactaaatccaaggatccactgtgatgcagaggaaaaaaatcaacactgctttttaaaccaaatgtctcctcataatccgcacttccctgtaatgtatttcagcaagtctgcaatcctcacttcaaaagatgatataattttcccaagcctctccctcaagaggtgtgtggtttttattatagtttacttaaaagcagagacttggaatcaaacgctggcaaacacattacacacttttagaaacttaatgctggcgtttctttttgttggtttggggtttcttttgtcaactgtt

SEQ ID NO: 8804 - DNA, 577 bp, Chicken  19866894203800_1
tgtgaatgaaacaaagttgtgttgctgaattcctccatgtggaaaaaatgacacccactgacagtcactgacacttgctgaagcattatagagaccaaacagtggatgtgtgcacagtgaggtggtgggtggtacatttcaagagtggtgacagtgacagtgggtcaccttcactagtgaatttttttagaagggcagcatgcaggcacttgttcattgctgatgaaaactcgtaactactgttggcgactgttgaaaactagtgttctgtagctgagaatgtgctctatcaaatactgktaatgtgctctctctgtctgttgtatctggttccatggaaataaataggagacattacttttggagcagtctatgtaccagtcagtccccaatgaactgcctctgacaccatccctccgtgcctgtgtggctcagcatcaaatcactacacacttactaaggggcaacacaattcaggtgtgcctcagctcactgcttttgagtccccacctgccttaggcattggtctggaacaaatagaagtttcttaaatctagctgagtaacaccacaattta

SEQ ID NO: 8805 - DNA, 599 bp, Chicken  19866894203808_1
  misc_feature (1)..(2): n is any nucleotide
nnatcatcactgggcatttctcaaacacaagggctttcacctctgtatccgtatgtatatatttatagaagcagcactgaaaaagaaaagctttttcaatgctgcttattttgaacttagatctgatgtactttggtttagattctagatgggaacttttattgatcaaatacactactgaaaccttcagaaaaacacaggttttctaacttggaaaatgaaacttaaacaatagaaaacagaaaatcccccctggaagttatcttgagaaatgccaagtttcttattgtccaagaagcrgttgctgatcatgataaggttacagaggacacagttttcagtcctttccaaaatgcaaaatgtagagaaatcaagagcttcagaatattagaccttttcccrttgcaagaaaaggaatgaaattcacaatgcagtgaaaaagttgaaaatactcacctacatggraagtgtgactctgttcatttgcctyttttgcaggaccgatcatagaggttgggtgaaaagaaaagtctgagacagatttgtaagtctaactattaaaagattgagtagaaattgaagtgaaattcagtccttga

SEQ ID NO: 8806 - DNA, 600 bp, Chicken  19866894203808_2
tgcttattttgaacttagatctgatgtactttggtttagattctagatgggaacttttattgatcaaatacactactgaaaccttcagaaaaacacaggttttctaacttggaaaatgaaacttaaacaatagaaaacagaaaatcccccctggaagttatcttgagaaatgccaagtttcttattgtccaagaagcrgttgctgatcatgataaggttacagaggacacagttttcagtcctttccaaaatgcaaaatgtagagaaatcaagagcttcagaatattagaccttttcccrttgcaagaaaaggaatgaaattcacaatgcagtgaaaaagttgaaaatactcacctacatggraagtgtgactctgttcatttgcctyttttgcaggaccgatcatagaggttgggtgaaaagaaaagtctgagacagatttgtaagtctaactattaaaagattgagtagaaattgaagtgaaattcagtccttgagttttccaacaaaaagcttaacgtgttttagaatagaaaacgaggtctgacacaattagctttattagtcatgtcctgtgaaggatgccatatttatccatga

SEQ ID NO: 8807 - DNA, 600 bp, Chicken  19866894203808_3
tcaaatacactactgaaaccttcagaaaaacacaggttttctaacttggaaaatgaaacttaaacaatagaaaacagaaaatcccccctggaagttatcttgagaaatgccaagtttcttattgtccaagaagcrgttgctgatcatgataaggttacagaggacacagttttcagtcctttccaaaatgcaaaatgtagagaaatcaagagcttcagaatattagaccttttcccrttgcaagaaaaggaatgaaattcacaatgcagtgaaaaagttgaaaatactcacctacatggraagtgtgactctgttcatttgcctyttttgcaggaccgatcatagaggttgggtgaaaagaaaagtctgagacagatttgtaagtctaactattaaaagattgagtagaaattgaagtgaaattcagtccttgagttttccaacaaaaagcttaacgtgttttagaatagaaaacgaggtctgacacaattagctttattagtcatgtcctgtgaaggatgccatatttatccatgacaagttaatcagataatgtttcttacctcactgaaggtacaggaaactatacttacagattaa

SEQ ID NO: 8808 - DNA, 600 bp, Chicken  19866894203808_4
aaaaacacaggttttctaacttggaaaatgaaacttaaacaatagaaaacagaaaatcccccctggaagttatcttgagaaatgccaagtttcttattgtccaagaagcrgttgctgatcatgataaggttacagaggacacagttttcagtcctttccaaaatgcaaaatgtagagaaatcaagagcttcagaatattagaccttttcccrttgcaagaaaaggaatgaaattcacaatgcagtgaaaaagttgaaaatactcacctacatggraagtgtgactctgttcatttgcctyttttgcaggaccgatcatagaggttgggtgaaaagaaaagtctgagacagatttgtaagtctaactattaaaagattgagtagaaattgaagtgaaattcagtccttgagttttccaacaaaaagcttaacgtgttttagaatagaaaacgaggtctgacacaattagctttattagtcatgtcctgtgaaggatgccatatttatccatgacaagttaatcagataatgtttcttacctcactgaaggtacaggaaactatacttacagattaaatattgtattatcagtctgagatgt

SEQ ID NO: 8809 - DNA, 599 bp, Chicken  19866894203813_1
  misc_feature (1)..(21): n is any nucleotide
nnnnnnnnnnnnnnnnnnnnnctcacagtgaagaatttcttcttaatatctagtctaaatctaccctattctagtttaaaactgttgccctgtcagaacatgcccttgtaagaagtctctccacagctttcccgtaggccccttcaggtgctggaaggctcatgatgccgctttctctccttgctgtttctgaactcagaagttttctttctgctttccttctcttcccccacgctgatgttacttttgactgtctccttgcttcccccagtgaagaacatggatgctttctatagctcrtcatcggagaataatgttatgaaattgaaactaagggtgcactgaaaayttgcaaatatttaagatgatctccaggcaagcattcactttgtatgcctacaagatttcttttagctaagagtaatgccaaaagctcaacaacagcaaagacagcctttggatgtgttagagaaactgctattggccctttctacaatgcattacaaacacattgtcaaaacccatgttttcttcattcaatactagcttcatctctaaccagtgccaaaaaagagactctgaagagtgctgtgcctgat

SEQ ID NO: 8810 - DNA, 600 bp, Chicken  19866894203813_2
ctagtctaaatctaccctattctagtttaaaactgttgccctgtcagaacatgcccttgtaagaagtctctccacagctttcccgtaggccccttcaggtgctggaaggctcatgatgccgctttctctccttgctgtttctgaactcagaagttttctttctgctttccttctcttcccccacgctgatgttacttttgactgtctccttgcttcccccagtgaagaacatggatgctttctatagctcrtcatcggagaataatgttatgaaattgaaactaagggtgcactgaaaayttgcaaatatttaagatgatctccaggcaagcattcactttgtatgcctacaagatttcttttagctaagagtaatgccaaaagctcaacaacagcaaagacagcctttggatgtgttagagaaactgctattggccctttctacaatgcattacaaacacattgtcaaaacccatgttttcttcattcaatactagcttcatctctaaccagtgccaaaaaagagactctgaagagtgctgtgcctgattggctgttgtctgtaacatgtcatctttaccaytttcttagatttctcac

SEQ ID NO: 8811 - DNA, 600 bp, Chicken  19866894203813_3
aagggtgcactgaaaayttgcaaatatttaagatgatctccaggcaagcattcactttgtatgcctacaagatttcttttagctaagagtaatgccaaaagctcaacaacagcaaagacagcctttggatgtgttagagaaactgctattggccctttctacaatgcattacaaacacattgtcaaaacccatgttttcttcattcaatactagcttcatctctaaccagtgccaaaaaagagactctgaagagtgctgtgcctgattggctgttgtctgtaacatgtcatctttaccaytttcttagatttctcactctmccttacagatttggtcaaggacttagtaagagcccagttaactgaaagctgagtgatagttttgttcccagctgctttgattatgcagttcttaaattgctttcataacaaaatattcctgctaaataccttttttttaaacaatgttacactcagcataaattatagcattttgttccattgcattattaaaaggagctttctacagaatgcattctgtatttgacacttgaaatgtgattgtaaatcacgctgtttgaatggcagctcacagtggca

SEQ ID NO: 8812 - DNA, 600 bp, Chicken  19866894203813_4
aaatatttaagatgatctccaggcaagcattcactttgtatgcctacaagatttcttttagctaagagtaatgccaaaagctcaacaacagcaaagacagcctttggatgtgttagagaaactgctattggccctttctacaatgcattacaaacacattgtcaaaacccatgttttcttcattcaatactagcttcatctctaaccagtgccaaaaaagagactctgaagagtgctgtgcctgattggctgttgtctgtaacatgtcatctttaccaytttcttagatttctcactctmccttacagatttggtcaaggacttagtaagagcccagttaactgaaagctgagtgatagttttgttcccagctgctttgattatgcagttcttaaattgctttcataacaaaatattcctgctaaataccttttttttaaacaatgttacactcagcataaattatagcattttgttccattgcattattaaaaggagctttctacagaatgcattctgtatttgacacttgaaatgtgattgtaaatcacgctgtttgaatggcagctcacagtggcactgaagttattgtcttccttt

SEQ ID NO: 8813 - DNA, 600 bp, Chicken  19866894203817_1
aaacagatttaagaattaggaaaatgagaggagaggagaggagaggagaggagaggagaaaggaaaagaaaggaaaaggaggaagaatgctgtatactaaagggatttgcataaattatacgttcataagtgggtttactggctcacaaatagcaaataagatcccctagcactcagacaatgagaagcacccgctggtggaaccacagtagtatcattatgttgatgcatttcattctccaaatgaaatggtgggcttttagctttagggtcatttttttctaaggaatttcaaggacrcattaaatgggatggaggaagggaggaaatggtcaggaagaacacgccctccagcacagttttcttcagggctgaacatgaaatccagggtttccaatattgtttcatatcttgcaggacaaatagacttcatttttataatgaaattccatatttctagataactatatatttcatgctaatgctcttggctatgaccaacaggcagagtgcacgacagagatttcagtaagaacttttcattaacctgtctgaacaaatgataaaacatatgctggggggacatgtcctgctactctt

SEQ ID NO: 8814 - DNA, 599 bp, Chicken  19866894203821_1
  misc_feature (1)..(58): n is any nucleotide
nnnnnnnnnnnnnnnnnnnnnnnnnnnnnnnnnnnnnnnnnnnnnnnnnnnnnnnnnnacctgttgaaagtgaagcttcagttcatctttgaaaaggtcaggcttctccctcgtgtgtttggaaaaatgaagtattacatcataaagataataaaagtacttgaaaagtgacttagaatcacagtgccaatgccattttcaaggtgagctggtcttgtgtaaatagggcaagcagttccaaagtgagttggtcttgtatgaatagggcaagctgctcttgcactaactcttaaggagttmtttggatttctgtttttcacatgatttctccatttgctatttgaagctatggaaaatgctgccatagcagcttygatgagaggtttcagagctgtgacttaaaggcaagttgcagggctgcaaatagcaggcccatggcactaccaagttaaaggcattgaggtgcaaagcccatctccatgatgggcacaaaagcattggacccarggcacagagacccactgcaacactggcacctccccccttgcaccacgcaggcagctgctttctgctgacacaaatctgtgcatcaaagcagt

SEQ ID NO: 8815 - DNA, 600 bp, Chicken  19866894203821_2
gcttcagttcatctttgaaaaggtcaggcttctccctcgtgtgtttggaaaaatgaagtattacatcataaagataataaaagtacttgaaaagtgacttagaatcacagtgccaatgccattttcaaggtgagctggtcttgtgtaaatagggcaagcagttccaaagtgagttggtcttgtatgaatagggcaagctgctcttgcactaactcttaaggagttmtttggatttctgtttttcacatgatttctccatttgctatttgaagctatggaaaatgctgccatagcagcttygatgagaggtttcagagctgtgacttaaaggcaagttgcagggctgcaaatagcaggcccatggcactaccaagttaaaggcattgaggtgcaaagcccatctccatgatgggcacaaaagcattggacccarggcacagagacccactgcaacactggcacctccccccttgcaccacgcaggcagctgctttctgctgacacaaatctgtgcatcaaagcagtgagtcacagacagatgttttcagtacaaggttgccaatgtggaatgagatcccgaagggaactgaaatgatgcaa

SEQ ID NO: 8816 - DNA, 600 bp, Chicken  19866894203821_3
gctggtcttgtgtaaatagggcaagcagttccaaagtgagttggtcttgtatgaatagggcaagctgctcttgcactaactcttaaggagttmtttggatttctgtttttcacatgatttctccatttgctatttgaagctatggaaaatgctgccatagcagcttygatgagaggtttcagagctgtgacttaaaggcaagttgcagggctgcaaatagcaggcccatggcactaccaagttaaaggcattgaggtgcaaagcccatctccatgatgggcacaaaagcattggacccarggcacagagacccactgcaacactggcacctccccccttgcaccacgcaggcagctgctttctgctgacacaaatctgtgcatcaaagcagtgagtcacagacagatgttttcagtacaaggttgccaatgtggaatgagatcccgaagggaactgaaatgatgcaaacggtgattaaccttcaggtgttctgcaaatcctcctccctacttcagcagtcccacttgaaaggccagaaaatcctggttctactgaattgggtttttgaatgacacgtgctgcagaaagccttgtgacaga

SEQ ID NO: 8817 - DNA, 559 bp, Chicken  19866894203821_4
gttttcagtacaaggttgccaatgtggaatgagatcccgaagggaactgaaatgatgcaaacggtgattaaccttcaggtgttctgcaaatcctcctccctacttcagcagtcccacttgaaaggccagaaaatcctggttctactgaattgggtttttgaatgacacgtgctgcagaaagccttgtgacagatagagattttgactagcagagaaatagaaaattattagccagagtgggtgctctttaacatctttatcagtgacataggcaatgggatcaagtgaacccttgggaaktttgctgatgacatcaagctgaccagtgcagttgactcaatggaaggaagagatgccatctagtgggtcctggacaggtttgagaagtgggcccacaggaaccaaatgagattcaacaaggccaagtgcaagggcttatgaacaggagggagaacaacttcttatactagcaaatagtgataagacacgggggaaaggttttaaactaaaagaggggagatttagagtagaaattacgaggaaattctttactccaaga

SEQ ID NO: 8818 - DNA, 599 bp, Chicken  19866894203822_1
  misc_feature (1)..(171): n is any nucleotide
nnnnnnnnnnnnnnnnnnnnnnnnnnnnnnnnnnnnnnnnnnnnnnnnnnnnnnnnnnnnnnnnnnnnnnnnnnnnnnnnnnnnnnnnnnnnnnnnnnnnnnnnnnnnnnnnnnnnnnnnnnnnnnnnnnnnnnnnnnnnnnnnnnnnnnnnnnnnnnnnnnnnnnnnnnnttttgctaattgtacagataagtacttggcactacttaaaattgtatcacagtaatattgttatctatctaaacactcaattattagagtcaagactgcattatacatgtcttctacttccaaaactasagaattattcagtagatagcaactaaactcagacctcactgttggaccttgactactgtttttcatcatggttaagcccaaacgggtgtctcaagctacagcaatttaaagcaccagctttaaatttgactgtatagattgattgcaatttagtttatatgaagttttgatataaatgacacttcttcaccgatgawtattcagttcagtattagcagtctcamatacagagaataattctcaaccttcttttatctgcatctcttttcccttctcactactgtatctcagtacagctc

SEQ ID NO: 8819 - DNA, 600 bp, Chicken  19866894203822_2
tggcactacttaaaattgtatcacagtaatattgttatctatctaaacactcaattattagagtcaagactgcattatacatgtcttctacttccaaaactasagaattattcagtagatagcaactaaactcagacctcactgttggaccttgactactgtttttcatcatggttaagcccaaacgggtgtctcaagctacagcaatttaaagcaccagctttaaatttgactgtatagattgattgcaatttagtttatatgaagttttgatataaatgacacttcttcaccgatgawtattcagttcagtattagcagtctcamatacagagaataattctcaaccttcttttatctgcatctcttttcccttctcactactgtatctcagtacagctcttttcctgttcctcaacatttccaataacaagcttatatcttcagagctgaaatatgaagaccttgctaatgctttattamcagactgatggtgaaaaatctagtatttycccccatgttaaactggacagtattttaaatgagtaatttgccacagccactttccgtcacagtctcattagacagtaggtattacat

SEQ ID NO: 8820 - DNA, 600 bp, Chicken  19866894203822_3
aatattgttatctatctaaacactcaattattagagtcaagactgcattatacatgtcttctacttccaaaactasagaattattcagtagatagcaactaaactcagacctcactgttggaccttgactactgtttttcatcatggttaagcccaaacgggtgtctcaagctacagcaatttaaagcaccagctttaaatttgactgtatagattgattgcaatttagtttatatgaagttttgatataaatgacacttcttcaccgatgawtattcagttcagtattagcagtctcamatacagagaataattctcaaccttcttttatctgcatctcttttcccttctcactactgtatctcagtacagctcttttcctgttcctcaacatttccaataacaagcttatatcttcagagctgaaatatgaagaccttgctaatgctttattamcagactgatggtgaaaaatctagtatttycccccatgttaaactggacagtattttaaatgagtaatttgccacagccactttccgtcacagtctcattagacagtaggtattacattatggaaagctcaacattgcattaaat

SEQ ID NO: 8821 - DNA, 600 bp, Chicken  19866894203822_4
aacgggtgtctcaagctacagcaatttaaagcaccagctttaaatttgactgtatagattgattgcaatttagtttatatgaagttttgatataaatgacacttcttcaccgatgawtattcagttcagtattagcagtctcamatacagagaataattctcaaccttcttttatctgcatctcttttcccttctcactactgtatctcagtacagctcttttcctgttcctcaacatttccaataacaagcttatatcttcagagctgaaatatgaagaccttgctaatgctttattamcagactgatggtgaaaaatctagtatttycccccatgttaaactggacagtattttaaatgagtaatttgccacagccactttccgtcacagtctcattagacagtaggtattacattatggaaagctcaacattgcattaaatgtcctgatttgtaaatgtttcccaaacttaatttctctctttaacaaggtgatatctcatttgaatgaatagttttcattaagttacttaaattatttgtatttatcattcttacaaatgcatccctcaaagtttctttcagctagaaaccccatt

SEQ ID NO: 8822 - DNA, 600 bp, Chicken  19866894203822_5
agcaccagctttaaatttgactgtatagattgattgcaatttagtttatatgaagttttgatataaatgacacttcttcaccgatgawtattcagttcagtattagcagtctcamatacagagaataattctcaaccttcttttatctgcatctcttttcccttctcactactgtatctcagtacagctcttttcctgttcctcaacatttccaataacaagcttatatcttcagagctgaaatatgaagaccttgctaatgctttattamcagactgatggtgaaaaatctagtatttycccccatgttaaactggacagtattttaaatgagtaatttgccacagccactttccgtcacagtctcattagacagtaggtattacattatggaaagctcaacattgcattaaatgtcctgatttgtaaatgtttcccaaacttaatttctctctttaacaaggtgatatctcatttgaatgaatagttttcattaagttacttaaattatttgtatttatcattcttacaaatgcatccctcaaagtttctttcagctagaaaccccattactgtgggattcattcagacacttcagga

SEQ ID NO: 8823 - DNA, 599 bp, Chicken  19866894203825_1
  misc_feature (1)..(183): n is any nucleotide
nnnnnnnnnnnnnnnnnnnnnnnnnnnnnnnnnnnnnnnnnnnnnnnnnnnnnnnnnnnnnnnnnnnnnnnnnnnnnnnnnnnnnnnnnnnnnnnnnnnnnnnnnnnnnnnnnnnnnnnnnnnnnnnnnnnnnnnnnnnnnnnnnnnnnnnnnnnnnnnnnnnnnnnnnnnnnnnnnnnnnnntttaatcctgtcatatgaaacaaatatcagttgcatagcattactcatcccattgctaagaaaaagaacgcacacatgtgcaggtttgaatttggaaattttaagcagtgaaaaaamcaatgtccccagaagttatattaactgagtgatcattctctgtggctactcgttagcagtttcaccagtcagcctcctggttgtgaatgcaaggaggagaaaggagagagactgcataaagcagaaataaaagtcttctcttgtgatagccaatacatcttcttcagacagaaaaaatggtcccataacatccgtaacaacaatcagtaattgtcattaaaagctctcattatatggagtaagtgtaattagagcatcttgcccgcacagggtgcagcacacagagaatgctacaagga

SEQ ID NO: 8824 - DNA, 600 bp, Chicken  19866894203826_1
atgaatcaaggactgccttgttgtacgaagcagactttaagcaggtcgaaaagatgccataatcttttctagctaaaacaattctatctcttgtggagatcaaggctttcactcacatacgactcaacgtacctaactgaaccaagctctcacgtcctgtgtattctgctcagaggaaacaggcagttaactgaaggtcagcactctcatataactgtctcagtaaaaaaaaaaagataaaatcacaatcaagctactagttatttaagataggaaactatgaggactattgtaggccaygtttaggtcatcagaggaaatattcaaggagtacattcagtacctgaaagacaaaatgttaaccctacactttactgacttgaartcacagaagagaaaccttttttgcatttctatttttgcttacagtttctgcttcctttttttttaggtagacggtaccctgcaccctgaaagacagtctgatgctgtacttcatcattttgctctgtgtacagtttattgcttaagaagcagcttcactatcttttctctagtatgtcaaagtaatctaaaataacacgtgttagcagagatagg

SEQ ID NO: 8825 - DNA, 600 bp, Chicken  19866894203826_2
atctcttgtggagatcaaggctttcactcacatacgactcaacgtacctaactgaaccaagctctcacgtcctgtgtattctgctcagaggaaacaggcagttaactgaaggtcagcactctcatataactgtctcagtaaaaaaaaaaagataaaatcacaatcaagctactagttatttaagataggaaactatgaggactattgtaggccaygtttaggtcatcagaggaaatattcaaggagtacattcagtacctgaaagacaaaatgttaaccctacactttactgacttgaartcacagaagagaaaccttttttgcatttctatttttgcttacagtttctgcttcctttttttttaggtagacggtaccctgcaccctgaaagacagtctgatgctgtacttcatcattttgctctgtgtacagtttattgcttaagaagcagcttcactatcttttctctagtatgtcaaagtaatctaaaataacacgtgttagcagagataggtaaacaggatttactcattaatttatagtgcgtgggatcatacagacatagagaaagatgtagaacattaaggaatgatagttat

SEQ ID NO: 8826 - DNA, 599 bp, Chicken  19866894203829_1
  misc_feature (1)..(183): n is any nucleotide
nnnnnnnnnnnnnnnnnnnnnnnnnnnnnnnnnnnnnnnnnnnnnnnnnnnnnnnnnnnnnnnnnnnnnnnnnnnnnnnnnnnnnnnnnnnnnnnnnnnnnnnnnnnnnnnnnnnnnnnnnnnnnnnnnnnnnnnnnnnnnnnnnnnnnnnnnnnnnnnnnnnnnnnnnnnnnnnnnnnnnnnctaagtcccacccccaaagggatacagacattcccatgtatgctctgtcccaaagaggaccaaagctcctcccccataaaccccacatccccaacgggaacccatctcacccgcacrcgtgggctgagctgcggtgcttcccatccccatcccatcgccgggagctgcgctcacatcctaaacaccccgcgaggacaacgcacagctcttcccaatcccccaaccctaccgagggaggacacccaacaaccagagccccctcccactccacgaaccgccacccaaacagcagcaaacgctgcgcatcacatggyaggacccgggattatcccatcatgtcgctaaaccctcacgcgacccaaggaatgtcccctccctgtgggagcacagaaacccccggcgttccgaagcaggag

SEQ ID NO: 8827 - DNA, 600 bp, Chicken  19866894203829_2
caaagggatacagacattcccatgtatgctctgtcccaaagaggaccaaagctcctcccccataaaccccacatccccaacgggaacccatctcacccgcacrcgtgggctgagctgcggtgcttcccatccccatcccatcgccgggagctgcgctcacatcctaaacaccccgcgaggacaacgcacagctcttcccaatcccccaaccctaccgagggaggacacccaacaaccagagccccctcccactccacgaaccgccacccaaacagcagcaaacgctgcgcatcacatggyaggacccgggattatcccatcatgtcgctaaaccctcacgcgacccaaggaatgtcccctccctgtgggagcacagaaacccccggcgttccgaagcaggaggtgtcagcactcatttctgctgatggtttctatcgctgatcaaacagagacgtaattaacgcaccgggacttcggatggggagctcattttttaggggcatcacggggagtgattagtgaaagcaaaccgcctgaccccgcggttcccatccggaggttctgtgctaatgaggggaggtggagcagggctggaagtcc

SEQ ID NO: 8828 - DNA, 504 bp, Chicken  19866894203834_1
atcaacaatttaagcagcatgtgaaatgaaacttacctaggcgatatagttgactgaagctttatctatgctctgtctcagaatatactgaggctcactcagcagataggaagctttcttcaatttgaaatgcattatgcactctcgtcttgtgatttctttttccacagcgtcttgttcactgctgcttcatcttgtggtgttggtcgtttccaatttatttccaggtatctccaatatttgatatcttccatattcagtatttttgtttattctgccttaatccggcaacagaaaatwacctgtgaactttgcatcttttaaacccccttttttgtccccccctcaaacaaaaaggaaaaaaggaatagaggcaaatgcactgacttcagctaactcgagtgttcagtacccattaaaaattcatttaaagatttagcatccagtaaattccatctgttttctgtcgatgattccaacactgaaaagttggaatgcacgctt

SEQ ID NO: 8829 - DNA, 599 bp, Chicken  19866894203835_1
  misc_feature (1)..(10): n is any nucleotide
nnnnnnnnnntccccaaattgatttatgactacgatactgtagtagtagaagaaaactcaagatgttttttcaataaaaggtgtttctttaactaaaaacctctcaaactcaaagaatttttttaacaaaagaatgaaaagaaaaagaaagctaaataaagttaaaataaaggtttgagacaacaaattcttcagattctcaaagggctactctgagaactgaaagttttataagaaaaatgttctgacacattttatcatttaaaatctattggacaggaagagaaagaaatcatgagwgatggaaaattaattatgagcacagaactgagcctcagtgcttgagtattaggagaaggtcacctctcaaatagagagaaygagtccatacataaactcatgttatcttgtacagagactaattttggataaatacagcatgcttagaactccaagattatccaaacaatgattttcagttgaactccagacaatgttttwttttgttttttttttaaagcatctttaagcattaaatttaaatatttaaaaagataaaataatagggtaccagtttaattcctcaagatcacaagttc

SEQ ID NO: 8830 - DNA, 600 bp, Chicken  19866894203835_2
tgtttctttaactaaaaacctctcaaactcaaagaatttttttaacaaaagaatgaaaagaaaaagaaagctaaataaagttaaaataaaggtttgagacaacaaattcttcagattctcaaagggctactctgagaactgaaagttttataagaaaaatgttctgacacattttatcatttaaaatctattggacaggaagagaaagaaatcatgagwgatggaaaattaattatgagcacagaactgagcctcagtgcttgagtattaggagaaggtcacctctcaaatagagagaaygagtccatacataaactcatgttatcttgtacagagactaattttggataaatacagcatgcttagaactccaagattatccaaacaatgattttcagttgaactccagacaatgttttwttttgttttttttttaaagcatctttaagcattaaatttaaatatttaaaaagataaaataatagggtaccagtttaattcctcaagatcacaagttcaaaaccttccagtttgtttaggataaagattcaaaagaagaggtaatgtgtgatctctccagtggaagcactgtactctttt

SEQ ID NO: 8831 - DNA, 486 bp, Chicken  19866894203835_3
aaagggctactctgagaactgaaagttttataagaaaaatgttctgacacattttatcatttaaaatctattggacaggaagagaaagaaatcatgagwgatggaaaattaattatgagcacagaactgagcctcagtgcttgagtattaggagaaggtcacctctcaaatagagagaaygagtccatacataaactcatgttatcttgtacagagactaattttggataaatacagcatgcttagaactccaagattatccaaacaatgattttcagttgaactccagacaatgttttwttttgttttttttttaaagcatctttaagcattaaatttaaatatttaaaaagataaaataatagggtaccagtttaattcctcaagatcacaagttcaaaaccttccagtttgtttaggataaagattcaaaagaagaggtaatgtgtgatctctccagtggaagcactgtactctttttctcag

SEQ ID NO: 8832 - DNA, 600 bp, Chicken  19866894203839_1
catcctgatccacctgttgggcagttccctcgtggcaaggcagacagctctgacactgttgaggtttggactccaagtgcagcagcgctcagaaagcagagctccccacaccgcatttcccgagcgctccccacaacgcagcaatgtcgcagggcagcactgcacaccactgggggaactgaggcagccccaccatcacccccacccaccacagggagccccacttaaaataaaacaagagcggcaggcgggcaccgacctgcagagcacgagggcatctcacgggcaaaacaacacccrgagaaggagagcgatcagctggggccacatgggcacagccgaggtatttttagcagtattacacagggacaggggattcctaccctgaacatccccgggggtttaaaataggccccggcacttcctcctgtgagcagagggataagcagcggtgctgtgtgcaccccgccacccccagcacccatgggtgggcacacagcaggggtcctgcagcatcccagaccggggggattgaatccccgtcccaccagagcaatgctgcagcaccagcctgtgccagcacgatgcaacacttctgcc

SEQ ID NO: 8833 - DNA, 600 bp, Chicken  19866894203845_1
aactaaacacaatggatcccacattttcagtaagacctctcattttatttccattccagctgcagcccttctaactgaggcccttccagctctagagctttgccaagagaaacatgcagacttgagcagctcaatatttctgaccacaaacaagaagttgtcctctcaagatgtgctgatttttttctagcgagtcttgtgccagacaagaattacacaatgggtcaagcaactcatccatcctctgctcccgaagctgaatttcatgcactctacattaaaaagtcagtagatcttccygaattaagagaggagtgtttgctaagagagtcagaaatatgcagagtgtggtactggcccaaggctggccaataaccaattgtactccaaccttagaaagaagaactccctgccacacagggcatcacagagaaagaactcaacgtaatttttgctgctggtgaaccagaaagcagagtatcagtaaaaaaccaactgtatttgccccatggctcctttcaccaactacctctaaggaaagttctaaatcaaaaaagctatgttctctgaaaactaagcaggtatcctataaggaaaaaa

SEQ ID NO: 8834 - DNA, 600 bp, Chicken  19866894203848_1
ctgtaataaaaaggatcatagttatttccagtagagagtgtaaaatgtgatagctccaaaatagggcccacattgatgtcaattacagatcagctttcccagcagagatggttgggatgaacagctttgcaaaacgtatctttgtctttatgtttttgaatgagaaagcagtttttgcaacaggagttgccttaatggtaggtagctctctcagatcatatacaatacacttaaaaattcgttttatttttacatttagaagaagaaaaaaacttaaatgagtcatttcttatagctagrctgaatgattactatttctactgaaactgactttccctcaaggaaatcccttccaactgacattcaatagcctgaattctccattcaattactagcagacaagtatccaaatcacaagatacaaactgcattctttgaagtgctctttgcaaattaaatcaaagttgactgagcatagaagtccctggaggtggtttctcagaagaagaccaagttacactgcattgggaaactgctgcactgttgcctgttctgtttcctatccatagtaagaagatggttttyatctccagggctgtt

SEQ ID NO: 8835 - DNA, 600 bp, Chicken  19866894203848_2
tttcttatagctagrctgaatgattactatttctactgaaactgactttccctcaaggaaatcccttccaactgacattcaatagcctgaattctccattcaattactagcagacaagtatccaaatcacaagatacaaactgcattctttgaagtgctctttgcaaattaaatcaaagttgactgagcatagaagtccctggaggtggtttctcagaagaagaccaagttacactgcattgggaaactgctgcactgttgcctgttctgtttcctatccatagtaagaagatggttttyatctccagggctgttaatctatcatctttcatcaacattaaattcatacataataaataaagatttttagatacacagttttcaagtgaaggactttattacccactggacgttatatgaaactgcatgaacaatgaggagaaaattagtaaagctgtcaattaagttcagtatttttccttctgccctactgaaatcatttgctcatagcatgaaactatacaacgaaaacatttgattcttaaacaaagagcaagaaaataattctactagtattctactggcctctgctggtcctgc

SEQ ID NO: 8836 - DNA, 599 bp, Chicken  19866894203850_1
  misc_feature (1)..(67): n is any nucleotide
nnnnnnnnnnnnnnnnnnnnnnnnnnnnnnnnnnnnnnnnnnnnnnnnnnnnnnnnnnnnnnnnnnncatttggagcaatatgccagagaagcatgatgagctagattgacatgatggcatcatttggggaactgggattcaattatttgaaagcctgaccaagatgttctctacatgacttatgtttgtgtttgactctggatcttcaccagtgaatttgcctcaagatcctcatacactgagcagttttcagaggactgattcagaaggcatagctaagtgctggaacaccaaagccytcctagtgtgcaagttactatagagaaccattgtaacatgctcacagaccagctggagtttgagggtctggctgacatacaggtgtttactctgaccattctgatctttaccaagtctctgggatcacactgaagtacaagccttgactgttgatcaggcagccagacagcagagtttaacattgaggctaatcctggataggtaagacaggaaaagacatggagcatggccaacttacagacgcttttttggagctgggaaataccctacctaagatacaagagggtaggacacctaa

SEQ ID NO: 8837 - DNA, 600 bp, Chicken  19866894203850_2
cagaccagctggagtttgagggtctggctgacatacaggtgtttactctgaccattctgatctttaccaagtctctgggatcacactgaagtacaagccttgactgttgatcaggcagccagacagcagagtttaacattgaggctaatcctggataggtaagacaggaaaagacatggagcatggccaacttacagacgcttttttggagctgggaaataccctacctaagatacaagagggtaggacacctaacaactcaacaagacttcctctaaacataaatccaaggggctactygtggcagatagatgagaccggttcactgtgcagtagtgcaaaaggaagggaatggcagctactggcsacatgtgctggggcatttcttcacaaaagcactggaggatttctaacagctgagaaaaatccttcatttttcagtgttcttcaaaagatctccatgcagcacatagctgttttattctgtttatccactctggcaagatgagacactgatcttaccctactagaacctgtagaaaaccaatatcctgtggttaagcttcagccttatgcttctcttttaatataagctgtcgt

SEQ ID NO: 8838 - DNA, 597 bp, Chicken  19866894203850_3
caagtctctgggatcacactgaagtacaagccttgactgttgatcaggcagccagacagcagagtttaacattgaggctaatcctggataggtaagacaggaaaagacatggagcatggccaacttacagacgcttttttggagctgggaaataccctacctaagatacaagagggtaggacacctaacaactcaacaagacttcctctaaacataaatccaaggggctactygtggcagatagatgagaccggttcactgtgcagtagtgcaaaaggaagggaatggcagctactggcsacatgtgctggggcatttcttcacaaaagcactggaggatttctaacagctgagaaaaatccttcatttttcagtgttcttcaaaagatctccatgcagcacatagctgttttattctgtttatccactctggcaagatgagacactgatcttaccctactagaacctgtagaaaaccaatatcctgtggttaagcttcagccttatgcttctcttttaatataagctgtcgttactgaatcccagtattacccaaatctgttttacatgagtccttggcaagacaatgtcagctgt

SEQ ID NO: 8839 - DNA, 600 bp, Chicken  19866894203861_1
tatcacctgcctagggctagcagaaatacacaggacccatacacaggtgacctggtcatctctggagcataagaaagaacctggtgggagacacttgggcatctcaggtgatcccaagtactactcattcttaggtaactgaatctttgcttttcattgacaggaaaggaagcttagcagacacttacctgtttagatacgcaaatttaggtgtatgaatctgaaggtaaaccacagccactgtggtttcagtgctctttgggctccactgacaaatttttttggcatggaacttctctytataagtaactaagtgaactgcaaggcaaagaaatatcagttgatgttatagatgtacaaggtgatttgcaaacatttttgtatttgtgtaaataggatgtagcacacattttcccatgttaaataaaactttaaaaagccaaaattcctctgagttctttcatctttctttgattttttttcgccaaggtttgtctctcataaacatattaaaacaccacaagcaagagagtaagataacccgctgatgaaatgactagccacataagcgtcctcactctgcaggaaacctcgtcatga

SEQ ID NO: 8840 - DNA, 600 bp, Chicken  19866894203867_1
aatttgcagtataaatccttggaggacataacaagtgccaggcttttttattttaagacttcaaaacattttatataacgtgtttacactgtaatttcagcaaactcatagtcagaaaaagaacaccgtgaactttacacataaatcatatttcaaatgcacttatttgataaggtgtacatgtatggaagttccacagagctgcaattgtttgtgcttgcctcccagcccaatgagtgagtacttcgctatcccacttttatctgtttgtgctgattatcatgctctgttacagcacgraaggggaaagacatactgataacacgacctttactgaggaagtgtactactgtggaaaagtatttcttgagaaggcctaggatgcttcatagatgtgcactttgaggtgcacgctgtagcaaacagtgctggcagtgctccctgccaggcartagtgggggcaacatgccacgccgcccttggtttgggtaacagtrgctggttggtgcacatgggcacatatatggagagtgagagggctgaactgttggcctttgcaggagctatttaggaaactttaagtgagtcctgagccccctc

SEQ ID NO: 8841 - DNA, 600 bp, Chicken  19866894203867_2
tcaaatgcacttatttgataaggtgtacatgtatggaagttccacagagctgcaattgtttgtgcttgcctcccagcccaatgagtgagtacttcgctatcccacttttatctgtttgtgctgattatcatgctctgttacagcacgraaggggaaagacatactgataacacgacctttactgaggaagtgtactactgtggaaaagtatttcttgagaaggcctaggatgcttcatagatgtgcactttgaggtgcacgctgtagcaaacagtgctggcagtgctccctgccaggcartagtgggggcaacatgccacgccgcccttggtttgggtaacagtrgctggttggtgcacatgggcacatatatggagagtgagagggctgaactgttggcctttgcaggagctatttaggaaactttaagtgagtcctgagccccctcaccaatattaatgtaaatgattaaaaagtacactgtttattacatttgacttatcatctttgagagatggaactagatgacctttaaagttcaatctagcctggaagaaaaaatagtggtatgtgatctcaaatacagaaagtgaagcatca

SEQ ID NO: 8842 - DNA, 600 bp, Chicken  19866894203867_3
agagctgcaattgtttgtgcttgcctcccagcccaatgagtgagtacttcgctatcccacttttatctgtttgtgctgattatcatgctctgttacagcacgraaggggaaagacatactgataacacgacctttactgaggaagtgtactactgtggaaaagtatttcttgagaaggcctaggatgcttcatagatgtgcactttgaggtgcacgctgtagcaaacagtgctggcagtgctccctgccaggcartagtgggggcaacatgccacgccgcccttggtttgggtaacagtrgctggttggtgcacatgggcacatatatggagagtgagagggctgaactgttggcctttgcaggagctatttaggaaactttaagtgagtcctgagccccctcaccaatattaatgtaaatgattaaaaagtacactgtttattacatttgacttatcatctttgagagatggaactagatgacctttaaagttcaatctagcctggaagaaaaaatagtggtatgtgatctcaaatacagaaagtgaagcatcataggatcaccagggctggaaaacacctccaagatcatctagttca

SEQ ID NO: 8843 - DNA, 600 bp, Chicken  19866894203872_1
atgtgcttctttttaaaagactgtaagacctgcatgaacttcacagggctaattaaagggctttacagagtgcaagtaccagaggactgaatttttgctcttcatcttgaccaagagtagtagatgtcagtccacagcccaacatgaaaatccattccatgaaggcagcaccatgagaaactggaggttagtttcagtgaccaaattactgcacaacgtgtacattcagcagaaatcaagcacattaaaagtgaagatacattttaatggttcctttagacaagaagtgctagtgagggragagacctggatgatacctgtaggccagaattatttatggaccctactcttcgtgccagaggagactgaacagttattcaaaatctatctttgagactcatgattttgaagctctatgttttattctaccaatctgcttcccaggctacagaactcctgcccatttcccttgtgctcttggcaatctcactgaatcttaatgcacaggtccaacagttcagtatggatactgcagtcttgatcttctgtcagccaggtctgggttgaagctcctaggagggtctgtccaaggacacaggt

SEQ ID NO: 8844 - DNA, 600 bp, Chicken  19866894203876_1
gctttctcttctccaggctgaagagcctaaactctctcagcctgtccttatagggaagttgctctagccctctcattatctttgtgaccctcctctggacctgctccaacaactccatgtccttatttcagcagatcccaaactggacgcagtactccaggtggggattcacaggagcagtggggaaaaatcacctctctcaagctgctggtcacatttcttttgatgcaatccaggatatggttggtcttctgggctgcaagtgcacatggctggctcacattgaatctttcatcaacygacactcccaaatccttctcctcagggttgctctcaagccattctctgcccagtctgtatctgtgcttgggattgccctagcccaggtgtagggccttgcwgttggccttgttgaacttcatgaggttggcatggacccacycctcaagcctgttgagatccctctggatagtatctcttccctctagcatgtcaactgcaccactcagtttgctgttttctgcaaacctgctgagggtgcacttgatcccgctgtccatgttgcctacaaagatattaaataacaccagtcccaacacc

SEQ ID NO: 8845 - DNA, 600 bp, Chicken  19866894203876_2
tgctccaacaactccatgtccttatttcagcagatcccaaactggacgcagtactccaggtggggattcacaggagcagtggggaaaaatcacctctctcaagctgctggtcacatttcttttgatgcaatccaggatatggttggtcttctgggctgcaagtgcacatggctggctcacattgaatctttcatcaacygacactcccaaatccttctcctcagggttgctctcaagccattctctgcccagtctgtatctgtgcttgggattgccctagcccaggtgtagggccttgcwgttggccttgttgaacttcatgaggttggcatggacccacycctcaagcctgttgagatccctctggatagtatctcttccctctagcatgtcaactgcaccactcagtttgctgttttctgcaaacctgctgagggtgcacttgatcccgctgtccatgttgcctacaaagatattaaataacaccagtcccaacaccaatccctgaggaatggcactcatcactggtctccacttggacattgagctgttgactgcaactctctgaatgtgaccatacagccagttccttatctgatg

SEQ ID NO: 8846 - DNA, 600 bp, Chicken  19866894203876_3
ctggacgcagtactccaggtggggattcacaggagcagtggggaaaaatcacctctctcaagctgctggtcacatttcttttgatgcaatccaggatatggttggtcttctgggctgcaagtgcacatggctggctcacattgaatctttcatcaacygacactcccaaatccttctcctcagggttgctctcaagccattctctgcccagtctgtatctgtgcttgggattgccctagcccaggtgtagggccttgcwgttggccttgttgaacttcatgaggttggcatggacccacycctcaagcctgttgagatccctctggatagtatctcttccctctagcatgtcaactgcaccactcagtttgctgttttctgcaaacctgctgagggtgcacttgatcccgctgtccatgttgcctacaaagatattaaataacaccagtcccaacaccaatccctgaggaatggcactcatcactggtctccacttggacattgagctgttgactgcaactctctgaatgtgaccatacagccagttccttatctgatgagtggtccatccatcacatccatttttctcccatttggcaa

SEQ ID NO: 8847 - DNA, 600 bp, Chicken  19866894203879_1
agaaggtgctttattaatttttgtgtcttactattcaagcctgttttatctggaaaaaaaattattcctaactcaagtttgttttgcccatgacagtaacttgtaactgatctccctgtcagcatcccaacccatgctcattttcacccaattaacccctgtcctgctgaggagggatggtgactgagtggctggtgggcatctcacagctgactgaggtcaccccacagcagcacataatgcactacagtaatgctgtttggagagggcgtattgtagcgacaggcctttttgtcattktaacttatgaagtcttctgctatgcagttctaaaatggttagtgtttgtaatcctgtaatgatttcagcacacgtacaagcctgtttgcttccatgttgttgattgcatcccactgggaaaatataaaaatagttggatcagaaataaaggaaatggcataaattctccaaagagaaaatctccacaatagtaatgaggttttctgggagaactgagaacagagttctctcttttgctgggactttgtgccttttccccatggatacatgctatgcttaatgaactgatagctctttaac

SEQ ID NO: 8848 - DNA, 600 bp, Chicken  19866894203879_2
gatttcagcacacgtacaagcctgtttgcttccatgttgttgattgcatcccactgggaaaatataaaaatagttggatcagaaataaaggaaatggcataaattctccaaagagaaaatctccacaatagtaatgaggttttctgggagaactgagaacagagttctctcttttgctgggactttgtgccttttccccatggatacatgctatgcttaatgaactgatagctctttaaccgtgtggaactaatgctcaccacttctttgatgtagcaaatatgcaataagacatattaktaagggggaaggtaacactggctttcatcctactctgtgagaaactcaggcaatcagttttgatgaacttctggccacacttatccctaatcccatgttgcatatcctagccagtgcctgttgcatttgtgggggttgtgctgtgcatcagatcagtttaatgaatcccatctgtcacagagaggcagattcagtgttgttgcactgggaatatctaaagatgccattgcctctccgttctctctggccatagaaatgtgagttcagtgatttggataagcttgaggagacttcatcaaa

SEQ ID NO: 8849 - DNA, 600 bp, Chicken  19866894203881_1
agttcggagatgttacaaagaagttacaaaggagagcaagagtgattttaaccagcatgcactgatggttcaagataaaggacacatttcatttcaaagcatggtttttattttctttttaaactttagaagatacagctctctcaaatcattgtaaaataaacaaactgatcactgaagctatttatggtgaaatgaaataaactgtaataacctgtaattttggggatggcttgttattgcattttgggagggacagaattactaaaaaacaactcgaaaagaaataattagaaaaasaaacaaaaggacacagctgtgtgctcatgccagaggagagaaagcaacaataaaacttcagcaggaaaagacacacaatatagsgagtatcttccacatctcaaaagcagacaatgcatctttcacctccacgtaaaacagactcaaaactccctcacatttagcatttgactgaaacatttaatttccctacacaagtcatttaacagactacaccaatgactgatgatgggaaaacagcgttcctyatayaatcccatcagttccatcttaagttcctcaagaataaacacagcctgt

SEQ ID NO: 8850 - DNA, 600 bp, Chicken  19866894203881_2
catttcatttcaaagcatggtttttattttctttttaaactttagaagatacagctctctcaaatcattgtaaaataaacaaactgatcactgaagctatttatggtgaaatgaaataaactgtaataacctgtaattttggggatggcttgttattgcattttgggagggacagaattactaaaaaacaactcgaaaagaaataattagaaaaasaaacaaaaggacacagctgtgtgctcatgccagaggagagaaagcaacaataaaacttcagcaggaaaagacacacaatatagsgagtatcttccacatctcaaaagcagacaatgcatctttcacctccacgtaaaacagactcaaaactccctcacatttagcatttgactgaaacatttaatttccctacacaagtcatttaacagactacaccaatgactgatgatgggaaaacagcgttcctyatayaatcccatcagttccatcttaagttcctcaagaataaacacagcctgttgtctgtaagaaaatctttaggatggagtaaaatgggagtgttccatttcttttggcagtacatcagagatatgcacctggaaa

SEQ ID NO: 8851 - DNA, 600 bp, Chicken  19866894203881_3
gggagggacagaattactaaaaaacaactcgaaaagaaataattagaaaaasaaacaaaaggacacagctgtgtgctcatgccagaggagagaaagcaacaataaaacttcagcaggaaaagacacacaatatagsgagtatcttccacatctcaaaagcagacaatgcatctttcacctccacgtaaaacagactcaaaactccctcacatttagcatttgactgaaacatttaatttccctacacaagtcatttaacagactacaccaatgactgatgatgggaaaacagcgttcctyatayaatcccatcagttccatcttaagttcctcaagaataaacacagcctgttgtctgtaagaaaatctttaggatggagtaaaatgggagtgttccatttcttttggcagtacatcagagatatgcacctggaaattgtttactatgccaaaaccttgaggttcgtctttccatatgtaaagagctggtggtggctgagatttagacagctacacttgcacatcaataagtttacacatcttaaaatgccattaggaggatggaaatttagcgagtagcaactgaccagtcactaggaa

SEQ ID NO: 8852 - DNA, 600 bp, Chicken  19866894203881_4
gggacagaattactaaaaaacaactcgaaaagaaataattagaaaaasaaacaaaaggacacagctgtgtgctcatgccagaggagagaaagcaacaataaaacttcagcaggaaaagacacacaatatagsgagtatcttccacatctcaaaagcagacaatgcatctttcacctccacgtaaaacagactcaaaactccctcacatttagcatttgactgaaacatttaatttccctacacaagtcatttaacagactacaccaatgactgatgatgggaaaacagcgttcctyatayaatcccatcagttccatcttaagttcctcaagaataaacacagcctgttgtctgtaagaaaatctttaggatggagtaaaatgggagtgttccatttcttttggcagtacatcagagatatgcacctggaaattgtttactatgccaaaaccttgaggttcgtctttccatatgtaaagagctggtggtggctgagatttagacagctacacttgcacatcaataagtttacacatcttaaaatgccattaggaggatggaaatttagcgagtagcaactgaccagtcactaggaattga

SEQ ID NO: 8853 - DNA, 600 bp, Chicken  19866894203888_1
tgattgtgattagcaagcttaaaaataattacctggtgtgttcattgctatctttggacatactctcatattcctactctgatagaaagtattgagcagcacaataggtttatttgatgactaaggtgttatactgtgctgaggatactgagcacatcttaattgttccatctcttggtgactgacacctgcacagggacaaaacccacaggccttactgaagcttaatgggggacgcagaaggaacagtctgaattcccttcattcccataggggcttatccacgtttccagttgcagycatcactgttaccacacagattttctttggcaacacaccatgacagccccgaacctatagctgctgcatcctgcaaaggagtaaaatatttgcttagcacctggggaacaggggatgtgttgcacctgggttttaacacatagtttaaaagcctgaaggtgttgattcatgcgtggtagtaagttgatctcaaacagctgatgcagttcatatgataaaaggctgtccatctctggaagctgttggctttatagcagagacagttgttgtaagtacttaaattcttgctatccacagaca

SEQ ID NO: 8854 - DNA, 599 bp, Chicken  19866894203895_1
  misc_feature (1)..(40): n is any nucleotide
nnnnnnnnnnnnnnnnnnnnnnnnnnnnnnnnnnnnnnnngggcatatcatagctataaaaagttccagtagagacctgatatattttctaactattcatctgacttttgtctatgtaaatattcaaggctaaattcaagaagttaagatagcagcagccataagagatcaatagttaatatcttttataaaaaaaagttgtacttgatttgaatcgatctggttgtaaactttggcccaggtgttgcacagtctgaactgcgctgatcatccacatttaaaagaactggagaagggcayagatatgttggcacttgtgattgattgatttatttttagggaaactatttgatcatacagtgttaatgttgggaacaaaacaycaagctggaaatgatgaaatgtgttcacctcaaaaatttcaggttttaaatgaacttaatttttaatagaagttattctttctcttcttttccttgtgatgctcatactagcccaggcaaaacagcattattctgtcctgagaagaccaggactggatagtcagcaaaacaagtgactaaaggtctgattaattctaaaggagcagagataaagct

SEQ ID NO: 8855 - DNA, 600 bp, Chicken  19866894203895_2
attttctaactattcatctgacttttgtctatgtaaatattcaaggctaaattcaagaagttaagatagcagcagccataagagatcaatagttaatatcttttataaaaaaaagttgtacttgatttgaatcgatctggttgtaaactttggcccaggtgttgcacagtctgaactgcgctgatcatccacatttaaaagaactggagaagggcayagatatgttggcacttgtgattgattgatttatttttagggaaactatttgatcatacagtgttaatgttgggaacaaaacaycaagctggaaatgatgaaatgtgttcacctcaaaaatttcaggttttaaatgaacttaatttttaatagaagttattctttctcttcttttccttgtgatgctcatactagcccaggcaaaacagcattattctgtcctgagaagaccaggactggatagtcagcaaaacaagtgactaaaggtctgattaattctaaaggagcagagataaagctgctgcaatacagtgtctttatttgaacagtttataatgatcctagcctgaagtgttttgctaagcactgacatgttgtgttaac

SEQ ID NO: 8856 - DNA, 599 bp, Chicken  19866894203896_1
  misc_feature (1)..(154): n is any nucleotide
nnnnnnnnnnnnnnnnnnnnnnnnnnnnnnnnnnnnnnnnnnnnnnnnnnnnnnnnnnnnnnnnnnnnnnnnnnnnnnnnnnnnnnnnnnnnnnnnnnnnnnnnnnnnnnnnnnnnnnnnnnnnnnnnnnnnnnnnnnnnnnnnnnnnnnnnnntggcgacacactggaacaggttgcccaaggaggttgtggatgccccatccctggaggcattcaaggccaggctggatgtggctctgggcagcctggtctgctggttggcggccctgcacatagcaggggatttaaactagatgatygttgtggtccttttcaacccaggccattctacgattctataatcccatgtttaaatatcctcataatagccagtatttttgggaagtgctgccattgctataagcaaaatgaattttgggcartgcagcatggaaatgccttttattttcagctgctactatataaaagtcatacagacgcaagctgttggtagcatttcaaattcagtgcagaagtccactcttctctaaaactgtgatatgaacagaagactttacttccatcttaaaagagatgaaaacaccagtgtggggtttgt

SEQ ID NO: 8857 - DNA, 599 bp, Chicken  19866894203896_2
  misc_feature (1)..(31): n is any nucleotide
nnnnnnnnnnnnnnnnnnnnnnnnnnnnnnntggcgacacactggaacaggttgcccaaggaggttgtggatgccccatccctggaggcattcaaggccaggctggatgtggctctgggcagcctggtctgctggttggcggccctgcacatagcaggggatttaaactagatgatygttgtggtccttttcaacccaggccattctacgattctataatcccatgtttaaatatcctcataatagccagtatttttgggaagtgctgccattgctataagcaaaatgaattttgggcartgcagcatggaaatgccttttattttcagctgctactatataaaagtcatacagacgcaagctgttggtagcatttcaaattcagtgcagaagtccactcttctctaaaactgtgatatgaacagaagactttacttccatcttaaaagagatgaaaacaccagtgtggggtttgtaaatgtacttgcaagatgatctaaagatgttattgtcttagacccggcccctttgtacagtaatctcctaatgrctgaatgatttatggagaaaatttcatttggcttttatgttgtgagcaa

SEQ ID NO: 8858 - DNA, 579 bp, Chicken  19866894203896_3
tatttttgggaagtgctgccattgctataagcaaaatgaattttgggcartgcagcatggaaatgccttttattttcagctgctactatataaaagtcatacagacgcaagctgttggtagcatttcaaattcagtgcagaagtccactcttctctaaaactgtgatatgaacagaagactttacttccatcttaaaagagatgaaaacaccagtgtggggtttgtaaatgtacttgcaagatgatctaaagatgttattgtcttagacccggcccctttgtacagtaatctcctaatgrctgaatgatttatggagaaaatttcatttggcttttatgttgtgagcaacagaagaatcattgcttctaaagtgttgctgtttagtgagatattaatggagggataatccatttacatttttacagcggaagttttgtaatgcttttggggttcgtttattctttgcatttgcaaaatagccgctaccaaaataagttgaagtaatttgctgtggaggaatacagtagtttgtcaaaacaaataaagtaaaataaaattcaatgctccataccaaagtc

SEQ ID NO: 8859 - DNA, 600 bp, Chicken  19866894203897_1
acaaaccccacactggtgttttcatctcttttaagatggaagtaaagtcttctgttcatatcacagttttagagaagagtggacttctgcactgaatttgaaatgctaccaacagcttgcgtctgtatgacttttatatagtagcagctgaaaataaaaggcatttccatgctgcattgcccaaaattcattttgcttatagcaatggcagcacttcccaaaaatactggctattatgaggatatttaaacatgggattatagaatcgtagaatggcctgggttgaaaaggaccacaacratcatctagtttaaatcccctgctatgtgcagggccgccaaccagcagaccaggctgcccagagccacatccagcctggccttgaatgcctccagggatggggcatccacaacctccttgggcaacctgttccagtgtgtcgccaccctctgggtgaaaaacttcttcctaatatccaacctraacctctcctgtctcagtttaaaaccattcccccttgtcctatcactatctacyctcgtaaacagccactccccctcctgtttatactcccccttcaagtactrgaaggccacaatg

SEQ ID NO: 8860 - DNA, 600 bp, Chicken  19866894203897_2
aaattcattttgcttatagcaatggcagcacttcccaaaaatactggctattatgaggatatttaaacatgggattatagaatcgtagaatggcctgggttgaaaaggaccacaacratcatctagtttaaatcccctgctatgtgcagggccgccaaccagcagaccaggctgcccagagccacatccagcctggccttgaatgcctccagggatggggcatccacaacctccttgggcaacctgttccagtgtgtcgccaccctctgggtgaaaaacttcttcctaatatccaacctraacctctcctgtctcagtttaaaaccattcccccttgtcctatcactatctacyctcgtaaacagccactccccctcctgtttatactcccccttcaagtactrgaaggccacaatgagcatcacttcaattacatttctgcatatgaaaatgggyaattaatacacacggacacaagtgtgcagaagtctcagattccactaggaactgctgcttttcctcacttttctaagctttcacaatcctcagacttaccttttcattcactgattagaagaggtaacatatttgggaacctaa

SEQ ID NO: 8861 - DNA, 600 bp, Chicken  19866894203897_3
gaggatatttaaacatgggattatagaatcgtagaatggcctgggttgaaaaggaccacaacratcatctagtttaaatcccctgctatgtgcagggccgccaaccagcagaccaggctgcccagagccacatccagcctggccttgaatgcctccagggatggggcatccacaacctccttgggcaacctgttccagtgtgtcgccaccctctgggtgaaaaacttcttcctaatatccaacctraacctctcctgtctcagtttaaaaccattcccccttgtcctatcactatctacyctcgtaaacagccactccccctcctgtttatactcccccttcaagtactrgaaggccacaatgagcatcacttcaattacatttctgcatatgaaaatgggyaattaatacacacggacacaagtgtgcagaagtctcagattccactaggaactgctgcttttcctcacttttctaagctttcacaatcctcagacttaccttttcattcactgattagaagaggtaacatatttgggaacctaactacttggaaagaagtcataagacttacttactatttacatcagcaagcagatg

SEQ ID NO: 8862 - DNA, 600 bp, Chicken  19866894203897_4
aaggaccacaacratcatctagtttaaatcccctgctatgtgcagggccgccaaccagcagaccaggctgcccagagccacatccagcctggccttgaatgcctccagggatggggcatccacaacctccttgggcaacctgttccagtgtgtcgccaccctctgggtgaaaaacttcttcctaatatccaacctraacctctcctgtctcagtttaaaaccattcccccttgtcctatcactatctacyctcgtaaacagccactccccctcctgtttatactcccccttcaagtactrgaaggccacaatgagcatcacttcaattacatttctgcatatgaaaatgggyaattaatacacacggacacaagtgtgcagaagtctcagattccactaggaactgctgcttttcctcacttttctaagctttcacaatcctcagacttaccttttcattcactgattagaagaggtaacatatttgggaacctaactacttggaaagaagtcataagacttacttactatttacatcagcaagcagatgaggtctgtgtgtgttctgtttattaggtatctaactatatgatcacccgg

SEQ ID NO: 8863 - DNA, 600 bp, Chicken  19866894203897_5
aaccagcagaccaggctgcccagagccacatccagcctggccttgaatgcctccagggatggggcatccacaacctccttgggcaacctgttccagtgtgtcgccaccctctgggtgaaaaacttcttcctaatatccaacctraacctctcctgtctcagtttaaaaccattcccccttgtcctatcactatctacyctcgtaaacagccactccccctcctgtttatactcccccttcaagtactrgaaggccacaatgagcatcacttcaattacatttctgcatatgaaaatgggyaattaatacacacggacacaagtgtgcagaagtctcagattccactaggaactgctgcttttcctcacttttctaagctttcacaatcctcagacttaccttttcattcactgattagaagaggtaacatatttgggaacctaactacttggaaagaagtcataagacttacttactatttacatcagcaagcagatgaggtctgtgtgtgttctgtttattaggtatctaactatatgatcacccggattccagtaccattagggtaggttctctgttaatacttacagcagaatggct

SEQ ID NO: 8864 - DNA, 600 bp, Chicken  19866894203898_1
tccccctcctgtttatgcattcccttcaagtactggaaggccacaatgaggtctccccagagccttctcttcctcaagctaaacaagcccagttccctcagcccttcctcataggagaggttctccagccctctgatcatctttgtggtcctaagcgatgctcccacctgtgacccaatcagctgcaccaacgacagcatgcagcgttaaaacagaaatgggtttgggaaaggaaacagaaggaatgcagacatcattctcatggaaggaaacaaatcacctacagggcattcatcgaawgcagaggatggctgagtgagaatatcggaggcaatatgcaggtatcaatgcattcaggcaaaaggaaagaaggggatatcagcatgttgcagcagaaaacacaaagaggcctctaattcaaccagaaaatgtacagttggaaagaagagtcagtctggctgcctctacacccaacctactcccatctctcgctccatatgggatagaattactcgcacatccccggaggcgactgcacgcagggtttcatttccaattgtcggcgatgctacaatttccattcagcaggattgctctcac

SEQ ID NO: 8865 - DNA, 599 bp, Chicken  19866894203900_1
  misc_feature (1)..(74): n is any nucleotide
nnnnnnnnnnnnnnnnnnnnnnnnnnnnnnnnnnnnnnnnnnnnnnnnnnnnnnnnnnnnnnnnnnnnnnnnnnctctctttttttaacaatttgctattccaccctaaagcactcgaagggaaagaaacacacacattttaattaaatttctctcaggttttttttttttttttccctttcatttgcatacttatttttattttttccccatttccctccccggggaagcgaaataaataaataaatgcaaaaagggagaaggacgcggaacagaagcgggaaggtgactgggatgcarattgcaggcaggggccgggggtggagggaagggaggggagggacaatccagcgactaagcagaaagtaaggtcgggcctgggggaaacgctagggtgggtgctcacgaggatactttgaggaggggaaggaatagctagagaagaaacacgtcttttgaaatgcgggaggtaacacgttgatgcgatgcggaagggaacgcgttgatgcgataccaacaagctcctcagaaccaaatctctaatgcgtattcccaacccgtttctgctcctccactaccgctcgtgactggcacggccc

SEQ ID NO: 8866 - DNA, 600 bp, Chicken  19866894203900_2
actaccgctcgtgactggcacggcccatggtgggcgcctggcagtgcggggccgtgccagcagccagcccaaagcctgacgtgggtgacaaaaacactcatttcagaatggagacgaccaacagaagcagtcaaagtacaataacaaaactgattaagattgtacggatgaagacccggatcaataaatacagcaacaaaaaagaatagggcattccatgcccctgggatgctccttttttacatttctttcttttgttgcttatttgttgcattttatttttaagatgtgaataaaccygtgcaacttggcatttaactgcccttgtttctacttcctttttgcttccaggttctgatttcaattttaatctgcgggtacggtactacctcctgtgaatctaataaggatgtcttcttatagcagtcccctgctggttctagaagttctaatttcatacctgctcttttcaggtcgtttctccccacaaaatatatggaggtaccagggtaaagctgaggggataaaaattcctctacaaagaayagcaagtcacatttgggacctgcaracatggaatctctttggaataacagggag

SEQ ID NO: 8867 - DNA, 600 bp, Chicken  19866894203900_3
tctttcttttgttgcttatttgttgcattttatttttaagatgtgaataaaccygtgcaacttggcatttaactgcccttgtttctacttcctttttgcttccaggttctgatttcaattttaatctgcgggtacggtactacctcctgtgaatctaataaggatgtcttcttatagcagtcccctgctggttctagaagttctaatttcatacctgctcttttcaggtcgtttctccccacaaaatatatggaggtaccagggtaaagctgaggggataaaaattcctctacaaagaayagcaagtcacatttgggacctgcaracatggaatctctttggaataacagggagatctggtacagtcccattttacacgcagatttgttattactcacacatcacccgaggacagtgtcatcttcttttctctgcaaaacgcatacgggggcattcagggtcctcttctcctctttagtaatgaccaagtctttcccgcaatctctatccatcctgattacctccttaactgactctccctggggcttccaactcttggtatgtaaagaaattattattattggttgtgttatctttggc

SEQ ID NO: 8868 - DNA, 600 bp, Chicken  19866894203900_4
cattttatttttaagatgtgaataaaccygtgcaacttggcatttaactgcccttgtttctacttcctttttgcttccaggttctgatttcaattttaatctgcgggtacggtactacctcctgtgaatctaataaggatgtcttcttatagcagtcccctgctggttctagaagttctaatttcatacctgctcttttcaggtcgtttctccccacaaaatatatggaggtaccagggtaaagctgaggggataaaaattcctctacaaagaayagcaagtcacatttgggacctgcaracatggaatctctttggaataacagggagatctggtacagtcccattttacacgcagatttgttattactcacacatcacccgaggacagtgtcatcttcttttctctgcaaaacgcatacgggggcattcagggtcctcttctcctctttagtaatgaccaagtctttcccgcaatctctatccatcctgattacctccttaactgactctccctggggcttccaactcttggtatgtaaagaaattattattattggttgtgttatctttggctgtttattcttcaatttttttctta

SEQ ID NO: 8869 - DNA, 600 bp, Chicken  19866894203901_1
ttgctcattctggtacattcttgaaagaattgctgtctccagacattcccttctctcataccataatcaatttgctatacatttttcagttagcatctagcacaacaaaaccatagtttactgagaaaataaaataacagaaaataagaagtgtcatttaacaaaatttaaccctttagtcagttccctcctctgctctccagtcttttctgtctaagaatatttaattatttccaagtttatcaagaactttatgtaatgtctgttcaaactctgaataaaacagatctataaaagggrtatgacaggtgggattataaaatcctagctccttctttttacaaatcaggtctccgtattaatttttaatcagagatcctccttctttcaacttctgaggtgtttaatttttttctaaagtatgtacaaaaaacagaaacaaaaacacagttttgcccttcattgtaaaatgagtgtgcatttaaaagatgagcacttcctatatgattatcaaaactgtaccaatatgaaacagtttagagcaatgatgactttttataacttgatcttaagctgagcaaaatcttctgcaaaatgtag

SEQ ID NO: 8870 - DNA, 600 bp, Chicken  19866894203902_1
attctatgtctgcctgactccagagtagaaagattttcagaattcccacccttaaaacataaagtgtgtaggatgaaccccatcatggcatgagctttccacagtttggcaacaagctctttcttatttcaggtgtcaaacataaagtttggatggctaagtctgttattcttgcctttgctgctgtgctgtaacaagcacgtgctgatcatgcagacctggctctgtctagcaattagaaatcctttgggctttgaaagtgctccctgggagctatattcaagtgccgtgaatgcaagygataggtcacctaaagatctgtatattttcatcaaattcagttgatcttctcagcttgccctctgaatttcaccaggatgtacaatgtaccacaagaacaggctgctgtccatcagggttcttagtctattgggagcgctgtttgtgagagattttcatctgtatgactataactattcaactctgttgcagttcattcttatgaatgaaaatggaggttgtgtggccaggcaggcctgtttttttctgtaaagcccagttgactacgggaacgactaaagtatttagtctaaaccctca

SEQ ID NO: 8871 - DNA, 600 bp, Chicken  19866894203906_1
acagtaaaaatgaattaaaattgggtattctaccaactctgcagccaactgtggcctgtattaagagtcaaataacagcagattttatgtccttctttttaggttactgggaagagcaaacaagcaaaacccagcaacaacacacttaaagcacttatattgcatttttacctagccctacctgtctgctgtctatctatctatctatccatccatccatccatctacctgtatatttattcagagccatcagtgtaataagccaagatgccaggaatactggccttcaatctacttaamaatgcacctstaacaagaagactgtaaaatttgtagcatcacatcatagtttttaagtcactctgcagcattggcaaactacagtcacattttttgtgagtcagagggctctttggagggttttttttgttttgttttgttttgttttgttttgtttttgcagctttttcttatccttcttctataggtcatcaaaggatccaggcttttaggtgaggtgacctcctctaaggaacaaattccattatgagctattaacttgagtgacatcaaaggataaacatggacagtgattcagga

SEQ ID NO: 8872 - DNA, 600 bp, Chicken  19866894203906_2
tgaattaaaattgggtattctaccaactctgcagccaactgtggcctgtattaagagtcaaataacagcagattttatgtccttctttttaggttactgggaagagcaaacaagcaaaacccagcaacaacacacttaaagcacttatattgcatttttacctagccctacctgtctgctgtctatctatctatctatccatccatccatccatctacctgtatatttattcagagccatcagtgtaataagccaagatgccaggaatactggccttcaatctacttaamaatgcacctstaacaagaagactgtaaaatttgtagcatcacatcatagtttttaagtcactctgcagcattggcaaactacagtcacattttttgtgagtcagagggctctttggagggttttttttgttttgttttgttttgttttgttttgtttttgcagctttttcttatccttcttctataggtcatcaaaggatccaggcttttaggtgaggtgacctcctctaaggaacaaattccattatgagctattaacttgagtgacatcaaaggataaacatggacagtgattcaggaacagtgtctt

SEQ ID NO: 8873 - DNA, 600 bp, Chicken  19866894203908_1
caatatatcacccgccaaggctacagaaagccaaagggtctaccaatggatttcaacttattggtcttcttaggaggatttaaatttggaccacctttcagagagctcttgggggtattttaaaagtgaagctaatattgttaggaaatgtgaggtccaggcctggcttcatgctctacaagcacagaaagtggaaaaggggagattcccagagctggggaagccccaggtgagcacaggtgggctcagagggctgggacctgctggaggccaggacatagtcctatttccaatgatttratatgagcagaagagaatggtgacattctcattttaacaaaaggcccggccttccaaaacctgccaattgaggaaatgaaatcattaatatatcagacacgcaggatgaaaccagagatgcttctcgtgtcaggaccacttaggcagaacctacaaacggtccatgatgacgactggctctgcttttattcttcagctttggcagtctgaggaggtctggagctttggatgatgaactcagtggtgatttggatccaggttgcattttatctgaaccactcacatttggagtcacaggaa

SEQ ID NO: 8874 - DNA, 600 bp, Chicken  19866894203914_1
aatcaaccttattgctaatcttgccatggttattgcccagtggagatgcctatgacaaaatggagagtgagcttccattgtggggctgaattagagaactcagggtggctgcatggtaatcttcctttttttctttctccccttattaaattaagagaagatccagcctacaaaaatctggatttcctctacatgcaagaggtagaatgggaataactctaagtttctcaagaaacatttaggaacatgaacatttcttgtatctgcacttactgtactgcaggtgattcaaaagaggaytgatatgyaccatgaaagatgagcatgcagcaaaattttgtgtatgcggtttttctcactctgaactatgaagtcactttccttttaagtccgtmcagaaatattraaatatttttatttgaggcatttgatattatttacagacttttgaattttctaattgtatctattctttgtcctgttctagtacttctcttttcactgttctaatttgggaaaaatcaatgtagtcaatttacattccagcagtgaatatgagtgaatatgaattttttttttaacctccttctacaaatccag

SEQ ID NO: 8875 - DNA, 600 bp, Chicken  19866894203914_2
ttattgctaatcttgccatggttattgcccagtggagatgcctatgacaaaatggagagtgagcttccattgtggggctgaattagagaactcagggtggctgcatggtaatcttcctttttttctttctccccttattaaattaagagaagatccagcctacaaaaatctggatttcctctacatgcaagaggtagaatgggaataactctaagtttctcaagaaacatttaggaacatgaacatttcttgtatctgcacttactgtactgcaggtgattcaaaagaggaytgatatgyaccatgaaagatgagcatgcagcaaaattttgtgtatgcggtttttctcactctgaactatgaagtcactttccttttaagtccgtmcagaaatattraaatatttttatttgaggcatttgatattatttacagacttttgaattttctaattgtatctattctttgtcctgttctagtacttctcttttcactgttctaatttgggaaaaatcaatgtagtcaatttacattccagcagtgaatatgagtgaatatgaattttttttttaacctccttctacaaatccagaagatgcc

SEQ ID NO: 8876 - DNA, 600 bp, Chicken  19866894203914_3
gaactcagggtggctgcatggtaatcttcctttttttctttctccccttattaaattaagagaagatccagcctacaaaaatctggatttcctctacatgcaagaggtagaatgggaataactctaagtttctcaagaaacatttaggaacatgaacatttcttgtatctgcacttactgtactgcaggtgattcaaaagaggaytgatatgyaccatgaaagatgagcatgcagcaaaattttgtgtatgcggtttttctcactctgaactatgaagtcactttccttttaagtccgtmcagaaatattraaatatttttatttgaggcatttgatattatttacagacttttgaattttctaattgtatctattctttgtcctgttctagtacttctcttttcactgttctaatttgggaaaaatcaatgtagtcaatttacattccagcagtgaatatgagtgaatatgaattttttttttaacctccttctacaaatccagaagatgcctgaaatctgttctgtgtgaatagggacagcatgttcttcattaggtttctcataggcagaataaagggggaaataaattctgtttcc

SEQ ID NO: 8877 - DNA, 600 bp, Chicken  19866894203914_4
ggctgcatggtaatcttcctttttttctttctccccttattaaattaagagaagatccagcctacaaaaatctggatttcctctacatgcaagaggtagaatgggaataactctaagtttctcaagaaacatttaggaacatgaacatttcttgtatctgcacttactgtactgcaggtgattcaaaagaggaytgatatgyaccatgaaagatgagcatgcagcaaaattttgtgtatgcggtttttctcactctgaactatgaagtcactttccttttaagtccgtmcagaaatattraaatatttttatttgaggcatttgatattatttacagacttttgaattttctaattgtatctattctttgtcctgttctagtacttctcttttcactgttctaatttgggaaaaatcaatgtagtcaatttacattccagcagtgaatatgagtgaatatgaattttttttttaacctccttctacaaatccagaagatgcctgaaatctgttctgtgtgaatagggacagcatgttcttcattaggtttctcataggcagaataaagggggaaataaattctgtttccaaggaattttc

SEQ ID NO: 8878 - DNA, 554 bp, Chicken  19866894203920_1
tgttcacagcagctggaaaaccaaaacaaatcccactctgcaaaaggaaacgtgaggccaaaacctgctgagtgccacagtgttgaaggtaaggaggaaagctgggagtggtgctccccagccacggagctgatcaaggccagcttggatggagccctgggtgatgtgacagcgcctgatttagtggttggctgatctgcccacagcagggcagtcagaaatgggtgagctttgagatcccttccaacccaaccattctacggttctatgattctgtagataaattttagagagaatagsagatacagatcttggtgtatgagcactactgcaggatttggactcactccccaaattcctaaagcactggaaaagagattagaatcaagagagcaggagcaatgatgcctatgtgcctgatagcatcctacaaagccaagataataaaggaggaaatgcccaaagcctgcagcaacgctgagagtttcataaaagcagtctgtgcatgaagttaaagccactcttctccagctggggacatataatggtccata

SEQ ID NO: 8879 - DNA, 600 bp, Chicken  19866894203924_1
gtgggcactcgacatgaagctggagctggctgcaacactgggagcacaaagaaggcttctggttaggaacaagcaggataagcccctctgaaagcccttccccagctgacagcaaaagctgtgtcaatcctatataggggttccaaggaaaataacagcagaagaagcaaaccaacagcacaaagtccaaagagctgatattccctgcatgcatcacctctaaaaccttgccacaacaaagctcttcagcgcgcttcaatttccctggctgcactgtgtgtgctttgctaaaccagggckgcaggttgcattaattatggattattaaaacaccgagcaaatgacagcagaggggcttgcagtgagcacgtaggcttggtgtgaggctgcaaatgaggcacctggggaggagaagcagctctcagaccccattccactgaactccctatgaagcttgtctaacaccagtgaggcattgctgtagcccatgtcccactgtatagggacagcgttgtctgcctcgccccaacaggggaatgcagaacttatcatattgcaaacggggcagtgctgcctcactctcctcaccctcacattcac

SEQ ID NO: 8880 - DNA, 599 bp, Chicken  19866894203927_1
  misc_feature (1)..(197): n is any nucleotide
nnnnnnnnnnnnnnnnnnnnnnnnnnnnnnnnnnnnnnnnnnnnnnnnnnnnnnnnnnnnnnnnnnnnnnnnnnnnnnnnnnnnnnnnnnnnnnnnnnnnnnnnnnnnnnnnnnnnnnnnnnnnnnnnnnnnnnnnnnnnnnnnnnnnnnnnnnnnnnnnnnnnnnnnnnnnnnnnnnnnnnnnnnnnnnnnnnnnnattttaaccccatgtacctcttatcaccaggtaaagactctgctgcagctattagttttttccacatgaggatatgaatattgctgcactgtgttctgaattygtgaccttacaaattatgactgtcattgaggaataaactggagtaaaaaaacaaacaagtaagccaaaaacgttgcacagacttgacttcacaggtacaagccagcccacaagcaagtcaaagggtaccatttcagtgaatagagattctggttttaatttgaaagacatttatgtgctgccagcaaaccatgccacaacccaaaagctaattgtgctcagacctgtacaaacacagttaatgctgcttcatgaagaacacgactggaagcctttattcatgatctactgttgccactg

SEQ ID NO: 8881 - DNA, 600 bp, Chicken  19866894203937_1
ttgcccttccctgtgtctcagtgcgggcatccccttgtccctcagcacctgctgttcaccccctctccatcatggccccaagcagaggtgtacactggctgggctggagcttgtggcccatgagccagctacccaggccaacgagtgcagggtaaacgctgcagatgtcctcacagtgctgctctcatctgggtttatctcttctgtatagccatccagcactcagatcagtgctccaccccaaagggcagcagcagcgggaaggcagatgtgcttcacagctctgtgtgttcacagccmttgcttatacatttccatgctgccttggctgccatttgctgttatagtagtcacaatgtctgtatagtagtcatgtggtttgtttcgaggcttacacgtaaggaaatctgcttattgcttagcctcaagacacgtcttatttccttgtcacagtgtcacaagccaccccaaggacccagcatccttacaatgatcatctgatcgttggactgcttggagagttctcttgctctcttgcttttctgcacaccgtgaggcatttttgcaggtggactggatccaaatggagaactcagttca

SEQ ID NO: 8882 - DNA, 600 bp, Chicken  19866894203939_1
aaataacccaggcaaagtcccacgtacgagccctaccaactggggcgggctgctgctgcaaacttttcatcttttcctccagtcgggtaggaatgacaataaatatttttgaaggagcattttgaatgctgatgttttgcacagctttgcttgtgcttctctgaagtgacacatttcccagcgcagttatgaatttaacaaaaaatctgctttgtaatatatcaaaacactgttctgggaagactggaattaataaagagttagaaataatatttttaccttgtgtgatgatgacattgytataatactgctgctttcacactctaggtacttttgaaattgcagtgtgacttaactagcaaaggactactttccttggatatccagattatttcttaaagagaaacacatttgactttctttattaagttaagaaaataaacacaccgtatagcaatatttaagagtagaagatggctgggagatgcayggttatttgtctgtcagctatgaatgaatacctttggggaactctgaaaaaagactgtaacactgtttgctttgtcttgtggtttgagattgatttcaggtttttttgtt

SEQ ID NO: 8883 - DNA, 600 bp, Chicken  19866894203939_2
gaatttaacaaaaaatctgctttgtaatatatcaaaacactgttctgggaagactggaattaataaagagttagaaataatatttttaccttgtgtgatgatgacattgytataatactgctgctttcacactctaggtacttttgaaattgcagtgtgacttaactagcaaaggactactttccttggatatccagattatttcttaaagagaaacacatttgactttctttattaagttaagaaaataaacacaccgtatagcaatatttaagagtagaagatggctgggagatgcayggttatttgtctgtcagctatgaatgaatacctttggggaactctgaaaaaagactgtaacactgtttgctttgtcttgtggtttgagattgatttcaggtttttttgttgttttttttccttttttttttaggttttaataaccttctgactataatttatttctaaggtactgaggtgcttgggaggggtgggaaacaagcaatttagtgcaatctatgcaaataatgcctaaatttttttcttttaacattttcctatgtgaaacttcattcatcaagacggctccatttttcactg

SEQ ID NO: 8884 - DNA, 600 bp, Chicken  19866894203939_3
taatactgctgctttcacactctaggtacttttgaaattgcagtgtgacttaactagcaaaggactactttccttggatatccagattatttcttaaagagaaacacatttgactttctttattaagttaagaaaataaacacaccgtatagcaatatttaagagtagaagatggctgggagatgcayggttatttgtctgtcagctatgaatgaatacctttggggaactctgaaaaaagactgtaacactgtttgctttgtcttgtggtttgagattgatttcaggtttttttgttgytttttttccttttttttttaggttttaataaccttctgactataatttatttctaaggtactgaggtgcttgggaggggtgggaaacaagcaatttagtgcaatctatgcaaataatgcctaaatttttttcttttaacattttcctatgtgaaacttcattcatcaagacggctccatttttcactgataaaacctgttgagcaacgtagcacacagcatttaggaatttaatgctcctattaccatcaaagcatagatattaagctacaccagtcagcttgaaaagcgtgcaggtgac

SEQ ID NO: 8885 - DNA, 600 bp, Chicken  19866894203939_4
aatttagtgcaatctatgcaaataatgcctaaatttttttcttttaacattttcctatgtgaaacttcattcatcaagacggctccatttttcactgataaaacctgttgagcaacgtagcacacagcatttaggaatttaatgctcctattaccatcaaagcatagatattaagctacaccagtcagcttgaaaagcgtgcaggtgactgacacaatccaccttcctgctgcttctcttcttccttcagatgcgcacatgctaatttgtgttcacatcagcaagcttatccagaatgtrtttataagagtgaactctgccacactatggttaatcacatacagtgctrgggatatcttttgaaggtatcctgaacactgtgacagaagtatttgtgactcaagctatttataattctaggagtttgcagggcagatgtgtttatttttttatacaaaatgctagtgcttcctttgcacaaagaaaatattgtctgtatctgtatggatgtataaggcagatcctgaggatgctgttttcagacagtgctgtatttgcaccccagctgcattgctacttgcctggttagcccttctgact

SEQ ID NO: 8886 - DNA, 600 bp, Chicken  19866894203939_5
ttttcctatgtgaaacttcattcatcaagacggctccatttttcactgataaaacctgttgagcaacgtagcacacagcatttaggaatttaatgctcctattaccatcaaagcatagatattaagctacaccagtcagcttgaaaagcgtgcaggtgactgacacaatccaccttcctgctgcttctcttcttccttcagatgcgcacatgctaatttgtgttcacatcagcaagcttatccagaatgtrtttataagagtgaactctgccacactatggttaatcacatacagtgctrgggatatcttttgaaggtatcctgaacactgtgacagaagtatttgtgactcaagctatttataattctaggagtttgcagggcagatgtgtttatttttttatacaaaatgctagtgcttcctttgcacaaagaaaatattgtctgtatctgtatggatgtataaggcagatcctgaggatgctgttttcagacagtgctgtatttgcaccccagctgcattgctacttgcctggttagcccttctgactcacaaatgactttggggctgtggtgctcagtctgctgtacacttaacct

SEQ ID NO: 8887 - DNA, 599 bp, Chicken  19866894203944_1
  misc_feature (1)..(20): n is any nucleotide
nnnnnnnnnnnnnnnnnnnnagaagtgtcactcgctttattttaacactgaagctttgaaattgtaatggatttcaaatcactaacagaacaaaaaggtgcagtagtgatgcaaaggaaccagcagatcgtttaatgtcatatttaacattaaacagtgtgcagtaggcaggtatgtatcttttgttcagtatcaggagcaagtaaacttctgggcagttacacacattgtatttttgtctttgtcgctgacctttaaataggcctattccaaattgattgaatatatgattcaaactgmccaaatattttaagggaataatggatttagctgctagcaattccatgtgtgttcagatgattcgtactgttccacacaacagctattccagtgccctttgccagatctttgtttttgggtgatttaggaggtgttaatctctttaatgattcataatagagttctaacactgtgttttcagaggtagacaargataatgtcattcagttaccaaaaaagtggtcaaatctctaaggactgcttggaaagcttaccctaaaaggtagctgcagtgagttaggattatttttggtgtttta

SEQ ID NO: 8888 - DNA, 600 bp, Chicken  19866894203944_2
tcaggagcaagtaaacttctgggcagttacacacattgtatttttgtctttgtcgctgacctttaaataggcctattccaaattgattgaatatatgattcaaactgmccaaatattttaagggaataatggatttagctgctagcaattccatgtgtgttcagatgattcgtactgttccacacaacagctattccagtgccctttgccagatctttgtttttgggtgatttaggaggtgttaatctctttaatgattcataatagagttctaacactgtgttttcagaggtagacaargataatgtcattcagttaccaaaaaagtggtcaaatctctaaggactgcttggaaagcttaccctaaaaggtagctgcagtgagttaggattatttttggtgttttaatctgactcttaagctctgcagacccaccgtacctgatagctgctttctataccacaaagtggcatatatctrtatctctgcagatgccaagcgtggtctttatttcattttatgaaatgatgttaackcaaagcagaacctgggaagtgtgaaaacacaccaattttttgtgtttattggtgagcacgccaa

SEQ ID NO: 8889 - DNA, 499 bp, Chicken  19866894203944_3
cacacaacagctattccagtgccctttgccagatctttgtttttgggtgatttaggaggtgttaatctctttaatgattcataatagagttctaacactgtgttttcagaggtagacaargataatgtcattcagttaccaaaaaagtggtcaaatctctaaggactgcttggaaagcttaccctaaaaggtagctgcagtgagttaggattatttttggtgttttaatctgactcttaagctctgcagacccaccgtacctgatagctgctttctataccacaaagtggcatatatctrtatctctgcagatgccaagcgtggtctttatttcattttatgaaatgatgttaackcaaagcagaacctgggaagtgtgaaaacacaccaattttttgtgtttattggtgagcacgccaacagcccctttgtacccctttggaaggcactccaaccggtgagtcagacaggtcagggagaatgcagctcataagagcag

SEQ ID NO: 8890 - DNA, 443 bp, Chicken  19866894203944_4
aggtgttaatctctttaatgattcataatagagttctaacactgtgttttcagaggtagacaargataatgtcattcagttaccaaaaaagtggtcaaatctctaaggactgcttggaaagcttaccctaaaaggtagctgcagtgagttaggattatttttggtgttttaatctgactcttaagctctgcagacccaccgtacctgatagctgctttctataccacaaagtggcatatatctrtatctctgcagatgccaagcgtggtctttatttcattttatgaaatgatgttaackcaaagcagaacctgggaagtgtgaaaacacaccaattttttgtgtttattggtgagcacgccaacagcccctttgtacccctttggaaggcactccaaccggtgagtcagacaggtcagggagaatgcagctcataagagcag

SEQ ID NO: 8891 - DNA, 599 bp, Chicken  19866894203948_1
  misc_feature (1)..(15): n is any nucleotide
nnnnnnnnnnnnnnnaacagttgtcatgtgctacccacagagaggtctgaaacatatggtggcttatcatatttagcatcgtgattacgcagcacttcatttgttttgccacatctgttccattatttaatgtctatgtggaatttggtaagccacctaagttgtctcaactccaattaagcacttggtatcaacaaaaagagctcacaaggagagaaaactatctgactcaaagcaaactttattatagtctaaatcaatcagaggcacgtcttattccagataaggagataaaaatcrtcattcttaattactgagcattccccaacagccctgtgagctatgtagatgtgagaagaaaaaaaaaagcttacttctagaggactactraaaggaagaaaaacctcaaaactgtgtatcacaggtctaatacttgcagataggaaaagggttgatcatctgcatcaagtctgcatttgtaagtgcacaccagttgctaacttcgggaaaggatccatgggatacccaagaagcaataccctttatttcacaggccacagaacacttctcagcaatgctaagagcaaaatgcaggacaa

SEQ ID NO: 8892 - DNA, 600 bp, Chicken  19866894203948_2
agcacttcatttgttttgccacatctgttccattatttaatgtctatgtggaatttggtaagccacctaagttgtctcaactccaattaagcacttggtatcaacaaaaagagctcacaaggagagaaaactatctgactcaaagcaaactttattatagtctaaatcaatcagaggcacgtcttattccagataaggagataaaaatcrtcattcttaattactgagcattccccaacagccctgtgagctatgtagatgtgagaagaaaaaaaaaagcttacttctagaggactactraaaggaagaaaaacctcaaaactgtgtatcacaggtctaatacttgcagataggaaaagggttgatcatctgcatcaagtctgcatttgtaagtgcacaccagttgctaacttcgggaaaggatccatgggatacccaagaagcaataccctttatttcacaggccacagaacacttctcagcaatgctaagagcaaaatgcaggacaagaggaaaatccagcatttcgtggcaggagaagcacatgataaacaggcaaccatgtaatcagtctctgtatcaacaaggtacctgttgagt

SEQ ID NO: 8893 - DNA, 600 bp, Chicken  19866894203950_1
caacgtagctatcagtagtgattcttagttattaatgtggatcaatctaaaatgataaccaggaacatcaccagattcctccagaagttcagtatcagaacaacagtggatttatccccaaagcaatactacaagtccaaagatctccaaaacttgcaatcttgacataccaaagcagcaatgaagtatatctcaacaataatgaacagcaaagctggaatcttgaaactaaataaaaattcagacaagaactagtctgactaagttactgtagtgatgcaacagactctttatcactartagttttaacatcagaacwtaatcaawttcaaacaaattaattcagggattctattctatatgagctgctacttacactgattctccaagctttactcctccccaagcaatgaactgcttgttggagagaataggtggaatatctgcagcagctgtagacacaggtctattttccactgactccatctcaccttttatcaccacytcgtactgaggcccagatggcaacacaaggattttcaaaacacttaaaaaataaataaatagattttaatcccatcacagaacaagataaaccga

SEQ ID NO: 8894 - DNA, 600 bp, Chicken  19866894203950_2
gattcttagttattaatgtggatcaatctaaaatgataaccaggaacatcaccagattcctccagaagttcagtatcagaacaacagtggatttatccccaaagcaatactacaagtccaaagatctccaaaacttgcaatcttgacataccaaagcagcaatgaagtatatctcaacaataatgaacagcaaagctggaatcttgaaactaaataaaaattcagacaagaactagtctgactaagttactgtagtgatgcaacagactctttatcactartagttttaacatcagaacwtaatcaawttcaaacaaattaattcagggattctattctatatgagctgctacttacactgattctccaagctttactcctccccaagcaatgaactgcttgttggagagaataggtggaatatctgcagcagctgtagacacaggtctattttccactgactccatctcaccttttatcaccacytcgtactgaggcccagatggcaacacaaggattttcaaaacacttaaaaaataaataaatagattttaatcccatcacagaacaagataaaccgatgaaaacaaaacataactg

SEQ ID NO: 8895 - DNA, 600 bp, Chicken  19866894203950_3
gttattaatgtggatcaatctaaaatgataaccaggaacatcaccagattcctccagaagttcagtatcagaacaacagtggatttatccccaaagcaatactacaagtccaaagatctccaaaacttgcaatcttgacataccaaagcagcaatgaagtatatctcaacaataatgaacagcaaagctggaatcttgaaactaaataaaaattcagacaagaactagtctgactaagttactgtagtgatgcaacagactctttatcactartagttttaacatcagaacwtaatcaawttcaaacaaattaattcagggattctattctatatgagctgctacttacactgattctccaagctttactcctccccaagcaatgaactgcttgttggagagaataggtggaatatctgcagcagctgtagacacaggtctattttccactgactccatctcaccttttatcaccacytcgtactgaggcccagatggcaacacaaggattttcaaaacacttaaaaaataaataaatagattttaatcccatcacagaacaagataaaccgatgaaaacaaaacataactggaaaagag

SEQ ID NO: 8896 - DNA, 600 bp, Chicken  19866894203950_4
acagcaaagctggaatcttgaaactaaataaaaattcagacaagaactagtctgactaagttactgtagtgatgcaacagactctttatcactartagttttaacatcagaacwtaatcaawttcaaacaaattaattcagggattctattctatatgagctgctacttacactgattctccaagctttactcctccccaagcaatgaactgcttgttggagagaataggtggaatatctgcagcagctgtagacacaggtctattttccactgactccatctcaccttttatcaccacytcgtactgaggcccagatggcaacacaaggattttcaaaacacttaaaaaataaataaatagattttaatcccatcacagaacaagataaaccgatgaaaacaaaacataactggaaaagagttacacataggccttttaaaagtaccttcttaaagggaatacactctattttatatctaaggccagctttaagtgtgacaaatttaaatcctttgggccattcagctatttcatacagatcaaccaactaacgtgcaaaatatggtgagtgcatacatctcagtgaatgaatgaaacg

SEQ ID NO: 8897 - DNA, 597 bp, Chicken  19866894203952_1
ttcatactattttttctatgttgcgaattatacttatcaaggcatttgtggcaaacggacttatttgtaaaaatggcaaattcaaaagagtgagaaaatctttgatttttgtagaaatctctaaacttgtttttggcatacctagcttgtggctgataggaaatctgagtatgttaactgtaggactgtaatggattgatggcatactatctagtagtttggtttgtatttttttctttatgaacactgaaaactaagtagtaacactattttatttttcctctgttgtaggtagcttgyatgcagctcatcaatgctcttgttacatctcctgatgatctggattttaggcttcacattagaaatgaatttatccgcagtggattgaaagagatactgccagtaagcaccttgtagtctctctttgtattgctctttaaattactggactgcttgagtctgagaggagaaatgaagaacaagttctaataaattattctcaagggcattttcttaggttggagcttaagcagttagaaattagaatcaatcttaaaataagaatgaaaaggtgaagtgtgctctctgaagcttatg

SEQ ID NO: 8898 - DNA, 600 bp, Chicken  19866894203958_1
gattataaataagcactgcatattataagcacttgctcacttcaagccttcttaaaaatcacagaaatgccggagaaataatgcctgtaatattttggcttgctgaaaccatctgtttaatgtaagttatttaatttatttcaaattctaaatccacagaatccagaaacacattagggaaaaagccaagccaggtgcagtaagccaagcacagcaatgatactaggaagaaaatctaattcagctctctgatgttggcattcgtgtggaagcaccatcagaaacaatagcaaagaagcycaggcctagacttaagaacaattcattacagcttcactctagcaaaacacctttctcacaggtgactcgggaacccgtgagagagtaaaaagtagatatgatttcagtcacccytagctcttgacattaggctttcactggtttaacatacaagtgttgatgaatgcagactatctcaagcacttaccacttgtcctttcaagcatcctcttttgtagcactggtttcagcataatcagtctttctgatttctcttcatctcattctccatctccacagggatccatttcgtgcattcac

SEQ ID NO: 8899 - DNA, 600 bp, Chicken  19866894203958_2
gtttaatgtaagttatttaatttatttcaaattctaaatccacagaatccagaaacacattagggaaaaagccaagccaggtgcagtaagccaagcacagcaatgatactaggaagaaaatctaattcagctctctgatgttggcattcgtgtggaagcaccatcagaaacaatagcaaagaagcycaggcctagacttaagaacaattcattacagcttcactctagcaaaacacctttctcacaggtgactcgggaacccgtgagagagtaaaaagtagatatgatttcagtcacccytagctcttgacattaggctttcactggtttaacatacaagtgttgatgaatgcagactatctcaagcacttaccacttgtcctttcaagcatcctcttttgtagcactggtttcagcataatcagtctttctgatttctcttcatctcattctccatctccacagggatccatttcgtgcattcacaaaacacttcttgaatattttactgaagtagatctttcactcttctgtacagccaagataatattcatccattagtccaaagatttgttcagttataactattgtctgaagcac

SEQ ID NO: 8900 - DNA, 600 bp, Chicken  19866894203961_1
ggcttagtggtttgtggcagcactcctagcccagtgctggccctccctgcagcatggcagctgctcagcaaagaagcagccactagagagcatgacgagaccactaacctctccgtgtctgagctagattaggacttgaaccccacattctgaggtaaagggctgctgttgtaaagcatcttcatgattgagccataaacacaaagacaaaaagccaacacaaattcaaatcttcaaaggcaaaataaaagagcattgaccttcaagctcagagtattaaatgaaagacagcaagaaacmgtctcatctctattggacctttcatatgaaaatatatagatgtctagatgtctgcattatacatgtatttgaaytcaatggaaagtcttcagaacagactatatataaatatttatgtgttgctagtaaacctctgaacatcactgctttatggtgtttttttcttctttattttcttttttctttttttttttcctaaagcaaactacaaggctgtaaacaaagggatataaatggaagaagcaagatgtgtttagtttggaagacaaaagcaaaactaaatgatgagacagcaaatta

SEQ ID NO: 8901 - DNA, 600 bp, Chicken  19866894203961_2
agcagccactagagagcatgacgagaccactaacctctccgtgtctgagctagattaggacttgaaccccacattctgaggtaaagggctgctgttgtaaagcatcttcatgattgagccataaacacaaagacaaaaagccaacacaaattcaaatcttcaaaggcaaaataaaagagcattgaccttcaagctcagagtattaaatgaaagacagcaagaaacmgtctcatctctattggacctttcatatgaaaatatatagatgtctagatgtctgcattatacatgtatttgaaytcaatggaaagtcttcagaacagactatatataaatatttatgtgttgctagtaaacctctgaacatcactgctttatggtgtttttttcttctttattttcttttttctttttttttttcctaaagcaaactacaaggctgtaaacaaagggatataaatggaagaagcaagatgtgtttagtttggaagacaaaagcaaaactaaatgatgagacagcaaattaaacagtttatttagatcattktatagatgtatactgttgcaaaaagggaaattaatgatctttggaatgaccta

SEQ ID NO: 8902 - DNA, 568 bp, Chicken  19866894203961_3
tgattgagccataaacacaaagacaaaaagccaacacaaattcaaatcttcaaaggcaaaataaaagagcattgaccttcaagctcagagtattaaatgaaagacagcaagaaacmgtctcatctctattggacctttcatatgaaaatatatagatgtctagatgtctgcattatacatgtatttgaaytcaatggaaagtcttcagaacagactatatataaatatttatgtgttgctagtaaacctctgaacatcactgctttatggtgtttttttcttctttattttcttttttcyttttttttttcctaaagcaaactacaaggctgtaaacaaagggatataaatggaagaagcaagatgtgtttagtttggaagacaaaagcaaaactaaatgatgagacagcaaattaaacagtttatttagatcattktatagatgtatactgttgcaaaaagggaaattaatgatctttggaatgacctaaagagctccagagctcttaccttttcctcccacatttcatctacatagataggacagctcttgcctcataactgtaat

SEQ ID NO: 8903 - DNA, 431 bp, Chicken  19866894203961_4
tcatatgaaaatatatagatgtctagatgtctgcattatacatgtatttgaaytcaatggaaagtcttcagaacagactatatataaatatttatgtgttgctagtaaacctctgaacatcactgctttatggtgtttttttcttctttattttcttttttctttttttttttcctaaagcaaactacaaggctgtaaacaaagggatataaatggaagaagcaagatgtgtttagtttggaagacaaaagcaaaactaaatgatgagacagcaaattaaacagtttatttagatcattktatagatgtatactgttgcaaaaagggaaattaatgatctttggaatgacctaaagagctccagagctcttaccttttcctcccacatttcatctacatagataggacagctcttgcctcataactgtaat

SEQ ID NO: 8904 - DNA, 600 bp, Chicken  19866894203965_1
tagcctaaatacgttttttcccttcacagtattacccgtatttcatatttttatacaggtgtgctcagtttttatccatcagagctaaatgagccaggcccttcttccttcttgatgaaaaataaactgtatgttctactgtacgtgaggtgaaagagacccatcctgcagcttctgttcttgcagttcattagcagaacaattaccttggactgtagtttttgagatattccacaataagtgagttttactttttgagttggagtactgtaaacttcagagagtgaatgaaacaaaatkwcagacttcttagaattagtttcttcctcctgtacaagctgaccaatcctcctgtgagcgtggaaccctgtttatgctttggcaaagaataaccaaatgccaattaaacwaactgtggtgtcaggtgtggatttctgtttgtgtgtaagattattcaaaatgtgagtgccctaagcaagccaagcctcgggctagaatgtaatcatctgttgagtccaacccaagcatcagctggtggctgtggttctgagctgtgtacctgtcacggaatgctggtgagcgttctgtggcacggtgacc

SEQ ID NO: 8905 - DNA, 600 bp, Chicken  19866894203965_2
agcctaaatacgttttttcccttcacagtattacccgtatttcatatttttatacaggtgtgctcagtttttatccatcagagctaaatgagccaggcccttcttccttcttgatgaaaaataaactgtatgttctactgtacgtgaggtgaaagagacccatcctgcagcttctgttcttgcagttcattagcagaacaattaccttggactgtagtttttgagatattccacaataagtgagttttactttttgagttggagtactgtaaacttcagagagtgaatgaaacaaaatkwcagacttcttagaattagtttcttcctcctgtacaagctgaccaatcctcctgtgagcgtggaaccctgtttatgctttggcaaagaataaccaaatgccaattaaacwaactgtggtgtcaggtgtggatttctgtttgtgtgtaagattattcaaaatgtgagtgccctaagcaagccaagcctcgggctagaatgtaatcatctgttgagtccaacccaagcatcagctggtggctgtggttctgagctgtgtacctgtcacggaatgctggtgagcgttctgtggcacggtgacca

SEQ ID NO: 8906 - DNA, 600 bp, Chicken  19866894203965_3
cttgatgaaaaataaactgtatgttctactgtacgtgaggtgaaagagacccatcctgcagcttctgttcttgcagttcattagcagaacaattaccttggactgtagtttttgagatattccacaataagtgagttttactttttgagttggagtactgtaaacttcagagagtgaatgaaacaaaatkwcagacttcttagaattagtttcttcctcctgtacaagctgaccaatcctcctgtgagcgtggaaccctgtttatgctttggcaaagaataaccaaatgccaattaaacwaactgtggtgtcaggtgtggatttctgtttgtgtgtaagattattcaaaatgtgagtgccctaagcaagccaagcctcgggctagaatgtaatcatctgttgagtccaacccaagcatcagctggtggctgtggttctgagctgtgtacctgtcacggaatgctggtgagcgttctgtggcacggtgaccaaagttagtttgtcaaaaataaataaataaaaacaaaacaaggcaaataccccagtggctggtatttctcctcatttgcttctctaatctgacccatgagaaggagaaga

SEQ ID NO: 8907 - DNA, 600 bp, Chicken  19866894203968_1
ccaaatccagcttcattttgtaaatgaattttcatgactgatcagcatatctgctaatcaacatatctacagtctagtccttcaccatgaatgccaagaacagacagtactgatgacaaaaaatgatacaatctgcacgttcattgaattatcagtgcttgatggatactccgtgcccttggcagaaaattaaatgtgattgactggagttggaatggatgaagatgaagtccatttcaaaagtctgttttttctccaaacctatagccaagagcaatgtcccagcacacaatcctatcrttcattgcagaatttcatttcaaagtaactctgcttagcatgccactcgaaacatcgcaggaggtgtgccagtactaccacaggctgtgcacatgagctgtgaacaccttgcagtgcagacaacagtgcctctcatccatgttgaccttgacagacactgccacaacaaacctacctgggataccatgactcaggtcctggaacacacttgcctgaatatgttggaataaaacagtggtagtttcagaatgcaacaggtaagcagtatagaacctggctcacaactggaacttgcttgtt

SEQ ID NO: 8908 - DNA, 599 bp, Chicken  19866894203974_1
  misc_feature (1)..(127): n is any nucleotide
nnnnnnnnnnnnnnnnnnnnnnnnnnnnnnnnnnnnnnnnnnnnnnnnnnnnnnnnnnnnnnnnnnnnnnnnnnnnnnnnnnnnnnnnnnnnnnnnnnnnnnnnnnnnnnnnnnnnnnnnnnnnnnntaagctgttggcatctgaggttacaacgctcaggcctatgttttggcagtgggatatgcccactttttcctttacgatctcatatttgagtatagctctggaagctgcagttcatgttttgcctgaaactagacagacatttcagtctgttatttattttataagattggcaygtagattatctaggctgtagtcttcgctgcatttctgtcaaatgctctggacactgtggttgaaaacaatgctctttaatcttgtgatgtttaccagccccctttagaagcaagcatgaattctttatgaccaatttcagttgagaacrtcctcccataaatwaaaacataaaactgctaatacttctggaccaggactaaagtctgtyttgctgtatgagcaagccaacatccaatcttcacaagtgcctgtgctacataggccattagtctccaattatgatcagacagttagaaat

SEQ ID NO: 8909 - DNA, 600 bp, Chicken  19866894203974_2
acaacgctcaggcctatgttttggcagtgggatatgcccactttttcctttacgatctcatatttgagtatagctctggaagctgcagttcatgttttgcctgaaactagacagacatttcagtctgttatttattttataagattggcaygtagattatctaggctgtagtcttcgctgcatttctgtcaaatgctctggacactgtggttgaaaacaatgctctttaatcttgtgatgtttaccagccccctttagaagcaagcatgaattctttatgaccaatttcagttgagaacrtcctcccataaatwaaaacataaaactgctaatacttctggaccaggactaaagtctgtyttgctgtatgagcaagccaacatccaatcttcacaagtgcctgtgctacataggccattagtctccaattatgatcagacagttagaaatatgtactatgtctcccttggaaatattcaggaccaatttattttatgtttaaatgccttaagactgcaccattttttgcagtttctcaagttctttcctaacttatgcccagtatgtttgctgtggtgaacatctgttcctaacagcatc

SEQ ID NO: 8910 - DNA, 600 bp, Chicken  19866894203974_3
tatgttttggcagtgggatatgcccactttttcctttacgatctcatatttgagtatagctctggaagctgcagttcatgttttgcctgaaactagacagacatttcagtctgttatttattttataagattggcaygtagattatctaggctgtagtcttcgctgcatttctgtcaaatgctctggacactgtggttgaaaacaatgctctttaatcttgtgatgtttaccagccccctttagaagcaagcatgaattctttatgaccaatttcagttgagaacrtcctcccataaatwaaaacataaaactgctaatacttctggaccaggactaaagtctgtyttgctgtatgagcaagccaacatccaatcttcacaagtgcctgtgctacataggccattagtctccaattatgatcagacagttagaaatatgtactatgtctcccttggaaatattcaggaccaatttattttatgtttaaatgccttaagactgcaccattttttgcagtttctcaagttctttcctaacttatgcccagtatgtttgctgtggtgaacatctgttcctaacagcatcaggcttcgcatcag

SEQ ID NO: 8911 - DNA, 600 bp, Chicken  19866894203974_4
tatttgagtatagctctggaagctgcagttcatgttttgcctgaaactagacagacatttcagtctgttatttattttataagattggcaygtagattatctaggctgtagtcttcgctgcatttctgtcaaatgctctggacactgtggttgaaaacaatgctctttaatcttgtgatgtttaccagccccctttagaagcaagcatgaattctttatgaccaatttcagttgagaacrtcctcccataaatwaaaacataaaactgctaatacttctggaccaggactaaagtctgtyttgctgtatgagcaagccaacatccaatcttcacaagtgcctgtgctacataggccattagtctccaattatgatcagacagttagaaatatgtactatgtctcccttggaaatattcaggaccaatttattttatgtttaaatgccttaagactgcaccattttttgcagtttctcaagttctttcctaacttatgcccagtatgtttgctgtggtgaacatctgttcctaacagcatcaggcttcgcatcagaaaagccaacttgagacagtagctcaccattcaacaatcctggaag

SEQ ID NO: 8912 - DNA, 600 bp, Chicken  19866894203976_1
gtgtgaaacctccacattctctcagataacatctacaccgtaactgctgtgacagcccactactggcacatcagttggagacatgcatcctttatagtttacattatgcatatatgtatttatttgtgatatcagaaagagtttctcaagaggtattatttgctccagattgtgcataatgcatggacttctatcagtgttcaaagtaggctttttagatagtttgcctgaatgtcctaactagagagctgtgtattaaagaaaaaatgatcaaaaaaaaaaaggaaagctgatgggttytgggaggtgcagcgtggtcagtaagtttcctgtatatttacaatttttttttttttttttttttttttttttttttttttgctttgatagaaattcattcttgcaacagggtaaatctgaaaatgtttcagtttacttcaggtagtttaactgcatgaaatttcttctagtttttttttctacttctcaaagttgaaagcatcttttactcaataccacaatggtattgagtaaaatatattctatattatatacctgtacattttttcaatcatttttcctgattcagaaaaacctact

SEQ ID NO: 8913 - DNA, 600 bp, Chicken  19866894203978_1
cagttgcaccaaaagaaattactgtttaacccccttaataacccacagctgtgcctcacaatgcaggaagaatgctgaggaatcagctataccacttaatgggaaaggaacgattcgagacaactaaaacccagcctgaaaaactggcagctgagagaagttaatttagaagggaaaaaaagacacaggtccctctccaaatttaagttgctgctggatatttcttattcgtagctaaggtctcatctctgtaacacaacaccacgaagcatttacacgtgacagcccttagagtcaatkggaaagcgtagagaaacaattttagaggaccaaaatactgaaattattgacgcacgctggcaatctaagaaagccttgctcacagtgctctaagcagactttgcatgagaaccagctcaagcactctgtacctgattcagaatacctaaagtaatgacagcagtcacrttgcaggctgcatgcccgcacacagcctggaagcrgcaggcgccatctcgtgaccccacgcagcaccrcttgggtttcccagcaccttcagctcgtagggcgcagagttccaggccccacagtaacccagca

SEQ ID NO: 8914 - DNA, 600 bp, Chicken  19866894203978_2
gaagggaaaaaaagacacaggtccctctccaaatttaagttgctgctggatatttcttattcgtagctaaggtctcatctctgtaacacaacaccacgaagcatttacacgtgacagcccttagagtcaatkggaaagcgtagagaaacaattttagaggaccaaaatactgaaattattgacgcacgctggcaatctaagaaagccttgctcacagtgctctaagcagactttgcatgagaaccagctcaagcactctgtacctgattcagaatacctaaagtaatgacagcagtcacrttgcaggctgcatgcccgcacacagcctggaagcrgcaggcgccatctcgtgaccccacgcagcaccrcttgggtttcccagcaccttcagctcgtagggcgcagagttccaggccccacagtaacccagcaaatcctcaggctctttgcattgctgaaaactaaagtcaaacagatgagatgacaaccgctgtggaaggcaccagccaggggccgcagcctcatcaatagagaggaggttacatacaggccagatccttgtattgttcaggttctattaaaatcagtttgaatcaataa

SEQ ID NO: 8915 - DNA, 600 bp, Chicken  19866894203978_3
taagttgctgctggatatttcttattcgtagctaaggtctcatctctgtaacacaacaccacgaagcatttacacgtgacagcccttagagtcaatkggaaagcgtagagaaacaattttagaggaccaaaatactgaaattattgacgcacgctggcaatctaagaaagccttgctcacagtgctctaagcagactttgcatgagaaccagctcaagcactctgtacctgattcagaatacctaaagtaatgacagcagtcacrttgcaggctgcatgcccgcacacagcctggaagcrgcaggcgccatctcgtgaccccacgcagcaccrcttgggtttcccagcaccttcagctcgtagggcgcagagttccaggccccacagtaacccagcaaatcctcaggctctttgcattgctgaaaactaaagtcaaacagatgagatgacaaccgctgtggaaggcaccagccaggggccgcagcctcatcaatagagaggaggttacatacaggccagatccttgtattgttcaggttctattaaaatcagtttgaatcaataattgcttgcagaggccacgatcaatggcaatgaact

SEQ ID NO: 8916 - DNA, 600 bp, Chicken  19866894203978_4
aaggtctcatctctgtaacacaacaccacgaagcatttacacgtgacagcccttagagtcaatkggaaagcgtagagaaacaattttagaggaccaaaatactgaaattattgacgcacgctggcaatctaagaaagccttgctcacagtgctctaagcagactttgcatgagaaccagctcaagcactctgtacctgattcagaatacctaaagtaatgacagcagtcacrttgcaggctgcatgcccgcacacagcctggaagcrgcaggcgccatctcgtgaccccacgcagcaccrcttgggtttcccagcaccttcagctcgtagggcgcagagttccaggccccacagtaacccagcaaatcctcaggctctttgcattgctgaaaactaaagtcaaacagatgagatgacaaccgctgtggaaggcaccagccaggggccgcagcctcatcaatagagaggaggttacatacaggccagatccttgtattgttcaggttctattaaaatcagtttgaatcaataattgcttgcagaggccacgatcaatggcaatgaactcttacgcttacagctctcagccctcaggagcag

SEQ ID NO: 8917 - DNA, 599 bp, Chicken  19866894203983_1
  misc_feature (1)..(22): n is any nucleotide
nnnnnnnnnnnnnnnnnnnnnntaaagatgttgtttatcactacagttgtgtttctttcccttgtctatttgtcagtcgtaccggtatttcccttcaaacattgaggtcattgaatggcttggagcctattgcattgacacccagttttgtgaaaaggccattgagtattttgaaagagcagcacttatcctgtaagttatctttattttatatctatttaaaaatgttgtgattagacatctgtaattgtactcagagataaatgacttgaataattttagtattgtaagcaagtatcrgagtaaactattttggaacttcatctaattttccccaaatttctgtttgtttacagggtgtttttgttcttactgtgttatttcaatgctaagtaagggcccaggatggtattagctattaaaacctcttttctctatcctttgtcgttagacatagcgatgaagtagggaacgcttctgctaagtcagcaagacttccttctctttggctttatgtgaaatattccctttctgtttatcacacagtgaggaactgatggtgtagataaatgtatatttaaatgttcttgctgagtttt

SEQ ID NO: 8918 - DNA, 600 bp, Chicken  19866894203996_1
tgtttggtctgggaagtgttactgtacagaatgatctacatggtatggggagcggcataatgttctggttttgttactacgttgtctactattattatttatatgttacttgtagccagtaacagaaatatttatgtatcaataacaatactactgttattattcctaacagctttgataatggtaattttcagcctggaggctgtttcagcttgctaaaactaattccagtacaaaattcctgggagccatttctgctcccgttgatttcagtaagatcaggatcaaagctagagatcygctctgacttccatggaaattacaaaaacaactcaacttgatcaaattaggggttaattaaagctcacagtttttaacacacttccatcctgacctgtggctctgctgctgttctggttctggagaatcttggcttgcatctggcacagcatgaagtggcagatatcactggctagcaacagcttcctcgttatacacttatacctgaagcatcttctcattttcatttctggcctctgatacagtggaagcttgtgaaatagtctacattcaggacattttgatttacataatccataa

SEQ ID NO: 8919 - DNA, 600 bp, Chicken  19866894203997_1
ttgcttcatacacacttccattccagacatcattttgttagggtgctcctctgctgccatctgttgtacagcaacaaaatataattgaatattggaaggaaggttcagcctttagtgccatactaccagcatctgtctgactttgtaaaccagcataataaaataggaggcattaatttcagagcagccctctaggactggaaacaactttttgcttacagcagtgtctgtctagatcctgaggtctttatccagatgagttttgaaaatctccaaggatgcatgacctctctagacaaygtatctcattgcttgactgtcctcacaagaaaactttctaattgtattcagtatgaacttctttcattkttttgaaaatgaggtgagggcctcttatccctccttccatgcactactgtgaagagaaaaactgtgttctcagagtcaccaccccacaaatggaggtggatatgaggtgcctcaaagacttagctcctgtttgtacacgtcctggtctctcagcctctccacatagggcagctactccagccctgatcaccttaatgcctgtacagtgagctttctacagtgtgcttatgt

SEQ ID NO: 8920 - DNA, 600 bp, Chicken  19866894203997_2
agcaacaaaatataattgaatattggaaggaaggttcagcctttagtgccatactaccagcatctgtctgactttgtaaaccagcataataaaataggaggcattaatttcagagcagccctctaggactggaaacaactttttgcttacagcagtgtctgtctagatcctgaggtctttatccagatgagttttgaaaatctccaaggatgcatgacctctctagacaaygtatctcattgcttgactgtcctcacaagaaaactttctaattgtattcagtatgaacttctttcattkttttgaaaatgaggtgagggcctcttatccctccttccatgcactactgtgaagagaaaaactgtgttctcagagtcaccaccccacaaatggaggtggatatgaggtgcctcaaagacttagctcctgtttgtacacgtcctggtctctcagcctctccacatagggcagctactccagccctgatcaccttaatgcctgtacagtgagctttctacagtgtgcttatgtcttccaaaggacacaaaactggatacagtacacatgagtgctgagtagaaggagataacaattttcctc

SEQ ID NO: 8921 - DNA, 600 bp, Chicken  19866894204003_1
cattactgggtatgaaccgattattatatagatggctctaagacctcatataaacgtttgcaaaatcacgcgtcctctagtgaaattatacaccactaagtgatgtatttcacatcatttgctgttgatgtcttttcacctttgttagttggtacaagaatcagatggaaagagtgtgaatgctatctccaaatgtgaatgcacagttttatccttcgagaatgatttctttcagctttataggaacgggaggacaaataagtcaagtcttttaaaactttttccatccagatcactaarctggatctcaagaacgaaatcctgaagcacaggaaaaatraaagactgtacggtattgtaagaggagaataaacttctttgatagtgacttgatgggagaaagaaagcccacaaaactttgtacctacctgaatcttctaacatatgcatactgttgagataacattcagcacttcaagtagccttgtagagaaatattaagtggaaaataaacaagaaaaaacctaccagaagggtgctctgggttactgctgaaatataatgtgattttaataatagtatgaaaatgagtaatactgc

SEQ ID NO: 8922 - DNA, 600 bp, Chicken  19866894204003_2
agacctcatataaacgtttgcaaaatcacgcgtcctctagtgaaattatacaccactaagtgatgtatttcacatcatttgctgttgatgtcttttcacctttgttagttggtacaagaatcagatggaaagagtgtgaatgctatctccaaatgtgaatgcacagttttatccttcgagaatgatttctttcagctttataggaacgggaggacaaataagtcaagtcttttaaaactttttccatccagatcactaarctggatctcaagaacgaaatcctgaagcacaggaaaaatraaagactgtacggtattgtaagaggagaataaacttctttgatagtgacttgatgggagaaagaaagcccacaaaactttgtacctacctgaatcttctaacatatgcatactgttgagataacattcagcacttcaagtagccttgtagagaaatattaagtggaaaataaacaagaaaaaacctaccagaagggtgctctgggttactgctgaaatataatgtgattttaataatagtatgaaaatgagtaatactgcctattagctagcatgatagagcaacgagttaaaagcaaac

SEQ ID NO: 8923 - DNA, 495 bp, Chicken  19866894204006_1
ttaaagcaccgaacagcttttaaaaaaaaaaaagaagaagaagaaaaaagagtaatcagttgcttcgttatagctctgtttgctgtgtctttgtttccctgagtgcctgagagaacatgaacaaaattgccagccgacacattacaaagacagggtgacaagctggatgaccctataagtcttgttcacatcttgtgtctgggttcttgacttgcatcttaaaaggctttcctatcaatgcctttgcagggaacctgctatgccattcagaggagtatgtcaaacccagacagaaggatscactaaagaaacagacaactgacgacttaaacaaaaacytccaaagccagaagagctgtttattcatttgaaatgcaaggactctttcacaagcataaccctgcgctccccagcatgcacccacccatctctgcctacgtctcttactctggtgtcatcaggagtggcactacacagcaggaaaagagaccggtt

SEQ ID NO: 8924 - DNA, 456 bp, Chicken  19866894204006_2
ttaaagcaccgaacagcttttaaaaaaaaaaaagaagaagaagaaaaaagagtaatcagttgcttcgttatagctctgtttgctgtgtctttgtttccctgagtgcctgagagaacatgaacaaaattgccagccgacacattacaaagacagggtgacaagctggatgaccctataagtcttgttcacatcttgtgtctgggttcttgacttgcatcttaaaaggctttcctatcaatgcctttgcagggaacctgctatgccattcagaggagtatgtcaaacccagacagaaggatytccaaagccagaagagctgtttattcatttgaaatgcaaggactctttcacaagcataaccctgcgctccccagcatgcacccacccatctctgcctacgtctcttactctggtgtcatcaggagtggcactacacagcaggaaaagagaccggtt

SEQ ID NO: 8925 - DNA, 600 bp, Chicken  19866894204010_1
ttactctgccactccttcttgttatgtatgtttgaattacaaagtagttgctgaaatgtatcccacatctgaacttcttcacagtgatttgatcggagtagcaattaatcagatcgttaaaagtcatttgctggtatttttttaaaaaatatcatatacaccaaatgcacgcacggttaaataaatgttggcaaaataaattcagataaagaactgctgcacagtcagatcagtaatttgtaggaggagacctaacatcacaccttaggcatcataccttaggcgatcaggtatgatgasagactgactggtggagcagaccttcttgcactcccagctgctactgactcatggatgaatactgactgttaactctgcttttgtgagttttgcttttctaatatgaaatgcaatacaaaaccagaaactccttttggaaacactgtcctcagtacgcaggccccactgtttagctgaaattcccacttgcaagatatactgttacaaaactcaagccaatgtgacaggaaacaggttttcacactatgaggatgtcaccactaagtgctatcacagtaacatctcagctggggtttgaaa

SEQ ID NO: 8926 - DNA, 599 bp, Chicken  19866894204013_1
  misc_feature (1)..(77): n is any nucleotide
nnnnnnnnnnnnnnnnnnnnnnnnnnnnnnnnnnnnnnnnnnnnnnnnnnnnnnnnnnnnnnnnnnnnnnnnnnnnntgaactaactaattgttgttgccttttacattttcttttgttttgtgaattgatgggttgtgtctcatctaaaagaatgatgtctgtctgtctgagggagggaattgggtgtaccaaaatgctcttgcttgtttatgctttctgtgggctttagccatagtccctggagtaaaaaatgtcttctttccctaacccttgggaactgataattagcaaggtaacratgcaccaaaggaaagttggtatggctgcatctttgctctaacccacagcatgctactgctcccatgcaaaaggcagctatatctgcagaaggacctgtaacaggtacagcatctaaaaagagtggctattttcctcttctcatgaattagatctctttaaaaggtaatttttgaggctattgctgggcttgaaccattgactttctatgggcagtggacatgcagtgatttctactaaatggattgatttgaaaaccgtaaaatgtgttcttacgagcgaaaagcataccttgtgcat

SEQ ID NO: 8927 - DNA, 599 bp, Chicken  19866894204032_1
  misc_feature (1)..(164): n is any nucleotide
nnnnnnnnnnnnnnnnnnnnnnnnnnnnnnnnnnnnnnnnnnnnnnnnnnnnnnnnnnnnnnnnnnnnnnnnnnnnnnnnnnnnnnnnnnnnnnnnnnnnnnnnnnnnnnnnnnnnnnnnnnnnnnnnnnnnnnnnnnnnnnnnnnnnnnnnnnnnnnnnnnnncccacatttctttctagtttaattgggaaggcttgaagcctttgacttatagctagaagtagttgagaatactgttcagcttttctcaagctttcagaaaacatattaaagaggctttctgcttttcctcctccayraattcataaagccagttcctgatctttttccccarcttcatctttcttctaaaaagctctatttgacatattttgtggttttgaccctttggaaaagcattttatttaagatataatactcttaagattattaacatttttcctctcttcttctagcaaataagtgaggtatccttaggtgaaayacatgcaaagaatttgcagtttggatatttccatgtctcaatacactgacaataagaaatggtgaacattgtgaattttgaaccaggcaagaatctgctactcttgtagcaaa

SEQ ID NO: 8928 - DNA, 599 bp, Chicken  19866894204032_2
  misc_feature (1)..(163): n is any nucleotide
nnnnnnnnnnnnnnnnnnnnnnnnnnnnnnnnnnnnnnnnnnnnnnnnnnnnnnnnnnnnnnnnnnnnnnnnnnnnnnnnnnnnnnnnnnnnnnnnnnnnnnnnnnnnnnnnnnnnnnnnnnnnnnnnnnnnnnnnnnnnnnnnnnnnnnnnnnnnnnnnnnncccacatttctttctagtttaattgggaaggcttgaagcctttgacttatagctagaagtagttgagaatactgttcagcttttctcaagctttcagaaaacatattaaagaggctttctgcttttcctcctccayraattcataaagccagttcctgatctttttccccarcttcatctttcttctaaaaagctctatttgacatattttgtggttttgaccctttggaaaagcattttatttaagatataatactcttaagattattaacatttttcctctcttcttctagcaaataagtgaggtatccttaggtgaaayacatgcaaagaatttgcagtttggatatttccatgtctcaatacactgacaataagaaatggtgaacattgtgaattttgaaccaggcaagaatctgctactcttgtagcaaat

SEQ ID NO: 8929 - DNA, 599 bp, Chicken  19866894204032_3
  misc_feature (1)..(128): n is any nucleotide
nnnnnnnnnnnnnnnnnnnnnnnnnnnnnnnnnnnnnnnnnnnnnnnnnnnnnnnnnnnnnnnnnnnnnnnnnnnnnnnnnnnnnnnnnnnnnnnnnnnnnnnnnnnnnnnnnnnnnnnnnnnnnnnncccacatttctttctagtttaattgggaaggcttgaagcctttgacttatagctagaagtagttgagaatactgttcagcttttctcaagctttcagaaaacatattaaagaggctttctgcttttcctcctccayraattcataaagccagttcctgatctttttccccarcttcatctttcttctaaaaagctctatttgacatattttgtggttttgaccctttggaaaagcattttatttaagatataatactcttaagattattaacatttttcctctcttcttctagcaaataagtgaggtatccttaggtgaaayacatgcaaagaatttgcagtttggatatttccatgtctcaatacactgacaataagaaatggtgaacattgtgaattttgaaccaggcaagaatctgctactcttgtagcaaataagtatttttctttagctagggaaacatgcatctg

SEQ ID NO: 8930 - DNA, 600 bp, Chicken  19866894204032_4
ttgggaaggcttgaagcctttgacttatagctagaagtagttgagaatactgttcagcttttctcaagctttcagaaaacatattaaagaggctttctgcttttcctcctccayraattcataaagccagttcctgatctttttccccarcttcatctttcttctaaaaagctctatttgacatattttgtggttttgaccctttggaaaagcattttatttaagatataatactcttaagattattaacatttttcctctcttcttctagcaaataagtgaggtatccttaggtgaaayacatgcaaagaatttgcagtttggatatttccatgtctcaatacactgacaataagaaatggtgaacattgtgaattttgaaccaggcaagaatctgctactcttgtagcaaataagtatttttctttagctagggaaacatgcatctgtgtcctcgtggtgtatcaaaaggaccacataaacaggaataataggttttgmgtatttatgctcactscatctatacaaatattaattaataaagcttattatttgaaaaaaaaaaagttgtttaacagtaatttagtgaaatgtatagga

SEQ ID NO: 8931 - DNA, 600 bp, Chicken  19866894204032_5
ctttggaaaagcattttatttaagatataatactcttaagattattaacatttttcctctcttcttctagcaaataagtgaggtatccttaggtgaaayacatgcaaagaatttgcagtttggatatttccatgtctcaatacactgacaataagaaatggtgaacattgtgaattttgaaccaggcaagaatctgctactcttgtagcaaataagtatttttctttagctagggaaacatgcatctgtgtcctcgtggtgtatcaaaaggaccacataaacaggaataataggttttgmgtatttatgctcactscatctatacaaatattaattaataaagcttattatttgaaaaaaaaaaagttgtttaacagtaatttagtgaaatgtataggattctgggggtagttctattcttcyagttacaaccaaatagcaacgtgaatgcatacttataaaaaaataaattaatatgtgtctcagaaacacacattcatacccatgcattgtatacatatattgaaaccagaacttaagcatttctccatttgtgccagccctatcatatactaagatatcccacttaagttgttattt

SEQ ID NO: 8932 - DNA, 600 bp, Chicken  19866894204032_6
tatttaagatataatactcttaagattattaacatttttcctctcttcttctagcaaataagtgaggtatccttaggtgaaayacatgcaaagaatttgcagtttggatatttccatgtctcaatacactgacaataagaaatggtgaacattgtgaattttgaaccaggcaagaatctgctactcttgtagcaaataagtatttttctttagctagggaaacatgcatctgtgtcctcgtggtgtatcaaaaggaccacataaacaggaataataggttttgmgtatttatgctcactscatctatacaaatattaattaataaagcttattatttgaaaaaaaaaaagttgtttaacagtaatttagtgaaatgtataggattctgggggtagttctattcttcyagttacaaccaaatagcaacgtgaatgcatacttataaaaaaataaattaatatgtgtctcagaaacacacattcatacccatgcattgtatacatatattgaaaccagaacttaagcatttctccatttgtgccagccctatcatatactaagatatcccacttaagttgttattttcatgaagtaccactg

SEQ ID NO: 8933 - DNA, 600 bp, Chicken  19866894204032_7
atatttccatgtctcaatacactgacaataagaaatggtgaacattgtgaattttgaaccaggcaagaatctgctactcttgtagcaaataagtatttttctttagctagggaaacatgcatctgtgtcctcgtggtgtatcaaaaggaccacataaacaggaataataggttttgmgtatttatgctcactscatctatacaaatattaattaataaagcttattatttgaaaaaaaaaaagttgtttaacagtaatttagtgaaatgtataggattctgggggtagttctattcttcyagttacaaccaaatagcaacgtgaatgcatacttataaaaaaataaattaatatgtgtctcagaaacacacattcatacccatgcattgtatacatatattgaaaccagaacttaagcatttctccatttgtgccagccctatcatatactaagatatcccacttaagttgttattttcatgaagtaccactgcacctactgatcaccattttctatggacaccagtatagaaaacattacttcttgtaatcatgacaaaaatttcttctaaggataattctctttctcaaagggaacct

SEQ ID NO: 8934 - DNA, 600 bp, Chicken  19866894204032_8
aagcatttctccatttgtgccagccctatcatatactaagatatcccacttaagttgttattttcatgaagtaccactgcacctactgatcaccattttctatggacaccagtatagaaaacattacttcttgtaatcatgacaaaaatttcttctaaggataattctctttctcaaagggaacctatcactttctgcccttttccttcatgtcacagatccttctgatgccctaccctatttttcatgatagtaatatcactgaagttgattttttccccttacccagatcagacttamctgataaaggacaggacagggaaacccatcactaacatcaacaaccccacctagtagggcttccatgcaggtaagggttatgcattctagcttaatgtaaaacaaccaaattcagtctgaaatagtttctccattctcaaaaacaaatttgaggactagaactttgttcttgcagaaattatccaactttgaacctaactccctgcataaaaccacctagaaagtggttactggacagaagtcacctgtaccatataagagagaaatatgggatcaagcttcactgttaagtataatgat

SEQ ID NO: 8935 - DNA, 600 bp, Chicken  19866894204049_1
catcttggtgcgggaagaataatcagtgcagcatggttgtttgaatttaaaagttacaaaagtgggaatttgagagttgcttaacttggaacacttcctcaaaggttgtactgaaagcatggaaaaacaaagatcctatttgagttatttgtgcacggagaggcctgacgtttgcggaaggacactaaactttccctgtctgaagggaaggtttggaaagtaacaaaggcactgttgtttgagtacttggatgtattggatgatgtttgactacttggatgatgacagtaatgattctcymttgcaaggctactgactttttcttacagagccacctctgtgatgttttattccaggagatggaaacttgcacttgaacatcacggcagaatcctacagccattcccttctggatgctatcgagccatttgtgtacgagtggactgcaagatgcaatggcagcatcagcgcagagcacgggctgggcttcaagaaaaagcagttcattcagtacagcaaacccaatgaagcagtctttctaatgcagcgtttcaaggccatgttagaccccaaaggaatcctcaatccatacaagacact

SEQ ID NO: 8936 - DNA, 600 bp, Chicken  19866894204049_2
atcttggtgcgggaagaataatcagtgcagcatggttgtttgaatttaaaagttacaaaagtgggaatttgagagttgcttaacttggaacacttcctcaaaggttgtactgaaagcatggaaaaacaaagatcctatttgagttatttgtgcacggagaggcctgacgtttgcggaaggacactaaactttccctgtctgaagggaaggtttggaaagtaacaaaggcactgttgtttgagtacttggatgtattggatgatgtttgactacttggatgatgacagtaatgattctcymttgcaaggctactgactttttcttacagagccacctctgtgatgttttattccaggagatggaaacttgcacttgaacatcacggcagaatcctacagccattcccttctggatgctatcgagccatttgtgtacgagtggactgcaagatgcaatggcagcatcagcgcagagcacgggctgggcttcaagaaaaagcagttcattcagtacagcaaacccaatgaagcagtctttctaatgcagcgtttcaaggccatgttagaccccaaaggaatcctcaatccatacaagacactg

SEQ ID NO: 8937 - DNA, 600 bp, Chicken  19866894204053_1
ctatttcagaaatatgcttttcttgttgttgtgtctttgggtgataacttgcagtggctgatctgaaaggtctgcacagtcaccatgaatttagtggcctaagctttgttctaccagagaatataacagctaaaaaaactccaaagaaaacctaaaccttgaattcttctattaatttcttcacagttacttaaaataattcaccaatgtagcatcaccaataatattcatatctaaaatggtacataaaacatcttgttttgttttcaatcttagaaagtatgagatattctattagtragtagtcctgttaaattcctcagattgtaaaaactgaacttatttttgcagttatcttgattatcttcacaaaaataacaaattcttacattcaaaaatattttaattctttcagacatactaccctcaaaaagaaagaaacaactctgaaaactgatgtaatgttaacattatacttagtggatatagccaatctcttgaaggagatttatgacagaaagaaagcttagagaagcagacttacaatgaatgtgagaactttagtccatccttttgtgcaccatcctttggtgcactctg

SEQ ID NO: 8938 - DNA, 600 bp, Chicken  19866894204054_1
gaaaatgacacgatcggcgcaagaagctctaaacacattaacaacagatttggagttatttattgatgtttttgcccactggcagtgtaaaatgtgtgtcggttgtcatcaccagtaacaatttcagcacattgtgttccgtttttatttacaccagtggcaacatgcttataaacaccggcaccgggggtgggtcaggaggtcagcgctcggggttaggaatgggaagggtcatcggctgttaacccagggctggcagcagcagtgcggccccgtgcgtgccggggccttcggaacctygtgaaactttggggtaatttggctgtagatacttcctaggatttgaggttggctgtttctgtagggaaggggtaaaaagagtctgagatttggtatcttcatctgttctcggggcttcctgagctttgcaccaaattgtgaagtattagggttgaattccctcctgcttggaagcagtgggagttttccattggctttggctgcagccgggtcaggctgagccgatatgtcacgaaataaaaaagatgggtggcagcgggtctgaaacgtgagctgcggccgccgaggtagaggaggtgc

SEQ ID NO: 8939 - DNA, 600 bp, Chicken  19866894204054_2
tattagggttgaattccctcctgcttggaagcagtgggagttttccattggctttggctgcagccgggtcaggctgagccgatatgtcacgaaataaaaaagatgggtggcagcgggtctgaaacgtgagctgcggccgccgaggtagaggaggtgctgagaaaagcgtgcagcttctctttcacaatcagagggttttccacttctgtcagggctttcgggaacacacagacctgggctctcgaggagaacctggagtcacagagtgcagaaggaaggcaggcacacagtgcagcacaytgcaggacctgatggtgagaagcagctccccggggtgcagctctgcgccccatggggacggcgtgcggcgctgctccgtcctgcagcacggctcactgctcctcgctgagcacacgcactgcggctgccggggtgtgagggagaagggtattcctcccagagccctcaccttcctgccctttggagaagcttttgcttttaatgctcaaaagccaaagtgatttttttattatattctttatacactccgctttccggaagccggtttaaaattcataaccgaaaaagctgcccagggct

SEQ ID NO: 8940 - DNA, 600 bp, Chicken  19866894204054_3
ataatatgtgaaagtagaaaaatatttttcccttttcgctgtgaggggagtgcccaaagtcgggtgtttctccccacggtgcgttcgggcagtgtgggctgatggaggcgcggctgacagcagcaccaggagcggccctcacacaccccgttgtgtaacaggactgcagtgctggactgtggcactgtgtgcacacccgtggtgttactattaattttctgaatcaaatcctgcgcgaggggccagatggcttgggagcatcttgtcatcccaaccgctgcaaacacagccagccacagraaaaaagaagattgaactgtgatttcacagatttttcattagttaatctgggatagagaggcttcaaagatcccatcagttaattctctcagcacttgcggaaatttctggcacatcgtgctaaagcgggtttgaaatctaagctgagaatcgctgccttgtagaagctgatctgtgcgtgctggtattaaaaattacagtaataacaaaactgcgtgtgtaaataaagctcctttgggcggaactgcgctgaggctgatgcttcagaaaacacttggaatgccctctgttactcaaagt

SEQ ID NO: 8941 - DNA, 600 bp, Chicken  19866894204061_1
atgtatttagtaagaatttacactgcttgaattatttaataaacagatgtaagattgaaatgaataatttagattaaacatggataatggagctttaaagatgcagtgctcttaagtcaaaaatcttttgttccttatattgatgttgaaaatagtgtatgtgctccataagactagatggaagaacagttgcttctcactacaactcattttaaaagaatctcatagagaaataaatgcttcagagacaagctgcaaacattataatcatgtgaaggtattatagctatatgacataaytccctgcttttattcaagtgtaaccaggtcttgtcattgattaacctgcacatatgtcatattctacaagattttcagatactgatactgaattgtcatttcatcatttcyattcacatactaatttccactttctggtgtaattttcatttcattatcactccatgtttttaccatcaagacattgtgttcacttcatttcttccttttattttgtttcctttgatgccctagcagccaggtttaaggcagtgtcgcattaatttatttttactagaggaaaggaaattagtatcttgg

SEQ ID NO: 8942 - DNA, 541 bp, Chicken  19866894204061_2
ttaagtcaaaaatcttttgttccttatattgatgttgaaaatagtgtatgtgctccataagactagatggaagaacagttgcttctcactacaactcattttaaaagaatctcatagagaaataaatgcttcagagacaagctgcaaacattataatcatgtgaaggtattatagctatatgacataaytccctgcttttattcaagtgtaaccaggtcttgtcattgattaacctgcacatatgtcatattctacaagattttcagatactgatactgaattgtcatttcatcatttcyattcacatactaatttccactttctggtgtaattttcatttcattatcactccatgtttttaccatcaagacattgtgttcacttcatttcttccttttattttgtttcctttgatgccctagcagccaggtttaaggcagtgtcgcattaatttatttttactagaggaaaggaaattagtatcttggtggaatatgtactacaggggatcaagtaggcattacagaactcttaaacaca

SEQ ID NO: 8943 - DNA, 600 bp, Chicken  19866894204064_1
gcacttccagttggcgatggccatggggcgatggctgagcacagcgcagtgagtggggatggacgagcagaaggcaaaagtgacattcttgtgctgtgcaaggactgctgcaggaggtcagcaatgctgcttgacaagtcctacacacagcaatgatacaagtcgtcaacgccttccccagccttcctcttcaccttcctcactcctgagtctactgctaaatgggtttggagacagggaggcaagggaccacacagtggtgaccatacagaaagaataggaagaggtggaaaaatacamaaaaaacatcacatatcttctgttcttcaggttttatcactcatcttttggtatctggcatttctctccaagatccaatgcctggattctcatcaattcacagaccctagctttcatctaaaaaaaatgtgattacaacacattccacctattgatgtggagaagtgcaagtcagaatctgaaatattcataatccagatgttaaaaaaatgaaaagattttgacatttattattttggaaagctctcaacttctgaatgagctgtgattttcagaagacctgactcatcatttctgaac

SEQ ID NO: 8944 - DNA, 600 bp, Chicken  19866894204064_2
ctcattcgtgtcatttccaaatatcaggaaatttacttaacagcaagagttgtaaaagctgtgaaatggttccctgcggaggagcagaaatctcatgactacactctgctgaacaaaccaacagctctcttctttctggctaggatagagcggatgaccccagacacattttccccttcacttctcttggctctggctaaccaagtcctcagaccgcaggcactaaagcccatctcctatccagctggggagacagcaacttctgcaggaggaacacacagcttcaagcaaaaacaccaytggcaaaccatttcacagaatcacagaatcattaaggttggaaaagacctytaagattcagtccagccatcaacccacctccaccatgcccactgcccacgtccctcagtgccacatcaccatggatcttgaacacctccagggacggtgattccaccactccctgtgcagctatgccactgagttagccctttttctgagaagaaatatttcctaatatccagcctgaacctcccctggtgcaacttaaggccattaactctcatttaggacttcacaaagagagaggaacctgtgyca

SEQ ID NO: 8945 - DNA, 600 bp, Chicken  19866894204064_3
gtaaaagctgtgaaatggttccctgcggaggagcagaaatctcatgactacactctgctgaacaaaccaacagctctcttctttctggctaggatagagcggatgaccccagacacattttccccttcacttctcttggctctggctaaccaagtcctcagaccgcaggcactaaagcccatctcctatccagctggggagacagcaacttctgcaggaggaacacacagcttcaagcaaaaacaccaytggcaaaccatttcacagaatcacagaatcattaaggttggaaaagacctytaagattcagtccagccatcaacccacctccaccatgcccactgcccacgtccctcagtgccacatcaccatggatcttgaacacctccagggacggtgattccaccactccctgtgcagctatgccactgagttagccctttttctgagaagaaatatttcctaatatccagcctgaacctcccctggtgcaacttaaggccattaactctcatttaggacttcacaaagagagaggaacctgtgycagcctttgagaatgcacacagaacatctctatccagcagttagaattgattt

SEQ ID NO: 8946 - DNA, 600 bp, Chicken  19866894204064_4
aytggcaaaccatttcacagaatcacagaatcattaaggttggaaaagacctytaagattcagtccagccatcaacccacctccaccatgcccactgcccacgtccctcagtgccacatcaccatggatcttgaacacctccagggacggtgattccaccactccctgtgcagctatgccactgagttagccctttttctgagaagaaatatttcctaatatccagcctgaacctcccctggtgcaacttaaggccattaactctcatttaggacttcacaaagagagaggaacctgtgycagcctttgagaatgcacacagaacatctctatccagcagttagaattgattttttctacatgaaaatcccttaggcacttggagtacagtgagatttttttcccattgcctatcaagtagttgtattaagaatgatgtctttggcagcacagccagtatgagtagatgcaagatgatcttaatctattcattctataccatctgcttcttacccttgactttcaaaggcctcgaatgagatgtagcccattgaattttatagctaaatttcatcaacctctttgaaaatgaaaggattg

SEQ ID NO: 8947 - DNA, 600 bp, Chicken  19866894204064_5
tgcctatcaagtagttgtattaagaatgatgtctttggcagcacagccagtatgagtagatgcaagatgatcttaatctattcattctataccatctgcttcttacccttgactttcaaaggcctcgaatgagatgtagcccattgaattttatagctaaatttcatcaacctctttgaaaatgaaaggattgcgcagaagacaaatttcgagacatcaaagggaccttcccttttcatgcaagcactaaaagcagtgcaatgggaactaattacaatttgctctattgccagttttcayactggagcaaatacaggcattttatgctttaaaccttgcaacctgccagcttacactcctgaagccagaaccaaattaataggttaaaaccatcttgcattcactcaggcaagcaatgaagccagaagaactggcaggctagctcatggaaaagctcttttttcctccttcctactttgttttaaaaatcaacatttctttacatattcaacagcagcgtaaacattaattcagctttttcaaaagcagctctatcacacagatacttttaaatgagctgatcttcatctgtgctgctga

SEQ ID NO: 8948 - DNA, 395 bp, Chicken  19866894204064_6
ctaggccagagcaggaactggctggccagggcaggagctcttcctgctctgtaggatggcctcagacgccattttacgtcttccagtgacctacaagctttctgatttacacttcacaaaaatcacaacagagcacctacagaagtgccctagtttccattccccaagctttcaggatggattggttggggaaggatctgttatcccaacgtaagtctccaaacatgactcctccacatgctttgtgctgtctgcagtataagcagagctgcttggactctgtggtcatggagacaggaycaaacgttctgatgctgaagacaacacgacggcaccagctcgtccaagaggaatcrttccaggaggtctcctgagccccaaggaaagcacaacca

SEQ ID NO: 8949 - DNA, 339 bp, Chicken  19866894204064_7
tggcctcagacgccattttacgtcttccagtgacctacaagctttctgatttacacttcacaaaaatcacaacagagcacctacagaagtgccctagtttccattccccaagctttcaggatggattggttggggaaggatctgttatcccaacgtaagtctccaaacatgactcctccacatgctttgtgctgtctgcagtataagcagagctgcttggactctgtggtcatggagacaggaycaaacgttctgatgctgaagacaacacgacggcaccagctcgtccaagaggaatcrttccaggaggtctcctgagccccaaggaaagcacaacca

SEQ ID NO: 8950 - DNA, 600 bp, Chicken  19866894204074_1
cttagaactgatagctaagcacaactgctgcaattcagatttgttccatggagcttgaagaattaattcagaaaggatattaccaatctgataattggattcattttgtaattagatataatcctgccaagatctgatagacagcagaaggaccagaataaaatgtaagggcctgcttctgaaaactcggctcaagcctctgtctgcaaaacttgcataactgtattagaatatctgatatgtagataactaattcttctatctgcagacatgaatcgaaggattaataaatacatatawattttttgttaagggcatataaaaatgttaaaagtatatataaataaataaatagggtaatcataactcatacatagaacataaatataatagttgtacaatctttcttctacagaggcagcagtaccatctagtacayttgcctttcctcaagtaaactccatttaattttaaagtttataaggccttgtactgagasttaggttagctgttcccacacatgcacgtaggctcttctgcactactaccctatgatgcttatactataagcaagtcgtattgcccatcccttaaactact

SEQ ID NO: 8951 - DNA, 600 bp, Chicken  19866894204074_2
gacagcagaaggaccagaataaaatgtaagggcctgcttctgaaaactcggctcaagcctctgtctgcaaaacttgcataactgtattagaatatctgatatgtagataactaattcttctatctgcagacatgaatcgaaggattaataaatacatatawattttttgttaagggcatataaaaatgttaaaagtatatataaataaataaatagggtaatcataactcatacatagaacataaatataatagttgtacaatctttcttctacagaggcagcagtaccatctagtacayttgcctttcctcaagtaaactccatttaattttaaagtttataaggccttgtactgagasttaggttagctgttcccacacatgcacgtaggctcttctgcactactaccctatgatgcttatactataagcaagtcgtattgcccatcccttaaactactcctctgtcttctcagcatggctctactttacagtcttcctgctcctacagaaaacttcaaaagatgtgttaactgtcagaattggaaaataaatttgaaaataagtaagtaccagctcccatcacacaaaaaatgaata

SEQ ID NO: 8952 - DNA, 600 bp, Chicken  19866894204074_3
ctgtctgcaaaacttgcataactgtattagaatatctgatatgtagataactaattcttctatctgcagacatgaatcgaaggattaataaatacatatawattttttgttaagggcatataaaaatgttaaaagtatatataaataaataaatagggtaatcataactcatacatagaacataaatataatagttgtacaatctttcttctacagaggcagcagtaccatctagtacayttgcctttcctcaagtaaactccatttaattttaaagtttataaggccttgtactgagasttaggttagctgttcccacacatgcacgtaggctcttctgcactactaccctatgatgcttatactataagcaagtcgtattgcccatcccttaaactactcctctgtcttctcagcatggctctactttacagtcttcctgctcctacagaaaacttcaaaagatgtgttaactgtcagaattggaaaataaatttgaaaataagtaagtaccagctcccatcacacaaaaaatgaatatgcaactcactcctagcttgaaggcgactgatagaaaaactagttttcttgatctctgaa

SEQ ID NO: 8953 - DNA, 600 bp, Chicken  19866894204079_1
ctgcgttttgcagatgtgaaggtcagtttctgtaggggaagccaggctattttgggggaattcacaatgctctgtctttttgctgccgctgctaatttttgtgagcaccatagaatacagtagaaaattgaaactgtgtgaaagatcaacaaatcagtgtagaatgtcacgcagcaacatctgttaactttggctctatctcatatcctcctgacccctcctttgcagccacaagtctcctgttttgtgagagcttggagtgatagggacttggagagcaggggaaggaaagtctagcaktttctcagtgttctgaagggcttgcaaaagtaccatgtggaattaaaattttatgcttgtgtgtttctgtatttttagttatgaaacaaatgggaatttgctgaatgaattaattgtattgcaccataaaagtcttatctggagagccgttatatattgtagcttacaaagtctgcagagagaaatgaaagaggcttccctttctaattaaggccttcaggaactcattgattacagaatctaataggtttgctcagagacatttgtttgatattacttctgataaatgagttttttttt

SEQ ID NO: 8954 - DNA, 599 bp, Chicken  19866894204081_1
  misc_feature (1)..(68): n is any nucleotide
nnnnnnnnnnnnnnnnnnnnnnnnnnnnnnnnnnnnnnnnnnnnnnnnnnnnnnnnnnnnnnnnnnnncctcccccccccggccccgccgcgttgctgccagacaaaggcgcggagcttcccttctccttgtcatccctgcactctacgtacgaatatctcatctccgtttattgcccggcgctgtaaacgcagagcctcccgttcaccgcacccatcaccaatagccccgcgatgctgcccgtagggctgctggggacccgctgccggcgtgccgatgaggacaggggatgctgcggcrtggggagggcccggacccgcgttcacggcgctgtgccctggcagcagcccgggagcggccacgcagcaaccggggccattgtctgcgagggtggcgcggcgcggcacrgctctcctttgcggcagggctgcaagggcagcgatgggctttattctttcccttgcggcgccgttgcaaaggaggtcgggggagggagagggggaagcacccgcagctccttaaaggcccgagggtttcgcgttttctttcgaaacgaggaaagccgcggaacacaaccggccgcctgacattgctcaacg

SEQ ID NO: 8955 - DNA, 600 bp, Chicken  19866894204081_2
gcgcggagcttcccttctccttgtcatccctgcactctacgtacgaatatctcatctccgtttattgcccggcgctgtaaacgcagagcctcccgttcaccgcacccatcaccaatagccccgcgatgctgcccgtagggctgctggggacccgctgccggcgtgccgatgaggacaggggatgctgcggcrtggggagggcccggacccgcgttcacggcgctgtgccctggcagcagcccgggagcggccacgcagcaaccggggccattgtctgcgagggtggcgcggcgcggcacrgctctcctttgcggcagggctgcaagggcagcgatgggctttattctttcccttgcggcgccgttgcaaaggaggtcgggggagggagagggggaagcacccgcagctccttaaaggcccgagggtttcgcgttttctttcgaaacgaggaaagccgcggaacacaaccggccgcctgacattgctcaacgaggaggaaaggggcaaaagcaccgcaaaagctcaaacctacagcacggccgctgcccgctctgcccctgccccatcccctatccctgcccgggcgtcgcccgtccccgc

SEQ ID NO: 8956 - DNA, 600 bp, Chicken  19866894204083_1
gagtggcaagaaagtaattgactttccaagttctttcagctattgccagtgatactgggactgcacaagagggaaggtcagctatatttcttcactaaaaaatgaagaagatgatgacagttttgaaaaggtatattataaagcattattctatcatgtatcagtaaaatgttgattaggacctgtaacctggcataaaatagtattgctgcttttctaagacatgtatttcagaatctgcttaagaacaccataagaaaagttatttaactatcctacagctactgcgtaccttacatrctcgctgaaataagaagtggtaagccaatcactaaagttttctttgtgtgtgttccttcacatgtccatctcatcaaagtttgcacagtgatctgtgggaaagcaattctgcttgtcagctttccttacacatccaggaataatgagcggaacagaaactgacttcaagcagtattcacttctgatttgttacttttcatcccagtcttcagctatgccccattacttcctacacactgtttcagtgcttgaatctgtcagaaaaaaaaaaaaaagtgagaagaagaaaaatgttagtag

SEQ ID NO: 8957 - DNA, 600 bp, Chicken  19866894204093_1
aaccaaagtaaacagcttattgttaacttctgccaaaacctgaaccttccttctgcagcccattactcttataaacttcctgcttgtgaagtttacctcttaaatgggaatataatcgttttcctctgccttttagtaactcgagacagcagctctaggagttttaaatggatatatttaaataaattatttaccctgaaatgtgcttatggtggtttaaatgtgaccgcgattgttccagttgggttaaagactcagtttggtgccctcttgaaagacgaaaggaataatgtcacttamtgaaagctctgcttattctgctgctttatragtgagatggcttcagtataggagaaaccaaccaaccaaaacactacttgaaagctgccctagtgtttctgaatctcaatgcaagggaaggatgctgtttcataggctttcctctgtcagtacaaagaaataaccactgaccaagcacagaagaaaggtcaaaaagccaagaagacascaagagcacgtaaacaaatgggatgctgatagggtttgtgctgtaccacgaactggaggagctgaatcaatacctttctgccagttttgctt

SEQ ID NO: 8958 - DNA, 600 bp, Chicken  19866894204093_2
tgccaaaacctgaaccttccttctgcagcccattactcttataaacttcctgcttgtgaagtttacctcttaaatgggaatataatcgttttcctctgccttttagtaactcgagacagcagctctaggagttttaaatggatatatttaaataaattatttaccctgaaatgtgcttatggtggtttaaatgtgaccgcgattgttccagttgggttaaagactcagtttggtgccctcttgaaagacgaaaggaataatgtcacttamtgaaagctctgcttattctgctgctttatragtgagatggcttcagtataggagaaaccaaccaaccaaaacactacttgaaagctgccctagtgtttctgaatctcaatgcaagggaaggatgctgtttcataggctttcctctgtcagtacaaagaaataaccactgaccaagcacagaagaaaggtcaaaaagccaagaagacascaagagcacgtaaacaaatgggatgctgatagggtttgtgctgtaccacgaactggaggagctgaatcaatacctttctgccagttttgcttcaaaaccattcatgaatatcactctgagga

SEQ ID NO: 8959 - DNA, 600 bp, Chicken  19866894204093_3
atggtggtttaaatgtgaccgcgattgttccagttgggttaaagactcagtttggtgccctcttgaaagacgaaaggaataatgtcacttamtgaaagctctgcttattctgctgctttatragtgagatggcttcagtataggagaaaccaaccaaccaaaacactacttgaaagctgccctagtgtttctgaatctcaatgcaagggaaggatgctgtttcataggctttcctctgtcagtacaaagaaataaccactgaccaagcacagaagaaaggtcaaaaagccaagaagacascaagagcacgtaaacaaatgggatgctgatagggtttgtgctgtaccacgaactggaggagctgaatcaatacctttctgccagttttgcttcaaaaccattcatgaatatcactctgaggagcttcaaatatgaatgagaaactgttttccacgtggctttgctctgaattttcaagaaactgaggagctaagattgctgaatkctgtgttacttaaaaacaaccaacaaagcagcagttttgtcaagaaggaacrttgactcaacggcagataattacatgcaggaaacaaatgggag

SEQ ID NO: 8960 - DNA, 531 bp, Chicken  19866894204093_4
agggaaggatgctgtttcataggctttcctctgtcagtacaaagaaataaccactgaccaagcacagaagaaaggtcaaaaagccaagaagacascaagagcacgtaaacaaatgggatgctgatagggtttgtgctgtaccacgaactggaggagctgaatcaatacctttctgccagttttgcttcaaaaccattcatgaatatcactctgaggagcttcaaatatgaatgagaaactgttttccacgtggctttgctctgaattttcaagaaactgaggagctaagattgctgaatkctgtgttacttaaaaacaaccaacaaagcagcagttttgtcaagaaggaacrttgactcaacggcagataattacatgcaggaaacaaatgggagtttatgccacgagaagcttgtattacatgaaaaatatctaacacacaaaccactctggaaacaaattgtaagctttgtgatctgtaacatttaaggctctttgtattaaaataataggatatctccccaaaatcat

SEQ ID NO: 8961 - DNA, 479 bp, Chicken  19866894204093_5
actgaccaagcacagaagaaaggtcaaaaagccaagaagacascaagagcacgtaaacaaatgggatgctgatagggtttgtgctgtaccacgaactggaggagctgaatcaatacctttctgccagttttgcttcaaaaccattcatgaatatcactctgaggagcttcaaatatgaatgagaaactgttttccacgtggctttgctctgaattttcaagaaactgaggagctaagattgctgaatkctgtgttacttaaaaacaaccaacaaagcagcagttttgtcaagaaggaacrttgactcaacggcagataattacatgcaggaaacaaatgggagtttatgccacgagaagcttgtattacatgaaaaatatctaacacacaaaccactctggaaacaaattgtaagctttgtgatctgtaacatttaaggctctttgtattaaaataataggatatctccccaaaatcat

SEQ ID NO: 8962 - DNA, 546 bp, Chicken  19866894204094_1
accagcgggtgagcaaagggcgcatcatatttttaagcgtggaaattttttcactcttctcagaaactgctcagagcagcttcatcttcacgtttctgaaaacatcagaaatgttgccttcctggtagcttgtggttttacatctccaacctcctttctttctatactgcataatcagtgtggtgttggacgtgtcagaacacatctggccggtgcggtgcccacagcaccactttgatagaggagagctgtgtgtttcggtttctgtgttctctgaacccatgagaatgtgcaggagcycctcagtaacatgaatcacagcaccgtctggagccagcaatttgactcagtagcctgttctttcaaacaaaggctaccatggaaattctgttgttgaagagcttaatcacttagttggaaaaatccatgggtaagggttgggtaaattacaaagagaagtaaaatacccttttgaattgctaggtgcttctgtcgtcaagcagaacgttactggaatttgggctggagtatctcattatatcttac

SEQ ID NO: 8963 - DNA, 600 bp, Chicken  19866894204109_1
ggagagatgtaaaaaaaccctgaaacagtacttcatacactatttctgagtgtatgaatatatttccaccatataacgaaggtggaaatggtctacttgctcagacataaatacattcctcttctaaaatgattacagtttctctattgagttagaagtgaaagatgtaaaaagccaggatggcaaatgtgaatataattcaaaatctagatcataacggaggagtattgttaaagtatatatcatgttcttaactgaagttctgtggaagaaggtatccccagtactttataaacttgrgatatttgaaatgatggttggtttttatagagcccttaacaatactgctgttttacatggaaaaagtcaggcttattttcattgctgaagtgttaaaaaaaaagagagagagagagaaatgagctaaaaaaaaaaaaaaggcagcaggatttactttcaggtttgcccaattaacatttagcaaggtaaagtacctgatgtctaggcttatgtccctctgaggataytgtgcttacagtgcagtgcttttacaatattcaaaagcttgcatcattgcctttaattttagaatacagatag

SEQ ID NO: 8964 - DNA, 600 bp, Chicken  19866894204109_2
ttgttaaagtatatatcatgttcttaactgaagttctgtggaagaaggtatccccagtactttataaacttgrgatatttgaaatgatggttggtttttatagagcccttaacaatactgctgttttacatggaaaaagtcaggcttattttcattgctgaagtgttaaaaaaaaagagagagagagagaaatgagctaaaaaaaaaaaaaaggcagcaggatttactttcaggtttgcccaattaacatttagcaaggtaaagtacctgatgtctaggcttatgtccctctgaggataytgtgcttacagtgcagtgcttttacaatattcaaaagcttgcatcattgcctttaattttagaatacagatagtacatactgaaatcaaaccattccccttttccttcttagaaaatgtcaatgccagagcctagttaaatatgcaactaaattgacgggtcttgcccatcaaactatacttaacaatcatagttcagcagaggtgagaagggataaatgtgtgttttcgtttgcttttgttcccccaactccagggtcattgtacataagaattccatacacatgcttctgactgtgtt

SEQ ID NO: 8965 - DNA, 600 bp, Chicken  19866894204115_1
taatgcaatttatgaaaacatcatgctgaggtgtagtattatttaaaccactggagctcattccaaaacagaaaagtgaataaacattgtgtatgtaaatggagccatagtactgacctaaatactttcaaggctacagctatgcaagtgaattaaatactactagggcataagttccatgccctggaactacctttttctaaaatataaaattttcagggcaatccctggcactcacttgatcttgcctgcttgaccagacacttcccaagggcttcccagtcatggccagggcatacrcacggtcccccaatggctccctaggggcaggttaactgtagccctgtgttctggaggctatgagagctaaccatatggaagtggccatcctcagctggcatcaaggctagagcaattctttgcattattcacttcacccataaaaatataggcaaagagcagaaattcagatgcagtgggaaaaaaaacccaccaccaccagaaatcacacttctaatcaaaaatgtactgaggctaactttgccaattaaggtctcattattagtggagtaaaagagacaaaccctgaccaatctgctt

SEQ ID NO: 8966 - DNA, 581 bp, Chicken  19866894204118_1
gcaatagaagtatgaaggattcaggacttatttctattcctgaattaagaaattctcttttgcctacgttatataaaagcaacaacatgatacatacaaggcttctcagctccctaattctttgctttggaatctggaacttacaatttcattatttcaaaataccttcttaatgttgcaaagtctgaaggcataaccatttaaactgcagtatctggtgtctccccagtcctatagataagagcttttgtttttacttgcaataccagacgaagtgtcactaacagtattaataatcayatataagaaaaagttgactcacccaattggtgaagagggtctcttgctatagaacattccttctcaggaagcagcctccatccaagaaatgttcactctttggaagctggcccttaaatgagcatgggagggtgtggggcggtggacccaaggttatatgggaagtacaggtgaattgcttgcacctgtgccccgtgggccagccacccccttcaccgggtactcaatcatcaattcacgctgtgacataatagttcccttacacctgtcttcttcaaaag

SEQ ID NO: 8967 - DNA, 600 bp, Chicken  19866894204121_1
atgaagatggaatgtactcaggactgcagcaaacagagactttttcatgtttgtcaaagaacaagaagcactgcttagattcaagcaaggagtaaacctctgtaattagtgggatagttaaaggttttgattgatgtgtctggggatattgtgcagtctgtacatataaaggtctgtacgtataaaggtcttaagtacaagaatcttagtccctaaaatatacagttaaattggaagttgtggaagttttcttattttcatattattaaaaaaaatatatagatagatatttttaaacakacaaacttcaatctcttcttttctttctatatttttttccaatttcwttacgttgtacattccttctgaaacaactgaatgccaagaaccttatgaaatgtattggccaactttagaatgttgacaactgccccaacccaccccaaaaaagtgaaaaaatatatatttgcataagaattgaatgtcttcaaattacctctacatttctatttcaggaagacattcattttggcagagcactactaatcttgtttcttgttcatcatccagcatgtttgcaaaaatgccattatgcatttt

SEQ ID NO: 8968 - DNA, 600 bp, Chicken  19866894204121_2
tgtttgtcaaagaacaagaagcactgcttagattcaagcaaggagtaaacctctgtaattagtgggatagttaaaggttttgattgatgtgtctggggatattgtgcagtctgtacatataaaggtctgtacgtataaaggtcttaagtacaagaatcttagtccctaaaatatacagttaaattggaagttgtggaagttttcttattttcatattattaaaaaaaatatatagatagatatttttaaacakacaaacttcaatctcttcttttctttctatatttttttccaatttcwttacgttgtacattccttctgaaacaactgaatgccaagaaccttatgaaatgtattggccaactttagaatgttgacaactgccccaacccaccccaaaaaagtgaaaaaatatatatttgcataagaattgaatgtcttcaaattacctctacatttctatttcaggaagacattcattttggcagagcactactaatcttgtttcttgttcatcatccagcatgtttgcaaaaatgccattatgcattttttgccacatactccagcttttaaatcagagttctccattgaaacaga

SEQ ID NO: 8969 - DNA, 600 bp, Chicken  19866894204121_3
ataaaacacaacttggcttagttaatagcaaatagtcaggtgtttcgtcatgctatttcagttcaggtttctcctgatagggtattttcatatcttcaagtgagtaaagtgtatttaattctagttagcataaattctttacaacattcatctggtaaagaggctcaaataattcagttttttataaggatcaaattactgtcaatatttgtagcatactgatttctctcacaaaagagctccttcacataattactatcagagaaacttctatgttgatacttaagcaaactccaaaayggctcaactaaaaggcagtgctttagggctgtaagcactcaaaaacaacagaacaccaaagcaatatttcatgaactttctttattgtttttaaaagacctggtaagggaaatagaagtggaaagtgtctgtcttggatttaaagcagagtacaaaaatccagagaggacagaaagcaaaagctttgtcagattttatttatttatttatttatttgggtccttcattgttttattagaaatattgttgtggtctttttttttttggaatgtttttttttcttttttttctttctttttt

SEQ ID NO: 8970 - DNA, 523 bp, Chicken  19866894204124_1
atggagggaagggaggcgtttagcactattctcagttatcagaagcatcagtctaagcaaattcagcattgaagtcattaggggtcttttaacggcttcatgcaagcttggatttttactcaaacagtgtatctatacagggtttgaagacgggaatccatccacctaaatgtacgcatgtgattaagatcttgagggtacaccagtacaaagagagaggtggtggaccagactgtctgagtgagaccacaccatgcagttaatgttaagagttgttagagaaattcatcttctaatccrgtgtcttgaacagcactcaaagtcagtggtcagagcaggcagaagcacctaagtacccagatgaaacaatcggaatgttattgcataatttacctctgcaacatttacagaggttagggtggaaatgtgtgcatgttgctttgtctgttggtgggggtgaagaagggagataataaattagaaaaatgaaaatgaaaataaacttttatttttgtgctttatc

SEQ ID NO: 8971 - DNA, 600 bp, Chicken  19866894204130_1
gcattattcagcccgttcccattcatcaaggtgtagaaggatgagtttgcaatatttaggatgtgttgaataaaaaggcatttttaaatgtgtttgcctatcactttaactgagcacagttctggtggtgctgcatgcacccagccatgctcttagagctgctctgagctgtcagctgggagagctgctgcccagcacagctctgcttcactcactgccccacagaagccccagaaaaacacacactgtggcacagtggtctcctgtgcctcacactggggcactgtcactacctatcaygaatgggctgcttggagagaaggctactgcctctccacagataaaatgcctggctttggatcgtggcagccttatttgttcggttttggcctgaaaatgatggcggggaggggcaaggagtggaatccaataccttcttatgccaagtagttgtcatgagggagaatagcagggtctggtccagagctagagaacagtttctcccttattccccaaagcagaacaacaacagtctgaacattttgaccaaggcagtgtgagagataatggtgtctgttacccacaggtgcaagaacatac

SEQ ID NO: 8972 - DNA, 600 bp, Chicken  19866894204137_1
ctctaaatttcaaacctcagctgaaaacatttgtcccattcttacagtttttctccccatttatctctgcaattgtacttcattcaatggagcattttaaatgtaattcagtggtgcattttgcaatacagtttgcttgaatgacgctatacagagtaaaggttgtattgtactatataatgaaacgacgtccatgcttgaacaaactccaactgctgttaatcaaaccagcaagttcctgaatgatctttcggagtcaggactaatggcaatagattattttaaatagcagccccgctstaaagtatgtttaggttgacacaggctgacgggccgtgacagaccccacagccaggctgaccagcgtgcagttaaaacacgacacttcgccctctgtgccagggtgacaaacgcagcacgcagcctgaagatcaacacgtagctttcagttttgcctctggttttcagcaaagccacgcagcacctgagaaggcttgcaagtcttcctatctgccttttgttcaccagccaccacgcactgcccagttgccacagcaaacagctggatggatccatggaatcatagaatcgttagggtca

SEQ ID NO: 8973 - DNA, 600 bp, Chicken  19866894204138_1
atagtcagtgtatgttaagtgtccccctctctgcttgatccacagatgacttgcatctgtctctgctttcatccatggagctcagctcaagctgtggacgctgttgcttttcacttgggtgccttcagtgcactcggcagcacggcagctttgccactggtgtttagtctaggcttggcatatggcatcagctttgtgactaccaccctggcatcttgcatcagcaccaaaaaaacgctttgtttttttcatgtgatacatcagtttatttttccacaaagcagaagtattggaagcagygtaatgtgaccagagcagygatagatagtaaagcggtaggaaggagaggggaaagctacagctcaaagtggagagatcttctgtggctctaccaggatcagatgccctttccccttccctccttcacaaacacacgcatggacacacgcacacacagggagttgtgcagtggcaratggggaaaggaaataaataagtgtcaggaggatgaactggcttgcacttggtctcctctcatatctctgcatatgtttactggtatgtaaagatcacaagaccaagggacttagtgctgcccca

SEQ ID NO: 8974 - DNA, 600 bp, Chicken  19866894204138_2
tgtccccctctctgcttgatccacagatgacttgcatctgtctctgctttcatccatggagctcagctcaagctgtggacgctgttgcttttcacttgggtgccttcagtgcactcggcagcacggcagctttgccactggtgtttagtctaggcttggcatatggcatcagctttgtgactaccaccctggcatcttgcatcagcaccaaaaaaacgctttgtttttttcatgtgatacatcagtttatttttccacaaagcagaagtattggaagcagygtaatgtgaccagagcagygatagatagtaaagcggtaggaaggagaggggaaagctacagctcaaagtggagagatcttctgtggctctaccaggatcagatgccctttccccttccctccttcacaaacacacgcatggacacacgcacacacagggagttgtgcagtggcaratggggaaaggaaataaataagtgtcaggaggatgaactggcttgcacttggtctcctctcatatctctgcatatgtttactggtatgtaaagatcacaagaccaagggacttagtgctgccccagaaaatctatacctcttaa

SEQ ID NO: 8975 - DNA, 600 bp, Chicken  19866894204138_3
tggcatatggcatcagctttgtgactaccaccctggcatcttgcatcagcaccaaaaaaacgctttgtttttttcatgtgatacatcagtttatttttccacaaagcagaagtattggaagcagygtaatgtgaccagagcagygatagatagtaaagcggtaggaaggagaggggaaagctacagctcaaagtggagagatcttctgtggctctaccaggatcagatgccctttccccttccctccttcacaaacacacgcatggacacacgcacacacagggagttgtgcagtggcaratggggaaaggaaataaataagtgtcaggaggatgaactggcttgcacttggtctcctctcatatctctgcatatgtttactggtatgtaaagatcacaagaccaagggacttagtgctgccccagaaaatctatacctcttaaataaaaatgaataaaaaaataaaagcatggcacctcaaaggacatcagagctggacagggatgaactcagcagcagagtcccagcatgtgatggattcagacagaagagaccatattttcctctgtgacttcccctgataccacacacccaaacca

SEQ ID NO: 8976 - DNA, 600 bp, Chicken  19866894204138_4
acaagaccaagggacttagtgctgccccagaaaatctatacctcttaaataaaaatgaataaaaaaataaaagcatggcacctcaaaggacatcagagctggacagggatgaactcagcagcagagtcccagcatgtgatggattcagacagaagagaccatattttcctctgtgacttcccctgataccacacacccaaaccagaacagaaggagatggatgtatttcagcagcactctgagctggtgctgttgtggttttccagttttccaataagctctgtgcccagaggaaaatcytgtgcagggaacccgagcagaggcagggcaatggctgggaaaaagggaaacaatagccactagttcctccagtgtcamcacagcatgcacaaatgctgttctcttctcctccagggcaggagtgagatgccagtgtcacctgtgtgctgctggggctcctggcctccatgcatggcagggagccttgcccaagaccacgggcaggtgcaagcatggggcgacattcaaatttggccttgtcttctgtgtgaaaaccttcgcttttagaacatgctggaaacaatttttcctatggcactc

SEQ ID NO: 8977 - DNA, 600 bp, Chicken  19866894204138_5
cacctcaaaggacatcagagctggacagggatgaactcagcagcagagtcccagcatgtgatggattcagacagaagagaccatattttcctctgtgacttcccctgataccacacacccaaaccagaacagaaggagatggatgtatttcagcagcactctgagctggtgctgttgtggttttccagttttccaataagctctgtgcccagaggaaaatcytgtgcagggaacccgagcagaggcagggcaatggctgggaaaaagggaaacaatagccactagttcctccagtgtcamcacagcatgcacaaatgctgttctcttctcctccagggcaggagtgagatgccagtgtcacctgtgtgctgctggggctcctggcctccatgcatggcagggagccttgcccaagaccacgggcaggtgcaagcatggggcgacattcaaatttggccttgtcttctgtgtgaaaaccttcgcttttagaacatgctggaaacaatttttcctatggcactctctgtcctccagggcatcctttcctccttctcattgctagtttctacacaaatgcaggatctttggtgcttagtcact

SEQ ID NO: 8978 - DNA, 599 bp, Chicken  19866894204141_1
  misc_feature (1)..(95): n is any nucleotide
nnnnnnnnnnnnnnnnnnnnnnnnnnnnnnnnnnnnnnnnnnnnnnnnnnnnnnnnnnnnnnnnnnnnnnnnnnnnnnnnnnnnnnnnnnnnnnnctttgtggaaactgatgttttggcccagccgacgtgaccactaatccatcttcagttcagacatctcttccagtggataggcgccggctgtgctgtcagtcaggtcaggctgctggaagatgaccagcacacactcagtttccctttcccttcctcatcagcactgaaaatcatccattatgaccaggggtgtggtaccagtgcyggcaaatcttgtgggaatatctgcatcctctgtgcrgtgcggctggctcgcaccaagccaaagggtggtttgagcttgtgccagcagaggcatctggtgtagatctgcaagattatgcaggtctgttggccacaaaccaccgtgttggggcttcacggagattgtggccttgattatagcctattaatgcgagtcgtagccctgtgagatatgtcagtcatgagtagagttgggtcttatggagctcagcacaccaagcttgctgggttggtctcagtggttgcaaggcagagatttga

SEQ ID NO: 8979 - DNA, 599 bp, Chicken  19866894204141_2
  misc_feature (1)..(59): n is any nucleotide
nnnnnnnnnnnnnnnnnnnnnnnnnnnnnnnnnnnnnnnnnnnnnnnnnnnnnnnnnnnctttgtggaaactgatgttttggcccagccgacgtgaccactaatccatcttcagttcagacatctcttccagtggataggcgccggctgtgctgtcagtcaggtcaggctgctggaagatgaccagcacacactcagtttccctttcccttcctcatcagcactgaaaatcatccattatgaccaggggtgtggtaccagtgcyggcaaatcttgtgggaatatctgcatcctctgtgcrgtgcggctggctcgcaccaagccaaagggtggtttgagcttgtgccagcagaggcatctggtgtagatctgcaagattatgcaggtctgttggccacaaaccaccgtgttggggcttcacggagattgtggccttgattatagcctattaatgcgagtcgtagccctgtgagatatgtcagtcatgagtagagttgggtcttatggagctcagcacaccaagcttgctgggttggtctcagtggttgcaaggcagagatttgacactggcataaaaattagtttgggaatcattattga

SEQ ID NO: 8980 - DNA, 600 bp, Chicken  19866894204148_1
cctggcctgtccttcccctggctggcctggcctggccttgcctggcatggcctggccttgccttgccctgcttggccgggctttgccttgccttgccttgccttgccttgcctggacttgcctgccctgcctggccttgccagtcctagccttgcctagccttgccttgcctggcctgaccttcttttgccttgccttgccttgacttgccctgcctggcctggacctgccttgcctggccttgctttgccttgccttgccttgccctgcctctcctcgacctgacttgcctgcacttgmcttgtcttgccaagcgtgaccttgccttgtctttcctggccttgcctggcatggccttggctagctctgccttgccctgcctggcatggcctggcctggctaagccaggctttgcctctccttgccttgcctggccttgccctccctggccttgccttgaccgrccttgccgtgccgatccaggcctggcctagcctggccttgccttgcctggccttcttttgcttcaccttgccttgccctgccaggcctggccagctttagcctttccttgccttgcctagcctttcctttccttgg

SEQ ID NO: 8981 - DNA, 600 bp, Chicken  19866894204148_2
ccttgcctggcctgaccttcttttgccttgccttgccttgacttgccctgcctggcctggacctgccttgcctggccttgctttgccttgccttgccttgccctgcctctcctcgacctgacttgcctgcacttgmcttgtcttgccaagcgtgaccttgccttgtctttcctggccttgcctggcatggccttggctagctctgccttgccctgcctggcatggcctggcctggctaagccaggctttgcctctccttgccttgcctggccttgccctccctggccttgccttgaccgrccttgccgtgccgatccaggcctggcctagcctggccttgccttgcctggccttcttttgcttcaccttgccttgccctgccaggcctggccagctttagcctttccttgccttgcctagcctttcctttccttggctggccttattttaccttgctttgccttgccttgccttgccttgccttgccttgccttgccaggccttgccgtggctggccttgtcttgctttgcctggattggcctggcgttgacctgccttgccttgccctacatgacctggccttgcctgactttgccctg

SEQ ID NO: 8982 - DNA, 599 bp, Chicken  19866894204152_1
  misc_feature (1)..(73): n is any nucleotide
nnnnnnnnnnnnnnnnnnnnnnnnnnnnnnnnnnnnnnnnnnnnnnnnnnnnnnnnnnnnnnnnnnnnnnnnnaacttagaatattctatgattcaatgaattgtgtagaatatttggtaatattgctgctgcagtcacctatcattgttagtaaaatgctttttgggggattactggattgagtttgggctacctggtatatttttttctactgttttgggttgtagacctggaatgtagaactagtttaacttagtggatctccgtatgaggtaatgtgattcttttaaactattttstttaattcctttagaatgaatatgttgtgtttctgctatgtgatgcagctattccaggagaaaataatatttaattaatgcaatgcctaaaatgatgatgaaatttgtttagagtttgactccttctgtttgcttcatcctccccagacaaacgtgtcgatgattggcccttgatgcagtctccatttccaacactgactataagcactatttatctcctcactgtttggctgggccccaaatggatgaagacaagagagcccttccagttacgtttcctgttggttgtttacaacttt

SEQ ID NO: 8983 - DNA, 561 bp, Chicken  19866894204152_2
tatctcctcactgtttggctgggccccaaatggatgaagacaagagagcccttccagttacgtttcctgttggttgtttacaactttggaatggttctactcaacttcttcattttcaaagaggtgtgtatgcactcttacaggagggaattcctactaaggtttgaaggcatctacagatgcaaaattgaaataatcttatgcattttataatgtctgttgtaggaggcctggcccagatttttaaaactgaatttgtgtttgacatgagtatttaggtagttaggtacattgtgttgygaataaaatacctagatgggtatatataaagaatytgtacactatctagatcaagatcttcttagattcatgttagcataaatactgcacagaataactggaatccataaagatttaagtggaattatttaacagtttgggaagtcatttttccagaatagtgtttcagaatacatacaatcctaaggagtagtttttcttactgtgattttgctcatgtgggttaaaggtcttcctgaaagactgtgaatcctgaaagat

SEQ ID NO: 8984 - DNA, 526 bp, Chicken  19866894204152_3
gaagacaagagagcccttccagttacgtttcctgttggttgtttacaactttggaatggttctactcaacttcttcattttcaaagaggtgtgtatgcactcttacaggagggaattcctactaaggtttgaaggcatctacagatgcaaaattgaaataatcttatgcattttataatgtctgttgtaggaggcctggcccagatttttaaaactgaatttgtgtttgacatgagtatttaggtagttaggtacattgtgttgygaataaaatacctagatgggtatatataaagaatytgtacactatctagatcaagatcttcttagattcatgttagcataaatactgcacagaataactggaatccataaagatttaagtggaattatttaacagtttgggaagtcatttttccagaatagtgtttcagaatacatacaatcctaaggagtagtttttcttactgtgattttgctcatgtgggttaaaggtcttcctgaaagactgtgaatcctgaaagat

SEQ ID NO: 8985 - DNA, 599 bp, Chicken  19866894204153_1
  misc_feature (1)..(143): n is any nucleotide
nnnnnnnnnnnnnnnnnnnnnnnnnnnnnnnnnnnnnnnnnnnnnnnnnnnnnnnnnnnnnnnnnnnnnnnnnnnnnnnnnnnnnnnnnnnnnnnnnnnnnnnnnnnnnnnnnnnnnnnnnnnnnnnnnnnnnnnnnnnnnnngaaatctgctgatctgaaagctgcccaggcgctggatccacaacgtttctgaagacgagagagggaaaggaaagtttgagtgaaagcaacagttagtgcagggttttggatggatgaagtgctgagatgtctccttggcaagagaaacattttgccrgtagcactgtaacgtatgtttaattaactcctaaaatgtgtcataacttgcagcataatatacggctatcctccagagagctaggtatgcacttctcttctgaagtgggaacatccttggcagaaatgatggtagcaatccttggcactttcagatggatgtctgaaatccatagctgcaaatgaccactgtaagaagacttaattctttcctccctaagttgctgagtgctgcagtgacttttccaggtctggtaacgttagctgaaacccaaagtgcagcattcatgtctacacgtg

SEQ ID NO: 8986 - DNA, 600 bp, Chicken  19866894204153_2
ttggcagaaatgatggtagcaatccttggcactttcagatggatgtctgaaatccatagctgcaaatgaccactgtaagaagacttaattctttcctccctaagttgctgagtgctgcagtgacttttccaggtctggtaacgttagctgaaacccaaagtgcagcattcatgtctacacgtgagaggcatttccagggattaggaatctacatctctgggaagcactgctgaagaaaagccaaagactcaacaaaaagggcaatgacttatgaaggagtgtggttagcttcctagcacygcacaggaacttaccaagaagataatttratggggaagtgctttaaggctcactgtgtgctcacggccccagactgcatcgagctcaggtgcccaaacgctgttattacagccaactgttattacagctgctatttactgcagaaacacacatgcaagtggaaatgctcaaagtgtttttctttcggagggaaaaacatacaggtgatgcacgtttgctacttagcagaaacgtgtgacatctgccctggagtgtaaagtcatctgcctgactttaaggggagctggggacaggttatac

SEQ ID NO: 8987 - DNA, 600 bp, Chicken  19866894204153_3
cactttcagatggatgtctgaaatccatagctgcaaatgaccactgtaagaagacttaattctttcctccctaagttgctgagtgctgcagtgacttttccaggtctggtaacgttagctgaaacccaaagtgcagcattcatgtctacacgtgagaggcatttccagggattaggaatctacatctctgggaagcactgctgaagaaaagccaaagactcaacaaaaagggcaatgacttatgaaggagtgtggttagcttcctagcacygcacaggaacttaccaagaagataatttratggggaagtgctttaaggctcactgtgtgctcacggccccagactgcatcgagctcaggtgcccaaacgctgttattacagccaactgttattacagctgctatttactgcagaaacacacatgcaagtggaaatgctcaaagtgtttttctttcggagggaaaaacatacaggtgatgcacgtttgctacttagcagaaacgtgtgacatctgccctggagtgtaaagtcatctgcctgactttaaggggagctggggacaggttatactggagggcttgctcttcagagatagacat

SEQ ID NO: 8988 - DNA, 600 bp, Chicken  19866894204156_1
atcactggaaaatattttacaaactcagacatttctgcagaaaaagatgcgcactcagccaaagatcaaaccttggaaataactagttcaattctaaattgcttggaataattaatatatctatctaaaggagagatggctgcagaatgacaagaactttgaagtgtgaccacgcatcacagatggaaactacaactcgttcataagaaaggagaaggaatacactttgtgagataatatagtgatttaacaaagtttgattgtaagtaagacaatgaattgacaagacttgagatagcraggtacgtttcataacaacagagaggtcagtgttaaacacactcatccaagacaacctcccacagcgtcatggggactccccccctgttttctaattttgtagaaccacagaagtaaggagcttagctggagctgaatccactcctagtcccagacatggtcagtggtttacatatagaattatatgtgtgcaataaacttaggatgtaatcgtagcaaagctaacaaagcatgaactattagtcactgacccagaatctgcatcagcaaggcatcttaacatcaagatgtaagggatct

SEQ ID NO: 8989 - DNA, 600 bp, Chicken  19866894204166_1
gcaaaaatactgcatactcttgatacttgacagcatgcagtctttgaatcatgtatacagagttagcttttgaacttgtatcctctttgatttatttgctgctgcctcaggagtttctgtctgttttaaaatcatgtctgagttacattactagtaggagttatttcactgctttactgtgctatgatatcatgtttcttttcacttgctgcttatcttaatcacctttaccttcactaatttgcaagtcaccattttggcttcattttccttaaacttgtgccatcctagtaaaatgawaaaggagtgaaaatttctttttaactagatgctagccagagtcagctgtacatgtgytgaatgaaagtgcaacctcaytaaatcaaaacattaatttactttctgccagcttaggcgtgctgtgaagaatgtatctactctttcatacagactttgaatatcttattttcaaatgtgtgtgttgctgttagagagggaagtgaacacgagtgagcttttagcacaagttttaaatatgtctggtaacaacttgtgctccatgatatgatcacgagctaggtctcacctgggttttggttt

SEQ ID NO: 8990 - DNA, 600 bp, Chicken  19866894204166_2
cagagttagcttttgaacttgtatcctctttgatttatttgctgctgcctcaggagtttctgtctgttttaaaatcatgtctgagttacattactagtaggagttatttcactgctttactgtgctatgatatcatgtttcttttcacttgctgcttatcttaatcacctttaccttcactaatttgcaagtcaccattttggcttcattttccttaaacttgtgccatcctagtaaaatgawaaaggagtgaaaatttctttttaactagatgctagccagagtcagctgtacatgtgytgaatgaaagtgcaacctcaytaaatcaaaacattaatttactttctgccagcttaggcgtgctgtgaagaatgtatctactctttcatacagactttgaatatcttattttcaaatgtgtgtgttgctgttagagagggaagtgaacacgagtgagcttttagcacaagttttaaatatgtctggtaacaacttgtgctccatgatatgatcacgagctaggtctcacctgggttttggtttggcatacaacagcctgggtgctgcaactgcttcaagcacaagaagataaacagtcaa

SEQ ID NO: 8991 - DNA, 600 bp, Chicken  19866894204166_3
tatcctctttgatttatttgctgctgcctcaggagtttctgtctgttttaaaatcatgtctgagttacattactagtaggagttatttcactgctttactgtgctatgatatcatgtttcttttcacttgctgcttatcttaatcacctttaccttcactaatttgcaagtcaccattttggcttcattttccttaaacttgtgccatcctagtaaaatgawaaaggagtgaaaatttctttttaactagatgctagccagagtcagctgtacatgtgytgaatgaaagtgcaacctcaytaaatcaaaacattaatttactttctgccagcttaggcgtgctgtgaagaatgtatctactctttcatacagactttgaatatcttattttcaaatgtgtgtgttgctgttagagagggaagtgaacacgagtgagcttttagcacaagttttaaatatgtctggtaacaacttgtgctccatgatatgatcacgagctaggtctcacctgggttttggtttggcatacaacagcctgggtgctgcaactgcttcaagcacaagaagataaacagtcaaatgaaggtaagaatagatatg

SEQ ID NO: 8992 - DNA, 600 bp, Chicken  19866894204167_1
tttagaattgtcttctctaatgttaatagtgataaagatagcttcagagtgtacttagggtagattatctgccattcagtattcacagatggttcccaaagggtgtgcttcaccacaaaagagtagagctccattttgagcttgttgtgatgctcttcaagttctgttatgtttgcagcaattccatgctgtgcttgtggcattcttgttaaaactcttgctatagctgttttagtatatgtacatgagatctctaacacaatgtggtaagacttcagtttggaccttgacttctgttayactgtgctgttatctagtggattgttgtacagctttggtactttttttctaaagtgtataaagtaattcgtatgtcagaagttaggcttaggttgaatattttatgcgtagaggtttagtaacaggatgagagtcttgtattagtcttggtgtttcaatctgtatgattgaatattgtgtgtgtatatatatagatcatatatctgtttccttcagcatgaaattaaccgtcttcttcagtaactgtaactttattatgtgctgtagtaaaacctaaaatgtgaaacttcttgagctatt

SEQ ID NO: 8993 - DNA, 599 bp, Chicken  19866894204168_1
  misc_feature (1)..(35): n is any nucleotide
nnnnnnnnnnnnnnnnnnnnnnnnnnnnnnnnnnntgaggtagcataattaggacaccatctcagtcgtgatgttagatgtaaggccaaagagagaatcatttcacctcccacaaagagcaagtgagtgcactcccacagtgctattgctagcatgatatagtgtttatgcacaatgaggaaaagcagattcagtcgctattgccaaggctccggcctgcagtaggagtacaaacacctaaaaatactgtcacagagcaacatgtcacgtgcttgataaaacatgggaatacatgggaayggaatgcgaagttctttttgagcaactgaatgatgttttagtttcttgctaaccaaattttaccatgattgtttttacaagtaaataactgcttgatgttctaagacattacagtgtttggctgacagctgaagaaggcatggttttaagtcattcagatccccttcctatgtctctgatgttccttccaaactggaaaagcagccataaccactgcactgaaataattaaaaatctcccaaacttcctgaattatagatactggaattgtcaaaaatatattaaatgaaagtttctct

SEQ ID NO: 8994 - DNA, 600 bp, Chicken  19866894204168_2
aaacataactgagatctcagccccagtctaagggactccatgtggggacaaggaattataaggctaagagcaatctgttttattttgttgcatatattacagttctccagctggaaccctggcaggttgacagtgtaaaccccagttgggaaagatttggggcacctgagctttgtgtcatttatgtacatttgtacctgctaaatgtcatggtcatacttgtccccatgactctgaccctggctgcagcaagggagaaggttattttcacctccctcctgtagccactcaggtttgctratgaagctgacaaatctgacattatttctttactgccttcagaagctgtagctctcagcactgctctccttkgacaggagcaggaaagccattccwactcctaccagaagaacggaggcaactaattctgcagtattacaaaggcttctttccatggttttcctgcatgtcctaagtctctgagtgcactataaaagatggagtagcagacagacgtcactaacatttggtgctgagtgtgcaaaagtgtatttttaatagtgctaatctgaagagctaaagctcatctacaggtagagc

SEQ ID NO: 8995 - DNA, 600 bp, Chicken  19866894204168_3
atctgttttattttgttgcatatattacagttctccagctggaaccctggcaggttgacagtgtaaaccccagttgggaaagatttggggcacctgagctttgtgtcatttatgtacatttgtacctgctaaatgtcatggtcatacttgtccccatgactctgaccctggctgcagcaagggagaaggttattttcacctccctcctgtagccactcaggtttgctratgaagctgacaaatctgacattatttctttactgccttcagaagctgtagctctcagcactgctctccttkgacaggagcaggaaagccattccwactcctaccagaagaacggaggcaactaattctgcagtattacaaaggcttctttccatggttttcctgcatgtcctaagtctctgagtgcactataaaagatggagtagcagacagacgtcactaacatttggtgctgagtgtgcaaaagtgtatttttaatagtgctaatctgaagagctaaagctcatctacaggtagagccaygtaggaaagaggaggaaggagaaaagttaactgtggagtggagggacagcagtgcctacctctattctc

SEQ ID NO: 8996 - DNA, 600 bp, Chicken  19866894204168_4
ttacagttctccagctggaaccctggcaggttgacagtgtaaaccccagttgggaaagatttggggcacctgagctttgtgtcatttatgtacatttgtacctgctaaatgtcatggtcatacttgtccccatgactctgaccctggctgcagcaagggagaaggttattttcacctccctcctgtagccactcaggtttgctratgaagctgacaaatctgacattatttctttactgccttcagaagctgtagctctcagcactgctctccttkgacaggagcaggaaagccattccwactcctaccagaagaacggaggcaactaattctgcagtattacaaaggcttctttccatggttttcctgcatgtcctaagtctctgagtgcactataaaagatggagtagcagacagacgtcactaacatttggtgctgagtgtgcaaaagtgtatttttaatagtgctaatctgaagagctaaagctcatctacaggtagagccaygtaggaaagaggaggaaggagaaaagttaactgtggagtggagggacagcagtgcctacctctattctcctcccttgagttctgactgcagag

SEQ ID NO: 8997 - DNA, 600 bp, Chicken  19866894204168_5
aagctgacaaatctgacattatttctttactgccttcagaagctgtagctctcagcactgctctccttkgacaggagcaggaaagccattccwactcctaccagaagaacggaggcaactaattctgcagtattacaaaggcttctttccatggttttcctgcatgtcctaagtctctgagtgcactataaaagatggagtagcagacagacgtcactaacatttggtgctgagtgtgcaaaagtgtatttttaatagtgctaatctgaagagctaaagctcatctacaggtagagccaygtaggaaagaggaggaaggagaaaagttaactgtggagtggagggacagcagtgcctacctctattctcctcccttgagttctgactgcagagcaacagaatcaaactagaactggagagaaataaatgaagatgagtactgggagagaggaaggtgcacccagtggaaatagctcccttatttctcatgctcacactgatgaaaaccattcctcttgatgctacatcagcattgacaaccacgtcctgccaaatgcagttacttttctgtgttttgctgaataaaataaaaagaaaata

SEQ ID NO: 8998 - DNA, 600 bp, Chicken  19866894204178_1
cctcacaggagtactcccacatttgactcagcaattaattattttaattttattgctgtttaactgaattcatagactatacactatctaaaaaaatcgtgtggaaaatgagagaggctgattagagaggaactatctgcagggtgagaggagaggaagctgaaggctatgaactgtcagatgaagggaattttaagactagcttggcactgagtgtctgtggtgaaagaatatcacgaagagcagtctccagccaagtctttgggggctggtttctttgttcttctttgctttagtgcwtaatcccataaaaactgtacgtggcattactgaaagaaatgacccatgaagaagattggtatggctgtcagaaacagacaaaacaatgaagatcttwggaaagagctataggagatcgggtaggaagagctacgagaagtacagaaatatcaagcattggcagaaagagaaacatgaatgaaaagagagaaactgtacacgataaggtgttgctttgtagtaatgttggaaatacagtaatatattccaacctctgcacagagtcttcaagaaaggtaagtcacacacaggaaggaaatt

SEQ ID NO: 8999 - DNA, 600 bp, Chicken  19866894204178_2
cgtgtggaaaatgagagaggctgattagagaggaactatctgcagggtgagaggagaggaagctgaaggctatgaactgtcagatgaagggaattttaagactagcttggcactgagtgtctgtggtgaaagaatatcacgaagagcagtctccagccaagtctttgggggctggtttctttgttcttctttgctttagtgcwtaatcccataaaaactgtacgtggcattactgaaagaaatgacccatgaagaagattggtatggctgtcagaaacagacaaaacaatgaagatcttwggaaagagctataggagatcgggtaggaagagctacgagaagtacagaaatatcaagcattggcagaaagagaaacatgaatgaaaagagagaaactgtacacgataaggtgttgctttgtagtaatgttggaaatacagtaatatattccaacctctgcacagagtcttcaagaaaggtaagtcacacacaggaaggaaattatcagctatatatgcctcaacatgagaatttaactcttctcacaggcaccttttccttttaatgaacaaaatacagatttactctaaacataacagt

SEQ ID NO: 9000 - DNA, 600 bp, Chicken  19866894204183_1
atttatttcctttctggggaaactcacagcatttcagggagtgaacctctcctgtgggccaccacaaaagccaggccatcctgaaagctgctctgtgcacgcagtgccggctggttgcggtgcatcgtccctctgtgaacgtggggaatggtgtctgcagggcagctggtgcctggcagtgcaccctgctgtgcctgggagctgtgcaccacgctgtgttgggtcttaagccttgcagaatgggctttgtgaatcgaggcggtggaactgctggcagcccagagcctcctcacagccctyggtcttctcctcccgttctcaggacaccctgcgagactgcgaccaggagtccacctgctacaacactgtcatctcrcccatctacttcgtgtccttcgtgctgacggcccagtttgtcctggtgaacgtggtgatcgccgtgctcatgaagcacctggaggagagcaacaaggaggcgaaggaggaggcggagctcgaggcagaactggagatggagatgaagaccatcagccccgggcagcacarcccctcggacatcttcacttggatgggcggcgtcggtggcgaaaggcccgagag

SEQ ID NO: 9001 - DNA, 600 bp, Chicken  19866894204183_2
catcctgaaagctgctctgtgcacgcagtgccggctggttgcggtgcatcgtccctctgtgaacgtggggaatggtgtctgcagggcagctggtgcctggcagtgcaccctgctgtgcctgggagctgtgcaccacgctgtgttgggtcttaagccttgcagaatgggctttgtgaatcgaggcggtggaactgctggcagcccagagcctcctcacagccctyggtcttctcctcccgttctcaggacaccctgcgagactgcgaccaggagtccacctgctacaacactgtcatctcrcccatctacttcgtgtccttcgtgctgacggcccagtttgtcctggtgaacgtggtgatcgccgtgctcatgaagcacctggaggagagcaacaaggaggcgaaggaggaggcggagctcgaggcagaactggagatggagatgaagaccatcagccccgggcagcacarcccctcggacatcttcacttggatgggcggcgtcggtggcgaaaggcccgagagcccccgaggatgcccccatcccctgcaaatccaggtggattctcagctctcgttagtttaccctatggtgagaagc

SEQ ID NO: 9002 - DNA, 600 bp, Chicken  19866894204183_3
ttgtgaatcgaggcggtggaactgctggcagcccagagcctcctcacagccctyggtcttctcctcccgttctcaggacaccctgcgagactgcgaccaggagtccacctgctacaacactgtcatctcrcccatctacttcgtgtccttcgtgctgacggcccagtttgtcctggtgaacgtggtgatcgccgtgctcatgaagcacctggaggagagcaacaaggaggcgaaggaggaggcggagctcgaggcagaactggagatggagatgaagaccatcagccccgggcagcacarcccctcggacatcttcacttggatgggcggcgtcggtggcgaaaggcccgagagcccccgaggatgcccccatcccctgcaaatccaggtggattctcagctctcgttagtttaccctatggtgagaagcttggctgcagggtgcagaggggctgccttgcgtttctgctgggggaagacgtgcrcgaggggtggtggaggtgccatgcagaggctctgtggtcctcactgctctgtggggcactccaggtggcagtgcatggcagggctgcagcccaccgccgtgcagagctttgcagt

SEQ ID NO: 9003 - DNA, 576 bp, Chicken  19866894204183_4
tgatcgccgtgctcatgaagcacctggaggagagcaacaaggaggcgaaggaggaggcggagctcgaggcagaactggagatggagatgaagaccatcagccccgggcagcacarcccctcggacatcttcacttggatgggcggcgtcggtggcgaaaggcccgagagcccccgaggatgcccccatcccctgcaaatccaggtggattctcagctctcgttagtttaccctatggtgagaagcttggctgcagggtgcagaggggctgccttgcgtttctgctgggggaagacgtgcrcgaggggtggtggaggtgccatgcagaggctctgtggtcctcactgctctgtggggcactccaggtggcagtgcatggcagggctgcagcccaccgccgtgcagagctttgcagtttgttctggagatgggcctgagctgcctcgtgcagggctaaactccacattagctctaatgcagcgtctgggctcggccctttgtgagagcaaaattacgagcataataagttgcttttctaatgccggccacgaaccgcaacataaaagggaatagaagt

SEQ ID NO: 9004 - DNA, 600 bp, Chicken  19866894204190_1
gatgctgacagttcattccagattacccagcaaacatgtaaccccagataagcaagcatctgtgctgcattacatggcagaagagagggtttgtaactataagtaatatcattcatttcacaatgaatatgacagcattaatacacaaggctcagattagataccgtgttcttagtcatatacgtgcacttggctctcctctcacttagcaatcccatttcaataaaagatgcaggaattaaatcctcctgaaaacaaagccattaaaccttgtttcagtttatccagttgtagtaaaaygcatctatatattcaaggataccctgaagaataccccgtttcttttttatmtttctttcctcatattacaggaaaagcttttctagagcattcagatctggcctaggagcaaataagggactccctacactggtcaacaagaacattgcttccagtttacccatcctttttaagtggtcaaaaattcctgtgtcatttcaggagtaacctaaggaaggaatgaggagcagatcaaaccatgctctaggcacatctattacactcaaggattcagtaccaagtggtccttacagtattcag

SEQ ID NO: 9005 - DNA, 600 bp, Chicken  19866894204190_2
gcaagcatctgtgctgcattacatggcagaagagagggtttgtaactataagtaatatcattcatttcacaatgaatatgacagcattaatacacaaggctcagattagataccgtgttcttagtcatatacgtgcacttggctctcctctcacttagcaatcccatttcaataaaagatgcaggaattaaatcctcctgaaaacaaagccattaaaccttgtttcagtttatccagttgtagtaaaaygcatctatatattcaaggataccctgaagaataccccgtttcttttttatmtttctttcctcatattacaggaaaagcttttctagagcattcagatctggcctaggagcaaataagggactccctacactggtcaacaagaacattgcttccagtttacccatcctttttaagtggtcaaaaattcctgtgtcatttcaggagtaacctaaggaaggaatgaggagcagatcaaaccatgctctaggcacatctattacactcaaggattcagtaccaagtggtccttacagtattcagatagagtatcttcagacccctaagtgtaggccaattcatgtttgctcatta

SEQ ID NO: 9006 - DNA, 600 bp, Chicken  19866894204191_1
gtgaaattgatgtcttttatgacttcccagcagagggaatcaaccatttactggatgggctcctacattcaggaccaggctttcgttctggaatttattccaagaactaaattctgggcagaagctctggtatctgccagttttcattttcatccttctctgtcagcctacaaacaagatgaatggcctgaattacactgcgtcagtttaactgcaggaataacattgtaccacttaaagcttttatgtgtgggctcatttttgtgctgttctgaacgtcctttacatcaggttagtttytctcagccatgaccttgtgcatcagctgtgttgcattttctaagggttaaaaaaacagcttgctaccagaccagctgcttctgctagactgtagaagataaagtaaattaaaaccatgcatacagttagttagaaaatcaggttaacatgtagagaagctggcttttgtacgtgttaagctttatagaacctgtagttaatccattatgttgccaactggttgagccatttcactgataaagacaaaacctccctgacaaagtaggactgtgtgctatgagagcagctcatgctgatgca

SEQ ID NO: 9007 - DNA, 600 bp, Chicken  19866894204195_1
tcccttcactgatttttaagatgattatattttatttatagatgagaaaataataattaatcttaaatttattgaaaactttttgtgagattacatgaaatgatcattctaacaatacattcagggaagccagactatatctgtatttagtcttgtaagtgctgatgtgaggttaagctattgatgtgaaattaaatgtgctttcacatatgcctgtgttcagaataaaggagttatatttttcttgctcttatgaaaagtttcattgcatgaagcactgatacacctcaggtgtttctyctgtgaaaactatatgtgaaatatctaagagctgaaagctcagggataggagtgtggtatcctctggtggctataagaactgatttctaagtcaaccaagtcatttatctactggtcaaccataattgcgtccacaattattgttgaatcttaaatcatagcacatggattgcaaactttcagtggaatttagagaacagcacaagaaacagctcattttaactcagaattccttgattccttgccttaacactgttaccttatttgttacctttaaaaagcctcggagacttttttttt

SEQ ID NO: 9008 - DNA, 599 bp, Chicken  19866894204207_1
  misc_feature (1)..(73): n is any nucleotide
nnnnnnnnnnnnnnnnnnnnnnnnnnnnnnnnnnnnnnnnnnnnnnnnnnnnnnnnnnnnnnnnnnnnnnnnntttccagtgccagatgatatcactgctgctgtgcaataagtgattcagtatcgaagttttccacatgcagtagtcatttcagatagacagtcagtggcctacagtgtcttttctacttcacaggcttacattcaaatctcaacccccaccaaagacttttggcatcatctgaaactaaccgccaagtgttttagttctccactgatgaaattgggtttaaaagctgktagagtgcttgcaccaagctratgctcctaaacattgctagtcactgctaggctcctacctctacagcagggacctggagccttgggatgttcaaatgtgagtcaaaacactcagaaacttcaggcttaataggtcaaaaccaactatttgtcagtacagggaagtraaaatggcagcaaayccaattagctgctaggttgcagagccatagaacctgggaatctcatctcccaggcccagtgctccagatgctggataatttaggtgtcctaggggttgttgcgaaggaaggaacgtg

SEQ ID NO: 9009 - DNA, 599 bp, Chicken  19866894204207_2
  misc_feature (1)..(52): n is any nucleotide
nnnnnnnnnnnnnnnnnnnnnnnnnnnnnnnnnnnnnnnnnnnnnnnnnnnntttccagtgccagatgatatcactgctgctgtgcaataagtgattcagtatcgaagttttccacatgcagtagtcatttcagatagacagtcagtggcctacagtgtcttttctacttcacaggcttacattcaaatctcaacccccaccaaagacttttggcatcatctgaaactaaccgccaagtgttttagttctccactgatgaaattgggtttaaaagctgktagagtgcttgcaccaagctratgctcctaaacattgctagtcactgctaggctcctacctctacagcagggacctggagccttgggatgttcaaatgtgagtcaaaacactcagaaacttcaggcttaataggtcaaaaccaactatttgtcagtacagggaagtraaaatggcagcaaayccaattagctgctaggttgcagagccatagaacctgggaatctcatctcccaggcccagtgctccagatgctggataatttaggtgtcctaggggttgttgcgaaggaaggaacgtgaattgaaatctgggacttcgc

SEQ ID NO: 9010 - DNA, 600 bp, Chicken  19866894204207_3
tggcctacagtgtcttttctacttcacaggcttacattcaaatctcaacccccaccaaagacttttggcatcatctgaaactaaccgccaagtgttttagttctccactgatgaaattgggtttaaaagctgktagagtgcttgcaccaagctratgctcctaaacattgctagtcactgctaggctcctacctctacagcagggacctggagccttgggatgttcaaatgtgagtcaaaacactcagaaacttcaggcttaataggtcaaaaccaactatttgtcagtacagggaagtraaaatggcagcaaayccaattagctgctaggttgcagagccatagaacctgggaatctcatctcccaggcccagtgctccagatgctggataatttaggtgtcctaggggttgttgcgaaggaaggaacgtgaattgaaatctgggacttcgcatagtttttaaaatgtctaaaataagcattgtgctattgatatgaaaatgcctatgggaattttcaaaaacaattttatgtgttggaatgggataaaaatagttgattgtttcacacagtattgagtatttggcagtgaaccgggca

SEQ ID NO: 9011 - DNA, 600 bp, Chicken  19866894204207_4
tttctacttcacaggcttacattcaaatctcaacccccaccaaagacttttggcatcatctgaaactaaccgccaagtgttttagttctccactgatgaaattgggtttaaaagctgktagagtgcttgcaccaagctratgctcctaaacattgctagtcactgctaggctcctacctctacagcagggacctggagccttgggatgttcaaatgtgagtcaaaacactcagaaacttcaggcttaataggtcaaaaccaactatttgtcagtacagggaagtraaaatggcagcaaayccaattagctgctaggttgcagagccatagaacctgggaatctcatctcccaggcccagtgctccagatgctggataatttaggtgtcctaggggttgttgcgaaggaaggaacgtgaattgaaatctgggacttcgcatagtttttaaaatgtctaaaataagcattgtgctattgatatgaaaatgcctatgggaattttcaaaaacaattttatgtgttggaatgggataaaaatagttgattgtttcacacagtattgagtatttggcagtgaaccgggcaacttataaaacaaag

SEQ ID NO: 9012 - DNA, 600 bp, Chicken  19866894204211_1
gggatctggacaaataattttggaaggaattatttgttaacattttaaaaatctacaggtgtattaattttgaattagcaactgctatattggttgttgcagttctggcactgactttgggaaattcagcatgcaactacatctgaactactgggatataaatttgtctactccatgttttccaagttccagcatgataatgagatcccattacttcagaagttctaatgtagtggcaataaaaaataattacaaaggaatatctcctaactgaataaaacgtagaacatctgtgaatayctawayagcttcttcacatgaagaatttggctgtggttctttratagttatgatttatttttgagaaaaatatttccttagctctatgcctctccccttcctcatctccactccatcccccaaagtaaaacacaacaacaacaacaacaaaatgtttacagcaaatggacgtatgctttttctgagttccctaatgagttaacttcaaaaaaggccagggagccatgatgtttaccgatcaggcactcagcatagtcacaggccagacaacatgttcttgggcacagttttagaagagta

SEQ ID NO: 9013 - DNA, 600 bp, Chicken  19866894204211_2
tctggacaaataattttggaaggaattatttgttaacattttaaaaatctacaggtgtattaattttgaattagcaactgctatattggttgttgcagttctggcactgactttgggaaattcagcatgcaactacatctgaactactgggatataaatttgtctactccatgttttccaagttccagcatgataatgagatcccattacttcagaagttctaatgtagtggcaataaaaaataattacaaaggaatatctcctaactgaataaaacgtagaacatctgtgaatayctawayagcttcttcacatgaagaatttggctgtggttctttratagttatgatttatttttgagaaaaatatttccttagctctatgcctctccccttcctcatctccactccatcccccaaagtaaaacacaacaacaacaacaacaaaatgtttacagcaaatggacgtatgctttttctgagttccctaatgagttaacttcaaaaaaggccagggagccatgatgtttaccgatcaggcactcagcatagtcacaggccagacaacatgttcttgggcacagttttagaagagtaaatg

SEQ ID NO: 9014 - DNA, 600 bp, Chicken  19866894204211_3
tggacaaataattttggaaggaattatttgttaacattttaaaaatctacaggtgtattaattttgaattagcaactgctatattggttgttgcagttctggcactgactttgggaaattcagcatgcaactacatctgaactactgggatataaatttgtctactccatgttttccaagttccagcatgataatgagatcccattacttcagaagttctaatgtagtggcaataaaaaataattacaaaggaatatctcctaactgaataaaacgtagaacatctgtgaatayctawayagcttcttcacatgaagaatttggctgtggttctttratagttatgatttatttttgagaaaaatatttccttagctctatgcctctccccttcctcatctccactccatcccccaaagtaaaacacaacaacaacaacaacaaaatgtttacagcaaatggacgtatgctttttctgagttccctaatgagttaacttcaaaaaaggccagggagccatgatgtttaccgatcaggcactcagcatagtcacaggccagacaacatgttcttgggcacagttttagaagagtaaatgga

SEQ ID NO: 9015 - DNA, 600 bp, Chicken  19866894204211_4
tttaaaaatctacaggtgtattaattttgaattagcaactgctatattggttgttgcagttctggcactgactttgggaaattcagcatgcaactacatctgaactactgggatataaatttgtctactccatgttttccaagttccagcatgataatgagatcccattacttcagaagttctaatgtagtggcaataaaaaataattacaaaggaatatctcctaactgaataaaacgtagaacatctgtgaatayctawayagcttcttcacatgaagaatttggctgtggttctttratagttatgatttatttttgagaaaaatatttccttagctctatgcctctccccttcctcatctccactccatcccccaaagtaaaacacaacaacaacaacaacaaaatgtttacagcaaatggacgtatgctttttctgagttccctaatgagttaacttcaaaaaaggccagggagccatgatgtttaccgatcaggcactcagcatagtcacaggccagacaacatgttcttgggcacagttttagaagagtaaatggactctttacaattgtttcgtaccaaaactttaagtagc

SEQ ID NO: 9016 - DNA, 599 bp, Chicken  19866894204212_1
  misc_feature (1)..(203): n is any nucleotide
nnnnnnnnnnnnnnnnnnnnnnnnnnnnnnnnnnnnnnnnnnnnnnnnnnnnnnnnnnnnnnnnnnnnnnnnnnnnnnnnnnnnnnnnnnnnnnnnnnnnnnnnnnnnnnnnnnnnnnnnnnnnnnnnnnnnnnnnnnnnnnnnnnnnnnnnnnnnnnnnnnnnnnnnnnnnnnnnnnnnnnnnnnnnnnnnnnnnnnnnnnnatgttagagcttgggtgcatcagaagaaaaggaccagaagaaaggatactaaaacagacaagtaactaaattagatatatctttctgcattctttargattaggtaacttctattcacagcaagaccacacaagggagctttgttttgaaactgaagctctatttcagcactcagttttaatgctctgataccttccttaaggcctcagctttcaaacacactgacaggctgagggaagcactgacctgcagtgggctggccacctcttaatgttgtctatgaacaacacagggaatgatcaaatctaagcaaatcctaactgcatgagcagaacagttctttacaatgtggcaacaatcttaattaaaacacctaataacatgctagctggcttt

SEQ ID NO: 9017 - DNA, 600 bp, Chicken  19866894204213_1
gactgtgaagtgagcaaagagaatgaatgttgtaaggcaacccagtgtgaccacaatgagtcatgttaaagtggagaggtgtttcccagaggtgcaggtaatggtgagactgctcctttgcagttgtgagaggtagatatttgaggtgagccttgaaggcaatgcagtatgactcttgctgtgggtattttgcaatatagtgccatttagggaaggtggcaaagccatgtgtttctatgattagccgtatttgctgttattatctagtcatgcttatctgtttgttgcggttatacagargaaggagtgatgtgtttttggagagagtatttgttcagagaccaagtgatgaaccttcttctgttgtcatcttcaagattcaggaactccagctctggtagggtcttagaagatccttcctctgtgcagagtgggatcagtcctgctcaaatcacacctcaggtggtcatctaacttctaatttttttggagaggtctatcattagtgaaggatctctattcagtctgtggtaatgcttttaaattccttactgttaccatattcttatattggtagtgttgaaggctcagaatgtccag

SEQ ID NO: 9018 - DNA, 600 bp, Chicken  19866894204217_1
taagttgttattttttaagttgcatggttagtagtgcctaaaatgttatttccttcattgttgctgtggaattttcccttgagacaaaagtatacctccacttggaagaggcactggaatcatctgcacaaaaatatctgcaggaaccaacagaaaacaaccaacagtacgagtgaagaaagaaaacaactgattaagcaatattctggtctggataccaatggcaaaagttaggctatttgccaccgaaagctaaatgacctacctcctttgacttataccacggatcttagatttttktgctcacagttgacttgagccatctttgactttgaaccctctagcttttatcagtttgcatcacaaccaaagtgttattcaggttttttttttagcgtgtgtgtgcacccacacactcacacagagaaaaataaggaaatttttatcattacggtattttggcagcataatgggaatagacagcaactactttgtgttacaaatttgaatgtgaaatttcagaaaacctccttgcattaaaaatgaattaactgtgtgattattaattgtgcatattccaatccctttgtgctgtaccgc

SEQ ID NO: 9019 - DNA, 600 bp, Chicken  19866894204221_1
aagagttgggtgggttttccttctttccagtcttctacccttggctgactcagccaagcacagccttctgtgactccagctctgctgtgtcagattgctctgagggggaatatcagtcctttaataactctgtcagacttatcgagggatttgttttattaattctaagactgggtacagcaaatagattatagcctgggccacttcataggcttaataagccctttctgtgcttacttataactttttttttctttccaaatctccctgtgttaatgactgtgttttgtttttgtgttrctatttattgaatgtcctcagagctgtgtgtgtcacagagaatatgcccaaagttcattcctttccatcatttttcagatgattagagagggatggagagagcacaaattrtgctggatttgggggtagtaaatgcctttgatagctgtcatggtgatggtctgagaacaaaacaaagctgaaaatactcagcatgtgagcaggttcttgctcagcaggagagaaggtgccctctttctgtggcatacagtggataatgtcccagtttccagtctctgtgtcagtcttgcaatgatacag

SEQ ID NO: 9020 - DNA, 600 bp, Chicken  19866894204221_2
atcagtcctttaataactctgtcagacttatcgagggatttgttttattaattctaagactgggtacagcaaatagattatagcctgggccacttcataggcttaataagccctttctgtgcttacttataactttttttttctttccaaatctccctgtgttaatgactgtgttttgtttttgtgttrctatttattgaatgtcctcagagctgtgtgtgtcacagagaatatgcccaaagttcattcctttccatcatttttcagatgattagagagggatggagagagcacaaattrtgctggatttgggggtagtaaatgcctttgatagctgtcatggtgatggtctgagaacaaaacaaagctgaaaatactcagcatgtgagcaggttcttgctcagcaggagagaaggtgccctctttctgtggcatacagtggataatgtcccagtttccagtctctgtgtcagtcttgcaatgatacagacagtggtgaaacactgtgggcccaattggagtgctttgaaaagcttgcagagtgcttgcagtgaagccagttttagcttcttgggttggtacacttcagtctaactgcta

SEQ ID NO: 9021 - DNA, 600 bp, Chicken  19866894204221_3
ataacctggttctcactgagcttttggctgtattgagtagtactgtatgcccctcaggatgggacaggcttctgatgaatttaagtctgtgctaaaatctactggatgtatatgctgccctgtatcactgattgaccccagagtaaaactgaaaactggtcctcctgtaggtaatgtagatgccttttgctgtaggcacagaatggcagctatacgcagaaggtcctgatgggacaaaactctttgattaagaaagaattgactaaaacaggacatgaggtagtaatcaggcatgctgcrataccattctgaatatagaatgattacccataattttttataaagcgacaggcaggcgatgccctagctgatatatccagctgcaggtgaacaaatgggaatagtttcacaccatatcaattctacttttggaagagactaggcaaattcaaggagagagtggagtccatcaaaaactattaagtatttgatgccatctctacaagtctctcattgctagaagctgcaaataaggtttttgtgaattttctctgtttctttgacacttccccgagtccctgtgcctggctgctgtcagaa

SEQ ID NO: 9022 - DNA, 600 bp, Chicken  19866894204237_1
tattatttggttttctggaaactgattttaaactggaaaaactgggaccatgataaaacagactgttggtaaaagcagtgttttagattataaatgcttaggaattaggtatcagaatgctgaatatttattgctgctactgctgatggccaaacacttgtttttcttcttgtgtgccagatcataaaacaacaactgtcttcaaagactgcatcttctcttgtgatttatgcctccggggattaaaactgcatggagattacattccccaggtagacaaactgatcttctgtagagacrgatgattgacttctgacccttttgtcagcattatctctgtaaaataagacttgtgcactgatctttttacatacatagatctttttcaaaatttatatgtgctataaacaagcaaaggcattgcatgcagtatgttggaactgaagtaattttgcatatttatgcttgccaacactgaattgtgaattacaacttggctaactcacrtgtttgtttggtgatatttgtactcaccttctgaaggagaggtttgtgattaaaagtggcagcctccctaatgcaaaatttaatggcacagga

SEQ ID NO: 9023 - DNA, 600 bp, Chicken  19866894204237_2
actgcatcttctcttgtgatttatgcctccggggattaaaactgcatggagattacattccccaggtagacaaactgatcttctgtagagacrgatgattgacttctgacccttttgtcagcattatctctgtaaaataagacttgtgcactgatctttttacatacatagatctttttcaaaatttatatgtgctataaacaagcaaaggcattgcatgcagtatgttggaactgaagtaattttgcatatttatgcttgccaacactgaattgtgaattacaacttggctaactcacrtgtttgtttggtgatatttgtactcaccttctgaaggagaggtttgtgattaaaagtggcagcctccctaatgcaaaatttaatggcacaggaggaacattagggaaaagaggagaggagaaccatgaactcgtggctggtcagctaaaaatttttgtctagcacgttgaggtgattgctgtctgaaaccatacatacccaaagtcataaaatatagacagattgctacacttgatctgaactccagctatttaatgctttggaatctaatgtagaaataattttatctgatctaaatct

SEQ ID NO: 9024 - DNA, 600 bp, Chicken  19866894204239_1
tgaggatgggccatcaagcagtgttaaagtacatgcctcaaccttaacttcagacttaacacagtgaattcagtgataacactagaagtatcctgagtactgctgcagccagaagatcacactgcccacgaccttagcatgaaagctgcagaaatagagcaaatgggaaaagaaccagggagtagtgaaactccatagctttccacttatactattaactggctaggcatttactacactaatgaaagagctaggaaaaaaaaagtgcaattcagactttaaatatgaaactgactataytttttcagtctgtgtatcaaaacccacyaaaagctgcttgtcactgactggacttccatttcataccaatgactacctgggcagattcctctattcttccatctgcattcaatgggaggaagagatttcaatctagtaaaatactgaagtggaattgaatcagttttccagaagccacttggaagttgtgttcccatttgaatgtttctgctcctacttagcatctggtagagctgcaggactaccctctgcttcagcgccaaacagcatttttaaagacttgatccagtgcaatggaat

SEQ ID NO: 9025 - DNA, 600 bp, Chicken  19866894204239_2
gtacatgcctcaaccttaacttcagacttaacacagtgaattcagtgataacactagaagtatcctgagtactgctgcagccagaagatcacactgcccacgaccttagcatgaaagctgcagaaatagagcaaatgggaaaagaaccagggagtagtgaaactccatagctttccacttatactattaactggctaggcatttactacactaatgaaagagctaggaaaaaaaaagtgcaattcagactttaaatatgaaactgactataytttttcagtctgtgtatcaaaacccacyaaaagctgcttgtcactgactggacttccatttcataccaatgactacctgggcagattcctctattcttccatctgcattcaatgggaggaagagatttcaatctagtaaaatactgaagtggaattgaatcagttttccagaagccacttggaagttgtgttcccatttgaatgtttctgctcctacttagcatctggtagagctgcaggactaccctctgcttcagcgccaaacagcatttttaaagacttgatccagtgcaatggaatctgagaaaagcttctgtagcaattaaga

SEQ ID NO: 9026 - DNA, 517 bp, Chicken  19866894204239_3
ctgcttgtcactgactggacttccatttcataccaatgactacctgggcagattcctctattcttccatctgcattcaatgggaggaagagatttcaatctagtaaaatactgaagtggaattgaatcagttttccagaagccacttggaagttgtgttcccatttgaatgtttctgctcctacttagcatctggtagagctgcaggactaccctctgcttcagcgccaaacagcatttttaaagacttgatccagtgcaatggaatctgagaaaagcttctgtagcaattaagacttaratgctaaacttctggcacacaaatcacttgcccagatgaaacatatctgtatttgaagaggctgccaaaaatctataaggctatggaggctgcgacaccagaatgctttgctacaaaggcaggttaagcgcagcactgtagcaagcttattctctccagcatcatgccttcagttccatgctagtggcaatggtgtgctctgtcaccgctcctcctg

SEQ ID NO: 9027 - DNA, 599 bp, Chicken  19866894204243_1
  misc_feature (1)..(218): n is any nucleotide
nnnnnnnnnnnnnnnnnnnnnnnnnnnnnnnnnnnnnnnnnnnnnnnnnnnnnnnnnnnnnnnnnnnnnnnnnnnnnnnnnnnnnnnnnnnnnnnnnnnnnnnnnnnnnnnnnnnnnnnnnnnnnnnnnnnnnnnnnnnnnnnnnnnnnnnnnnnnnnnnnnnnnnnnnnnnnnnnnnnnnnnnnnnnnnnnnnnnnnnnnnnnnnnnnnnnnnnnnnaaaaaagaaaaaagaaaaaagaaaaaagaaaaaagaaaaaagaaaaaagaaaaaagaaaaaagaaaaaagaaaaaagaaaaragaaaaaagaaaaaagaaaaaagaaaagtattctttcctaaatccaggaatgctgaatgacagtaatatcagaaaacaagttttgaaagctataccattcagcagtcacagtggacttgtcatttttcagagaaacaacaaaaagccccagatttgtatgatttctccagtactagttagcagatagaaacaagttatttgattttcttcagacctttttctatcaatgaatgatctcaatttgtactgtggataaagcagacctcaaaaatgtgttacaactctatccctggccggtc

SEQ ID NO: 9028 - DNA, 600 bp, Chicken  19866894204248_1
tattagaaaaaagctaagtgattatctgaagagagccagggaatatttcatggaatatacatggagtgacttcagccagaggtgttgagagtcctaaattttgtgatgtcctgaagctactgcacagcattcttatcaagagtggaaaatgagtttaagctattatttctactcaaggaaaaaatgtgaagctgtacctgccacatcttgttcatgctcctgatcctcccagcctttcttcttcatctttttcactggttcagagctgttgctaaagctcctccttaattcatcactctrcttttatttaaagaaataaatgcgttggaaaatacactgaaactggstttgttttaaaatcatctctgctatattaatttaatatctataaaagtcttctgtttcacattatctcaaattacatttttctcttggaattgccacaaaataataaaaagaacagaaataatttccactctcctgactgtcataattcttttgttagaaaactacttttccctatttctgtatattgttcagagccaacactcttgtgctaatcatctcagccaaaatcattttgcattcctgtctagacac

SEQ ID NO: 9029 - DNA, 554 bp, Chicken  19866894204248_2
tcatggaatatacatggagtgacttcagccagaggtgttgagagtcctaaattttgtgatgtcctgaagctactgcacagcattcttatcaagagtggaaaatgagtttaagctattatttctactcaaggaaaaaatgtgaagctgtacctgccacatcttgttcatgctcctgatcctcccagcctttcttcttcatctttttcactggttcagagctgttgctaaagctcctccttaattcatcactctrcttttatttaaagaaataaatgcgttggaaaatacactgaaactggstttgttttaaaatcatctctgctatattaatttaatatctataaaagtcttctgtttcacattatctcaaattacatttttctcttggaattgccacaaaataataaaaagaacagaaataatttccactctcctgactgtcataattcttttgttagaaaactacttttccctatttctgtatattgttcagagccaacactcttgtgctaatcatctcagccaaaatcattttgcattcctgtctagacaca

SEQ ID NO: 9030 - DNA, 600 bp, Chicken  19866894204249_1
tcattcatttttctgaattccacatagagaagtaagagttgttcagtatctaaggccaagccagggtacctctgacacttccttctccttattagccctagtcaaagagacaatacaaaaagaaaagttctttctttgcaaagggagctgagaaatgttaatacactggagttagttcaacatgttctccaacagctgagattccctgcaaacacactgctgtctattcagagttcagctgcccacctcttggcaagggcagcacgctgagtccagcacgttgcatgccattaactggargagaagactccaggagaragccaacctaccattttccgcagaggcttacagcggatggccatcccatccatatagtcctccaccttgaactggtacgacacctgcagcttctggagtaagccatcaaaaaaggaagtgccctgcagaacacatgtatttggttgacacaatttttccaaagacaagcagaaaatcttaacactgtcctttagttactgcaggaaaggtcccyctcccactggtttgggctgttctcttcagaaagcaacgataaggccagaggatctccagcttcagttt

SEQ ID NO: 9031 - DNA, 600 bp, Chicken  19866894204249_2
tccacatagagaagtaagagttgttcagtatctaaggccaagccagggtacctctgacacttccttctccttattagccctagtcaaagagacaatacaaaaagaaaagttctttctttgcaaagggagctgagaaatgttaatacactggagttagttcaacatgttctccaacagctgagattccctgcaaacacactgctgtctattcagagttcagctgcccacctcttggcaagggcagcacgctgagtccagcacgttgcatgccattaactggargagaagactccaggagaragccaacctaccattttccgcagaggcttacagcggatggccatcccatccatatagtcctccaccttgaactggtacgacacctgcagcttctggagtaagccatcaaaaaaggaagtgccctgcagaacacatgtatttggttgacacaatttttccaaagacaagcagaaaatcttaacactgtcctttagttactgcaggaaaggtcccyctcccactggtttgggctgttctcttcagaaagcaacgataaggccagaggatctccagcttcagttttttagggctgagctagac

SEQ ID NO: 9032 - DNA, 600 bp, Chicken  19866894204249_3
gttcagctgcccacctcttggcaagggcagcacgctgagtccagcacgttgcatgccattaactggargagaagactccaggagaragccaacctaccattttccgcagaggcttacagcggatggccatcccatccatatagtcctccaccttgaactggtacgacacctgcagcttctggagtaagccatcaaaaaaggaagtgccctgcagaacacatgtatttggttgacacaatttttccaaagacaagcagaaaatcttaacactgtcctttagttactgcaggaaaggtcccyctcccactggtttgggctgttctcttcagaaagcaacgataaggccagaggatctccagcttcagttttttagggctgagctagacaaagtcaaggctgacctgatttggtgttagccacagtcctgctccaagcaggaggttggactgacgccttccagcagtcccttcctgccaacataattctataaaacacatcctcttggatctgtcagcctaccttctacaacgagtaaaccgagctgagtgtctaacagaatgacttttcagcaaattgataaagatagcacaaacacctctg

SEQ ID NO: 9033 - DNA, 599 bp, Chicken  19866894204250_1
  misc_feature (1)..(5): n is any nucleotide
nnnnntagggctgcagagtccagcagggctgctttcattgataatggttattgatgggttatttttggttttacttgttcaagtatgacatatggttcagttccagtcccagtgcttctgaaatcatcttcctgaggacaaaaatgggtgccaaagttctcttgggttacagtcaaacataaaaggtatctcggttcattgcaagtgtaaggatgtaaacattgtgtgtgtggacactagtgtaagtttcgtgttaataaaaattgcctgactactgcctattagatccagatgcctttkggggggaaagggtacttttccaagcagttcattttcttgggaggaatgttgtcattttatttatttatttatttatttatttatttaggaagtcattactgttagctatgcttctctatcttgtgtgctgcttgcatttgtcagtgcagggacttgtgtatccatgaaatcttgtgtgaatcaaattcaaattcttgttccttttctcaaagtaagtgtcctaagatgtttgaaaagttgttctagactctttggagatatcgtggctacttgacaattctctgaggacctatagctgt

SEQ ID NO: 9034 - DNA, 600 bp, Chicken  19866894204253_1
ggcattctaataactatgctgaaatgacctatttactacagtgttcaaatcataatgtacagctgttcagggattattcattttatcttttgaaatataaccaatacttgctttgaacttagcatctgctctatgcattctgacaaaaaagcagactagttcagggacatgaaatgaagatattcacattatcgtatgaaaatgcagacataaagataacattatgatgtgattatgaagtctacatagagggatatggggttccttctgctggcatagactgatcagaagaagcaactrgaatataatatgaagaattcaaccctcmcaggaaggaaaaaagttatgacaatgtatttattttctttcaaattaacctcagttaaatagtcctttcttatggaaatgagtataaatccttgactaaaatggaaataaatagggttttttttaggggtcagttctcatatctggatgttttacatgtcaatgggaggtgaagctatgcataaatttaatcttacagaaaagacctcgctgtcattaggggcacagagacaggaagtgtacaaacttactttaatctcctgccacctgata

SEQ ID NO: 9035 - DNA, 600 bp, Chicken  19866894204253_2
ctatttactacagtgttcaaatcataatgtacagctgttcagggattattcattttatcttttgaaatataaccaatacttgctttgaacttagcatctgctctatgcattctgacaaaaaagcagactagttcagggacatgaaatgaagatattcacattatcgtatgaaaatgcagacataaagataacattatgatgtgattatgaagtctacatagagggatatggggttccttctgctggcatagactgatcagaagaagcaactrgaatataatatgaagaattcaaccctcmcaggaaggaaaaaagttatgacaatgtatttattttctttcaaattaacctcagttaaatagtcctttcttatggaaatgagtataaatccttgactaaaatggaaataaatagggttttttttaggggtcagttctcatatctggatgttttacatgtcaatgggaggtgaagctatgcataaatttaatcttacagaaaagacctcgctgtcattaggggcacagagacaggaagtgtacaaacttactttaatctcctgccacctgataggctttgctacttctgtgaccttctgaa

SEQ ID NO: 9036 - DNA, 600 bp, Chicken  19866894204256_1
ctctgctattgagctttattaggaagaatagaaactactgctttaaactttaaggagaaggaacaacagaaatgcacctaaaagatacccattcctctctgggaggggggaaattaagctaattttataatactgtattcctatgttcactagtaaattctgatttttataaacttgttctttcaagtatgctcattttctgcatttcccacgaagcattaactgttctttaaggaagtgtttgctcaaagagagttaagtttattgcttttgtgttcccttcagtgttgacattttacygagtaagtgatgatttctatgggaattgaactacatttcagcctaaagtacagacaaatgaagcaacagccctatgcacatggctgctgccctggctgggatgatgaggtgcaacacctgtttcccygcagaaaacaagagaagcttgagcaggtttatggcagagcttcacacccacttgaatggatgagttgaggcaatacctgcaggtactctcagtccataccatgtatggacaacaaactatttaatgatattaatcctgaaaaataatggagaaagtagttataggcaagatat

SEQ ID NO: 9037 - DNA, 600 bp, Chicken  19866894204256_2
taatactgtattcctatgttcactagtaaattctgatttttataaacttgttctttcaagtatgctcattttctgcatttcccacgaagcattaactgttctttaaggaagtgtttgctcaaagagagttaagtttattgcttttgtgttcccttcagtgttgacattttacygagtaagtgatgatttctatgggaattgaactacatttcagcctaaagtacagacaaatgaagcaacagccctatgcacatggctgctgccctggctgggatgatgaggtgcaacacctgtttcccygcagaaaacaagagaagcttgagcaggtttatggcagagcttcacacccacttgaatggatgagttgaggcaatacctgcaggtactctcagtccataccatgtatggacaacaaactatttaatgatattaatcctgaaaaataatggagaaagtagttataggcaagatatagcagtgaggaaaagaagcaaacatacccagtgtatcccagctggacctcaagtgccacatgaggtaaattcaatgcactttagctaaatccttatttaaaatttgggacacaaacatacctgcatg

SEQ ID NO: 9038 - DNA, 600 bp, Chicken  19866894204263_1
caagtgtgtatatacatgcaccagggagatacttggaaacgattttagaagtgtcttttaatatctctgggctgatagctagggaatcagtcactaaagaaaggcaaagttactgtgacctttcaaagcctttaaactgcctataaattctacaaaaatattaattattttatgaaacaataataacatatagacatattgtgattataatactggctatgaccagagatgagaaaattccaggtatttttttcaggggtttaggagaagtgaaatcaaaatatttttctgtttaaatgstaatgtaaaaactgattttacttttaatataaattcagcaacagagacaggcatttgttttctcgtttgtagctgcttaatgattatcttctccttcacattctatttgctgtcaaaataggtaggccaaataggttaatttgacagcactggtgtttggaaaaatgcattgttacagaggtggaactatgatttattagtgcatttggacacagaaagcttttccatatatgcaaggatctgtagttgagaactgcattcatgcataagataaaactgatgcagtcaatgatttatagt

SEQ ID NO: 9039 - DNA, 600 bp, Chicken  19866894204263_2
ttctcgtttgtagctgcttaatgattatcttctccttcacattctatttgctgtcaaaataggtaggccaaataggttaatttgacagcactggtgtttggaaaaatgcattgttacagaggtggaactatgatttattagtgcatttggacacagaaagcttttccatatatgcaaggatctgtagttgagaactgcattcatgcataagataaaactgatgcagtcaatgatttatagttgtttgctgtctacaaaaaatgaccttgttaagataattaattaaatgaaactgttatmttttcagtttgatgaaagtatcaaagatgactctaaaaatttataaacattttattgaaacagatggtctacttctgtaaataaggctttgaagaataaagttggacagaaaagtatattagatttttccattgatgttattatttatcaaagctttgaaaaaaaggatttgaatgattacttccaggatgtgggggrctacgatcataggaaatrttgtttgattttcactggcttttatcttattttttgtgtgttttcgtacctctcaaacacaatactttcatgcaattaagaagc

SEQ ID NO: 9040 - DNA, 600 bp, Chicken  19866894204263_3
attcatgcataagataaaactgatgcagtcaatgatttatagttgtttgctgtctacaaaaaatgaccttgttaagataattaattaaatgaaactgttatmttttcagtttgatgaaagtatcaaagatgactctaaaaatttataaacattttattgaaacagatggtctacttctgtaaataaggctttgaagaataaagttggacagaaaagtatattagatttttccattgatgttattatttatcaaagctttgaaaaaaaggatttgaatgattacttccaggatgtgggggrctacgatcataggaaatrttgtttgattttcactggcttttatcttattttttgtgtgttttcgtacctctcaaacacaatactttcatgcaattaagaagcatcagaaactgaagcaattatgttaatgggagtaaaaattaaaaataaaaacaactgctaaatatataawgaacatcttatgttacccatgagaatatgcataaaaatctttacagaaagattttaagttcttctttcatctattatatatcagagaaattataaaacataacacacgttgcctttataatctttata

SEQ ID NO: 9041 - DNA, 600 bp, Chicken  19866894204263_4
actgatgcagtcaatgatttatagttgtttgctgtctacaaaaaatgaccttgttaagataattaattaaatgaaactgttatmttttcagtttgatgaaagtatcaaagatgactctaaaaatttataaacattttattgaaacagatggtctacttctgtaaataaggctttgaagaataaagttggacagaaaagtatattagatttttccattgatgttattatttatcaaagctttgaaaaaaaggatttgaatgattacttccaggatgtgggggrctacgatcataggaaatrttgtttgattttcactggcttttatcttattttttgtgtgttttcgtacctctcaaacacaatactttcatgcaattaagaagcatcagaaactgaagcaattatgttaatgggagtaaaaattaaaaataaaaacaactgctaaatatataawgaacatcttatgttacccatgagaatatgcataaaaatctttacagaaagattttaagttcttctttcatctattatatatcagagaaattataaaacataacacacgttgcctttataatctttataatattttccttatacaca

SEQ ID NO: 9042 - DNA, 600 bp, Chicken  19866894204263_5
acttctgtaaataaggctttgaagaataaagttggacagaaaagtatattagatttttccattgatgttattatttatcaaagctttgaaaaaaaggatttgaatgattacttccaggatgtgggggrctacgatcataggaaatrttgtttgattttcactggcttttatcttattttttgtgtgttttcgtacctctcaaacacaatactttcatgcaattaagaagcatcagaaactgaagcaattatgttaatgggagtaaaaattaaaaataaaaacaactgctaaatatataawgaacatcttatgttacccatgagaatatgcataaaaatctttacagaaagattttaagttcttctttcatctattatatatcagagaaattataaaacataacacacgttgcctttataatctttataatattttccttatacacacccatgcatttcctattactgttcatggaaactggctagattttgcatcttgagcacatactttttatctgcttttctcctagaggttgttgaaagagacttgtttacttctttgtcatttactgagggtcataaacttgtgtgttaacttcta

SEQ ID NO: 9043 - DNA, 600 bp, Chicken  19866894204268_1
tttccttttgatcagcgtgcctacaaatgagttcagatcagttgagaggctttaacagcaaagctcctgaaatctctattgaatgctgctgctgcatgtttgcacgtatctgataaaaaattaccatgaattatttctgataagtgtttattaaaagctggagcacagtaaactgtgaagcgtactggcttaaagaatttaagcagaagatggcttcttgtcacggtgatatatactcaagcagtacacagtgatatactcaagactactcaattccagatcaacagacctattatcagwgagcttcagaatcagagagcggccagttgtgtcacataatctctgtgctcctgtctgctgcctggcctaaasgcagcattcagggtgagcttgcctatgccattggctggttctccaactatcaagtgttcagccactatttttcccattaaacctcatttctcttgtactctgaacaatgccacctatttttatgaagaccttgaaaggagcttcatcagataaagcactgtgaaagtacagctagttgattcttgtctcctgtgaaggcttgcaaaagtggcaattttaaggctgcag

SEQ ID NO: 9044 - DNA, 600 bp, Chicken  19866894204268_2
tctctattgaatgctgctgctgcatgtttgcacgtatctgataaaaaattaccatgaattatttctgataagtgtttattaaaagctggagcacagtaaactgtgaagcgtactggcttaaagaatttaagcagaagatggcttcttgtcacggtgatatatactcaagcagtacacagtgatatactcaagactactcaattccagatcaacagacctattatcagwgagcttcagaatcagagagcggccagttgtgtcacataatctctgtgctcctgtctgctgcctggcctaaasgcagcattcagggtgagcttgcctatgccattggctggttctccaactatcaagtgttcagccactatttttcccattaaacctcatttctcttgtactctgaacaatgccacctatttttatgaagaccttgaaaggagcttcatcagataaagcactgtgaaagtacagctagttgattcttgtctcctgtgaaggcttgcaaaagtggcaattttaaggctgcagtaacagcatcactttcgcctggcaataaaaccagactgctcttaagaggtcctcctgcacagctccaagggc

SEQ ID NO: 9045 - DNA, 599 bp, Chicken  19866894204274_1
  misc_feature (1)..(1): n is any nucleotide
naaaagaaaggaggaagatgcacactgggctccagttctccctgtgagtgtctagttcaggaaacagaagcaattctgcctttaagtgtcgagaactaaaatgagcatcactcagagtttaggtttcaacaagaacccatggaatttggctaggaaggaagaattgatgttgcctctctccggtctgctcccgttcatcctgaaggtacaccaaaacaaaggtgactgcctgtgtcccaagggaagcccacaggagctccacaactccacaggcagcggtcgtacaattccaatgggaayaasaggaaggatcagcaagtctgactgtacaaacagcatcgcaygcatgcactcagaccagacaggtgacaccagaatgtgaaagaaatggagccaatgagaactacagaggtaaaagacagtatgtgcatggctggaagtgagtggcttcagtatttgtgcttcgagcgttagtacaacaaaccctgtaacttctggctggcagagcatcgctgtacagcaaggagggctgaggaagacaagcacaacactttttggcatagaaaatgaaacaacaaaaaaggatgcctatagcagaa

SEQ ID NO: 9046 - DNA, 600 bp, Chicken  19866894204274_2
aagaaaggaggaagatgcacactgggctccagttctccctgtgagtgtctagttcaggaaacagaagcaattctgcctttaagtgtcgagaactaaaatgagcatcactcagagtttaggtttcaacaagaacccatggaatttggctaggaaggaagaattgatgttgcctctctccggtctgctcccgttcatcctgaaggtacaccaaaacaaaggtgactgcctgtgtcccaagggaagcccacaggagctccacaactccacaggcagcggtcgtacaattccaatgggaayaasaggaaggatcagcaagtctgactgtacaaacagcatcgcaygcatgcactcagaccagacaggtgacaccagaatgtgaaagaaatggagccaatgagaactacagaggtaaaagacagtatgtgcatggctggaagtgagtggcttcagtatttgtgcttcgagcgttagtacaacaaaccctgtaacttctggctggcagagcatcgctgtacagcaaggagggctgaggaagacaagcacaacactttttggcatagaaaatgaaacaacaaaaaaggatgcctatagcagaattca

SEQ ID NO: 9047 - DNA, 600 bp, Chicken  19866894204274_3
tgagtgtctagttcaggaaacagaagcaattctgcctttaagtgtcgagaactaaaatgagcatcactcagagtttaggtttcaacaagaacccatggaatttggctaggaaggaagaattgatgttgcctctctccggtctgctcccgttcatcctgaaggtacaccaaaacaaaggtgactgcctgtgtcccaagggaagcccacaggagctccacaactccacaggcagcggtcgtacaattccaatgggaayaasaggaaggatcagcaagtctgactgtacaaacagcatcgcaygcatgcactcagaccagacaggtgacaccagaatgtgaaagaaatggagccaatgagaactacagaggtaaaagacagtatgtgcatggctggaagtgagtggcttcagtatttgtgcttcgagcgttagtacaacaaaccctgtaacttctggctggcagagcatcgctgtacagcaaggagggctgaggaagacaagcacaacactttttggcatagaaaatgaaacaacaaaaaaggatgcctatagcagaattcacaaccttggtaaaaggttaggattattaccctacaacagaa

SEQ ID NO: 9048 - DNA, 599 bp, Chicken  19866894204276_1
  misc_feature (1)..(14): n is any nucleotide
nnnnnnnnnnnnnncaccttctgaatttagagccaaaagatctagtcttgcaaatggaaaacttttagtgaatatgatccagcttcaaccacgagagccagagtcctcacagatgccatttggcttcttgccacagggagcaacgatgctgtgcctgttcaagctctgtcagaaggctcaggcttcatttgcccagcacaaggttgacataccttcttctggtagcccaaactacagttagtgctagcactgacctggcaggagtaaagcccaaagggaaggagaaattctcagcctctsgggggtaatctgatttcttccaggaagaatgatacaatgggtgataagggaagrtgataacaaacagaaaccagagcaagaaagcctctggcatccctgtgacatgaagttgccccagcatgtcagatttttgaagtatgttctatattcttcagtatttttgtttctgttgattatcatagtgattttgagacgtgtatttgattaggtacagggaacaaaggtactgcttttttatttagaaacactgtttgtcaagacagcaaaatgttaattgtgcgtagttgagaaggtaagtg

SEQ ID NO: 9049 - DNA, 600 bp, Chicken  19866894204276_2
tggaaaacttttagtgaatatgatccagcttcaaccacgagagccagagtcctcacagatgccatttggcttcttgccacagggagcaacgatgctgtgcctgttcaagctctgtcagaaggctcaggcttcatttgcccagcacaaggttgacataccttcttctggtagcccaaactacagttagtgctagcactgacctggcaggagtaaagcccaaagggaaggagaaattctcagcctctsgggggtaatctgatttcttccaggaagaatgatacaatgggtgataagggaagrtgataacaaacagaaaccagagcaagaaagcctctggcatccctgtgacatgaagttgccccagcatgtcagatttttgaagtatgttctatattcttcagtatttttgtttctgttgattatcatagtgattttgagacgtgtatttgattaggtacagggaacaaaggtactgcttttttatttagaaacactgtttgtcaagacagcaaaatgttaattgtgcgtagttgagaaggtaagtgttcagcccttcccatacatatctgtcaatgcagctaagtctttgcctgccactcc

SEQ ID NO: 9050 - DNA, 600 bp, Chicken  19866894204276_3
tacagggaacaaaggtactgcttttttatttagaaacactgtttgtcaagacagcaaaatgttaattgtgcgtagttgagaaggtaagtgttcagcccttcccatacatatctgtcaatgcagctaagtctttgcctgccactcctgcactccctgacttggcagataaatagctgttactgtgatgtggaaaaccttattttcctgatttgtcaagtaattctatagaagttggcaggataagttagcctgggaaaagatatgcaaagtagcactggaagagttttggagaaagaatcrtgtgtatgcattgtctatatatatatatttttcctgaaaataggcttttaactgggcacttccattgctgtttgaaaaaacagatcaccctcttaagaaggctgtttaattccacgggagatcctttgaggatctgggctaatatgaatgttaagtgccaaactttggcatagaataattgcccaattctttgctcttttaagagctcatatcagctgctctgatccttttttcttaagttttagccatcatctgtagttacttgaagtcagggttgataaacttcagaaacttgaattt

SEQ ID NO: 9051 - DNA, 462 bp, Chicken  19866894204278_1
ttcttaagccagtggtcctgaaaaacaacgtctgacaaatctcagctaaaagcaggatgaagaacctttcaagtatacagagagaaaataagcaacagacaaccaacacctatcgtgacactactgagatacagaacgggcaaaaaaagcttcagcaggttggtcctacattattttatcatgcacacaaggtgctaagtacatcttctgaatacttgtgcagtacacctaacacttaacatttagggcaacaagcagtgcagtcataccctgtacttgaatcagtcatcaaggaatagyatacaaagcaaaccaaataaagaatactgcattaatcccaaayacagagcattaaaacaagtcattcgtcatgacactgactggaggcagcagtggtaatattttaaagttaaaaaagaagtctcatcgtttattttcttagtgcagcttccaggcgaaagc

SEQ ID NO: 9052 - DNA, 419 bp, Chicken  19866894204278_2
agctaaaagcaggatgaagaacctttcaagtatacagagagaaaataagcaacagacaaccaacacctatcgtgacactactgagatacagaacgggcaaaaaaagcttcagcaggttggtcctacattattttatcatgcacacaaggtgctaagtacatcttctgaatacttgtgcagtacacctaacacttaacatttagggcaacaagcagtgcagtcataccctgtacttgaatcagtcatcaaggaatagyatacaaagcaaaccaaataaagaatactgcattaatcccaaayacagagcattaaaacaagtcattcgtcatgacactgactggaggcagcagtggtaatattttaaagttaaaaaagaagtctcatcgtttattttcttagtgcagcttccaggcgaaagc

SEQ ID NO: 9053 - DNA, 599 bp, Chicken  19866894204279_1
  misc_feature (1)..(108): n is any nucleotide
nnnnnnnnnnnnnnnnnnnnnnnnnnnnnnnnnnnnnnnnnnnnnnnnnnnnnnnnnnnnnnnnnnnnnnnnnnnnnnnnnnnnnnnnnnnnnnnnnnnnnnnnnnnntggtcccttgccacccccccttgccatgcctgcctttcccttcctttgatttcttgtccccacctcctgccccagcagagcttgcactttcttctccttccagcctctgaggctttttctctgcctgctttgcctttttcttctcttaggtgcatctgtgccctttcatctaattactttctcctgtcttgktgccccattcctgctgtgctcctggggaagctctggctggagtatgttcagagagtgcagaatctttgcagaatttagctttcagattttgactgtaaatgtgtggacttctatgagtagtttctcttgacttgggaattttcctacaggaacagctaaaagcacgttctgaccagacaggtctaaatgttaagcacaggtctgtgtgaggcagtaggcagggctgagcatttcactgtttttagccttgaaactgttttttgagggggtggaggggggaggtcatattttcctcaaga

SEQ ID NO: 9054 - DNA, 600 bp, Chicken  19866894204282_1
caagagcagtatgacaactagcagcccccagcaggcaccacgctgttttgaatgtgatctgcactattcttggctggatcaataattattatcaattcattcaagtgatttccatcaattgggcagctctctgtactaattttggaaggatttctgtgcttcaggtgaaaattttcccttattttccaactttgctattcccattccctagtttccgtactaatggatacttaatatgatttcccatcaagctgctgctcaccatcatggagtgtcatcaggattattcccactgatgtrgaaacagaggtayggggtgggtaacactgcctgcaggctgctctgacagccaccaggacaacagggaagaacaccaatcccaagcttctcttctgtgctcttcacacaagagttgcagaggaggctggaactacccactctaacttaacacccatctacagtgaaaaaaagtaygttttaaagtttttttttcmaataaaatttgtaatgtgaaaccgcttgatacaatgggttcacttctccttgaacttcctcctgccaattatcttttatttttagatcttttatttttagactgct

SEQ ID NO: 9055 - DNA, 600 bp, Chicken  19866894204282_2
acaactagcagcccccagcaggcaccacgctgttttgaatgtgatctgcactattcttggctggatcaataattattatcaattcattcaagtgatttccatcaattgggcagctctctgtactaattttggaaggatttctgtgcttcaggtgaaaattttcccttattttccaactttgctattcccattccctagtttccgtactaatggatacttaatatgatttcccatcaagctgctgctcaccatcatggagtgtcatcaggattattcccactgatgtrgaaacagaggtayggggtgggtaacactgcctgcaggctgctctgacagccaccaggacaacagggaagaacaccaatcccaagcttctcttctgtgctcttcacacaagagttgcagaggaggctggaactacccactctaacttaacacccatctacagtgaaaaaaagtaygttttaaagtttttttttcmaataaaatttgtaatgtgaaaccgcttgatacaatgggttcacttctccttgaacttcctcctgccaattatcttttatttttagatcttttatttttagactgctgcgtgttatcact

SEQ ID NO: 9056 - DNA, 600 bp, Chicken  19866894204282_3
tcccttattttccaactttgctattcccattccctagtttccgtactaatggatacttaatatgatttcccatcaagctgctgctcaccatcatggagtgtcatcaggattattcccactgatgtrgaaacagaggtayggggtgggtaacactgcctgcaggctgctctgacagccaccaggacaacagggaagaacaccaatcccaagcttctcttctgtgctcttcacacaagagttgcagaggaggctggaactacccactctaacttaacacccatctacagtgaaaaaaagtaygttttaaagtttttttttcmaataaaatttgtaatgtgaaaccgcttgatacaatgggttcacttctccttgaacttcctcctgccaattatcttttatttttagatcttttatttttagactgctgcgtgttatcactgggcagctcaaccaacaattaattggaattgttttgcttctcacgcggttttatttctttgctttaggcagcacttgaactaaactgtcctcggaggagatgacagcatggacagcacgctaaggacaagcacaagctggcacaatggggcactctcactg

SEQ ID NO: 9057 - DNA, 600 bp, Chicken  19866894204282_4
ctattcccattccctagtttccgtactaatggatacttaatatgatttcccatcaagctgctgctcaccatcatggagtgtcatcaggattattcccactgatgtrgaaacagaggtayggggtgggtaacactgcctgcaggctgctctgacagccaccaggacaacagggaagaacaccaatcccaagcttctcttctgtgctcttcacacaagagttgcagaggaggctggaactacccactctaacttaacacccatctacagtgaaaaaaagtaygttttaaagtttttttttcmaataaaatttgtaatgtgaaaccgcttgatacaatgggttcacttctccttgaacttcctcctgccaattatcttttatttttagatcttttatttttagactgctgcgtgttatcactgggcagctcaaccaacaattaattggaattgttttgcttctcacgcggttttatttctttgctttaggcagcacttgaactaaactgtcctcggaggagatgacagcatggacagcacgctaaggacaagcacaagctggcacaatggggcactctcactgcagttctcccctcccacacc

SEQ ID NO: 9058 - DNA, 600 bp, Chicken  19866894204285_1
cattatagcctgcaatgtattcaggctctatagcaaaataacactttcgaaagttgctggtacaaatgttgcaccccccacgaggagcacgttgtgcagtgcagggttatttgtattctttgagaagccagcatacgaacactcgtgtatgtttgtacacacgcagtgctatgcctcatttcaggacacgtaccttactgcttggttcacctcatccaaacactgcacaggctgcttgtacacttgaaggcattcaggggtgtgctttgtattaccaagcaggtgcacaggtaggcagargaagaccttgtccaggcacacgtgataatacccatggaatgactgaaggcgcacacayggcttccactaacttcaaaggctgagcagcacagttccagaaggtctttttgtcccagtgtgtttagacatatacctggggatgctccaagcagacagcctggcccaagaaagcaagccagccggtacagagtgcacaaaaccttttcagaatggctccacggctccaccagatcttgtctgcaaaccagcggaagctcctcaattccctgtttctgatatggatcccccacgcagaaggca

SEQ ID NO: 9059 - DNA, 600 bp, Chicken  19866894204285_2
ggtacaaatgttgcaccccccacgaggagcacgttgtgcagtgcagggttatttgtattctttgagaagccagcatacgaacactcgtgtatgtttgtacacacgcagtgctatgcctcatttcaggacacgtaccttactgcttggttcacctcatccaaacactgcacaggctgcttgtacacttgaaggcattcaggggtgtgctttgtattaccaagcaggtgcacaggtaggcagargaagaccttgtccaggcacacgtgataatacccatggaatgactgaaggcgcacacayggcttccactaacttcaaaggctgagcagcacagttccagaaggtctttttgtcccagtgtgtttagacatatacctggggatgctccaagcagacagcctggcccaagaaagcaagccagccggtacagagtgcacaaaaccttttcagaatggctccacggctccaccagatcttgtctgcaaaccagcggaagctcctcaattccctgtttctgatatggatcccccacgcagaaggcacattttccattttactatgaaacctgagcacttcagttgcttcacctggaattcctac

SEQ ID NO: 9060 - DNA, 600 bp, Chicken  19866894204289_1
caagctcggtgcaatgacagaacagactttgatagcattgggaagggcttgctccatcccctctgggtgctccactgctaccaccgtctctcccagaggtgtactgttcactagagcagggctagaaatgtctctaagctaagtcgtcagaaatgaccacatttagattttttagaatctcccaatcacagattgtgcaaatctcattagtgagcagtaccaatgaaagctgcttttgttttcctggccagactgacctagcttgccatcagcttagagctgttaggctaatcctaaaaygtgacactatccatctatttgatgacttctagctctctaactatggggggaggttctactgttcatgggtatctggttatgctttgctgtaacacttactgttctgctccagttccttacagctatatagagcacagagagtggagtttgtcatgcagaccagtcagttctgtacctgcctttcctcttgacttctttgcactgtactttatgcactttatagtgtttgttgtaatttgatgttcttaacctggaattgtagggaatgtttcttttaccagcagaactggaattctgatc

SEQ ID NO: 9061 - DNA, 600 bp, Chicken  19866894204294_1
gaggagatattttcgagccatttgagctcagattttgcatacacttaagcatgcgcttaatttatgcacacgagtagttccactggaattaatactgcggaaaatcgagcacatgtgtaagatccagtgggctttttgagctgatgagctgcagctgtactcccaaaaacgcccatgaagcggcgcagtgagatcccacggtttgaaatccttcacacgttgaaagaagcgtgtaagtcctggaagctcattgcaggatctgaagtcagcttaggctgtgcagtcagacttctcctaacrccaaacgttcagctgtccgagggagggctccgtcccaccctgactkagcagacaggctgcaaactgcacgaagggcggctcagccctgagctgtgggctctgcggggcttccaggcaggagagcaggtcgtgctgccgtcctcgtgggtggagagggcgtcttcagaaggaagaactcaccatcctcatccacttcgttctctgaccgccacagcgcctcgatgttcctgttgaacttagtgcttaacgtagtgtgtatctatagcgtggtaaccgtcagtactctatggccatcatcgt

SEQ ID NO: 9062 - DNA, 600 bp, Chicken  19866894204294_2
aagcatgcgcttaatttatgcacacgagtagttccactggaattaatactgcggaaaatcgagcacatgtgtaagatccagtgggctttttgagctgatgagctgcagctgtactcccaaaaacgcccatgaagcggcgcagtgagatcccacggtttgaaatccttcacacgttgaaagaagcgtgtaagtcctggaagctcattgcaggatctgaagtcagcttaggctgtgcagtcagacttctcctaacrccaaacgttcagctgtccgagggagggctccgtcccaccctgactkagcagacaggctgcaaactgcacgaagggcggctcagccctgagctgtgggctctgcggggcttccaggcaggagagcaggtcgtgctgccgtcctcgtgggtggagagggcgtcttcagaaggaagaactcaccatcctcatccacttcgttctctgaccgccacagcgcctcgatgttcctgttgaacttagtgcttaacgtagtgtgtatctatagcgtggtaaccgtcagtactctatggccatcatcgtgtgtgttacactcatagaagcacgttgaatgcagcagcagagcctg

SEQ ID NO: 9063 - DNA, 600 bp, Chicken  19866894204298_1
gttagagcaggcacacacactcacctgctgcctatgagcaatcctacctgcttcccgaagggctttcctccctgcaaaagtgactcatattatccagtgctaaatatatttttatctgtattaaggtgctacgagtctgccatataaatttgcatggtcaaaagttctagcaacctctatgactcagttctgttcaccagattcgggctaactaccaactttcccaagaacatttctcatgtttcggttatttttctcctttttgcagttattggtaaagttactgagcagtactagtckaggcaggtgatcctatgggaatccaccagaagtgtggggctgaccctgttgggagtgcacagctcccatactgcggagggaggatggaggtgtctgagagtcagaatatttataatgatcttaggaagtaagaattagtgatgggccaggattgcctcagccctaaatgtgttcgagtccaggttggatggggctttgagcaacctgagtggattgtgtccccatccatggcagggtagttggttatgttattggttatgggatctttagaggtccctttcaatctgcttctgcctgggg

SEQ ID NO: 9064 - DNA, 600 bp, Chicken  19866894204298_2
cagcttggtgctcaccactgaaggacatagctggggatctgggccgaaggctgtttcagtgtcacacaagtgagtcagcctcctgtgtcagagcgtgtttcttaatttagatgtacccttttacgcttcctctaaatgctcatccctctgcccaccctctccccatccccactattgaggcatttggtttattgctggttctctgatgccctcctgtgacttactgaaggtggctgacagcactggtgtgtcactggcaggtaaggaggagctgggtctcgatgggaaacatttccacartgtgggcaggcaaataataaaaattgctttagaaacatcattgctggtgctgatccccagagcttggctcacgagtggtccttgtatcacagaggggttgcctgaacgattttggaatcaaggactctgaacatgtcacagcctaattaatgcgcatacagtacaattaatacgcgacaaccgtgcacacttcattagtaaattcggtgctttcaagcattgggtctttgcgctgaaggtccctcctgccaaccacggagtcagtaggtgatgactttattttcaaatggaaatcgtagt

SEQ ID NO: 9065 - DNA, 600 bp, Chicken  19866894204302_1
ctggtgttaggttttactaaactgagagaagaatcacaatgccttgccctactctccttaagcctgtcaacatggcagagtacaaccaaaggcagattcaaatttccaaccttttcttttaaattctctttctactttgtgaaattggatacaagatatttgcatgcaataaataatactcttcttctttgtttcatacagtttgctttgtctcaacatccatctcaccagaataaaaacaaatgctgtttgggattaatttcacagtaaatggcattattgttcagcacatattttcartagtcatgggatgttatctgttggggttttactgatctctacacagtctggctaagctctaagttgctgtctgatatttctcaaaagagattcattgcctcgaagcttccagccccttctcacagtattactttgcaattcattcatcagactttgatctagaagtttatttactccaagatacactctttgccattacctgtcccaaatttattgtaataaaatgttatgcaatctgttggaaactgactagattacactgacttttatcatattgtatgcccagagttctgcttagaa

SEQ ID NO: 9066 - DNA, 600 bp, Chicken  19866894204306_1
cagtgggacagagatcagttatataatataagttccagcttctgtaaaactaggctactaatatggctaagactactactaagtagactgctactgctactaagactgctaacactccccaccaaactctgtgggaaccccagccacctcaccttcatggtcctggtggaggaaatcagcagctgaagctgcctgacatctctctagcaaaccgctgctcaaggcagctctgctgtgcttctgcccagatccacttcactttgcctctcctgtgatgcctgtgaaagcaacagcttctgygttatcccagccctttgcagcacctggcacatacaaatccaccctctccttggggttctcactacaacccacaaaactactgctaccattaaaaggccattatctgatgacataaaattacgtattacaacagaggctgaatccacacactctgaaattgctgacagagccttgcaagggcgagagtcctttctaaagctgtgatggggctctcccacataaagttcacactttctgaggaactgatcatttgactgtcaaacaaaagccatacagctaaattccatacacaaatgactc

SEQ ID NO: 9067 - DNA, 600 bp, Chicken  19866894204310_1
cttcttgcttatgaaaggtcagtttaaacacatcgagaacgtaggactaacacagaggtgtaaaagtcaaggtacatttgaacttctgtctttcagcatggtctgaaccccatcatgagtgctgacagaaatatttaatctttgatttttcctctttcatctttatgatcacctccctaagattaagagggcccaaatgccattagtctgcaggagtttagaggtgaacagctccaggcctgctttcatcttgctgacagctagaagggaagaatacaaaaattacgccccactgctacrattatcccaagcacggtaaaacaagggcaaaaggatgaaggcmctgttgtccagtacctcccacaccagctgccctgaccaatcattacaccgccacaccactgaccactgcggccaaccattgcttgttgcaacaacaagttatattgcactttgttttctttctttttctggtgtttcaaattcaaagtacaaggaaacacaaacactggaaatgctctcctcttactgatggatcagtgagctctactctgtttcttggaaatattactcatctgtatgygttcaactatgacattt

SEQ ID NO: 9068 - DNA, 600 bp, Chicken  19866894204310_2
ggactaacacagaggtgtaaaagtcaaggtacatttgaacttctgtctttcagcatggtctgaaccccatcatgagtgctgacagaaatatttaatctttgatttttcctctttcatctttatgatcacctccctaagattaagagggcccaaatgccattagtctgcaggagtttagaggtgaacagctccaggcctgctttcatcttgctgacagctagaagggaagaatacaaaaattacgccccactgctacrattatcccaagcacggtaaaacaagggcaaaaggatgaaggcmctgttgtccagtacctcccacaccagctgccctgaccaatcattacaccgccacaccactgaccactgcggccaaccattgcttgttgcaacaacaagttatattgcactttgttttctttctttttctggtgtttcaaattcaaagtacaaggaaacacaaacactggaaatgctctcctcttactgatggatcagtgagctctactctgtttcttggaaatattactcatctgtatgygttcaactatgacatttaacctggcatttttatttttatttttattttttgccttcaaaa

SEQ ID NO: 9069 - DNA, 600 bp, Chicken  19866894204310_3
tacgccccactgctacrattatcccaagcacggtaaaacaagggcaaaaggatgaaggcmctgttgtccagtacctcccacaccagctgccctgaccaatcattacaccgccacaccactgaccactgcggccaaccattgcttgttgcaacaacaagttatattgcactttgttttctttctttttctggtgtttcaaattcaaagtacaaggaaacacaaacactggaaatgctctcctcttactgatggatcagtgagctctactctgtttcttggaaatattactcatctgtatgygttcaactatgacatttaacctggcatttttatttttatttttattttttgccttcaaaacttttaaaatcagtatcctggaggcacaattgtgttcaagtacaacagtaatcactacatcattcaagagttccttttgcaacttactaaagcactttctatttttctgttctaagttatcactttattagtcattgtgacagtgcctacattcacgcctggagacctatgatgctgcacattgtttgcaagcaacagcaacaacaaagaaacctcaaagagtttggattaagattagaa

SEQ ID NO: 9070 - DNA, 592 bp, Chicken  19866894204312_1
aagagcatgtatctgttcctagaaaggacaggtgagggaaagcccacagtctccttgaagacctttttttgcatcgggaagcagtcctcatctgatactcatcagaacattccagtgcatctcacttttttttttcccaaatatccagttttttctttcacagcattcagaacaattatttagggaaagcttttcacatataatcccatgcaggaaagcgtgagaggaaatagaaaatcttttggaaagaaagcatagcccagatgctatggacccttctctgtactgtttccatccacrtgagattttgcccctgcttagctgtcaatyatyaaaaagaggaaacaattacatctttatgatagtactgtagtggagggtgacactatcattgagtcaagctgtaaattaggaggcaagatatgcctctgttcctatagcagctcagtggtgctgtatgaggaggggagcggtgcacacacaaaatgtatcctccattccactgggatggctgtgctattaaccctttttcactctggcttagatgtatccctctcatgatgccagagtcataaagaggcatgtagaaagt

SEQ ID NO: 9071 - DNA, 562 bp, Chicken  19866894204312_2
ggtgagggaaagcccacagtctccttgaagacctttttttgcatcgggaagcagtcctcatctgatactcatcagaacattccagtgcatctcacttttttttttcccaaatatccagttttttctttcacagcattcagaacaattatttagggaaagcttttcacatataatcccatgcaggaaagcgtgagaggaaatagaaaatcttttggaaagaaagcatagcccagatgctatggacccttctctgtactgtttccatccacrtgagattttgcccctgcttagctgtcaatyatyaaaaagaggaaacaattacatctttatgatagtactgtagtggagggtgacactatcattgagtcaagctgtaaattaggaggcaagatatgcctctgttcctatagcagctcagtggtgctgtatgaggaggggagcggtgcacacacaaaatgtatcctccattccactgggatggctgtgctattaaccctttttcactctggcttagatgtatccctctcatgatgccagagtcataaagaggcatgtagaaagt

SEQ ID NO: 9072 - DNA, 559 bp, Chicken  19866894204312_3
gagggaaagcccacagtctccttgaagacctttttttgcatcgggaagcagtcctcatctgatactcatcagaacattccagtgcatctcacttttttttttcccaaatatccagttttttctttcacagcattcagaacaattatttagggaaagcttttcacatataatcccatgcaggaaagcgtgagaggaaatagaaaatcttttggaaagaaagcatagcccagatgctatggacccttctctgtactgtttccatccacrtgagattttgcccctgcttagctgtcaatyatyaaaaagaggaaacaattacatctttatgatagtactgtagtggagggtgacactatcattgagtcaagctgtaaattaggaggcaagatatgcctctgttcctatagcagctcagtggtgctgtatgaggaggggagcggtgcacacacaaaatgtatcctccattccactgggatggctgtgctattaaccctttttcactctggcttagatgtatccctctcatgatgccagagtcataaagaggcatgtagaaagt

SEQ ID NO: 9073 - DNA, 600 bp, Chicken  19866894204315_1
gaaataaggagtgtctgaagcacctggtgagctctgatggacgtgtccagtattgctcagtccagtttttactgcagggaatgaaggcagaacttcccggaggggtttggttaatccagccagcacagtaagaacaagaacaagatacatattacctggagaaaaagaacagagaagcacacgggtctgaaaaaaacaaaacagcagtgctttgcagaattcaccctttccaccaaacattcaacatcattaattttaggaccaccctctgcattgtgctcgcactttccaatgtagatytgagggagagcagtgcaacagctttgcagactcacacaaatcaaacaaacaaaaaaattcggagtatctgtggtaacattttttcctcctctcggtttcctatagaaaccagaaggtctgagaaaaggaaagttccactggaataaagagaaaacttacaacaaaaaaaaaaggaagatctgatgaaatccagcagaactttagtctgccaaaaaggaaaagctttggccagctttattgggaatctggagagcaagaagctggctgaagtgcttgcatggtaagtatttttttccacta

SEQ ID NO: 9074 - DNA, 600 bp, Chicken  19866894204318_1
ttacataggactcaggttgtatttctagactgctctccaaccgcaatcacttcttcagagatttaatctcttcgtttttatgatgtgtccttgatacataagaaggtatttgaaaggaaaaccctgtactttgtatttactgctctaaagcaggcctcagtactgttcacttcttcctttttccttaaagtagccggtgatggatactgaaaaacagctgcttcacctcctcctccccaaagagtctacagtcttcttcagaatcctgtccattttgaagagcaccatcttcatagtagraatktgttggcagttttctgggcatcatctacagtgattgctggatttgtttccagttgcatgaagttaatgttttgcctgaagcttaaaggaactcccttcttcacaactcccatraacttcytctcctcactctctcttacttttctttcattatttttctccacaattcactgctggttttattcttcatcaaatcttgatttattttgcagctttgttcctyactgtgagattttccacccttcttgctgttttaggccagcgatctggctcattaaatacttccattagatttaa

SEQ ID NO: 9075 - DNA, 600 bp, Chicken  19866894204318_2
ataggactcaggttgtatttctagactgctctccaaccgcaatcacttcttcagagatttaatctcttcgtttttatgatgtgtccttgatacataagaaggtatttgaaaggaaaaccctgtactttgtatttactgctctaaagcaggcctcagtactgttcacttcttcctttttccttaaagtagccggtgatggatactgaaaaacagctgcttcacctcctcctccccaaagagtctacagtcttcttcagaatcctgtccattttgaagagcaccatcttcatagtagraatktgttggcagttttctgggcatcatctacagtgattgctggatttgtttccagttgcatgaagttaatgttttgcctgaagcttaaaggaactcccttcttcacaactcccatraacttcytctcctcactctctcttacttttctttcattatttttctccacaattcactgctggttttattcttcatcaaatcttgatttattttgcagctttgttcctyactgtgagattttccacccttcttgctgttttaggccagcgatctggctcattaaatacttccattagatttaaccat

SEQ ID NO: 9076 - DNA, 600 bp, Chicken  19866894204318_3
aaaaccctgtactttgtatttactgctctaaagcaggcctcagtactgttcacttcttcctttttccttaaagtagccggtgatggatactgaaaaacagctgcttcacctcctcctccccaaagagtctacagtcttcttcagaatcctgtccattttgaagagcaccatcttcatagtagraatktgttggcagttttctgggcatcatctacagtgattgctggatttgtttccagttgcatgaagttaatgttttgcctgaagcttaaaggaactcccttcttcacaactcccatraacttcytctcctcactctctcttacttttctttcattatttttctccacaattcactgctggttttattcttcatcaaatcttgatttattttgcagctttgttcctyactgtgagattttccacccttcttgctgttttaggccagcgatctggctcattaaatacttccattagatttaaccatataaatccttgcttctgtggaagatgttggagatctgcctttttgatatgtgaatggtgctaactcgtcaaagtctctttcagtaatggggcttacttttgttattttctgtt

SEQ ID NO: 9077 - DNA, 600 bp, Chicken  19866894204318_4
tgtactttgtatttactgctctaaagcaggcctcagtactgttcacttcttcctttttccttaaagtagccggtgatggatactgaaaaacagctgcttcacctcctcctccccaaagagtctacagtcttcttcagaatcctgtccattttgaagagcaccatcttcatagtagraatktgttggcagttttctgggcatcatctacagtgattgctggatttgtttccagttgcatgaagttaatgttttgcctgaagcttaaaggaactcccttcttcacaactcccatraacttcytctcctcactctctcttacttttctttcattatttttctccacaattcactgctggttttattcttcatcaaatcttgatttattttgcagctttgttcctyactgtgagattttccacccttcttgctgttttaggccagcgatctggctcattaaatacttccattagatttaaccatataaatccttgcttctgtggaagatgttggagatctgcctttttgatatgtgaatggtgctaactcgtcaaagtctctttcagtaatggggcttacttttgttattttctgttttctttc

SEQ ID NO: 9078 - DNA, 600 bp, Chicken  19866894204318_5
ctcctcctccccaaagagtctacagtcttcttcagaatcctgtccattttgaagagcaccatcttcatagtagraatktgttggcagttttctgggcatcatctacagtgattgctggatttgtttccagttgcatgaagttaatgttttgcctgaagcttaaaggaactcccttcttcacaactcccatraacttcytctcctcactctctcttacttttctttcattatttttctccacaattcactgctggttttattcttcatcaaatcttgatttattttgcagctttgttcctyactgtgagattttccacccttcttgctgttttaggccagcgatctggctcattaaatacttccattagatttaaccatataaatccttgcttctgtggaagatgttggagatctgcctttttgatatgtgaatggtgctaactcgtcaaagtctctttcagtaatggggcttacttttgttattttctgttttctttcaccctgcagcaaccatgtctgatagcacaggcactgtgcaatgctgtgtgaagatctctgggtatgtttttggccagggggtgaaagggtaggaggacaaat

SEQ ID NO: 9079 - DNA, 599 bp, Chicken  19866894204319_1
  misc_feature (1)..(52): n is any nucleotide
nnnnnnnnnnnnnnnnnnnnnnnnnnnnnnnnnnnnnnnnnnnnnnnnnnnnccaggacaatacattgtgttggcagatgacgctctaaagagtgcagaggtttttggtttgttcttttttgtcagtcagatccttagctttgggcgttacaaaaatgcaaacgtccccctaaattttgagaagatcgccagaggtgcttgttctaggggaactcacatcagctgatggtgttgcttatgaagaacactgcagggatatgcttttatcttgtctaacaaaactttctcccagtcgatgarcagactttaacttcttctccttcagctttctctcagatgctgttgattatcttgcaaaactttctctgaacatctttaacaagcctgtaaaaagcyttcattgtcggagagtatcagcagagggaactttgaaatatgcctgttaattgtccggcatttactggggatagaggggagtttagaatggggcgtatgacttttaaggcggaatttctcgccctttgaatcaaaacttcagacgctgttctaccaactccacaggagttgtgggtttgctcgtcttatcaaagatgcgctaa

SEQ ID NO: 9080 - DNA, 600 bp, Chicken  19866894204319_2
agaggtttttggtttgttcttttttgtcagtcagatccttagctttgggcgttacaaaaatgcaaacgtccccctaaattttgagaagatcgccagaggtgcttgttctaggggaactcacatcagctgatggtgttgcttatgaagaacactgcagggatatgcttttatcttgtctaacaaaactttctcccagtcgatgarcagactttaacttcttctccttcagctttctctcagatgctgttgattatcttgcaaaactttctctgaacatctttaacaagcctgtaaaaagcyttcattgtcggagagtatcagcagagggaactttgaaatatgcctgttaattgtccggcatttactggggatagaggggagtttagaatggggcgtatgacttttaaggcggaatttctcgccctttgaatcaaaacttcagacgctgttctaccaactccacaggagttgtgggtttgctcgtcttatcaaagatgcgctaaaactcaacacacagacaggttgctttgcttgttgagcgttgctttacttttgtgtgtttaatgaaagagacggcgcaaaatgcgctrccagctgtga

SEQ ID NO: 9081 - DNA, 461 bp, Chicken  19866894204319_3
gtaaaaagcyttcattgtcggagagtatcagcagagggaactttgaaatatgcctgttaattgtccggcatttactggggatagaggggagtttagaatggggcgtatgacttttaaggcggaatttctcgccctttgaatcaaaacttcagacgctgttctaccaactccacaggagttgtgggtttgctcgtcttatcaaagatgcgctaaaactcaacacacagacaggttgctttgcttgttgagcgttgctttacttttgtgtgtttaatgaaagagacggcgcaaaatgcgctrccagctgtgagcaggtaagtgccccgacgtgaaccgagaggttgattccttcccyctgcgaggacgcagagcagcccagcatcccttcccagcatctgcctgcgctggctgctgtgcccgtctctagccttaatgaagaaaagcgagagaagaaatgtaag

SEQ ID NO: 9082 - DNA, 406 bp, Chicken  19866894204319_4
gttaattgtccggcatttactggggatagaggggagtttagaatggggcgtatgacttttaaggcggaatttctcgccctttgaatcaaaacttcagacgctgttctaccaactccacaggagttgtgggtttgctcgtcttatcaaagatgcgctaaaactcaacacacagacaggttgctttgcttgttgagcgttgctttacttttgtgtgtttaatgaaagagacggcgcaaaatgcgctrccagctgtgagcaggtaagtgccccgacgtgaaccgagaggttgattccttcccyctgcgaggacgcagagcagcccagcatcccttcccagcatctgcctgcgctggctgctgtgcccgtctctagccttaatgaagaaaagcgagagaagaaatgtaag

SEQ ID NO: 9083 - DNA, 600 bp, Chicken  19866894204323_1
tttataaaaaaatccattaaggaatgacttttgcatgtgtgagcatcaaaatataatatatgcacatttacagagaaaaatattgtaaagcaatcaaacactattcaaaaaggcttgtagacatatcctgtttcgttagttcaaatgtctatttttgttctgtccattccaaccacacagaaaataaatagcacaggtctgtatctagaaactttttcaaataagaaagtacatttctaatccatgattttccaacacaaatcaagacacagagtatagatcaatgaataagaagtctgyaaaaggagagaaagtttgggttaacattcagatttccagctatgatcagaagtgaaacttatagcaatctatctgttttacaagtctgctttgctcatcctagtgtccaattgacatacttgatttgtcagtaactaagtaacagcttgaaagacattcttcctttcttgtcaacatgaatcattcttgtaatatctccaatatgagactatcaatkcatgaatacaacacatatatccatttttactgttttcagtcatatcaacattcatttaaggtcaatgagtaatcacatacatt

SEQ ID NO: 9084 - DNA, 600 bp, Chicken  19866894204323_2
caaataagaaagtacatttctaatccatgattttccaacacaaatcaagacacagagtatagatcaatgaataagaagtctgyaaaaggagagaaagtttgggttaacattcagatttccagctatgatcagaagtgaaacttatagcaatctatctgttttacaagtctgctttgctcatcctagtgtccaattgacatacttgatttgtcagtaactaagtaacagcttgaaagacattcttcctttcttgtcaacatgaatcattcttgtaatatctccaatatgagactatcaatkcatgaatacaacacatatatccatttttactgttttcagtcatatcaacattcatttaaggtcaatgagtaatcacatacatttatcttcaaaatacatttcaacaaaaytgttttcattattttcattttacctagtttttacgatttttgatttgtctataatgtatgatttattcactattcatgacataaaracaaaatgggggaaactctcttcttatttctttctacattctcagtcactctgcgcagttttgacaaccatctgctgagattagacttcacatcttcctcctgc

SEQ ID NO: 9085 - DNA, 600 bp, Chicken  19866894204323_3
tcagatttccagctatgatcagaagtgaaacttatagcaatctatctgttttacaagtctgctttgctcatcctagtgtccaattgacatacttgatttgtcagtaactaagtaacagcttgaaagacattcttcctttcttgtcaacatgaatcattcttgtaatatctccaatatgagactatcaatkcatgaatacaacacatatatccatttttactgttttcagtcatatcaacattcatttaaggtcaatgagtaatcacatacatttatcttcaaaatacatttcaacaaaaytgttttcattattttcattttacctagtttttacgatttttgatttgtctataatgtatgatttattcactattcatgacataaaracaaaatgggggaaactctcttcttatttctttctacattctcagtcactctgcgcagttttgacaaccatctgctgagattagacttcacatcttcctcctgctcatccccatcacattcaagtattgacagaaacagtttcttctgggaaaagaaaaagttaatggataagtggaagctctattcagtttatcattaatgttctgatgtact

SEQ ID NO: 9086 - DNA, 600 bp, Chicken  19866894204323_4
acatacttgatttgtcagtaactaagtaacagcttgaaagacattcttcctttcttgtcaacatgaatcattcttgtaatatctccaatatgagactatcaatkcatgaatacaacacatatatccatttttactgttttcagtcatatcaacattcatttaaggtcaatgagtaatcacatacatttatcttcaaaatacatttcaacaaaaytgttttcattattttcattttacctagtttttacgatttttgatttgtctataatgtatgatttattcactattcatgacataaaracaaaatgggggaaactctcttcttatttctttctacattctcagtcactctgcgcagttttgacaaccatctgctgagattagacttcacatcttcctcctgctcatccccatcacattcaagtattgacagaaacagtttcttctgggaaaagaaaaagttaatggataagtggaagctctattcagtttatcattaatgttctgatgtactcttacaacctgtgttgtatttatttatctgaccatttgaaaccgtgaaaagttaaaaggtaaagctgcagcccaaacattggattt

SEQ ID NO: 9087 - DNA, 599 bp, Chicken  19866894204327_1
  misc_feature (1)..(68): n is any nucleotide
nnnnnnnnnnnnnnnnnnnnnnnnnnnnnnnnnnnnnnnnnnnnnnnnnnnnnnnnnnnnnnnnnnnnagattaatgcaaatattaccacccccaagaatctgtcatctgcatttgttgaaggcttattcacaaagcagtatagcaataatattttcagtgcagagaagagatcaagttaagtataaatctgagtgctcaccaacatgtaggccttagggccatgaaggagagcctacttaaaagactgaggtctttttcctgagaacctggagtacccttttgaatcaaagtgccttcrtttcagtatgtttatatttagatttttttcattgatgagaatggaataagtactggacagactgttgttgttacaactgagcacaaaatttacctctttataggtcccctgttccgttaatgtgttcctgccttcttcaggaaaaggtgaaatgagaatgttacaggctttcaagaggataggaacattcagtatttcttctctggacttgaactatgtgggtattgagtattaaaaaaaaaaggcaacttaagaatttattaaatgaacaaataatgtaatttttcctatgctacatg

SEQ ID NO: 9088 - DNA, 600 bp, Chicken  19866894204327_2
ttgaactatgtgggtattgagtattaaaaaaaaaaggcaacttaagaatttattaaatgaacaaataatgtaatttttcctatgctacatggtttcagaatgcatggctaaactcttaactatttgtaattgaaacaagaataccttcttgtggccctgtcaaaacataaacaacttactttcttgtggaagatgtgtgtcatcatcaatcatactcagtaaaagtcgtcacaattgataaataaaaggtagttttcctgcactcacagtctaaggcaactaacttctctttcatgcagyaactttaaaaacaagaggcagtacagggttacatttcctcatactctagctacaaataagccattagcattaagcactgcatgatttgcccccatgaattgtggtttatttagagaacatttgccaattaagcaaaatgagccttacatttgtcaacagtacactgacaatatagctagcatatccaatgaggtcatcagcccttctaggaaataataggtgtctgaggaacatcataggacaaatctatacttggcatgatcacatgcaaaggagtaagtcataaattggaagtcaggt

SEQ ID NO: 9089 - DNA, 600 bp, Chicken  19866894204329_1
ctcttaaaatgcttgggccttgtcttcagtaagttgtgctgttcctttcttttcctctatgccttactacaagatgctgctgtattccaaataactttctgaatgcgttaattagaagttgctaattctataagtacagaagcatactcttatatatggctcttaactgttcattgtttgctacttaatgggtagtaagattacttgtactttctgaagctttgtgcataaataatttgtacaccaaaataagccttttacttacaaaaattatttagaagctgatagtcttagtgaggkaggtttagtaagttatatcaaatggtaatcacagactgtcattgatttaatgttcccctgatgttttaaatttaacagctaaaacagaggtattagtggcttccacagttaatgcttaaaccatgccaggcttcaggagaaatgccaaagaaaactcgtgcaagtagtttccatatgttgctgacacattatttcctggaaggctggttgatgtgttggcaaaacaagtaaaatgtgccattttctgttaaagtttgggaagaacaatcaagtcgcagctcttaaaatagagagtctgag

SEQ ID NO: 9090 - DNA, 599 bp, Chicken  19866894204334_1
  misc_feature (1)..(124): n is any nucleotide
nnnnnnnnnnnnnnnnnnnnnnnnnnnnnnnnnnnnnnnnnnnnnnnnnnnnnnnnnnnnnnnnnnnnnnnnnnnnnnnnnnnnnnnnnnnnnnnnnnnnnnnnnnnnnnnnnnnnnnnnnnnnataaaagatgtggtgcagttgataaaccacatggcctttctttcccccagaagaaactgagtaggaagatgagttttctgatagagtgcttgggtggtttcttatgaaaacaaacaaacaaacaaaaaaaactgaggaaatgaagttggagtgaatttagactccatttgagcccyggagatgataatctgcattcctgcaacagatggaacaatgaaatcaggagtgtgaggagatcactggggaaatgaagactgtaacttgaataaagcagcagaattagagaagggcaataagaagagcctggaaaagggtccaaagggagaataacctcagtggtaggctggtacatggcaggtgtccagccatgccgccctggcagtttggggagtgctgctcatggaaatgaagacgtacagcttgttgtgtttcagaagcaatrrtgatgggatgtgcagyccaacacaaagggcca

SEQ ID NO: 9091 - DNA, 600 bp, Chicken  19866894204334_2
aagttggagtgaatttagactccatttgagcccyggagatgataatctgcattcctgcaacagatggaacaatgaaatcaggagtgtgaggagatcactggggaaatgaagactgtaacttgaataaagcagcagaattagagaagggcaataagaagagcctggaaaagggtccaaagggagaataacctcagtggtaggctggtacatggcaggtgtccagccatgccgccctggcagtttggggagtgctgctcatggaaatgaagacgtacagcttgttgtgtttcagaagcaatrrtgatgggatgtgcagyccaacacaaagggccaggagcctccaacaggtgggaagaggagagtgggacagcgggaggccccactgctctcctgcccttctcctggtggtgtctcagtgacagccctgcatgcaggcaggtggtgccttcagccaccttcatagaggaagagaagcagaacaacaagtcacatgtattccagcatgggcaaatccaaaaagctctctctggtagcttttatatacagctatattattatatacagctaataaaatcacctattctctgggttaaactagca

SEQ ID NO: 9092 - DNA, 600 bp, Chicken  19866894204334_3
agttggagtgaatttagactccatttgagcccyggagatgataatctgcattcctgcaacagatggaacaatgaaatcaggagtgtgaggagatcactggggaaatgaagactgtaacttgaataaagcagcagaattagagaagggcaataagaagagcctggaaaagggtccaaagggagaataacctcagtggtaggctggtacatggcaggtgtccagccatgccgccctggcagtttggggagtgctgctcatggaaatgaagacgtacagcttgttgtgtttcagaagcaatrrtgatgggatgtgcagyccaacacaaagggccaggagcctccaacaggtgggaagaggagagtgggacagcgggaggccccactgctctcctgcccttctcctggtggtgtctcagtgacagccctgcatgcaggcaggtggtgccttcagccaccttcatagaggaagagaagcagaacaacaagtcacatgtattccagcatgggcaaatccaaaaagctctctctggtagcttttatatacagctatattattatatacagctaataaaatcacctattctctgggttaaactagcat

SEQ ID NO: 9093 - DNA, 600 bp, Chicken  19866894204334_4
gactccatttgagcccyggagatgataatctgcattcctgcaacagatggaacaatgaaatcaggagtgtgaggagatcactggggaaatgaagactgtaacttgaataaagcagcagaattagagaagggcaataagaagagcctggaaaagggtccaaagggagaataacctcagtggtaggctggtacatggcaggtgtccagccatgccgccctggcagtttggggagtgctgctcatggaaatgaagacgtacagcttgttgtgtttcagaagcaatrrtgatgggatgtgcagyccaacacaaagggccaggagcctccaacaggtgggaagaggagagtgggacagcgggaggccccactgctctcctgcccttctcctggtggtgtctcagtgacagccctgcatgcaggcaggtggtgccttcagccaccttcatagaggaagagaagcagaacaacaagtcacatgtattccagcatgggcaaatccaaaaagctctctctggtagcttttatatacagctatattattatatacagctaataaaatcacctattctctgggttaaactagcattcagatgcaacaagtt

SEQ ID NO: 9094 - DNA, 600 bp, Chicken  19866894204334_5
aggccccactgctctcctgcccttctcctggtggtgtctcagtgacagccctgcatgcaggcaggtggtgccttcagccaccttcatagaggaagagaagcagaacaacaagtcacatgtattccagcatgggcaaatccaaaaagctctctctggtagcttttatatacagctatattattatatacagctaataaaatcacctattctctgggttaaactagcattcagatgcaacaagttcctactgcccccaaggacaaaaaaaaaaggatgggatgaaggccaggcagcaccacrgtgtgcacagcagtctcttccctgccacggccagagcagctgttcctccttttttctgctaaggaagccatggtctgacccctggcaaacagtgattttcttctaatggctcccatgcagggaggtgcctgcttgccttacagagctcatggcagatgcttctcagcaatgtctggtttggagctgaatacatagacctgaaacaaagcattacacactcaaagcactgagaaaagtagacttgaaacacatgccaaagatttttttttttcctttctttgaatattcagcaaagaatgg

SEQ ID NO: 9095 - DNA, 600 bp, Chicken  19866894204344_1
agagtgactgataccgtcatgtatttgtggcatcagagagaccttgtcatttttttgaagtatacaagggatttttgttatgtttctccatggaaagtcagttcagatgggcaggtaacttcagccttcaccttttaaataagctgtttatactgatagataatttcttttatgtttttctttatgatgctaatagaggggaaaaacagagtttaagaaattgctgcactctgtggaaagataaatggaaaaccaatcaccacttcagacctttcttgagaacagttctgctaaaataarctaattctctaactccttccatgtcttcttttaacactaccagcagctgtgccgtatgaaaatgaagtagggagctaccaaaatggagcctggggcttcccgtgactcagccacatgaaagtactgcatttctggatcgtgtattgttcctttgtctaatgcatgtagagacatgacatttcctaggaacacaatgtgccatcaaactggagcagaagcctcaggatccctggaaactggcccgtgctggatgcctcgaaggaggaatcaatatgaagtaagagaaccggccctggcaat

SEQ ID NO: 9096 - DNA, 600 bp, Chicken  19866894204347_1
tttaagcattttatgcatttctgaaaccacacagctagacacacattttgtcaccagtttcttacactacatcctataaatatagcactttgttcaagtcttgtctaaaatgagcaagtacacacgtgcatgagtctgacttctttttataagagtcttcttgttacttgatggaaatcatagaatcataaagtttggaaaagagctctaagatcatctagttcatcaccaccatacccctaaaccatgtcccacagtgccatacctagaaatttcttgaagacctccagggcagtgacwctactacccccctgggcagcctgttccaatgcctcacaactcttctgagaacaaatgtttcataaccgccaacctgaacctcccctggtgcaacttgaggccgttccctcccatcctatcactgttccctggaagaagaaggtgaccccccacctcaccacaacctcctttcaggcagagagtgatcaggtctcccctgaacctccttgactgaataatcccagttcacttagttgctccccttaagatttgtgccccagatccttcacagctttgttgcctgtcgctggccacrttcca

SEQ ID NO: 9097 - DNA, 600 bp, Chicken  19866894204347_2
tgacwctactacccccctgggcagcctgttccaatgcctcacaactcttctgagaacaaatgtttcataaccgccaacctgaacctcccctggtgcaacttgaggccgttccctcccatcctatcactgttccctggaagaagaaggtgaccccccacctcaccacaacctcctttcaggcagagagtgatcaggtctcccctgaacctccttgactgaataatcccagttcacttagttgctccccttaagatttgtgccccagatccttcacagctttgttgcctgtcgctggccacrttccagggcctcaatgtcttccttgtaggcaggaacatctaagactctgcagtaccaagactgcagagcaagtctgcagcagtgcaccacctatcagcaaatctgtgcaaacatgtttggttaataaagggaaaattctttctgatcattttgtgaaaaaaacatcacagtcagattgtttgaagtcccgcttatttcatatttaccagtctgcgtgttctccacttcaacagaaaatacagtcttcaatattgacactggactagaacaaggttacctggcaaagtggccagtagagtt

SEQ ID NO: 9098 - DNA, 559 bp, Chicken  19866894204347_3
gcaaagtggccagtagagttggtgttgttttgagacacgtttttaaaacaagaaattgattagttaacagtgttccactgtgccaatatcggtgctgagatcatgatgaatactatttgctctcaaaagctgaaaacactacattttttttaaacaacgacagcattgttttagatgtgatggtataaggcctctggcaaggtacgtgggaggagctgacatgtttttgtaggccaattgacataactgggagacaaacaaacaacaatttctgctgcttctgcagtttgcaaaagcttstctgttggttttttcccctatttttttttcttctcarttatatccccaatttaagaaattacagtaccacttccagaacaggcacactaacaagggagagaaagtgtgaacatgctcgaagacttagaaaagtgcaagattttgacaacttaattcaaaaccaacaaactaaacagaaatttttgcattaactgaagtgcttttttggtaggttgagatgatcaaggacatattgcattctcttttatgtaaggttttg

SEQ ID NO: 9099 - DNA, 522 bp, Chicken  19866894204347_4
cgtttttaaaacaagaaattgattagttaacagtgttccactgtgccaatatcggtgctgagatcatgatgaatactatttgctctcaaaagctgaaaacactacattttttttaaacaacgacagcattgttttagatgtgatggtataaggcctctggcaaggtacgtgggaggagctgacatgtttttgtaggccaattgacataactgggagacaaacaaacaacaatttctgctgcttctgcagtttgcaaaagcttstctgttggttttttcccctatttttttttcttctcarttatatccccaatttaagaaattacagtaccacttccagaacaggcacactaacaagggagagaaagtgtgaacatgctcgaagacttagaaaagtgcaagattttgacaacttaattcaaaaccaacaaactaaacagaaatttttgcattaactgaagtgcttttttggtaggttgagatgatcaaggacatattgcattctcttttatgtaaggttttg

SEQ ID NO: 9100 - DNA, 600 bp, Chicken  19866894204355_1
caaattgggttggcttcagtacacaccagactaatacttttatctgtacatctcctacttggccaaacaagagtgaagaaaacaacctgaaagcagcagctttctcatagccaagctctttaaagtaagcaacagtcataacagttataacaagagttattcatgttccacaatgttgacatgcagcaaagctcacaatagccttgaacaaacagtaacgtaactgttatatccatttcagtacagatagtgaagatgtaacgctggaatccaattttaaggagaaaaagactaactatraggtatacttgctgtaaaatacatggtaacgaggctatgatyagaaggatayccagttaagygccarataaagtaaacaagagataccatgagctgaagggaactgcgaactgctctatttttaaaaagaagctaaatgcaaatggtatagcaaaaggtaaatacttccttcttaccatgaggtggtggagcccgagatggatagacaatttctggctgttgagggactagaggagggtaaggaccaggaagaaggggtggagggatgacttcaggacggcctggaggaaggtcaggtct

SEQ ID NO: 9101 - DNA, 600 bp, Chicken  19866894204355_2
tctgtacatctcctacttggccaaacaagagtgaagaaaacaacctgaaagcagcagctttctcatagccaagctctttaaagtaagcaacagtcataacagttataacaagagttattcatgttccacaatgttgacatgcagcaaagctcacaatagccttgaacaaacagtaacgtaactgttatatccatttcagtacagatagtgaagatgtaacgctggaatccaattttaaggagaaaaagactaactatraggtatacttgctgtaaaatacatggtaacgaggctatgatyagaaggatayccagttaagygccarataaagtaaacaagagataccatgagctgaagggaactgcgaactgctctatttttaaaaagaagctaaatgcaaatggtatagcaaaaggtaaatacttccttcttaccatgaggtggtggagcccgagatggatagacaatttctggctgttgagggactagaggagggtaaggaccaggaagaaggggtggagggatgacttcaggacggcctggaggaaggtcaggtcttgctggcagcagagcagctactgagcacaatttgcgatactc

SEQ ID NO: 9102 - DNA, 600 bp, Chicken  19866894204355_3
tcctacttggccaaacaagagtgaagaaaacaacctgaaagcagcagctttctcatagccaagctctttaaagtaagcaacagtcataacagttataacaagagttattcatgttccacaatgttgacatgcagcaaagctcacaatagccttgaacaaacagtaacgtaactgttatatccatttcagtacagatagtgaagatgtaacgctggaatccaattttaaggagaaaaagactaactatraggtatacttgctgtaaaatacatggtaacgaggctatgatyagaaggatayccagttaagygccarataaagtaaacaagagataccatgagctgaagggaactgcgaactgctctatttttaaaaagaagctaaatgcaaatggtatagcaaaaggtaaatacttccttcttaccatgaggtggtggagcccgagatggatagacaatttctggctgttgagggactagaggagggtaaggaccaggaagaaggggtggagggatgacttcaggacggcctggaggaaggtcaggtcttgctggcagcagagcagctactgagcacaatttgcgatactcatctgaaatg

SEQ ID NO: 9103 - DNA, 600 bp, Chicken  19866894204355_4
ccaaacaagagtgaagaaaacaacctgaaagcagcagctttctcatagccaagctctttaaagtaagcaacagtcataacagttataacaagagttattcatgttccacaatgttgacatgcagcaaagctcacaatagccttgaacaaacagtaacgtaactgttatatccatttcagtacagatagtgaagatgtaacgctggaatccaattttaaggagaaaaagactaactatraggtatacttgctgtaaaatacatggtaacgaggctatgatyagaaggatayccagttaagygccarataaagtaaacaagagataccatgagctgaagggaactgcgaactgctctatttttaaaaagaagctaaatgcaaatggtatagcaaaaggtaaatacttccttcttaccatgaggtggtggagcccgagatggatagacaatttctggctgttgagggactagaggagggtaaggaccaggaagaaggggtggagggatgacttcaggacggcctggaggaaggtcaggtcttgctggcagcagagcagctactgagcacaatttgcgatactcatctgaaatgtgaaaacatg

SEQ ID NO: 9104 - DNA, 600 bp, Chicken  19866894204355_5
caagagtgaagaaaacaacctgaaagcagcagctttctcatagccaagctctttaaagtaagcaacagtcataacagttataacaagagttattcatgttccacaatgttgacatgcagcaaagctcacaatagccttgaacaaacagtaacgtaactgttatatccatttcagtacagatagtgaagatgtaacgctggaatccaattttaaggagaaaaagactaactatraggtatacttgctgtaaaatacatggtaacgaggctatgatyagaaggatayccagttaagygccarataaagtaaacaagagataccatgagctgaagggaactgcgaactgctctatttttaaaaagaagctaaatgcaaatggtatagcaaaaggtaaatacttccttcttaccatgaggtggtggagcccgagatggatagacaatttctggctgttgagggactagaggagggtaaggaccaggaagaaggggtggagggatgacttcaggacggcctggaggaaggtcaggtcttgctggcagcagagcagctactgagcacaatttgcgatactcatctgaaatgtgaaaacatggatgc

SEQ ID NO: 9105 - DNA, 600 bp, Chicken  19866894204358_1
gaacatttccacagaaggttatgagcctgtaattgcttacccagctgtcattcctttgggataaatacgcagttaagcattcttacaaatgtgttttggccgtgaagaaaaatgtccatggcaatcctgaaagcttttagtttgtgaaagccagcagcagctttgttcagttaaaatagctatttttttttattttttacatttaatgtgtacttttaaagtcgatactttggtcttgaattaatgaaggtttggttttttaagcaaagcattacctgtgtgccatcccacgcttggtaytgaagggttcctgtgaggatatagtcggagaggtaaaatataaagaggcttataatgagcagagggctagcaaaagcccacattgctttccagtaccagtttagcttgcgtccaatcatcgtctgaagatctttctcaaatctgtgtttaaaaacagaaacaaaaacacagcatattcctgcgtatggtcaatccgcgccctgatccgagtcacttcagcagcacctacagaaaacacgagcgcagggagtggagagcatacctggtcaggaggggtaatgagcaaagaacttgcctgaa

SEQ ID NO: 9106 - DNA, 599 bp, Chicken  19866894204359_1
  misc_feature (1)..(32): n is any nucleotide
nnnnnnnnnnnnnnnnnnnnnnnnnnnnnnnnatcaggtggttatagcaacgcagtacattcgttgtacagtctcattaagtcagcgcagggctggattaaagtctccatcttatcaatcatttctctaaaatgtattagaaatgaacaaaatctggactggaaggcaagtatagcacaacactggccaagttccatgatgcactgtggctttctcgtaagcaacacacgaggatgcttttttgctacttggtgggtagttttacccttagagtggggaggaacaaaatatgtttttttwatgaaacaaaatgatcacagcacagagatctgtgaatatcccacatttctgtggtggggaatagagcagtatcatatccttgttttgcagctgcaatagcacattgcatgtctggaggagcagggatgcaccaggttgggttactgtcagtgctccaatattacctttgkaaagcggtttgtttacccagayctaagtgccatggtggatgggaacagccccagcagtgctgttatacctcatgctgcacacctgggctgtgtgtctgaattcctctgtgatctgtccattcagaggca

SEQ ID NO: 9107 - DNA, 600 bp, Chicken  19866894204359_2
tatagcacaacactggccaagttccatgatgcactgtggctttctcgtaagcaacacacgaggatgcttttttgctacttggtgggtagttttacccttagagtggggaggaacaaaatatgtttttttwatgaaacaaaatgatcacagcacagagatctgtgaatatcccacatttctgtggtggggaatagagcagtatcatatccttgttttgcagctgcaatagcacattgcatgtctggaggagcagggatgcaccaggttgggttactgtcagtgctccaatattacctttgkaaagcggtttgtttacccagayctaagtgccatggtggatgggaacagccccagcagtgctgttatacctcatgctgcacacctgggctgtgtgtctgaattcctctgtgatctgtccattcagaggcagcccaccagggaaaacaacrtgcagtccttccagcacacactgcaggactgctgctgggtctgcttgcacgtactgcactgtacaatttgagcctgacctagagactggtgacagcagctgcataaaagcctgtcttaagcagaaaaactgtatttactgtaggaatggga

SEQ ID NO: 9108 - DNA, 600 bp, Chicken  19866894204359_3
tccatgatgcactgtggctttctcgtaagcaacacacgaggatgcttttttgctacttggtgggtagttttacccttagagtggggaggaacaaaatatgtttttttwatgaaacaaaatgatcacagcacagagatctgtgaatatcccacatttctgtggtggggaatagagcagtatcatatccttgttttgcagctgcaatagcacattgcatgtctggaggagcagggatgcaccaggttgggttactgtcagtgctccaatattacctttgkaaagcggtttgtttacccagayctaagtgccatggtggatgggaacagccccagcagtgctgttatacctcatgctgcacacctgggctgtgtgtctgaattcctctgtgatctgtccattcagaggcagcccaccagggaaaacaacrtgcagtccttccagcacacactgcaggactgctgctgggtctgcttgcacgtactgcactgtacaatttgagcctgacctagagactggtgacagcagctgcataaaagcctgtcttaagcagaaaaactgtatttactgtaggaatgggaagagttggagtcactgcagtac

SEQ ID NO: 9109 - DNA, 594 bp, Chicken  19866894204359_4
gcacagagatctgtgaatatcccacatttctgtggtggggaatagagcagtatcatatccttgttttgcagctgcaatagcacattgcatgtctggaggagcagggatgcaccaggttgggttactgtcagtgctccaatattacctttgkaaagcggtttgtttacccagayctaagtgccatggtggatgggaacagccccagcagtgctgttatacctcatgctgcacacctgggctgtgtgtctgaattcctctgtgatctgtccattcagaggcagcccaccagggaaaacaacrtgcagtccttccagcacacactgcaggactgctgctgggtctgcttgcacgtactgcactgtacaatttgagcctgacctagagactggtgacagcagctgcataaaagcctgtcttaagcagaaaaactgtatttactgtaggaatgggaagagttggagtcactgcagtacaataaagggtaaaaggcatttagaaacaagtgcagcaaagcttttcaaagaaaatgttttcttaaaagaaagaatactgcctatggtattgttatttgattactagataggaacaacactg

SEQ ID NO: 9110 - DNA, 600 bp, Chicken  19866894204360_1
caaacaaacatggagcagcttctgtcagacacggccaggtacttgtttagactggagtgacagcattgctccacagcactctactctccctgctgcgctggaagcatctggcaaatagttgctgcagcagcacccgtgccagtccaaaaaggactcatgtgcggaactgtctggagaagggaagggcgtagaaggggaagatctaaaggccctttcctgtgggattgccctgacactcgtggaccagattatgctgaggctttggcaagacactgcttataggcatagctctaatcaagyggtgatgagaaacattcccayggcgtcttgtaatctctctctcccttagggaccttcagtgactgaaaggggctctggtgacaacatggcacctagacctgggtcgaaagttgcaaagttgcagaggggccaggtaggcagttggctggcactcagcagctttccagatactctctctgggccacgtgaaacaatcctcagagacagcatggaagagcatttgggttttcttactggggagatctctgatgtacagagaccaagccaaatttgaaaagaaagacttacgactgatctgcg

SEQ ID NO: 9111 - DNA, 600 bp, Chicken  19866894204360_2
ctgtcagacacggccaggtacttgtttagactggagtgacagcattgctccacagcactctactctccctgctgcgctggaagcatctggcaaatagttgctgcagcagcacccgtgccagtccaaaaaggactcatgtgcggaactgtctggagaagggaagggcgtagaaggggaagatctaaaggccctttcctgtgggattgccctgacactcgtggaccagattatgctgaggctttggcaagacactgcttataggcatagctctaatcaagyggtgatgagaaacattcccayggcgtcttgtaatctctctctcccttagggaccttcagtgactgaaaggggctctggtgacaacatggcacctagacctgggtcgaaagttgcaaagttgcagaggggccaggtaggcagttggctggcactcagcagctttccagatactctctctgggccacgtgaaacaatcctcagagacagcatggaagagcatttgggttttcttactggggagatctctgatgtacagagaccaagccaaatttgaaaagaaagacttacgactgatctgcgtatggcctttaaggcacaaag

SEQ ID NO: 9112 - DNA, 600 bp, Chicken  19866894204360_3
ctctctctgggccacgtgaaacaatcctcagagacagcatggaagagcatttgggttttcttactggggagatctctgatgtacagagaccaagccaaatttgaaaagaaagacttacgactgatctgcgtatggcctttaaggcacaaagagacttgaaagtactttggaggttcttacgtacctgaatacactactacagcactaatttttctgccttcaaggaaacgggtactcacaacttacctctgggtttcccctgaggcacaaaagcaatattcacccagtcatttgggtaargagcgccaatgtcatcatctagaatcaagaacagatgagagatgttcctattgcatgttgtgatttccttttccctgactgactggggatgggtcaggtaatgggatgggagactcaggccgtgattgccaaagctgcagagtggccagggtgacctggagcctggcactyggcagctttacaaatgctctctccaggccacgtgcaacacccctccgggaccgcatggaagagcccaccagggctttcttacagggagatccctgctgtatctgccactgaagcattggaggaaacgat

SEQ ID NO: 9113 - DNA, 600 bp, Chicken  19866894204360_4
ggttcttacgtacctgaatacactactacagcactaatttttctgccttcaaggaaacgggtactcacaacttacctctgggtttcccctgaggcacaaaagcaatattcacccagtcatttgggtaargagcgccaatgtcatcatctagaatcaagaacagatgagagatgttcctattgcatgttgtgatttccttttccctgactgactggggatgggtcaggtaatgggatgggagactcaggccgtgattgccaaagctgcagagtggccagggtgacctggagcctggcactyggcagctttacaaatgctctctccaggccacgtgcaacacccctccgggaccgcatggaagagcccaccagggctttcttacagggagatccctgctgtatctgccactgaagcattggaggaaacgatgcctgtttcttcctctgggctccagcccgggggtctttgttgggaactgggattcgtctgtggagagcaccaggaagccagagcagaaatgctcacgcttttcccagcacacttctccagagctctcccccaggacaaccccagggtgaaggccatgctcagccagtggca

SEQ ID NO: 9114 - DNA, 600 bp, Chicken  19866894204363_1
tttttgatcagcctcctaaggagagacgaggtccttctatacgttattggtttttcttttgaaaaactgaaatgatattatcacccagcttttaaccatgccttatttatttctgtttgcaggatgcggaataaattttaccagtcctgcaggtcgtattgtctctcctaactaccctagtcagtatgacaacaacttgaactgcagttatatcatagatcgggggccgcagtcactggtaatcctggagtttgagactttccacttggaaggtaattggttctttgttatgttatgtakgtatgtaccatgaagtgtaacttcttgcttgaaaacattcaagtcctttatcatggaaaatggttggtggtttaatttccactctgaaaactatttatagacaaacatttacagagggagtttgcacggggttcagttttgtgtcagtgaaggcatcctgaagagtgaagatagagctcatgtgtatattttacagcactgaggctggggatttgccaggtggttagagcacaggagggcctgtggccaatttggatgtttgttcctgtctttttttttttaccattcatcttatgatct

SEQ ID NO: 9115 - DNA, 502 bp, Chicken  19866894204372_1
gaggagagtgtaatttcttttttcattcttcttttttgccatcttcaacaaaaataaacaaagagaaacaactcgaaacacaggtaaatataattccaccagagtggctgtcagttacaaaaacatgtgaagcctgggatctgccttggggatagaaactgtgcatttctgtctacaaaaagaaggaaaagggaaactataaaccagaaacggcagggtagggaggtaggggaagtaggggtgggagtgggtctggctgataaatagattgtgaactgtggtgtgttgtttctagcagamgagagcagaagccactgaacttagtacttaaatacataataaaaatctgctttttaaattatattctccactctggtgcacggctcaccaggcagcacttttctttacactgaatgtgctgagcaggctttactttatctgccttcagtggaaaaccaactctctataaaaaatagtattttaaaactgtgtgtaatagagg

SEQ ID NO: 9116 - DNA, 599 bp, Chicken  19866894204373_1
  misc_feature (1)..(59): n is any nucleotide
nnnnnnnnnnnnnnnnnnnnnnnnnnnnnnnnnnnnnnnnnnnnnnnnnnnnnnnnnnnacacaagaggaattcttctcataactggcctgcaggtagactgtgaaccaatagttaccatcctgtggttccaaccaacaaatcagcttttcatccatctagctgtccacacattcagcatatatcccaagcagatacaaggattatcctgcaactagctacactaaacagccctgctgtactatgttcactatccagctgaatgtctttagggccacagaagacaacagacatttgctgygkttgcagatgagccacatatgatctatttaccttatcccatgttggatcatgattgaaaacctgcagccaggcaaaaaaaagtgataaaacgatgcattcatttcagtaaactacaagtacaagggaacaggcttcaagactgccttgtccttttcacccataccaggagttctggtgtaatttgtcaataaaaccaccagtttyccatgagaatctgaacatttccaacagctaccagcaactctgaaattccttgaccttgccaacttcggtgcacagacaaacgaacaagttgtc

SEQ ID NO: 9117 - DNA, 599 bp, Chicken  19866894204373_2
  misc_feature (1)..(57): n is any nucleotide
nnnnnnnnnnnnnnnnnnnnnnnnnnnnnnnnnnnnnnnnnnnnnnnnnnnnnnnnnacacaagaggaattcttctcataactggcctgcaggtagactgtgaaccaatagttaccatcctgtggttccaaccaacaaatcagcttttcatccatctagctgtccacacattcagcatatatcccaagcagatacaaggattatcctgcaactagctacactaaacagccctgctgtactatgttcactatccagctgaatgtctttagggccacagaagacaacagacatttgctgygkttgcagatgagccacatatgatctatttaccttatcccatgttggatcatgattgaaaacctgcagccaggcaaaaaaaagtgataaaacgatgcattcatttcagtaaactacaagtacaagggaacaggcttcaagactgccttgtccttttcacccataccaggagttctggtgtaatttgtcaataaaaccaccagtttyccatgagaatctgaacatttccaacagctaccagcaactctgaaattccttgaccttgccaacttcggtgcacagacaaacgaacaagttgtcag

SEQ ID NO: 9118 - DNA, 546 bp, Chicken  19866894204373_3
cctgcaactagctacactaaacagccctgctgtactatgttcactatccagctgaatgtctttagggccacagaagacaacagacatttgctgygkttgcagatgagccacatatgatctatttaccttatcccatgttggatcatgattgaaaacctgcagccaggcaaaaaaaagtgataaaacgatgcattcatttcagtaaactacaagtacaagggaacaggcttcaagactgccttgtccttttcacccataccaggagttctggtgtaatttgtcaataaaaccaccagtttyccatgagaatctgaacatttccaacagctaccagcaactctgaaattccttgaccttgccaacttcggtgcacagacaaacgaacaagttgtcagcctttctgcattactcagaacatgtattgtcaagaagataataaatgtggtaatactgaggggaggcctgatggcggctgcagctcctcacagggagcggaggggcagcgctgagctctgctctgtgtgacagcgacagggcccgagggaa

SEQ ID NO: 9119 - DNA, 600 bp, Chicken  19866894204379_1
aggaaaagacagaaaaagatctgtgcatcggctggttaattttgaagagttttgctctcctacaaagtcctgttgacaggcaatatgtttatgtggaatctcactgtccaagtgcccaaacagaacagatagaaacttacctaactcctgcaagcttcagatcacagcctacattccagtaggtggggttttttgtgtgctttcaaaaagcattgtaaaattcaaaactgaagataacttcagctcaaaggggactcagcactgcaataaagagggctgcaaagtgacttgaaatacctyacttgcaaaggagggttttgcagaatgctaatgaaataacagtgcaaaagaaaccaagtggtctgaaaaaaataatcatgctttcaagacatgaaaaaacctttgttgaagacgtgcatacaccttagggcaatacatttaatagcactgactaccattaactttaaatggtgtatatcatagaaatctaagagagaggcttttaaaagggctcagaaagatggaaattctactctgagttgcagctgtcagccctcagtggaaacaagagtaacactgccactgggctcctctactgtg

SEQ ID NO: 9120 - DNA, 600 bp, Chicken  19866894204380_1
gataattagatcagactcacgtacttctttccagcctccgtgttaattggagtatcactgcaggtgtatatggaaaggcagtgaggaaatgtcatatactatttagacaccaattgagcctggaagacaattcaaaatgatggtgtttatctaaatttctaaactcagataatcgaaagtgaatgtcatatactgatagactgaagaaacatttgaaagttgatgttcaaagatgtacttaagtaataatgccccttaattgatgagatggctggttttagtgagtacatggcaagactrttctggtgaggcttgttttgtaaagtttcatcctgtgttgagggatgttgtactgaccttttctttgaaccagtcttaaacccaaatatcataaaataaatatttttatcaagtattaagatgataaaaatgtagtaatacataattaataggaaaaagagtaaaatgcagtatataatcgtgaggaaaaaacgtgaccgaattaatcgtgttagagattttgtgttatctcactacttttctctcagttccaggggaaagaattgcagttcaaatacacataagtaatcccgtgtggag

SEQ ID NO: 9121 - DNA, 600 bp, Chicken  19866894204382_1
gttacacagagagtgaaattgctgcagcagtctcccatgcctggttttacagagaaaacacgttcctcaagcactctgaattctgaacctttgttccctgcatgggtgtgtgttctctccacgccacagcccccatcccctctttatctcttcattccctccacagcacagctcctgtcccctctttatctcttgatccattattcatttgtctgcagttctgggtctgattctcgaaagctttttagttcttggacttcagcaatagcagtccaaccacatccagagccttcctcctcytcctcctcctgctgctgctggggcagtgctggaacccttccttgttttgttatggataagagagactcaaggggaaatagcagttcttccagtgcacctagcagagattttctgctcctgtatcattcctgggatgtttttatgtccctgtatcagctggctgggatttgatagcccttgctgtcattgtggggtccacttcagaccccatctgtgatgctgtcccatctcagcagcagctcccaacaatccctacctatgcttttttggaagctgcgtctaccttcagccaaactacct

SEQ ID NO: 9122 - DNA, 599 bp, Chicken  19866894204387_1
  misc_feature (1)..(94): n is any nucleotide
nnnnnnnnnnnnnnnnnnnnnnnnnnnnnnnnnnnnnnnnnnnnnnnnnnnnnnnnnnnnnnnnnnnnnnnnnnnnnnnnnnnnnnnnnnnnnntacctttgccgacacctgcatgctgttttcttgcatgttcatgatggcttcagaaatcttgacatcaaataggatccatgactgattcaatgttgaatggtccctctaatctctccgctaccagaagcatagcatctgttaaaacacaaagcagccgttcccttaaagaagaggtaccttcaggtgcctcaagcagaccgagcgcwctgggcagcggtgtggggatgtgtgacagtggggaacctgactgcagtgcagctcccmagtcagcaggaatatctcccccttccaccaccaccgccacagaaagagaaatggagactgtagagagactgtagaagttagattaatagtagttgttgtagcattatcaagcttggggtgcaattattttacacagcatcacaccagttgaagcatccagtgctctggagcgcacttatatgttctctgtcccaagaagaagcaggatgatagaaatgaatccctggcatatgttcttcgg

SEQ ID NO: 9123 - DNA, 599 bp, Chicken  19866894204387_2
  misc_feature (1)..(36): n is any nucleotide
nnnnnnnnnnnnnnnnnnnnnnnnnnnnnnnnnnnntacctttgccgacacctgcatgctgttttcttgcatgttcatgatggcttcagaaatcttgacatcaaataggatccatgactgattcaatgttgaatggtccctctaatctctccgctaccagaagcatagcatctgttaaaacacaaagcagccgttcccttaaagaagaggtaccttcaggtgcctcaagcagaccgagcgcwctgggcagcggtgtggggatgtgtgacagtggggaacctgactgcagtgcagctcccmagtcagcaggaatatctcccccttccaccaccaccgccacagaaagagaaatggagactgtagagagactgtagaagttagattaatagtagttgttgtagcattatcaagcttggggtgcaattattttacacagcatcacaccagttgaagcatccagtgctctggagcgcacttatatgttctctgtcccaagaagaagcaggatgatagaaatgaatccctggcatatgttcttcggggctgtgtgagatgatgaatacttttatatgatatatcagggtgttataattaaagca

SEQ ID NO: 9124 - DNA, 576 bp, Chicken  19866894204390_1
caagaatggcatcatggaaaaaaaatatgtgtttttccttccttccagttcttatctgaacaacatgaattacaaacagatgtataagttttgcagaaaatttaatagtatttttgatctattgtaggttcacaccatatactgtgatgtccctgaggcacaacagtacatcaatcagcttgtcagggagaacgaggttgaaagggctgattggaaagaagcctttaataacgctcaggctgacattttgtcctacgaggtatcttatggaaatgaacctatagatgacaaaaggtatayaggactgttaataatgatagaaataatttttaaaaagtaatgagctgtttacatacagagaaaatacattttaaagatctttgttataattttcatgcaaggtttttaacttggaaaaaacaatctaagtattctatagttatattaaaaaataaataaaggagcttaaaaacacctgttacaaagagcaggaaaacaattcagtatatctatcatatgcaaattttaaccagcgtgttataaaatatgctgaaataagcttatttggcaagtctg

SEQ ID NO: 9125 - DNA, 600 bp, Chicken  19866894204393_1
gtgagggaatgtaactgttttctcagcatcctttccgtattcccattccataaccttcgagcttctcccctccagctggcaggagaacgctctcagcccatgagagtgagagcttccagctcagagcttggtccagagaggaaaagggaaactgtgagcagagaccggagccccaagcgggcgagtccaaggaggagtcatccttgcaaaactccttccatccctgcctgcctttccaaacaggtatctctgccaccaacagcgggcactgggagctgctggggtcagagatgggctccrtcccaacctcaacctcccctgctgtgtgctgtcccggggactgctgctgctcccctggggctgtgcagggcacgttgtggtcactcagcctttgggctcggctggcagtcactgtgaaggcagaaaaagggctgagcatattttgatcactgtctttctccagctgaaggtaaagggaactcgttgcaaacaagcgcgaggacactgaatacagccctggagaaatgtgcaatgtggaataacagttcagtctcttaaaggaggagggggggggggggcgggttaaaacagaaagaaaag

SEQ ID NO: 9126 - DNA, 502 bp, Chicken  19866894204395_1
acaaaatgaatatattgcttacatactgatatactgatttctctggcatttactgtaattgcagatttgcaatgaaagattctggcaagagacagaagggaaaaatctccctcatgcagtcttccccactggaaacagtttctcatacagcgatctggcacttgatggcaggtgttaattctctgaatagtgtgctgaaataatcttttttgagtgaagttgggcaactgcgtctgtagacccagaaatattacatctcatctacccacagtaagtgtcaatttatagaaatcaaactckcatttccactaccagaacaaaggtgaatcatagctatgtaactgtttctgtgcaagtggcttcagagtaatccagtactgtttagcatcaaaaagaggacgtcagggagatttccttccctaacaagggagacattagcgacattaaggagatttctctctctaatgagaggtgtggataaggataagggctaccgaaggtg

SEQ ID NO: 9127 - DNA, 600 bp, Chicken  19866894204404_1
tgcacttgttctgtattttattcccctcggtcataagcatttggccatatatgtatcagaagagcaatacttgcatgctccaaaagaatatactgtatgtcctaaaactgagattgaaaacctaccttaaaagaacacacagagttgattcacagctgtaggcaacatattataagtagtattctatctctgctgtagtacgtacccagctcaggaccaaaacttctcaccattcatacaacaggcatcaagcctgtgttacaacagtacattaagccacacactggagaacacaccacrgagctcaagacacctcatgyttcacaaggtttacaaattcagcacagccatactaattgcactggtcaagccatgctgtccttcacgctcagcgtatgcaaaccctacacagctgggtgatggagacacaggcttccataagtacagccaccatcactactgactcaaatttgtgaagtaaattaagagttggtgctatttgaaggcctctaactgcactctgcaccatttatctgtagagcatcttgcttccttgcacataccaattgaaatgatgaggtctctcctgaggacaaatcc

SEQ ID NO: 9128 - DNA, 600 bp, Chicken  19866894204404_2
ttcccctcggtcataagcatttggccatatatgtatcagaagagcaatacttgcatgctccaaaagaatatactgtatgtcctaaaactgagattgaaaacctaccttaaaagaacacacagagttgattcacagctgtaggcaacatattataagtagtattctatctctgctgtagtacgtacccagctcaggaccaaaacttctcaccattcatacaacaggcatcaagcctgtgttacaacagtacattaagccacacactggagaacacaccacrgagctcaagacacctcatgyttcacaaggtttacaaattcagcacagccatactaattgcactggtcaagccatgctgtccttcacgctcagcgtatgcaaaccctacacagctgggtgatggagacacaggcttccataagtacagccaccatcactactgactcaaatttgtgaagtaaattaagagttggtgctatttgaaggcctctaactgcactctgcaccatttatctgtagagcatcttgcttccttgcacataccaattgaaatgatgaggtctctcctgaggacaaatccaacaagcctttgggactccc

SEQ ID NO: 9129 - DNA, 600 bp, Chicken  19866894204404_3
caccatttatctgtagagcatcttgcttccttgcacataccaattgaaatgatgaggtctctcctgaggacaaatccaacaagcctttgggactcccgtgacaccaccactggatagccactgtaggtggtttcattgattatggtctcaatgtcttctactgtcatgctgtcctgagtgatgacagtcagaggaggatcattcctccgtggcctcattacatccattgcaagtgtcttgtgtgagaactcttccttggcttccaagaaaggatagccattgaggcgtatatgggcatcrtaaatgccctcccgcccaatagcatctgccacccacttgctggtcatggctgctgccatcagaggaactatrtactccagtccaccagtgagctcaaacataatgaccactagtgacacagtcattcgggtcaccccacctacaaaaagaacacaggaagacaaaagacgttaacatatttaacagagatttacagccagaagagctgtcctgacacttagtacagttttcctccaaagatgacattaatttcaatgcaggcaacaggaygtaccccagtgtcatatgtcctctgcacat

SEQ ID NO: 9130 - DNA, 600 bp, Chicken  19866894204404_4
aatccaacaagcctttgggactcccgtgacaccaccactggatagccactgtaggtggtttcattgattatggtctcaatgtcttctactgtcatgctgtcctgagtgatgacagtcagaggaggatcattcctccgtggcctcattacatccattgcaagtgtcttgtgtgagaactcttccttggcttccaagaaaggatagccattgaggcgtatatgggcatcrtaaatgccctcccgcccaatagcatctgccacccacttgctggtcatggctgctgccatcagaggaactatrtactccagtccaccagtgagctcaaacataatgaccactagtgacacagtcattcgggtcaccccacctacaaaaagaacacaggaagacaaaagacgttaacatatttaacagagatttacagccagaagagctgtcctgacacttagtacagttttcctccaaagatgacattaatttcaatgcaggcaacaggaygtaccccagtgtcatatgtcctctgcacatcatctgaatgagagctctgtgaacaatgtggtttatctgttctaaacttacttaatactatatatgaaaaca

SEQ ID NO: 9131 - DNA, 479 bp, Chicken  19866894204404_5
ggatagccattgaggcgtatatgggcatcrtaaatgccctcccgcccaatagcatctgccacccacttgctggtcatggctgctgccatcagaggaactatrtactccagtccaccagtgagctcaaacataatgaccactagtgacacagtcattcgggtcaccccacctacaaaaagaacacaggaagacaaaagacgttaacatatttaacagagatttacagccagaagagctgtcctgacacttagtacagttttcctccaaagatgacattaatttcaatgcaggcaacaggaygtaccccagtgtcatatgtcctctgcacatcatctgaatgagagctctgtgaacaatgtggtttatctgttctaaacttacttaatactatatatgaaaacatttcctagtgccaatttgctgttacttaacatggaaatttagctagctgcaaaatagcctggtcacgatataaaatg

SEQ ID NO: 9132 - DNA, 600 bp, Chicken  19866894204405_1
ggtaggatgtgatgaccttaatggtcttttccaaccttaacaattctatgattccatgaaatggatgcagagaggaatctgactgtgttcagtgctgtgctttttgttctcatgcaactttagagtatgtccaagagatgcaagtgaaatcaagagatgctccaaaccaacacttctttgttgtgggttgtggccagtgaagaaaaagagagttggaaaaacctggaagatttttctagattctttttctttccaaactcttgagtctccatcatggattggttttcagggagcctgagycacagagacttggcgctgttgttgctctgccacaaccagcttgacacaaatgctcccactccccatgatccagttcaaatttgctgtcatgaagcatccatcttgctgggtcacttggagcctgccatgaaaaagactgcaaaatcaagcctcacctttcctcacttcatttcataggtctagctatgaaaattttgttttaaaattaatacaatcaaaaacgcagtttaaataacagaatattcaacagttactgaagcttccttcaacagatttgagtgtaagactgaaaatgaactg

SEQ ID NO: 9133 - DNA, 600 bp, Chicken  19866894204409_1
ccattctgcagtgcaacacgtgcagtgctgcctgcattgcatggacagagggcacatggacacttcacaatcaaagggaaattcgctctcagcacagcattcctgggtccaaccatccccagccctccctctcttccagacgccagagctcagcaaagcaggtgcttacctgtattccccaccttacatttctgtacctgcacttgcagtgcaaagttgctttagttttcattcctaagtgcagtggagtatctcatgcacttgtgcagttcagagtgggctttgcacgagggctgtgcrccacctggcactctggtgcacccagtgaagccggacctctgcttctgcacctccacacctggcatctcccggtatctccctgcctggcacaacacacccccgcccctctgccagcactgccctgggacagcaaaagctggaaaaggcagaggcgcttaatgggatttgcagaagcagccagctcggttacagcctgttgtctcaggcgtgttttttaaatctttatctctgcatcactaaacactgatttgcatttgaaaaggctcccttcagttccctacctctgaaatgaggatagct

SEQ ID NO: 9134 - DNA, 600 bp, Chicken  19866894204412_1
tatagaacactataagcactacaaggacgcatacgctgtgtagaatttaatctttaagtacttcttgttaaagacaagaaggtagcataagtaaaactatacaaaagtccttgcaggcatttgcatcaaagggcattaattaattcatacttaataaacagaaattaaaaaaataaaataacttatctgctccaacagaaatatatgaagattagataaagtaatttaattgccacagcttacattaaatttcagtaacatttttaactcaccttcagaagtccatttaagcttcacttracctttaygccctgactccaccttggggaaaaaaaacaacaaacacagttgtctagtccagatgaagtacagattgctgttaccttcacagcagtccttaagagctctatgaccgcagctgtctcgtggaaatgagatcacctgctgaaatcccacagaaaggcaaatcttactcaaacctctgttgaggcagctgtcagatagcataggaacagctaaatcaggcactgctgccaaaggaaagacgcactgcaattggtttcctgagttgggaagcagggctacacccagggccacctt

SEQ ID NO: 9135 - DNA, 600 bp, Chicken  19866894204412_2
actataagcactacaaggacgcatacgctgtgtagaatttaatctttaagtacttcttgttaaagacaagaaggtagcataagtaaaactatacaaaagtccttgcaggcatttgcatcaaagggcattaattaattcatacttaataaacagaaattaaaaaaataaaataacttatctgctccaacagaaatatatgaagattagataaagtaatttaattgccacagcttacattaaatttcagtaacatttttaactcaccttcagaagtccatttaagcttcacttracctttaygccctgactccaccttggggaaaaaaaacaacaaacacagttgtctagtccagatgaagtacagattgctgttaccttcacagcagtccttaagagctctatgaccgcagctgtctcgtggaaatgagatcacctgctgaaatcccacagaaaggcaaatcttactcaaacctctgttgaggcagctgtcagatagcataggaacagctaaatcaggcactgctgccaaaggaaagacgcactgcaattggtttcctgagttgggaagcagggctacacccagggccaccttcttccagc

SEQ ID NO: 9136 - DNA, 600 bp, Chicken  19866894204412_3
cagatagcataggaacagctaaatcaggcactgctgccaaaggaaagacgcactgcaattggtttcctgagttgggaagcagggctacacccagggccaccttcttccagcaccaatggcatttctaagggtcacttgtgaatctgccttgctaccatccatctttttcattctcttctctgctatttcctgcagtttcaaaaacaagatctttttggttgtcaacagatcatttactggatgacaccagaaggatgttaagattaaagaacgttctaactgaagcttaaaaaaaaaaawaaaaaaataagggttccctactcacaaatttcttgctgagtactaggcagaagaatatgtctttgggataacagggaacctcaactttttactgtctattttggatgagctcaattcaaccaggaagtgttgttcataaagctacattgtagtatagggaatagattgctacttcaaggtctacataaggttaaggaaattgttctgaaaagaagtttttcaagttgaataaatagctagcaaagtgggcaggcaagaaggaataacagaagtctgctccatttacatattgataagagt

SEQ ID NO: 9137 - DNA, 600 bp, Chicken  19866894204415_1
ttcccattttgttaatttgttgggtttgagttaaaaaggggaacaattagaaaacagctcttagtatctgatgtcatttgaggggctaaaaatattgttaaataaggtgattgctgtgaaagatgatcctttttcatgtgaagtctttaaatgagcttgtgtctaaaaattattgcttacgtgtgtctgtctcattatcaggcttgttcagcctggagaagagaaggctgcagggtgacctcattgcagccttccagtacctaaagggagcctacaaacaggaagggagccatctctttrcaagggtagataatggcaggacaaggggaaatggttttaagttgaaggagggaagatttagattggatatcagggggaatttctttagcagaagagcagtgagtgctggaacaggctgcygagaaaggctgtggatgccccatccctggaggtgttcaaggccaggttggatggrgccctcagcagcctggtctaatattagatatggaggtgggtggccttgcctgtggcaggggtttggagcttgatggtgcttgaggtcccttccaacccaagccattctaggattctgtgatccta

SEQ ID NO: 9138 - DNA, 600 bp, Chicken  19866894204415_2
agatgatcctttttcatgtgaagtctttaaatgagcttgtgtctaaaaattattgcttacgtgtgtctgtctcattatcaggcttgttcagcctggagaagagaaggctgcagggtgacctcattgcagccttccagtacctaaagggagcctacaaacaggaagggagccatctctttrcaagggtagataatggcaggacaaggggaaatggttttaagttgaaggagggaagatttagattggatatcagggggaatttctttagcagaagagcagtgagtgctggaacaggctgcygagaaaggctgtggatgccccatccctggaggtgttcaaggccaggttggatggrgccctcagcagcctggtctaatattagatatggaggtgggtggccttgcctgtggcaggggtttggagcttgatggtgcttgaggtcccttccaacccaagccattctaggattctgtgatcctatctagcacagctcctaataaaccagattgtctttttctgagaaatgacagttttattagttttaatccatttcttcatgagctgtaacgagttaattaaattcagtctttcaattacatt

SEQ ID NO: 9139 - DNA, 600 bp, Chicken  19866894204415_3
cttacgtgtgtctgtctcattatcaggcttgttcagcctggagaagagaaggctgcagggtgacctcattgcagccttccagtacctaaagggagcctacaaacaggaagggagccatctctttrcaagggtagataatggcaggacaaggggaaatggttttaagttgaaggagggaagatttagattggatatcagggggaatttctttagcagaagagcagtgagtgctggaacaggctgcygagaaaggctgtggatgccccatccctggaggtgttcaaggccaggttggatggrgccctcagcagcctggtctaatattagatatggaggtgggtggccttgcctgtggcaggggtttggagcttgatggtgcttgaggtcccttccaacccaagccattctaggattctgtgatcctatctagcacagctcctaataaaccagattgtctttttctgagaaatgacagttttattagttttaatccatttcttcatgagctgtaacgagttaattaaattcagtctttcaattacattgtcttctactgtctccaaagctggaaattttttcagtcaactttacttttttcaa

SEQ ID NO: 9140 - DNA, 600 bp, Chicken  19866894204425_1
tttgcataaacacaagcattgtctctaagcttactgaggaacaaagcagaagaaacataggtcaaaccaagctgccctgaagtaggaaaaacagacctctattagagaaaatgaatttcacaaatgaccaatccaaaaccttctagaaagaggctaaaaatcttagtctcctcctgttaaagtacatgccaaatggtaaccattaatccacaccttaacataatctagaagcattataggatactaagctttcaatctcaattacaatggaaagcaaatgagcacagacataaagatctkttttgatatcttgtgatgaaactgtggctccatttaattcagtgggtgattcatcattgacttacatactcaacaatatcagcaggcagctcctctgcacaagagactaaactttcagaacacagacaaaggggctggctttgaacctaaattcagaatttctcattattttgtctctctccctcaaaaacaaaaacaaacaaaaaaaaaagagaaactactgttagttaatgcaatgttaatagaactgtagatcaagatttgacacaagaaaagtgaaattctacagggaaactgaaa

SEQ ID NO: 9141 - DNA, 600 bp, Chicken  19866894204425_2
gtgattcatcattgacttacatactcaacaatatcagcaggcagctcctctgcacaagagactaaactttcagaacacagacaaaggggctggctttgaacctaaattcagaatttctcattattttgtctctctccctcaaaaacaaaaacaaacaaaaaaaaaagagaaactactgttagttaatgcaatgttaatagaactgtagatcaagatttgacacaagaaaagtgaaattctacagggaaactgaaaaataattgaagtcttttttcatcatctttaaacacatggagttcmttgcacagacttagtgccattaattgatcatgtatgcattcacacatttttttttttgtttgtttcctgttgtctattactgcaactctaccaatctcctccttcttccagtgaactctacctcacatcagctctctctagttaatcaacatgtgcatcagtccaaaagatagggcaatgacaaagactataggaaacaacttgctaggtataaaattactttcacccagttaataatacctttctctgctgtataacatcatttgatgagtcaattcaatgcacatgttgccaagagat

SEQ ID NO: 9142 - DNA, 600 bp, Chicken  19866894204425_3
ctctgcacaagagactaaactttcagaacacagacaaaggggctggctttgaacctaaattcagaatttctcattattttgtctctctccctcaaaaacaaaaacaaacaaaaaaaaaagagaaactactgttagttaatgcaatgttaatagaactgtagatcaagatttgacacaagaaaagtgaaattctacagggaaactgaaaaataattgaagtcttttttcatcatctttaaacacatggagttcmttgcacagacttagtgccattaattgatcatgtatgcattcacacamttttttttttgtttgtttcctgttgtctattactgcaactctaccaatctcctccttcttccagtgaactctacctcacatcagctctctctagttaatcaacatgtgcatcagtccaaaagatagggcaatgacaaagactataggaaacaacttgctaggtataaaattactttcacccagttaataatacctttctctgctgtataacatcatttgatgagtcaattcaatgcacatgttgccaagagatgtttcttgtgagtactttgaggatggagctataggaaaggaggtaga

SEQ ID NO: 9143 - DNA, 600 bp, Chicken  19866894204432_1
gattttttttttcctaataaagtgaacaattcttctttctatggattgtcaccagaaagtgcagctttccattttagtttgagacttgtgagaattaatagttttacttaaaatcaatttagaatggtgggcaaggacaaaaacatgctgggttcagcacagcatgaagaatacctgccccaaggagatgcttttgctcgtctttgctcctgcctttttctttttatttcactaatcaatcaccaatggccattatgtcagcttggcttcttctgacatacatacactggtataattacyggtatgaatggatgactggctgaggaggggatctgggtgttgtctctggagcctggcctttctctcccattgtatgcgccttcctctcttgccgacagctgatcagacagtggtgtggaatgcgctatttaatttctctgcaatgaatccaccagctctgccctgtcattgcaattagtcataccctctcggtgcattataatcctcacatatcacatctcaccgagtcgttcctatagtgttaggaacaaagctcgctcacgaacgtcaccaaagagaagcatccagaggaagctgctg

SEQ ID NO: 9144 - DNA, 600 bp, Chicken  19866894204432_2
ggatgactggctgaggaggggatctgggtgttgtctctggagcctggcctttctctcccattgtatgcgccttcctctcttgccgacagctgatcagacagtggtgtggaatgcgctatttaatttctctgcaatgaatccaccagctctgccctgtcattgcaattagtcataccctctcggtgcattataatcctcacatatcacatctcaccgagtcgttcctatagtgttaggaacaaagctcgctcacgaacgtcaccaaagagaagcatccagaggaagctgctgctgtgcacygtgattggtgagaatctccatatacaacaattttatccaaaattattccatacttaaaaattaagaatatgccagtgcctttgtaaactcaggactaaaagtacccagtgcccgttctgagctgggcacaaagtatgacttgtcaacaggtagaaacagtgcccagccgtgactgaggctcctgcacctcatctcactcaaagggaaaacaatgtgagtttcacatcagcataaatcccaccatgccatacttcatagactcagtccacagtgcacaacactgaactcaaggcaagagca

SEQ ID NO: 9145 - DNA, 600 bp, Chicken  19866894204433_1
tccatccagttgggaaagtgatgcctttctgactgtgacatttcttttgatttcaggtctctgctcagtgcactacgaaaacatttaattggttattgtcagacaatggtgaaaaccgatgccagggaaaaacaaacagggaagtttcccagtacctttagggccatgatgcgaccactgtatttctacttctaacacaccactttgttgctgtgaatcattctcacagccacaatgactcatataggtaaaaaataaaataaaataaaaatgtcagaggagcaggttgtgcactaattrtaatacatgtattatctgtcaccagaaatcwctgtaatgaatgtctggaattgggagaacttttgttacccactgagtctagaattttattttaagatctgtggtaaagtacttagattaaatacttctctcacaacataaaccataacttgtgtttataatttagcaacaaagaatcatagaatcatagaatctcaaggttggaaaggacctacaagatcatctagtccaaccatcctcccactaccattgctaccacaagccactaaaccatatctcatagctcctcatccagacacc

SEQ ID NO: 9146 - DNA, 600 bp, Chicken  19866894204433_2
actgtgacatttcttttgatttcaggtctctgctcagtgcactacgaaaacatttaattggttattgtcagacaatggtgaaaaccgatgccagggaaaaacaaacagggaagtttcccagtacctttagggccatgatgcgaccactgtatttctacttctaacacaccactttgttgctgtgaatcattctcacagccacaatgactcatataggtaaaaaataaaataaaataaaaatgtcagaggagcaggttgtgcactaattrtaatacatgtattatctgtcaccagaaatcwctgtaatgaatgtctggaattgggagaacttttgttacccactgagtctagaattttattttaagatctgtggtaaagtacttagattaaatacttctctcacaacataaaccataacttgtgtttataatttagcaacaaagaatcatagaatcatagaatctcaaggttggaaaggacctacaagatcatctagtccaaccatcctcccactaccattgctaccacaagccactaaaccatatctcatagctcctcatccagacacctcttgaacacggccaaggatggcaactccac

SEQ ID NO: 9147 - DNA, 600 bp, Chicken  19866894204434_1
tataaggcccgtaggtcacctgacctgggtcttccctttcttctcgtctcgtcgtgctcgctttcagatcgtctcactgctgctcccaactgaacgcaaggcttcagtattagtgtaaggcctttagctctcggacaatctttctctcaaaattatatttgattttattaataattatattgaattatattgtattatagtgtgttatcacgcattccgatactatatttagtaaattagtttgtttctcctcagatcgctgccactgtttttttaattattctttcttgtgggggggtyccctgtttcctttttctggaggcgtgaattttgcaaaaaaaaatccctccgccccactagtcatggaaccaggctggaccagcccgtaaaccgtcgacaatatagttccctctttttcagttcaggctactaacagagccatacatgccaaagaggtccctttaccactatcaaccagaatctaatttttgctactgggtataatagagaaggggaggcagtttgtggaaagcataagaccttcccagtaggttctccaggggatgtaagactgtgactgtgttccagcacatactgatg

SEQ ID NO: 9148 - DNA, 600 bp, Chicken  19866894204437_1
attcagaaactgcaaaatttcatgtttaaacatttaaacgagaatacatgaagttgggatcaccatgcttcaacttactcatctacaagttggtagctactcaaagatgctttttagttatttgagggggagatttcccagtagttaaaataattgtcttcatctggctgatttctgaaaagattacacattaccttctgctgctgccttctctctctgaagcgtagggggcattggacacctcgcttgcagaagtaaggttttaggcaaggtgaattttgcattgtgtacaaaatgtcraatgcaagttttgactgttaaaataagtataggtaggtaccattatgtaactgtgcaataccgtcatgtggcagaaagtaatggagagacccatatattgtagtatcaggaagacttgcaaagtctgcttggtttcagagtctgcgtgcagtgtgcttctgcagctatcagtgatgagcattactagtattcttatttttcttccagtgagaggtatgagccagtgaataataaaaaataacatatagttctgaaaattttccttacatactatttgtgctgacaaaataagttaaaaga

SEQ ID NO: 9149 - DNA, 600 bp, Chicken  19866894204437_2
aagtaatggagagacccatatattgtagtatcaggaagacttgcaaagtctgcttggtttcagagtctgcgtgcagtgtgcttctgcagctatcagtgatgagcattactagtattcttatttttcttccagtgagaggtatgagccagtgaataataaaaaataacatatagttctgaaaattttccttacatactatttgtgctgacaaaataagttaaaagaacctaaatctagagcggagaacaggcaccttgcaagtgtttttctcattgctgacatagagtgtcttacattcaygtagattttaattgtatgttttaacagaaactggaaaatgaacaaattataatggtagatgttagaaaaggtagtatctcttggaagcagcagaaaaaaaaggtaatgaagctgaccttcctggatatattataagccagcttagcctgggtaggagtcttcttgtaagataagtgcgtgtgacaggaagtgctaatcgcagttcacgttccaccattgtaagtcctgaccttctgtatgctgcttgtaccagtgatagtgtgtcagcctaatggaatatacgtagctggacagtcattt

SEQ ID NO: 9150 - DNA, 600 bp, Chicken  19866894204438_1
acgttttttaatatggatacctggaggtgcaaatcctctggctgtaaacactgtttattccgtgggtgcggatatgagagtaaacaaagcctgccgttttaaaggtttgctttgtactgtgcggttagggtatgtctcacgagagggaatgttatcttaggctcaaagcaagtgttaaaaagaaagactaatgaagctgttacattgacatgagtgtcagctggaagataagcaggggaatagctttctgctgcagctgagaaaagggaaggaaggactaaacaacagcaatctgctccrgtgtcagcaaaggaaygtatctgtgcagactgttttgatgaactaggaagtaaaggaataattgtggcaaaaattccacagaattctggctttctgtttgcttgacwgattaactctctaacactctctaacttttgtttgggcagcactgtgactgccttgtttgcagcaagtttggaaagcttggtttgggaaacctttttcttctttcgtcttactatgatctgttggaccgcatgtttcaggaagaaattgtttactgtgagggtggtgagacactggcacaggttgcccagagtt

SEQ ID NO: 9151 - DNA, 600 bp, Chicken  19866894204438_2
atacctggaggtgcaaatcctctggctgtaaacactgtttattccgtgggtgcggatatgagagtaaacaaagcctgccgttttaaaggtttgctttgtactgtgcggttagggtatgtctcacgagagggaatgttatcttaggctcaaagcaagtgttaaaaagaaagactaatgaagctgttacattgacatgagtgtcagctggaagataagcaggggaatagctttctgctgcagctgagaaaagggaaggaaggactaaacaacagcaatctgctccrgtgtcagcaaaggaaygtatctgtgcagactgttttgatgaactaggaagtaaaggaataattgtggcaaaaattccacagaattctggctttctgtttgcttgacwgattaactctctaacactctctaacttttgtttgggcagcactgtgactgccttgtttgcagcaagtttggaaagcttggtttgggaaacctttttcttctttcgtcttactatgatctgttggaccgcatgtttcaggaagaaattgtttactgtgagggtggtgagacactggcacaggttgcccagagtttgtggatgcccctccc

SEQ ID NO: 9152 - DNA, 600 bp, Chicken  19866894204438_3
tgctttgtactgtgcggttagggtatgtctcacgagagggaatgttatcttaggctcaaagcaagtgttaaaaagaaagactaatgaagctgttacattgacatgagtgtcagctggaagataagcaggggaatagctttctgctgcagctgagaaaagggaaggaaggactaaacaacagcaatctgctccrgtgtcagcaaaggaaygtatctgtgcagactgttttgatgaactaggaagtaaaggaataattgtggcaaaaattccacagaattctggctttctgtttgcttgacwgattaactctctaacactctctaacttttgtttgggcagcactgtgactgccttgtttgcagcaagtttggaaagcttggtttgggaaacctttttcttctttcgtcttactatgatctgttggaccgcatgtttcaggaagaaattgtttactgtgagggtggtgagacactggcacaggttgcccagagtttgtggatgcccctccctggaagcattcaaggccaggctggrtgggtctttgaggaacctggtctagagggaggtgtccctgcctatagaagggggttggaactaggt

SEQ ID NO: 9153 - DNA, 600 bp, Chicken  19866894204438_4
actaggaagtaaaggaataattgtggcaaaaattccacagaattctggctttctgtttgcttgacwgattaactctctaacactctctaacttttgtttgggcagcactgtgactgccttgtttgcagcaagtttggaaagcttggtttgggaaacctttttcttctttcgtcttactatgatctgttggaccgcatgtttcaggaagaaattgtttactgtgagggtggtgagacactggcacaggttgcccagagtttgtggatgcccctccctggaagcattcaaggccaggctggrtgggtctttgaggaacctggtctagagggaggtgtccctgcctatagaagggggttggaactaggtgatcttaagggtcccttccaacccaaaccactctatgattctgtgttgcattttgtgcaagtttgcttcctcacaaaggaattgctctggaatcacactttttttttttttaaataaaaacgtggttctcatcctgttttctttttcttagacattatcctgtttatttataactttattcatctaatgcattctaacagttcactatgaataaagatgtaagctggtgagttg

SEQ ID NO: 9154 - DNA, 600 bp, Chicken  19866894204443_1
cctggctcccaaagggatcagagtgacactgcaagtttacagctgtgacggcagtgatgagatgtactcctctttgcctgtgataataaaaatacaagatgcattgcgctgttcggtgtgcgttgttacttatttgtaacttaagagtgctcatgcagcaataaatatctgctctttaattagctggaaaattctcagagggaaaagtgctattttgaataagaaaatcaagggatcttgtatttgagctcaatttatggatgtattcctatttggtgaggtatgaaatcgaactcagcyttatttgaaatcaaatgtactgcaaagatgttcagaacttttctaaagactccacactctgaactggtagctgtgatagagctccttgtcattagcaaggcagcactaactaaaaattgagctgcatagctttaatttatgattgctcacaaagtcaatgtacgagaagaaactctgtatttcacaaaaggttttaattgcaggaggtcttaaagcggaaagtcttttttgctacacagcactcaaagcaccattttgctgtggatccaagctaaaattcgtgaccttttgaaatcaagc

SEQ ID NO: 9155 - DNA, 600 bp, Chicken  19866894204443_2
aatcaagctgtgtcttttcttttggtgcagtgctgctgcagatagccttgggcacagtgcatttgtgcacaatggagtggaagtggtaggctgtaaagatgcgcagttacgatctctatagaaaagaactgatataattgtgtcagtgtggtgcttcctctgggtaggcaaaatgttggctaaattgtggtagagcatctccacagcttcttgtgcctacccatgtgcaggaccttgcactgggccttaccaaacttcatgaggttggcatgggcccacttctcaagcctgtccaggtcmctctggatggcatccctgccctctagtgtgtcaactgcaccactcagcttggtgtcatctgcaaacttgctgagggtgcactcgatcccactgtctgtgtcacctacaaagatgttaaataacaccggtcccagcaccaatccctgtggaacaccactcgtcatcgacctccacttggagacctcctttcagggagatgtaaagagtgataagatctcccctgagccacttctccagactgtgcaatccctgctccctcagccactcttcataagaatggcatttgaattttccaagctt

SEQ ID NO: 9156 - DNA, 599 bp, Chicken  19866894204456_1
  misc_feature (1)..(118): n is any nucleotide
nnnnnnnnnnnnnnnnnnnnnnnnnnnnnnnnnnnnnnnnnnnnnnnnnnnnnnnnnnnnnnnnnnnnnnnnnnnnnnnnnnnnnnnnnnnnnnnnnnnnnnnnnnnnnnnnnnnnnntcagcctgcaaaaatgctgcgagctgctgcggagtcatttctgttctttgcactcagcaggaagggagacgaagcggggaggggatgtgggtcaccctgtggggtcagtgctccgtgatgcattgctgcattcactggcagcaatgcactgtgcatgcgcctcggcagagcaaccacaaggscaaatctgagggagggtggtgcaggaggctcttcatcctgcaggtggtcagtgagtgtagaatcataggatcaaataagattggaaagaccaataagatgatccaatccaaccatcagcccatgatccagtgatggcagtgagggctccagtggtctcagcacgacagtcccccatgccacgggtagcagctgggtctggaagagacctcattgtcactacccagagcccacctacatgggagagtcctctccctccccgcattatgatctgggaagagcacggagcagccaatcccca

SEQ ID NO: 9157 - DNA, 600 bp, Chicken  19866894204456_2
gaaagaccaataagatgatccaatccaaccatcagcccatgatccagtgatggcagtgagggctccagtggtctcagcacgacagtcccccatgccacgggtagcagctgggtctggaagagacctcattgtcactacccagagcccacctacatgggagagtcctctccctccccgcattatgatctgggaagagcacggagcagccaatccccagagatggtggaaagaagaatgatttctcagggcctcaggggctccacagagatccgtgcaatgagtctcatggcttttcagctygcatcagctttaccatcacggtaactgcaagtgcacagatctggggtggcacttttagttctttctgacggagtttttttgggagggtttcagatcgaaaaaatgaaaatttaaaaaatggttatttctggaaaaaaaaaaaatcccaatcaaacttggcagtggaaaagcaatatttcataaaaacgggatattttgaaagaaatctctttatttccaaggaaaacagcacttgttcagaataattgtgtgggattacttcagagcaggttccttattaaattgtattgaagaaatgaa

SEQ ID NO: 9158 - DNA, 600 bp, Chicken  19866894204458_1
acctcaatgtcactatggacttcactgccacggacaggatgcaaagtatttgttagcaataggcaggcaactgaaattgaaagtaagcaaagaaccagagctcttgcttgagtacatctttgacagagttcacagatgtagaagttgcttaaactgtccgaagtgggtcattctgaagagcctcagaaaggaggcaagtcaccagtttttccccattacagagtgatacagagaatgagaactacatttggttcaccagcaatttgtaactcctgtccagagcagggtatgctaataaawcgtcaactttcattacagcaaaatatgcctaagcaatgcagagaaagcatgtctgctatgaatgacactattaatgaaatagtactagggatgctattgttccacagtgagaaaaaaagactgttttaaattggcaatttctacttctcgaagtaaagcaagattacttcatctctgtaagtattaacaatgggttcatacgagattcttaaacctcaaataactaccttttcaaatcccagtcagcaacatggccaaaaccccatacaaacactgaggtcctcgggattgcagtgcagt

SEQ ID NO: 9159 - DNA, 599 bp, Chicken  19866894204459_1
  misc_feature (1)..(176): n is any nucleotide
nnnnnnnnnnnnnnnnnnnnnnnnnnnnnnnnnnnnnnnnnnnnnnnnnnnnnnnnnnnnnnnnnnnnnnnnnnnnnnnnnnnnnnnnnnnnnnnnnnnnnnnnnnnnnnnnnnnnnnnnnnnnnnnnnnnnnnnnnnnnnnnnnnnnnnnnnnnnnnnnnnnnnnnnnnnnnnnntgcccagagcactttttacaggttgtcttccagtcttaggagtatatgaagggctagactactactcctcagtggagtttatggcaaatccattttatcatacaaacacaatcgcaataaattrtaaaatttttaaagttgcaggtttgtaaattgtgcatattgagtgcatcagccacagttagagggttagaaatctttcaggaaaaacaaaatctttaacctatatctgagaggaaacccagctgcttctctttgtttaccaataatatgcagttttaataagttgcctgccctgtcatgggctaacatcaaaccttgcacttaaagattgaatgtacgacatacggcatgtaagtaatgagatggggttttgttcatcctttcagttaattctgtgtgttcttttttttcccccttgtg

SEQ ID NO: 9160 - DNA, 600 bp, Chicken  19866894204461_1
ccttatttaagttccttaatttatttgctgataaattcatatgatttatagctaaagatggactcatttttaaaaagttccttagtggaactgaaggctgtttatgaatagctagaatgtttaaatcagcgcctaaatagatcttcttggaattttactacaaagaaacctattatagaattttgtatcatgaacattatttctccctttccgtctaacagtgaattaaggtttataattcttgctacctctgttcctcagcagtatgtcacagaccatgtgtctcatttcttccaggcrctctcagcaaggtatgatgtatgtgwgagcagtgagaccaattatctgaattgttctgccacttctggaactggcaaaagcatgattttgcttgaatctaaaaagctcattgtttgagaaagttgcatttctccacagacaggagaaagaaattgagagttggtggtcagaactggaagtttggaggaaataacaaagatagagtggaagttggatagaaaataaaactgaaagtttgttttcatggtgaaagaggtctgtgaaggcagcagccagggaaggcacagtcccagaccctgg

SEQ ID NO: 9161 - DNA, 600 bp, Chicken  19866894204461_2
gctgataaattcatatgatttatagctaaagatggactcatttttaaaaagttccttagtggaactgaaggctgtttatgaatagctagaatgtttaaatcagcgcctaaatagatcttcttggaattttactacaaagaaacctattatagaattttgtatcatgaacattatttctccctttccgtctaacagtgaattaaggtttataattcttgctacctctgttcctcagcagtatgtcacagaccatgtgtctcatttcttccaggcrctctcagcaaggtatgatgtatgtgwgagcagtgagaccaattatctgaattgttctgccacttctggaactggcaaaagcatgattttgcttgaatctaaaaagctcattgtttgagaaagttgcatttctccacagacaggagaaagaaattgagagttggtggtcagaactggaagtttggaggaaataacaaagatagagtggaagttggatagaaaataaaactgaaagtttgttttcatggtgaaagaggtctgtgaaggcagcagccagggaaggcacagtcccagaccctgggtacacaccaggacccttcatgcaga

SEQ ID NO: 9162 - DNA, 600 bp, Chicken  19866894204464_1
tggtaattacatccttcccagatagtagccgtagtcattgatcatactaataccattataactgattcctgtaagtcaccttttaaagacactttctatggtttctttccccctatatcttcttcctctgcagtcacaggataagactttttctgtctatccttcatctgattgattagaaatgccacatgcttcctttacgtatggcctggtaatatacacatcacatttcttccctcgggatcttaatcacaagtaatggcctttagcttttctcattagcaaaatggaaaagcaccrtacccaatccattagaaatgcagcattgtaatatgagcttatagaaaaatggctgcatgccagcggacatggagtgagtttacctgaaaagattttcagaaaaaaatatatatataaaaaagaagtcatcctttctgtctggcaagcaaatgttttgagccataacttttcacacctgcctgtcaggcattttgctgttgctccttaagtgctgtttggacacctttgtcrtatamagggcactttatgaagaggaaatagagacgtttatacatacattaatgtcttccccagtgttga

SEQ ID NO: 9163 - DNA, 600 bp, Chicken  19866894204464_2
cttccctcgggatcttaatcacaagtaatggcctttagcttttctcattagcaaaatggaaaagcaccrtacccaatccattagaaatgcagcattgtaatatgagcttatagaaaaatggctgcatgccagcggacatggagtgagtttacctgaaaagattttcagaaaaaaatatatatataaaaaagaagtcatcctttctgtctggcaagcaaatgttttgagccataacttttcacacctgcctgtcaggcattttgctgttgctccttaagtgctgtttggacacctttgtcrtatamagggcactttatgaagaggaaatagagacgtttatacatacattaatgtcttccccagtgttgattctctgtgagggttatctttctcatattccatctccagtcagaatttgaggtggggaggaagttggagagattttgttgttgtgctttgtttttcttttattttcatattctgygaacacagcaatgagaacaaccgtaacagcttcctcatctttcaggcatttacctgagagtactgctatgcattttttagccatacctgaaactattcataatcactacaccaaga

SEQ ID NO: 9164 - DNA, 600 bp, Chicken  19866894204464_3
ctcgggatcttaatcacaagtaatggcctttagcttttctcattagcaaaatggaaaagcaccrtacccaatccattagaaatgcagcattgtaatatgagcttatagaaaaatggctgcatgccagcggacatggagtgagtttacctgaaaagattttcagaaaaaaatatatatataaaaaagaagtcatcctttctgtctggcaagcaaatgttttgagccataacttttcacacctgcctgtcaggcattttgctgttgctccttaagtgctgtttggacacctttgtcrtatamagggcactttatgaagaggaaatagagacgtttatacatacattaatgtcttccccagtgttgattctctgtgagggttatctttctcatattccatctccagtcagaatttgaggtggggaggaagttggagagattttgttgttgtgctttgtttttcttttattttcatattctgygaacacagcaatgagaacaaccgtaacagcttcctcatctttcaggcatttacctgagagtactgctatgcattttttagccatacctgaaactattcataatcactacaccaagagtgag

SEQ ID NO: 9165 - DNA, 559 bp, Chicken  19866894204464_4
aaaaaagaagtcatcctttctgtctggcaagcaaatgttttgagccataacttttcacacctgcctgtcaggcattttgctgttgctccttaagtgctgtttggacacctttgtcrtatamagggcactttatgaagaggaaatagagacgtttatacatacattaatgtcttccccagtgttgattctctgtgagggttatctttctcatattccatctccagtcagaatttgaggtggggaggaagttggagagattttgttgttgtgctttgtttttcttttattttcatattctgygaacacagcaatgagaacaaccgtaacagcttcctcatctttcaggcatttacctgagagtactgctatgcattttttagccatacctgaaactattcataatcactacaccaagagtgaggacaagactgattaagagttttttaccaatgaagtagattgtttttcacttggtctggacttgattagccctaaaacaggaaaaagtagaaaaaaaacccatactgtttaaattcttaccctggcatttgtgcttatg

SEQ ID NO: 9166 - DNA, 600 bp, Chicken  19866894204468_1
aaaacaaaaaacagcatcaaaagcttaccatatggaaattagaaataaaaacacccatacacaccttctgtcctatttcaatttgtgaatctgaaaacacctacctatcagtgtcatcatgtcaggtttcttgtcactgactacacttttaaggacctcatcagcattctgaaaccagaaatcctagcttctacctatagaagaatcacaagtacttttatgatccattctgaaaataagaagataaaggaaaaaagcctcatgtgacatcttagaatctttatcaccaggaagacgtgrcaaaaggcatgggaagagwgatgtcttataggaggcaaagcacaactttaccaaagaggatgaaaagctaaggaaactaccartcttccctctggcatagcagacttctagatccacataacatttcaaaacttaatacccttagcatcacctcactgcttggcctccatctgactccattctgtacagaggagcaataacttctatgytagcagaaattagacccgaagggcttcctagtgtcctggaaactascaaaaaaatgtaactaactatgcactcttacactctcttctaaca

SEQ ID NO: 9167 - DNA, 600 bp, Chicken  19866894204468_2
aaagcttaccatatggaaattagaaataaaaacacccatacacaccttctgtcctatttcaatttgtgaatctgaaaacacctacctatcagtgtcatcatgtcaggtttcttgtcactgactacacttttaaggacctcatcagcattctgaaaccagaaatcctagcttctacctatagaagaatcacaagtacttttatgatccattctgaaaataagaagataaaggaaaaaagcctcatgtgacatcttagaatctttatcaccaggaagacgtgrcaaaaggcatgggaagagwgatgtcttataggaggcaaagcacaactttaccaaagaggatgaaaagctaaggaaactaccartcttccctctggcatagcagacttctagatccacataacatttcaaaacttaatacccttagcatcacctcactgcttggcctccatctgactccattctgtacagaggagcaataacttctatgytagcagaaattagacccgaagggcttcctagtgtcctggaaactascaaaaaaatgtaactaactatgcactcttacactctcttctaacattaaagatatatacactca

SEQ ID NO: 9168 - DNA, 600 bp, Chicken  19866894204468_3
tgtgaatctgaaaacacctacctatcagtgtcatcatgtcaggtttcttgtcactgactacacttttaaggacctcatcagcattctgaaaccagaaatcctagcttctacctatagaagaatcacaagtacttttatgatccattctgaaaataagaagataaaggaaaaaagcctcatgtgacatcttagaatctttatcaccaggaagacgtgrcaaaaggcatgggaagagwgatgtcttataggaggcaaagcacaactttaccaaagaggatgaaaagctaaggaaactaccartcttccctctggcatagcagacttctagatccacataacatttcaaaacttaatacccttagcatcacctcactgcttggcctccatctgactccattctgtacagaggagcaataacttctatgytagcagaaattagacccgaagggcttcctagtgtcctggaaactascaaaaaaatgtaactaactatgcactcttacactctcttctaacattaaagatatatacactcaattcgtcttaacttaaaagtaactttgctccctattcagccctaaaagaaaacacattcttcct

SEQ ID NO: 9169 - DNA, 600 bp, Chicken  19866894204468_4
aagtacttttatgatccattctgaaaataagaagataaaggaaaaaagcctcatgtgacatcttagaatctttatcaccaggaagacgtgrcaaaaggcatgggaagagwgatgtcttataggaggcaaagcacaactttaccaaagaggatgaaaagctaaggaaactaccartcttccctctggcatagcagacttctagatccacataacatttcaaaacttaatacccttagcatcacctcactgcttggcctccatctgactccattctgtacagaggagcaataacttctatgytagcagaaattagacccgaagggcttcctagtgtcctggaaactascaaaaaaatgtaactaactatgcactcttacactctcttctaacattaaagatatatacactcaattcgtcttaacttaaaagtaactttgctccctattcagccctaaaagaaaacacattcttcctggcataataacaaagtgacagaagaccttgcaaacagctccctgcatctcaactgtgggagtgacagaaggcaactggcatactgacawcataggaagattttcagcaagggaataagccacttgc

SEQ ID NO: 9170 - DNA, 600 bp, Chicken  19866894204468_5
agcctcatgtgacatcttagaatctttatcaccaggaagacgtgrcaaaaggcatgggaagagwgatgtcttataggaggcaaagcacaactttaccaaagaggatgaaaagctaaggaaactaccartcttccctctggcatagcagacttctagatccacataacatttcaaaacttaatacccttagcatcacctcactgcttggcctccatctgactccattctgtacagaggagcaataacttctatgytagcagaaattagacccgaagggcttcctagtgtcctggaaactascaaaaaaatgtaactaactatgcactcttacactctcttctaacattaaagatatatacactcaattcgtcttaacttaaaagtaactttgctccctattcagccctaaaagaaaacacattcttcctggcataataacaaagtgacagaagaccttgcaaacagctccctgcatctcaactgtgggagtgacagaaggcaactggcatactgacawcataggaagattttcagcaagggaataagccacttgcataagcaacaatgggctttcccaaccctctcctcctattaccatga

SEQ ID NO: 9171 - DNA, 600 bp, Chicken  19866894204468_6
gactccattctgtacagaggagcaataacttctatgytagcagaaattagacccgaagggcttcctagtgtcctggaaactascaaaaaaatgtaactaactatgcactcttacactctcttctaacattaaagatatatacactcaattcgtcttaacttaaaagtaactttgctccctattcagccctaaaagaaaacacattcttcctggcataataacaaagtgacagaagaccttgcaaacagctccctgcatctcaactgtgggagtgacagaaggcaactggcatactgacawcataggaagattttcagcaagggaataagccacttgcataagcaacaatgggctttcccaaccctctcctcctattaccatgaagtaacctgctgtagcagaaatgctgagtcacagcctgaagcagtgattgagcacctggtgggaaggcagggccaacccaggggagctcaggtgcgtgcaatgtacctcagtgaccagaagggttggagccaggatccaccccttcccagatctcatttaagggttgcagtggaggtaagggtatctgtctggagatctctttgtacctgatgcctt

SEQ ID NO: 9172 - DNA, 600 bp, Chicken  19866894204477_1
gctccacaccgaactgcccgaaagcaaaccccacgtttgagggatttgtccaaaggcttcctgcagcttggggctgtgagcaattctgaaagcaggagcatcacggcaagcatccctgtcccccacttattttccattggatttcaaaagacgtaccttgcaattactgcctattactgaaaatctttcatttttagaaggccagtaacggcttgcagtaatgtaagccaagaagcacacctgaaggaggaagtcactggctcatcacttccttcccagtgggtaccacttgcacaaacrcacagcacacaccattgctttcagctgctgtggcacatgtggttctgctcataccaggcactcagtgctgtacagccttcasagtttgctctgcaaccagactgtcccattgttagtaaaacaggcttcattcccacatattcttctctaaagggaaactcaagaacccgagtcataggcaaaaattcacattggctcactgcaatgtaatttagaaactcaaggcaaggtctctcaatttgctgtagctggcacagctagctgggagctcttgaaattatgcaaaccaaaaaatcaacc

SEQ ID NO: 9173 - DNA, 600 bp, Chicken  19866894204477_2
attctgaaagcaggagcatcacggcaagcatccctgtcccccacttattttccattggatttcaaaagacgtaccttgcaattactgcctattactgaaaatctttcatttttagaaggccagtaacggcttgcagtaatgtaagccaagaagcacacctgaaggaggaagtcactggctcatcacttccttcccagtgggtaccacttgcacaaacrcacagcacacaccattgctttcagctgctgtggcacatgtggttctgctcataccaggcactcagtgctgtacagccttcasagtttgctctgcaaccagactgtcccattgttagtaaaacaggcttcattcccacatattcttctctaaagggaaactcaagaacccgagtcataggcaaaaattcacattggctcactgcaatgtaatttagaaactcaaggcaaggtctctcaatttgctgtagctggcacagctagctgggagctcttgaaattatgcaaaccaaaaaatcaaccacagaagtaaaacaaccctgygaaaatgtatctgggtttggggtcactgaccagagctgatgaacatagytgtgaccatgcc

SEQ ID NO: 9174 - DNA, 600 bp, Chicken  19866894204477_3
cagctgctgtggcacatgtggttctgctcataccaggcactcagtgctgtacagccttcasagtttgctctgcaaccagactgtcccattgttagtaaaacaggcttcattcccacatattcttctctaaagggaaactcaagaacccgagtcataggcaaaaattcacattggctcactgcaatgtaatttagaaactcaaggcaaggtctctcaatttgctgtagctggcacagctagctgggagctcttgaaattatgcaaaccaaaaaatcaaccacagaagtaaaacaaccctgygaaaatgtatctgggtttggggtcactgaccagagctgatgaacatagytgtgaccatgcctggccatgctgagcagagcaaaaaaagagtaagaacagaaggactgaaattgtgcaatttttgctgtagtttacctatactctttcgtttgttctaatggacatttcaggagcataaaacgaagacaacgtgtcaccttgaatgcaaatgtatacaagcttaccatttaagttacaaatctattctggtcttcatcacttacaggattgctaggcacatctctacctcaaaataatact

SEQ ID NO: 9175 - DNA, 600 bp, Chicken  19866894204477_4
tacagccttcasagtttgctctgcaaccagactgtcccattgttagtaaaacaggcttcattcccacatattcttctctaaagggaaactcaagaacccgagtcataggcaaaaattcacattggctcactgcaatgtaatttagaaactcaaggcaaggtctctcaatttgctgtagctggcacagctagctgggagctcttgaaattatgcaaaccaaaaaatcaaccacagaagtaaaacaaccctgygaaaatgtatctgggtttggggtcactgaccagagctgatgaacatagytgtgaccatgcctggccatgctgagcagagcaaaaaaagagtaagaacagaaggactgaaattgtgcaatttttgctgtagtttacctatactctttcgtttgttctaatggacatttcaggagcataaaacgaagacaacgtgtcaccttgaatgcaaatgtatacaagcttaccatttaagttacaaatctattctggtcttcatcacttacaggattgctaggcacatctctacctcaaaataatactaaaagtatcctaaaaatcatttgaacaagcatattagtaacaatcaagt

SEQ ID NO: 9176 - DNA, 600 bp, Chicken  19866894204478_1
agcttcggtaatagacatttattttaaaagacaagctcagaaaagagactttcttggctttttctaaagatgggtctgtaagtacattttcagaagaatggaaggtcacgctaaagatgacatatcaaaaacagccttttcactgctaccacagaggcttacaatgcaatccatatttagtgctgctcaggcctgacatgtcatgggaataaaaggtttgacgatgaacttgggtgggttaattcaggtgtcccatccatgctgttccggatgcacaagcactgccccagcaactgctcytctacaccccaaattgcctctctgcccctctttgagtagagaagaaacatttctcctgttgccatatgtaaaacatcagtccagctgaaactttctagaccccagttgtgcattagctctataaaaccgttttctaatgctcactgctaatatcacatcaacgcttttgctgtcctgcctgaaaaagcaagacaaatcacctaaatctcttgtacattccatggctactttattgctgaggtttagaaatgttggtgtgaatggagtcctgccactgagtttggagcagtacaaaggaac

SEQ ID NO: 9177 - DNA, 599 bp, Chicken  19866894204483_1
  misc_feature (1)..(143): n is any nucleotide
nnnnnnnnnnnnnnnnnnnnnnnnnnnnnnnnnnnnnnnnnnnnnnnnnnnnnnnnnnnnnnnnnnnnnnnnnnnnnnnnnnnnnnnnnnnnnnnnnnnnnnnnnnnnnnnnnnnnnnnnnnnnnnnnnnnnnnnnnnnnnnntgttgggcttgattcattacagttcagctttagctttacgctggtgaaattcaactgaataaaattacagtgaagtgaacctaaaatacttcagtaacgtgcttaggtatgttgatggaaaataaaatgagtcagagaagcacaggaactttgcagrgtaattataaatattacaaagcagaagtttcaggtgctgagatttctcacagaacttcaatactaacctctttcttgcttctgacatgtttcatctcttttgctcagcctactgcatctgaataatgaaatagtgactctgacactgaagtgctgatttactcttctcaacatctcacgcattttcctcaattttgcatctgttttcttgctggcagcaacctcttccatcaaaactgtcagtgttttttagagctatgaatttaaggaaaaataggraaaaaaaatmttcaaaacctc

SEQ ID NO: 9178 - DNA, 600 bp, Chicken  19866894204483_2
agaagcacaggaactttgcagrgtaattataaatattacaaagcagaagtttcaggtgctgagatttctcacagaacttcaatactaacctctttcttgcttctgacatgtttcatctcttttgctcagcctactgcatctgaataatgaaatagtgactctgacactgaagtgctgatttactcttctcaacatctcacgcattttcctcaattttgcatctgttttcttgctggcagcaacctcttccatcaaaactgtcagtgttttttagagctatgaatttaaggaaaaataggraaaaaaaatmttcaaaacctctgaagtgaatttctttacctcagaagcacttcatgtggtagttttctatcaagatatatagcagagatagctgaaaaagaagaatggcaatttagaagatcactagaaagatacttgctgcctgctctcagcaaggtgtcagtgttgccagctacaatgctttggggaaggagccattatgctgtctgtgtcacaagaggacaaaaagtggggaagatttaggattgaaaaggggaactgagctaaatgccacttctgtaatatacctgtcagcaagct

SEQ ID NO: 9179 - DNA, 600 bp, Chicken  19866894204483_3
gaactttgcagrgtaattataaatattacaaagcagaagtttcaggtgctgagatttctcacagaacttcaatactaacctctttcttgcttctgacatgtttcatctcttttgctcagcctactgcatctgaataatgaaatagtgactctgacactgaagtgctgatttactcttctcaacatctcacgcattttcctcaattttgcatctgttttcttgctggcagcaacctcttccatcaaaactgtcagtgttttttagagctatgaatttaaggaaaaataggraaaaaaaatmttcaaaacctctgaagtgaatttctttacctcagaagcacttcatgtggtagttttctatcaagatatatagcagagatagctgaaaaagaagaatggcaatttagaagatcactagaaagatacttgctgcctgctctcagcaaggtgtcagtgttgccagctacaatgctttggggaaggagccattatgctgtctgtgtcacaagaggacaaaaagtggggaagatttaggattgaaaaggggaactgagctaaatgccacttctgtaatatacctgtcagcaagctgctcggagga

SEQ ID NO: 9180 - DNA, 600 bp, Chicken  19866894204498_1
cccactagggcaggaaagtgcccatggttgaggcaggacagcatggctgaggctcctcatcagttttaacccaatgaatttctaggcaggcagaaagaaggtgagaagaaacctgcctaaatccaatgacagtaacagaaggaagcagggcaggcgtcacatttggagaatcataattcaatggcttacttcacacggagagggagaaaagaaaatcctggtaatggtctcagccccaaatttgatgaatttatgaaccattcacatcacagcaggttggaagccctgacttcaggaacraccagcaccaggatttcagggaaaattcaaccctccccggaatgtgccccagcttggagataaacatcaccagggacctcttccttggctcagcagaagagtacgataaggaaagatttgctcacgtgcatacttttgagaggtctcagtgtgctcaaacttggctatacttcggtgcttaaatacactccagacctggatggctcaaagggacagcattgtttgaaatctccagacctccaggaaataaatggaaaacttttctactcagcgtagaacaggggtcaagagcagagcatg

SEQ ID NO: 9181 - DNA, 600 bp, Chicken  19866894204501_1
ccactaggaagttaaaactcttcacacagtgagttaagtccactgccaagcccctgtgagaagtcctcacctggtaggaagcgaggggttctgaggaaccagtccagagaaatgaggagctcagagaagtagaataggtacttttaaattctttccatgtctccttaaggatgtaatacgacggaaggtagagagcaaagctatgcgtgtatgatactgcatgtagcagcaatatggattcagaggctatctggagttcaggcacgtttatatgcaccttatctggaagctcagaaatcratgagattgtcgggaaatctcacataggatcacaggtgaaggtctaaagaccttggggaagcacagatacagactaggtagagaatggcttgagagccctgaggagwaggatttgggrgtgtcagttgatgaaagactcaacgtgaaccggcartgtgtgcttgcaacccagaaggccaaccgtatcctgggttgcaacaagagaagggtgaccagcatgttgagggaagcagttctgccgctctgctgtgctctaaggagataccacctgcagtactgcatccagttctggggccccca

SEQ ID NO: 9182 - DNA, 600 bp, Chicken  19866894204501_2
agaaatgaggagctcagagaagtagaataggtacttttaaattctttccatgtctccttaaggatgtaatacgacggaaggtagagagcaaagctatgcgtgtatgatactgcatgtagcagcaatatggattcagaggctatctggagttcaggcacgtttatatgcaccttatctggaagctcagaaatcratgagattgtcgggaaatctcacataggatcacaggtgaaggtctaaagaccttggggaagcacagatacagactaggtagagaatggcttgagagccctgaggagwaggatttgggrgtgtcagttgatgaaagactcaacgtgaaccggcartgtgtgcttgcaacccagaaggccaaccgtatcctgggttgcaacaagagaagggtgaccagcatgttgagggaagcagttctgccgctctgctgtgctctaaggagataccacctgcagtactgcatccagttctggggcccccaacacaagaaggacrtggagttgttggagcaggtccagaggagggccacaaaaatgatcagagggctggagcacctcccctacaaggacaggctgaaagagttggggc

SEQ ID NO: 9183 - DNA, 600 bp, Chicken  19866894204501_3
gctcagagaagtagaataggtacttttaaattctttccatgtctccttaaggatgtaatacgacggaaggtagagagcaaagctatgcgtgtatgatactgcatgtagcagcaatatggattcagaggctatctggagttcaggcacgtttatatgcaccttatctggaagctcagaaatcratgagattgtcgggaaatctcacataggatcacaggtgaaggtctaaagaccttggggaagcacagatacagactaggtagagaatggcttgagagccctgaggagwaggatttgggrgtgtcagttgatgaaagactcaacgtgaaccggcartgtgtgcttgcaacccagaaggccaaccgtatcctgggttgcaacaagagaagggtgaccagcatgttgagggaagcagttctgccgctctgctgtgctctaaggagataccacctgcagtactgcatccagttctggggcccccaacacaagaaggacrtggagttgttggagcaggtccagaggagggccacaaaaatgatcagagggctggagcacctcccctacaaggacaggctgaaagagttggggcttttcatccta

SEQ ID NO: 9184 - DNA, 600 bp, Chicken  19866894204501_4
ccatgtctccttaaggatgtaatacgacggaaggtagagagcaaagctatgcgtgtatgatactgcatgtagcagcaatatggattcagaggctatctggagttcaggcacgtttatatgcaccttatctggaagctcagaaatcratgagattgtcgggaaatctcacataggatcacaggtgaaggtctaaagaccttggggaagcacagatacagactaggtagagaatggcttgagagccctgaggagwaggatttgggrgtgtcagttgatgaaagactcaacgtgaaccggcartgtgtgcttgcaacccagaaggccaaccgtatcctgggttgcaacaagagaagggtgaccagcatgttgagggaagcagttctgccgctctgctgtgctctaaggagataccacctgcagtactgcatccagttctggggcccccaacacaagaaggacrtggagttgttggagcaggtccagaggagggccacaaaaatgatcagagggctggagcacctcccctacaaggacaggctgaaagagttggggcttttcatcctagagaagagaaggcgccgaggggactgagggaaaggc

SEQ ID NO: 9185 - DNA, 600 bp, Chicken  19866894204501_5
aaatctcacataggatcacaggtgaaggtctaaagaccttggggaagcacagatacagactaggtagagaatggcttgagagccctgaggagwaggatttgggrgtgtcagttgatgaaagactcaacgtgaaccggcartgtgtgcttgcaacccagaaggccaaccgtatcctgggttgcaacaagagaagggtgaccagcatgttgagggaagcagttctgccgctctgctgtgctctaaggagataccacctgcagtactgcatccagttctggggcccccaacacaagaaggacrtggagttgttggagcaggtccagaggagggccacaaaaatgatcagagggctggagcacctcccctacaaggacaggctgaaagagttggggcttttcatcctagagaagagaaggcgccgaggggactgagggaaaggctaaatggccttccagtacccaaagacagtctacagaaaagctggggagagactatttataagggctggtagtgacaggacgaggggaaatggctttaaactggaagagggtagatttggactaaatattaggaagtaattctttactgtgagggtggtga

SEQ ID NO: 9186 - DNA, 600 bp, Chicken  19866894204504_1
ggaagctttcatgcataaaatcacaagatcacaagttttcttcagttgtgtcagtagcacagaacctgctgctaaaacaagtgcttgtttttgtcaccaattgtttggtatcctgtaacagcgatagatgagcacttatcatcagcattttaagctgctcattataggagtctgtcccattcgtgttgcactgtgccattttaattagagtgtcctgctgctctgtcaagcatattaaaacactagttacaagtttttccatttactctttacctgaagttatactgtgcatgcaacacrgggattggcaaagaggttacaacctacaatttgtgtgccatgcgagggatgattatgtccagtggatagctgtgaagaaggagataattctcaagcgaaaagcagacactcaatccttctttaccaatgaagaaacatgtacaaggttcacacagctcagctgttggtatatttaaatgaacgctatcttttgaattttccttcctgacttagaaatgcaaaggctctgcctgagaagagaggataaggattgtttgaaaacagtgattactgttctacacatgcaacaaacttttgcct

SEQ ID NO: 9187 - DNA, 600 bp, Chicken  19866894204506_1
tgggataccctaacagggtaagtgagcagccacagtactaggagcttggctcacaaagaggcagtgcaaagcctcagcccagcagctcaggagtgaggaccagacttgccgcatgcacacctgggagctctcctgcagtgtgttagcatgcctgtggtaagccagcaagcctgctggcttgcagaaccatctccgtgcccagacactgcacacagagctgaccacccaccttccctccctccgcccgtaaggagtctctcaaagtcttcatcagtgccttcagggaggcctgacagttcwcttccagccaggacacttccagcccttcctcacctttgttttgttgagctctccatcctcgtcctcatagggaccaccaagaatgaaggagttgggtatgttcagagcaccaggggccatgatattagcaagagaccattttttgggtcggggtaatggttctttttcaccatcaagcttcaggatgccrttcatgaagagcaaggggacttctttctaaagagacacragaatgaaaggacttctgcttccaacgtgagcaagagcaagtgccagctgctccgagctgtgcttaacaaa

SEQ ID NO: 9188 - DNA, 600 bp, Chicken  19866894204506_2
ctccgtgcccagacactgcacacagagctgaccacccaccttccctccctccgcccgtaaggagtctctcaaagtcttcatcagtgccttcagggaggcctgacagttcwcttccagccaggacacttccagcccttcctcacctttgttttgttgagctctccatcctcgtcctcatagggaccaccaagaatgaaggagttgggtatgttcagagcaccaggggccatgatattagcaagagaccattttttgggtcggggtaatggttctttttcaccatcaagcttcaggatgccrttcatgaagagcaaggggacttctttctaaagagacacragaatgaaaggacttctgcttccaacgtgagcaagagcaagtgccagctgctccgagctgtgcttaacaaagcaagaaagcagtgcaggggcctggcttgaagatcacactccaccacatgcatacaaagaagggagaaaaaaaaatcatggcgtggaaaaaaacagccagtttcaacccaaatcttgccatgcagtcctttatctgtgttaaagaaacaccagggctgtagccccacgggcctgctcacttgtgtcatgg

SEQ ID NO: 9189 - DNA, 600 bp, Chicken  19866894204506_3
cttccctccctccgcccgtaaggagtctctcaaagtcttcatcagtgccttcagggaggcctgacagttcwcttccagccaggacacttccagcccttcctcacctttgttttgttgagctctccatcctcgtcctcatagggaccaccaagaatgaaggagttgggtatgttcagagcaccaggggccatgatattagcaagagaccattttttgggtcggggtaatggttctttttcaccatcaagcttcaggatgccrttcatgaagagcaaggggacttctttctaaagagacacragaatgaaaggacttctgcttccaacgtgagcaagagcaagtgccagctgctccgagctgtgcttaacaaagcaagaaagcagtgcaggggcctggcttgaagatcacactccaccacatgcatacaaagaagggagaaaaaaaaatcatggcgtggaaaaaaacagccagtttcaacccaaatcttgccatgcagtcctttatctgtgttaaagaaacaccagggctgtagccccacgggcctgctcacttgtgtcatggtgggggacaaccatctgctctgcagcagccaacacccac

SEQ ID NO: 9190 - DNA, 600 bp, Chicken  19866894204506_4
agcagtgcaggggcctggcttgaagatcacactccaccacatgcatacaaagaagggagaaaaaaaaatcatggcgtggaaaaaaacagccagtttcaacccaaatcttgccatgcagtcctttatctgtgttaaagaaacaccagggctgtagccccacgggcctgctcacttgtgtcatggtgggggacaaccatctgctctgcagcagccaacacccacctagctgtgccaggacccaacctcaccttcccaagtgctggtatttgcaagcaagccatgtagttttgcgatggcccrgtgggaacaaatgcttcagggacagaataagctgcctccagcgtgacactcaggaagttaccatctgaaagctgacttgaagaaaggaggggctttttggtgcacacagacacttcaagagcacactgcagggaaaaatgatttaaaaawacagctaataactagacagttctaattctctgctcttgtgggagaagcaagcagaaacctaaggctagaatgtataatgttatcttattcctcacttcagatgttaaagaaaacagaaaggaatttcacggtcaatctttcctatgtctg

SEQ ID NO: 9191 - DNA, 600 bp, Chicken  19866894204506_5
gtagccccacgggcctgctcacttgtgtcatggtgggggacaaccatctgctctgcagcagccaacacccacctagctgtgccaggacccaacctcaccttcccaagtgctggtatttgcaagcaagccatgtagttttgcgatggcccrgtgggaacaaatgcttcagggacagaataagctgcctccagcgtgacactcaggaagttaccatctgaaagctgacttgaagaaaggaggggctttttggtgcacacagacacttcaagagcacactgcagggaaaaatgatttaaaaawacagctaataactagacagttctaattctctgctcttgtgggagaagcaagcagaaacctaaggctagaatgtataatgttatcttattcctcacttcagatgttaaagaaaacagaaaggaatttcacggtcaatctttcctatgtctgaattgtgatatttgtgtgttcacatcagagcccacaggaggcacagcatatgtatagtcaggatctctgacagaggaaggaaaaagaacaccagggatagaaaacaatgctcgtgacacagagccagtgaaagctgaggccatacttcag

SEQ ID NO: 9192 - DNA, 600 bp, Chicken  19866894204509_1
taaaactgcatagctgttgggaaaggaataagagtgatgaggaaacagttctaaagctgattactcttcctccttttcctagtctctcaacagaaatatttggtagagaggaatatgttttctcattacttggaatggatgtcaaggcagtagattgagggaccctattaaatatgcagtcacaaaggctctaagcatgccagctcgagaaaatcagtatttgttctctgcttttccagctctggcacacttttacttactatgtatttaaatattgtctcaaactgcaatgtaaatttrtaatttttttattaaacagtcaaaacataatcatgctgaggaagtttattattacatacagtagatgtaaacaatgaccttatttactcaagttcctgagttagagggaaaaaamtactgttttcaaacaatcatttaattctttttcacataaataaatcacttttttcctttccttcggaatacagttttaatgaaaaacaggaagttgttctaagtctatattaacactttccatgtgcctttctataatttttcctttaaattgacctaggaataggygatgttgctctttcacat

SEQ ID NO: 9193 - DNA, 600 bp, Chicken  19866894204509_2
tgttttctcattacttggaatggatgtcaaggcagtagattgagggaccctattaaatatgcagtcacaaaggctctaagcatgccagctcgagaaaatcagtatttgttctctgcttttccagctctggcacacttttacttactatgtatttaaatattgtctcaaactgcaatgtaaatttrtaatttttttattaaacagtcaaaacataatcatgctgaggaagtttattattacatacagtagatgtaaacaatgaccttatttactcaagttcctgagttagagggaaaaaamtactgttttcaaacaatcatttaattctttttcacataaataaatcacttttttcctttccttcggaatacagttttaatgaaaaacaggaagttgttctaagtctatattaacactttccatgtgcctttctataatttttcctttaaattgacctaggaataggygatgttgctctttcacattatgaagataatttttaatagtatttcgcatgactgagtcccatggaagtaggtctgaaagaactttgaattaatagtctcttcatctacatgcattagcagtttgaaaatgcca

SEQ ID NO: 9194 - DNA, 600 bp, Chicken  19866894204509_3
aactgcaatgtaaatttrtaatttttttattaaacagtcaaaacataatcatgctgaggaagtttattattacatacagtagatgtaaacaatgaccttatttactcaagttcctgagttagagggaaaaaamtactgttttcaaacaatcatttaattctttttcacataaataaatcacttttttcctttccttcggaatacagttttaatgaaaaacaggaagttgttctaagtctatattaacactttccatgtgcctttctataatttttcctttaaattgacctaggaataggygatgttgctctttcacattatgaagataatttttaatagtatttcgcatgactgagtcccatggaagtaggtctgaaagaactttgaattaatagtctcttcatctacatgcattagcagtttgaaaatgccagtttttctgtagaaccagtattcttctggtaagcaaataatgtatctacattgagtacagaaaggaaaayacataaattcaattcagacactaaacacaaagtttcagtgtaggacattgcactgctgacagataaaacaattccagacagtcttcaaatttatgac

SEQ ID NO: 9195 - DNA, 600 bp, Chicken  19866894204509_4
cagttttaatgaaaaacaggaagttgttctaagtctatattaacactttccatgtgcctttctataatttttcctttaaattgacctaggaataggygatgttgctctttcacattatgaagataatttttaatagtatttcgcatgactgagtcccatggaagtaggtctgaaagaactttgaattaatagtctcttcatctacatgcattagcagtttgaaaatgccagtttttctgtagaaccagtattcttctggtaagcaaataatgtatctacattgagtacagaaaggaaaayacataaattcaattcagacactaaacacaaagtttcagtgtaggacattgcactgctgacagataaaacaattccagacagtcttcaaatttatgactcattttaaagataaaggtaacttacctcctctacagtgataagccattaacttcataactgaagcttctagtgggtgactatttcaagaatattaattatttttatgtgcttaaggcatctggaaaacagaggtacctagctctaatcttgaagtacagctcatgttaaatccattgttgaatatttttcacccatttggaa

SEQ ID NO: 9196 - DNA, 600 bp, Chicken  19866894204511_1
gaaggcctgattaaggtcaaaccacagccaacttgtaacaaaagaccaacagaatcaccataaccatcaggctgaatgaaatagaagcaagtgctgcaccacattctgcaaaacaacaaccacactgtcctaccaaggacagaggagcaggcagccagctctgtgctcccattaactgcaatccagcacagctcacacacgacagatggaccctgagctgtgataaattgccaccaccaccatcaacaaggcaggagttattttagtgacttgagctgtggcaattaatacagggggaayaaaactctcttgcaaaatttgggcagcgcagaatgggcgcttccttcctgcagcaggtttagctaaaaccccatcggatctcagcgggcacatacacatgctggaataactgaatggagggtgttggacctggtaaatctgtaggttgcaaatctgggaacgatcttaagcgagtactggtctatgcagagtaaaataaaggggattctacaacaaaggaattaaggactgcagggaggtagggaggaaaacagttgttccttaggcaggagtagtttaataggcactaaagtgcatcaa

SEQ ID NO: 9197 - DNA, 600 bp, Chicken  19866894204513_1
tggtgcctccataggagttgcagttttgctgttggcttcagtggagtcaaagtattgccctgtaaatcactgccgtgtaaatcactgccagcatgggtttttgttcccttcatttttttttcttcctgcacgtgagttattataacctaaactttgagctgttccttttttttcctgtttctagtaagacacttaccagctaattttatatatccctaatactgtctgtacaaaccttgctttctccaggcccaccagattcaggagatgttccctcaggttccttatcatgtagttctrcaggatctgcagctgacccgttctgtagagataaccactgacaacatcttggaagggcgcatccaagtgcctttccctacacaggtaagtcatgacactgcacctaaaacgtctgtcttacatatggactgagcttgtaggggtgagtggcatcggtaaaggcacagtgaactcagcttagctcagtgcactgttactcttcagattttacctgtatgaaggtgttgcagttggaagatgcagaccagttttgtctgtctggcatgttttgtatcttcacattgcgatgtctgatatgat

SEQ ID NO: 9198 - DNA, 600 bp, Chicken  19866894204515_1
gcctcagctgggcttgctctgatctgataataaacattaaaaattaactatttttttccactgttccacgcagttgcagtttccttgggtacagccttcagtcaggctgacttttgtctttgtaggagagcagggatttgaatcggtggtgaatgataattctttcatccacttctgtgtcattcttgtttgtttgtttatttgtaagtcatctccacttggacactgttatcctaagcattctttcatcagtgcagtacattctcttccacaaagcagtgcttgcatgtaagctaatasttggggcgaacagattatcttgttttgttagatgttttcctgtgaggatacagtccttccatgtgatgtcatggcatatttcacttgtggtggaaggcataattctcttatattttctgttcgcatgacctgaattcctccccaagattttgcagctttaaagaattttcaaggtaatgatttcccttctcctgctctggtttgcttctaaatctcttccataccaccttctgaaatgctgagcttctaccggagacttgaatttctggaaaagagagcggattgtaattgtttccctac

SEQ ID NO: 9199 - DNA, 600 bp, Chicken  19866894204515_2
gtggaaggcataattctcttatattttctgttcgcatgacctgaattcctccccaagattttgcagctttaaagaattttcaaggtaatgatttcccttctcctgctctggtttgcttctaaatctcttccataccaccttctgaaatgctgagcttctaccggagacttgaatttctggaaaagagagcggattgtaattgtttccctaccattcctcttttcagagttattgtattctaggtgttagttccacatcaaatttcactgcgcctccaccaagtcaaatgaaatgtgagcrataataaagatgtctacagcactgttgctgattccattatttcattggatcatcgtggttggatacgttaacttcctgcatatgggagggagaatatgtgctactaatgctgactgagccagcatgtctgaacagaggtgtcttcagcaggcagtgaattatctgtaggtgattatttttgagttccagatgaatatgatgctggagtatgcaataaggactgatcaaagcatattgtctttaattaaaatggagcaaccacaaaatgcctcatttaaaataaagagtaagaaattaaat

SEQ ID NO: 9200 - DNA, 497 bp, Chicken  19866894204517_1
gatatctgcatcttcatagaactctgcactgttccccttgacctttatttcagtaccagcaaagctgatttttctagggctccatgtgattttgttgctcgttgttcatacgtgctaggaaggtagtaatttgcttagagcttatctcaaggtctggcataggggcttcaagagcctctacaaccacagcagttttacccactaattatattgccgtgctatacctggatttgggatttctttctgggcccactacagcctgtggtttccagatcaggtccctcagctctcccagtgagyggaccagtgtgggcagtgtaaatatttggtactcgcaccacatggtttttgtcattattcatccagaacttaaaatttccaaaacgtgacacttttttttccccccttttctactttctgagaaagtgtagtagtgttaatcatatggggacttttcaaatttaaactgccaaatataaaaattaatgaggtgcgag

SEQ ID NO: 9201 - DNA, 600 bp, Chicken  19866894204518_1
cgctcaaacttttgttcaaacttataattagttggatgagtcctttattttgcagctactttcttagtaactttgtactgtttcagagctaatatcaacacaacaaaggaagtcttgcatccatctgagcaaaaatttaggtttcccagacctaaagattgctccaatcccagaaaatctgagatttaggcaagagaaaatgtgaaattcccttcataaaatttctgaggttgtttttcttagaggtgtgggtggaaggaggacagcagagtggagcaaagctttttgacctacaaagcygaagggattgaggcgttgctccaaaaagcgggctgctcccatgccaatcccaggcagcggagattttgtcaaacacagccctggctgcccttggagttccttacaacagagggaagcggggcttcacaaggccaggctgtgtccacgggaagcctggtgccctcccagcgccaggccgggcaggcggccaggcagaacmcagcttcaatctgcaggcccagagcggggcctggcccagcgcactgctagcagtggcagttctctgcatggctccatttccttcccctcgtgcccctgcat

SEQ ID NO: 9202 - DNA, 600 bp, Chicken  19866894204518_2
atgtgaaattcccttcataaaatttctgaggttgtttttcttagaggtgtgggtggaaggaggacagcagagtggagcaaagctttttgacctacaaagcygaagggattgaggcgttgctccaaaaagcgggctgctcccatgccaatcccaggcagcggagattttgtcaaacacagccctggctgcccttggagttccttacaacagagggaagcggggcttcacaaggccaggctgtgtccacgggaagcctggtgccctcccagcgccaggccgggcaggcggccaggcagaacmcagcttcaatctgcaggcccagagcggggcctggcccagcgcactgctagcagtggcagttctctgcatggctccatttccttcccctcgtgcccctgcatagccccaaataaaatagcaaatctggaagggaagcatttcgttggcagaaggcatgctctcagctgagctctgtttcatacatgtgcttgtatgctccatttcttgctcactaccttgcagatttatcaaaaaaattatcagaaccagaaggtcatctgactgcccttagaacagatgatgacatcctgctaaaagcca

SEQ ID NO: 9203 - DNA, 600 bp, Chicken  19866894204519_1
cagacaaggtagacaggataactgaggataatttgcttcactgtttaagtcaaaatgacttaaggacactcatgcaatactccagaacttgtctgcttttgtcacctaaacttcctttcctgttaggaagacagtggattcactatgaaaccttagggattgtataacatcaaaagccaagtcacatttaggaacaaccttaaacagcataggggatggaaggctgtgtattttatttatatacatacacacaaacacttttttttttttccttcctaaaataaaacaaatagctattawttcttgctacctcggtctttgagcttcacttactttgaacacgtcaaacctttcaccccagggactgagagcaaaactactacgggctcctgggactgagactagcctgaaaaagctaagtgtctagaaaagcccacagaatgttgaacagccagcagcactggaaggtataaatccaattcagctgaagaaaaaaagaaaaaaaaaaagggtaaacagccctagctggaatgaacccagattctacccaccagaaatgcatgagtaataccmaacaacctcaaatacatatatttttta
